United States Patent Application Publication US 2007/0067865 A1 - sequence listing, part 44

SEQ ID NO: 269593 - DNA, 465 bp, Zea mays
gcacccgcaattcgcaaacccgcacaacctccccaccccccaaacccatccctcccgcgagatctctcaccggagtcaccgccccccagatccgcctcccctcgccggcgcgctcgcgtgttttccgctcgtccgccgccatgtcgcacaaccacggcgacacgatcccgctccacccctcgtcggcgcagtccgacatggacgagatcgagagcctcatccacgccgcgccatctccggccaccgtgctccccgcgcggccaccgtctccgacgcgggcctccattcccgtatcctcctctccggcgttggcgccggcgcccgtccccacgaagccgcctctccccgccgcctccattccgatctccgtctctgtctcccccgttctaacgtccgtctccgttcccatcggcgctgacgggtttggacctccacccaacacgctcacagagccggtatgggaca

SEQ ID NO: 269594 - DNA, 1513 bp, Zea mays
ctctcttcctcttctcccggcgcacagcttctctcttctctcggcggcgccaccacggcgatcaagcgcgatacgggcgtaaccgaagaatcgacaatgggcgtgcgagaaggaaacctttgatacgtccgacctcaacgcctcgtcaatgcccttaaggataagctgcagagcctggcgggccagcacgccgatgtgttagagacgctgtcgcccaatgttaggaagcgggttgagtttttgagagagatccagagtcaacacgatgaaattgaggccaagttttttgaagaacgagctgcccttgaggcaaagtaccagaagctttatgaacctttatacacaaagaggtatggaattgtaaatggagaagtggaggtagatggtgtttgtgatgaaccggccagtgagaatactgttgagggaaaagaaccagacgctaaaggagttccagacttttggcttactgccatgaaaacaaacgaggttttgtctgaggagatacaagagcgcgatgaagccgctttgaaatatctaaaagatatcaagtggtctagaatcgaggatcctaagggtttcaagctggattttttctttgatacaaacccattcttcaagaattctgtcctgacaaaaacgtaccacatggttgatgaagatgacccaattttggagaaagctattggaactgaaatcgagtggtatcctgggaaaaacctaacacagaagattctaaaaaagaaacctaaaaaaggttcaaagaatacgaagcctatcactaaaaccgaggactgtgagagtttcttcaactttttcaatcccccgcaggtccctgaagatgatgatgacatcgatgaagacactgctgatgagctgcagagtcaaatggagcatgattatgacattgggaccaccataagggataagattatccctcatgcagtttcctggtttactggtgaggctgtgcaaggtgaggattttggtgagttgggcgatgatgatgaagatgatgatgatgaagacgatgacgaagatgatgaggatgaagaagaggatgatgatgaggaagaggatgatgaggaagaaagcaagccagcaaggaagtcaggatctggtcgcagacataaggcgccacagaaggtgtcgcagggaaatgcggaacaaccagcggagtgcaagcagcagtagaatggcctgttgatgttggttgatgcagtattttccattgagctgcctagaggttatgtgtgcgcaggccagatgttggtgttgatatctcaagtgtggtttttattagtaggcggtgagggtgttgtctggagcactttggtgctgcgttggtggatggatattggtttgcaacttgtctgctagtgtcttggggattcagctacgtgcaatcggatgatattatatggttgtaattatctttgcactcggcctataacggctctttatttgcaaaaaaaatccggtaaacagccggtaagaggccccgcataagagagag

SEQ ID NO: 269595 - DNA, 653 bp, Zea mays
aatcactcttcctctactcccgccgcccagctgctctcttctctcggcggcgccaccacggcgatcaagcgcgatacgggcgtaaccgaagaatcgacaatgggcggcgagaaggaaacctttgatacgtccgacctcaacgccttccttcccgcggccgctgcagccctcagcgccgaggaccgcgccggcctcgtcaatgcccttaaggataagctgcagagcctggcgggccagcacgccgatgtgttagagacgctgtcgcccaatgttaggaagcgggttgagtttttgagagagatccagagtcaacacgatgaaattgaggccaagttttttgaagaacgagctgcccttgaggcaaagtaccagaagctttatgaacctttatacacaaagaggtatggaattgtaaatggagaagtggaggtagatggtgttttggtgatgaaccggccagtgagaattctgttgagggaaaagaaccagacgctaatggagttccagacttttggcttactgccatgaaaacaaacgaggttttgtctgaggagatacaagagcgcgatgaagcccgtttgaaatatctaaaagatatcaagtggtctagaaacgaggatcctaaggtttcaagctggattttttctttgata

SEQ ID NO: 269596 - DNA, 804 bp, Zea mays
cccacgcgcccgggggcgagtgtgcaaagccaaaaccccaatcgcacaggagagaccgagagagaggttttccatccatggctcccggcgtcgcttccgtgctggtcccgcaggagcccgtcctcctcaaggacatcctcgcctcaccgtccccctgcgggaacaccgctgtctccgcccgccacctcttcggcaacggagtcgcgccgccacgctcctcggacgacggcatcaaggacgccgctgccgaccgccacggtgaccgcgacctctccatccccaagatcttcaccggagacgtgctggacctgctcgacgatgctgcgaggctggacctgatgctggcgctgacgggggacggcggtgcggcgtccatggccggcttctccgcgcgcgggtggtgggtctcgaaggaggatggcgacgcggtgcagctgaaggtgccgatgccggggctggggaaggagcacgtgaagatgcgggtggagaaggacgccctggtgatcaagggggaggccggcaaggacctcgagggcgacgacgacaagggcccggcgcggtacagctaccgcatcggcctctcctcccaggctttcaagatggaccagatcaaggctgacatgaagaacggcgtgctcagggtcaccgtcccgaagatcaaggacgaggagcgcaaggacgtcttcgagatcaagatcgagtatggggtgtgcatcggatggggcctactaggtgtcctatttgcaatccatatatgtccatatccgtaatgcagtgcatattcatatcggaaatgccatgagc

SEQ ID NO: 269597 - DNA, 1002 bp, Zea mays
ctcggaatcggtcgagcactgctggaagccaccctggctatgccagtcaaccgcctactagtgctgcagcaagctatccagttcgggggtcagctccatctgggagagtggtgctccaccaccccagcctggctatggcacccaacctccacagcaaggtggatatggtccgggcgcttatgggcagccttctccacagggccagaaacctcctgcatcgtcaccttatggacaggctccgcctcctggttctgctcaggctggttacgggcagtatggttacagccaacctgcttacggtgcaccaccagcttaccctggtgcacccattgcaagccaccagggctatggccagcagcagtcttatggccagcagcagtcttatggcgatgcttatggtagtgcaagctatgggcagcctccagcctactctactgaagcaacacctcctgctgcatcccaggatcactctgctgcccctgctgcggcccttggaacaacagcttcgacagctcctgaaaacagtgggggcgcccaaacatccgctgaaacttgagcttcagcagctaattgggaacaaacattttccaagaccctgccgtgtggtttcctccgcgctgttgcttaatataattacgcatctaatttagggtctacaactacaagttatttttttttctgcctgttgtttttgacaccatgacttgctgtttccttgctatattgagtagtaccttgcagttattttattgctggcatatatgtctggactagtgatatatgtgtttgtgtggttacccttgttggaccgtaatggtctggacagataaatgcccatctatatgtattctgagccctgttatgtttgctctacccgcggaggtttctatgcccacttcagctggtgatggttatgtatgaaatttggtttcaatattgcgtaagacttatgtatcggaccataaaaggtttaagcagcatgaaagtctgcctttttgtttt

SEQ ID NO: 269598 - DNA, 1492 bp, Zea mays
  unsure (1)..(1492): unsure at all n locations
gngtaattgtatgtctgctatttgtgctgctattttttttctattatgtgcactatgtctctttgtcatatacatatacagatgtgcaaactatatttttgcagaatcgtgctaggaatccaatgtctggtggctattctcagcagggatatcgccctcctcgtcctcagtcaaactggggcccgccttctgtgccaccccagcagcctggctatggttatatgcagcctggggcttatcctggggcaccgccacagtatggtgcacctcagcaaccttatggtagctaccccccaacatctggtggttatcagactggatgggatcagtctcaaaaccagcaatctcatacaactccccctggtactgggtatgattattatagtcagcagcagcaacctcagcaacaatctgcccctgggacagctgcttctactgatgccactagctacaattatggtcagccttcgacgtatgcttcacagggatatgattctacctacactcagcagagtggtgggcagcaagcatatggacatgatggctactctggttaccagacccaaggccagcagcagggctactctcagcagactggttatgaccagcagggatatggtgcatctgcttatggatcagctgcgaactcgacccaggatgggtccagctatggtggtcctggtggggccacccaggcatctccagggcagcaaacatcaaacccagctgctggaagccaacctggctataccagccaaccgcccactagtgctgcagcaacttacccacctcaaggttcagctccatctggatatggcgctccaccatcccagtctggctatggcacccaaccaccacagcaaggcggatatggtcagggcgcttatgggcagccttctccacagggccagaaacctcctccattgtcaccttatggacaggctctgcctcctggttctgctcaggctggttacgggcagtatggttacagccaacctgcttacggtgcaccaccagcttaccctggtgcacccattgcaagccaccagggctatggccagcagcagtcttatggcgatgcttatggtagtgcaagctatgggcagcctccagcctactctactgaagcaacacctcctgctgcatcccaggatcactctgccgcacctgccgcggcccctggaacaacagctgcgccagctcctgacaacaatgggggtgcccaaacttctgcggaaacttgatcttcaacagctaattgggaacaaactttttacaagcccctgccgtgtcgtttcctccgcgctgttgcttaatattacacatctagtttaggctccacatctacaggttatatctttctgcctgttgttttgaccccatgaatcgctctttccttgctatattgagtagtaccttgcagttattttattgctggcaaaaaaaaaaattaaaaaaaaaaaaaaaaaaaaaaaaaaaaggggggcccccc

SEQ ID NO: 269599 - DNA, 703 bp, Zea mays
gttgatcccaagaattattgttttatattctctaaactgtgcatagatcataaaagaagccagtaaatagtgcaactaaagaagggttgtactggaaaaaataggtaaacgaggctaaaatttgggatccaaatacagtccatcttgtacataacttttatttggaatttggaatattcctgaatatcatatatgccaaactgttttgcaaccgaaggattcagaaaaccctgcatgaagctattttattatgtgttatctgtctctattatatgtgcctggtggatctgcaggttgctgtccaatgttgtttttgtgcttaaatagtatcatttgaatgttgtctttgatgcttcattctgtttaatatttttcaacctcagtaaagtaacctagctgatttttatatatcctgtcatttagcaatgaattgaatattttagatggtagtgaaagcacctttctatatcacatacatctctagacatctattggaactctattccacggcattgctattcaacatatgtatatgtatatgttcgtctagtccaatcttcattagccccatagttctgcacatgggcaacgctagatgggcatcactagcctgacgattctgatcgaatcgtgccaggaatccaatgtctggtggctattctcagcagggctatcacccttctcgtcctcagtcaaactgggg

SEQ ID NO: 269600 - DNA, 1487 bp, Zea mays
ttttcttccacgcgtccgcctgcagccgccgcccaaaccctagcaacccgtcctccgccatggccgacgaccactactcctctaagaggaagtacgacgacccctcgccgccgccgcggcgcacggggttctcttcgggcccgccgcctgcctcgccgctcgcgggcggcgccccgtcgtacaacagcgtgccaccgccccccgatgagatccagctcgcgaagcagcgcgcgcaggagatcgcggcgcggatctttaacgccgcagaggccaagcgtcctcgcgtcgacaacggcgacgatgacagcggcggcttcggtgtaggcctgggcagcactggtggcggtggccgcatcggcggcggaggactcggcttctcgtcctctgccggtggtgggcacggggcttctatcccacaattatcttctcagagcagcgcacctcagtactcctcttatggtggatatcagggtacaagcaaaaagattgaaattccaaatggaagggtaagtttttgtaaagtttattttccgtctctgaatgtatagtcgtataagaaagtgtatctggaagtgtgatatttatatccccttcaacttgcactattgtcgacttgcggtaggttggtgttattattggaaaagctggggaaactattaggtatatccaacttcaatcaggagcaaagattcaagttacgagagaccatgaagctgaacctggtgcactgacaaggcaagttgagctttctggcaatcctgagcagataagcaaagctgaacagttgatcaaagaagttatagcagaggctgatgctgggtcatccggtgctgtatctggtggccggaaatacaatgcaccacagccaggcgctgagacattccagatgaaaattgctaataataaggtgggactgattattgggaagggtggggagactataaagtccatgcaggccaattctggagctcgtattcaggttattcctttgcatctgcctgctggtgatacttcaactgaaagaactgtgcatattgatggcactcaagaacaaattgaacatgcaaagcagctggtcgctgaggttaccagtgagaatcgtgccaggaatccaatgtctggtggctattctcagcagggctatcgccctcctcgtcctcagtcaaactggggcccgccttctgcgccaccccagcagcctggctatggttatatgcagcctggggcttatcctggggcaccgccacagtatggtgcacctcagcaaccttatggtagctaccccccaacatctggtggttatcagactggatgggatcagtctcaaaaccagcaatctcatacaactccccctggtactgggtatgattattatagtcagcagcagcaacctcagcaacaatctgcccctgggacagctgcttctactgatgccactagctacaattatggtcagccttcgacgtatgcttcacagggatatgatt

SEQ ID NO: 269601 - DNA, 592 bp, Zea mays
acccaaaaactgccgccaagagccattgtttcggttccaactaccatagcagactcatcgaagttattgactcatgtgaattgccaacaatttttggcggatcatgcacatgcagtgagaagggtggttgcctcaggtctaacaggggtccagggaatgaccctgtcattatgaagctaatacacagtatggaaggtggtagtactagagaaataaagcaagtttctgacggggacgaaagaagtggctcttccctaagggcagaaaacctgaagggcatgcttagtgacatatcaaatgctgaatctgagtcggatgttgatgacgttggtttaacagttgtccaaaagagtacggaccacagtttactaaccccagttcatgaagaagtcaaggggtcagatacttcgatattttgtagttctagcagtaagcatctcctagatacaactcctggatctcctcaggccacccctcaaatggagatgcccattcagttgacttgccgtaaatattttcctacctttgggtggctaaataatttagggaatgcttacattagtttgcatggtacatccgctggaaagactct

SEQ ID NO: 269602 - DNA, 847 bp, Zea mays
tttctaccacgcgtccgcccacgcgtccgcggacgagggggaaggaaaatggcgcacctggtggagacgtacgcgtgctcgccggccacggaacgcggccgtggaatcctcctggccggggaccccaagacggacacgatcgcctactgcaccggccgcagcgtcatcattcgccgcctcgatgcgcccctcgacgcttgggcctaccccgaccacgcctaccccaccaccgtcgcccgcttctcccccaacggcgagtgggtcgcctccgccgacgcctccggctgcgtccgcgtctggggccgctacggtgaccgcgctctcaaggccgagtttcggcccctctcgggacgcgtcgacgacctccgctggtcccccgacggcctacgcatcgtcgtctccggggacggcaagggcaagtccttcgtccgcgcattcgtatgggactctggcagcacagttggtgagtttgatgggcactcaaagagggttctgagctgtgacttcaagccaacacgtccatttcgcattgtgacatgcggtgaagattttctggctaacttttatgaaggaccgccattcaaattcaagcattccataagggatcactcgaattttgttaactgtatccggtatgctcctgatggtagtaagtttatcactgtgagttctgataagaagggtttgatatatgatggtaaaactggagaaaaaataggagagctttccactgaaggcggtcacacagggagcatatatgctgttagctggaatcctgacagtaaacaggttctaacagtttctgctgataaatctgcgaaagtatgggatatctttgaagatgcaa

SEQ ID NO: 269603 - DNA, 575 bp, Zea mays
tcgctcgtggcacccaccccaaaccctcgcgccgcctccgagacagccgccgcaaccatggccaccaccgccgccgcgtctaccgcgctcactggcgccactaccgctgcgcccaaggcgaggcgccgggcgcacctcctggccacccgccgcgccctcgccgcgcccatcaggtgctcagcggcgtcacccgccatgccgatggctcccccggccaccccgctccggccgtggggccccaccgagccccgcaagggtgctgacatcctcgtcgagtccctcgagcgctgcggcgtccgcgacgtcttcgcctaccccggcggcgcgtccatggagatccaccaggcactcacccgctcccccgtcatcgccaaccacctctttcgccacgagcaaggggaggcctttgccgcctccggctacgcgcgctcctcgggccgcgtcggcgtctgcatcgccacctccggccccggcgccaccaacctagtctccgcgctcgccgacgcgctgctcgattccgtccccatggtcgccatcacgggacaggtgccgcgacgcatgattggcaccgacgc

SEQ ID NO: 269604 - DNA, 296 bp, Zea mays
tttcccaacccttcctgccatgtaaccttgtgggagaggaaagcagcaggtgacgaaggtagtagacagaggaaaactatgccaaagaaaatgagagaacaaccttcttagcttctcctccagtctctctccaccaccgctctatctcctcggtaggaagaagagcaagcaagagaggagcaagctagctagcggtacaagggagagtgagcggcgaatgggacggacgaattgaagaacactgccagtccgatcgagcgggtggtgccgccaggataaatcgggaggtatatgat

SEQ ID NO: 269605 - DNA, 729 bp, Zea mays
ttaaatccatccacgcgttcgcttcctggctggcttttcttctctcgtccaccctaggtctcagtctctgctcgcgctcttgtggagctactaggtgaccgtcgcgaccgccctacgccacgtgctcgatccagcctcgtcggcttcttcgcacccgtcaccggcggtcagcacccaccaggttcataaatggcagagacggtgttcaccccctctttggaaggtatgaagcatgtgaaggcagagaacggagtcattctcaccaagcccttccttgatgtctgcaagcaaatcttgcctgtcctggataaatttggagctgctatggcaattgtaaagaatgatatcagcggcaatatcacaaggctggaaaacaagtattcttcagatccatcaaagtatggacacttgtacagcatggttcaggaagaagttcaaaacaagaccgcgaaaggttcctcaagctgcacaaatgggcttctgtggctgacgagggccatggacttccttgttgagttgtttcgtaacctgcttgagcatccagactggaccatgagtcaatcttgcactgattcatacaccaagactttgaagaaatttcatggctggcttgccagttctagttttacggtagaatctttcactcaattatgaattaatggtccatgtgggaattctatccacacagacaatctgtttattcaactttctttctcgagaaaatataac

SEQ ID NO: 269606 - DNA, 542 bp, Zea mays
ggtcaatgctcctcttttaaggtcattgcatacttttggttggagtatatcccttttattggtgcttccatttgttcatttgcttatatgaattgctggcaggttttacggtggcaatgaagcttgctcctaatagagagaaatttatggaggtcattagtggaaccggtgacatcaatgcagatattgagaaattttgcacgaccttctctcctttcctcaaagaaaaccacaactttctggcgagcgtcggtcttgatgatctgaaggcttcatagatcaatctccatgctgattacaacaaaataagcatgtcttacgaaactcaaagtgttgccgagggtatacctgtttcccgtagccatctcccccttgaaaaactttaggaggtgataataatttttccgcatgattaaccatggctacttacacagcgacttgacagtactctacaaatttactttccaaagttagtccctttttttccagataatctacatatgatatgaaattctagtgcaattaataaataaattcctgct

SEQ ID NO: 269607 - DNA, 1098 bp, Zea mays
atggatcggggcacagagattccgtgtgatcggggcacagagattccgtcgtaaaaaaatcggtatggcgttggtattcgttctctcgccactagccgctagtgaaagaacgggatatatattcgtgtcctccgaattagtccttcctgcagtgtcctcgccgacagggaaagccgtgttgcaagaaggggaattccgctgcgagatccgtgaacggttcagagatggcacagacggtgttcaccccctctttggaagcgatgaagcatgtcaaggcagagaacggagtcattctcaccaagcccttccttgatgtctgcaagcaaatattgcctgtcctcgataaatttggaggtgctatggcaattgtaaagagtgatatcggcggcaatatcacaagactggaaaacaagtatacttcagaaccatcaaagtatgaacacttgtacagcatggttcacgaagaagttcaaaacaagaccgcgaaaggttcctcaagctgcacaaatggtcttctgtggctcacgagggccatggacttccttgttgagttgtttcgtaacctgcttgagcatccagactggaccatgagtcaatcttgcactgattcatacaccaagactttgaagaaatttcatggctggcttgccagttctagttttacggtggcaatgaagcttgctcctaatagagagaaatttatggaggtcattagtggaactggtgacatcaatgcagatattgagaaattttgcacgaccttctctcctttcctcaaagaaaaccacaactttctggcgagcgtcggtcttgatgatctgaaggcttcatagatcaatctccatgctgattacaacaaaataagcatgtcttacgaaactcaaagtgttgccgagggtatacctgtttcccgtagccatctcccccttgaaaaactttacgagatggtaataatttgtcatcatgattgaccatggctacttacgcagagaattgacaccactctacaaatttactttccaaaaaaaaaaaaaaaaaaaaaaaaaaaaaaaaaaaaaaaaaaaaaaaaagggcggccgctcgcgatctagaacttag

SEQ ID NO: 269608 - DNA, 241 bp, Zea mays
gggtatacctgtttcccgtagccatctcccccttgaaaaactttaggaaatggtaataatttgtcagcatgattgaccatggctacttacgcaaaaaattgacccccctcaccaaatttagttaccgaactctcgatcctgtgttacagcaaatcctatggttatgtggaactctggtgcggtaattctcttgtatgctacccagtatgccccaggaaatcataattcggtgttcccttgc

SEQ ID NO: 269609 - DNA, 928 bp, Zea mays
aaatatagttccatggagagccttctattggggccctaaggagcaagagaggttaattatttctgattatgtcagtggtgatagcttggcactctacctctacgagtcgactccaagaagatactcccgcctgtcggtttcgcagcgtctcaggatcgccatcgacctagctcgctgcctccagttcctacaccacgagaagggcctgcctcacggcaacctgaagccgactaacatattcctgactggtcctgatctcactccaaagctggtggattacggcctgcacaggttcatgactccaagtggcgccgccgagcagatactgaacctaggagcgctagggtaccgagccccggagctggcgaacgcggggaaggcggcacccacgttcaaggcggacgtgtacgcgttcggggtggtggtcatggagatgctgacgcggaggagcgcgggagacatcatctcggggcagtccggcgcggtcgacctgaccgactgggtccagatgtgcagcagggaagggcggggagccgactgcttcgaccgcgacatcgccggcctggaagagcgccccggggtgatggaggagctgctggcggtctcgctcaggtgtatcctccctgtaaatgagaggcctaacatgaagacagtctgcgatgacctgtgctccatcataacagcgtgagtttagtttccccttccttgccttgccttgcatggccccagtgtacatgtaaccgatcggttttcccgtccgttggttgggccctattttttctttctttcccccggtgggttttccggagcccgtgtagccagggtgggttcgtttgattgggaactgctagtgtaaagaggattcgattcgatccccccccattgattgattgatatcccaaccattgccgtcttgtttagttggccc

SEQ ID NO: 269610 - DNA, 767 bp, Zea mays
gctggcagcggcggcgcaccttatggcgacttgagggctctgtgcgacgtcctcgggacgggcagaccgtaattgaaatgaaaaggatcggtagatctagctaattcgataacaaggcaaggtgcgctcctatggaagtggaagaagtaggaggcgaagtggagatcgccggcaaggacgaggcggatgcggagtaccattcgcgcgatttcgaatgggaggacctcaaggaagaggtggaatctggacctgtcttctcctaccacctctccccctttctcgaccccgccgccagtaccacctcgccgccgcagccctcgtcggaggcctggagaagctttcaccgtcgccatgcgtccggaaaattctttaaggaaaggagatatttgcttaaggaatttcctgaactttgtagcagcaaagatcatgccaaggttttagaagtggggtgtgggaatggaagcactgctgtttccattctacggtcgggtgaaaggatcactgtctttgcttgtgactgtagtaaagacactcttgagaaggcatatgaaattatatccaatacaaaagggattaatatcaaggataggttccacccctttttaatggatgtttctaaagaaactttcccagattggttattttgcaaagcctgtcaaacttcgctgggaaaagctgctgcatctttacttgatccaagtcaccatggaattagagaagagcacccagtcttccttggagagaaccaatgttgtgctggtggcatg

SEQ ID NO: 269611 - DNA, 958 bp, Zea mays
cgcgatccatcctccgctccctcccttactcgcgccctcgcctccggtccccacgcgtccggccggctactgtgcgctgagctgattgtcccattcaataaagaaagcgaagggcatagataccagaagcaacactgagcccatcttgcttggaattctatctgctgttggaacaacttacaccaatatcatggcaaaccttgctgattcttttctagcggatcttgatgaactgtcagacaatgaaggctatcctgaagaagacaatgctgaggcagcgggtagggatgacgacgaagatgatgatatgcctgaccttgagtctcttaattatgatgaccttgatagtgtctcaaagttgcaaaagacacaacgctataatgatataatgcaaaaagttgaaaatgcacttcagaaaggtactgatttctctaatcaaggttccatcctggaggaggatccagagtaccagcttattgttgactgcaatgctttatcagtagatattgagaatgaaataatcataatccataatttcatacgggacaagtataggttgaagtttcctgaactggagtcccttgttcatcacccaatcgattatgcccgtgttgtcaagaagattggaaacgagatggatttaacactagtagatctggaaggacttttaccttctgcaattataatggttgtctcagtgacagcatcaacaacaagtgggaagcctttttctgaagacaatttggaaaaaaccactgaagcatgtgacagagcccttacccttgatgcgtcaaagatgaacgtgctctgttctgatgtgctgcatatggttttcatttctcccttatctttctttctttatcatctttttttttttcttttttttatcctttcctttttgttttttctctatcctttcacctctccttttatctctttttttttctctttttccttc

SEQ ID NO: 269612 - DNA, 600 bp, Zea mays
tcctttcgtccgcccacgcgtccggaagattggaaacgagatggatttaacactagtagatctggaaggacttttaccttctgcaattataatggttgtctcagtgacagcatcaacaacaagtgggaagcctctttctgaagacaatttggaaaaaaccactgaagcatgtgacagagcccttacccttgatgcgtcaaagaagaaagtgcttgattttgtagagagcagaatggggtacattgcaccaaacctttctgcaattgttggcagtgctgttgcttccaaactgatgggtactgcaggtggtctgggagcacttgcaaaaatgcctgcttgtaatggtcagttactcggtgccaagaggaaaaatcttgctggattttctactgccacttctcagtttcgtgttggctatcttgaacaaactgaagtatttcagagcacccctccacctttaaggactcgtgcctgcagacttattgctgcaaaatcaactctggcagcaaggattgattcaattagaggtgatccaactggaaaagctggacggaacttgttagaagaaattcgtaagaagattgagaagtggcaagaacc

SEQ ID NO: 269613 - DNA, 413 bp, Zea mays
ggcgatccatcctccgctccctcccttactcgcgctcggcacgcaggcgacgccggcggtggtcaggctcgggctctaagcgacggcgtcagtgtcttcccctcccacctctcggcagtcgcctcgcgccctcgcctccggtcctccacgcaccagccggctactctgcgctgagctgattgtcccattcaataaagaaagcgaagggcatagataccagaagcaacactgagcccatcttgcttggaattctatctgctgttggaacaacttacaccaatatcatggcaaaccttgctgattcttttctagcggatcttgatgaactgtcagacaatgaaggctatcctgaagaagacaatgctgaggcagcgggttgggatgaccaccaagatgatgatctgcctgacctt

SEQ ID NO: 269614 - DNA, 1696 bp, Zea mays
tcactcactccgcaattccgcatcacgcaccccaccccaccgcccgcaaccgcaagctcagattccctcccaccccaccccaccgtcccgctcactccagcccagcccgcgtccccacagcccagcgacagcgagcaccggcggcatccagccatgtgcggcggcgccatcctgtcggacatcatcccgccgccgccgccgcggcgggtcacggcgggccacctctggcccgagagcaagaagccgaggagggctgcagccggcaggaggagagcccccgtggagcaggagcaggaggaggatttcgaggccgacttcgaggagttcgaggtggagtccggcgagtcggagctcgagtccgaggacgagcccaagcccaagcccttcgccgcccccagcagcgcgctcgccagaggtggactaaacactggtgcagctggtgtcgatggccctgctgcaaattcagttaaaaggaagaggaagaaccagttcaggggtatccgccggcgcccgtggggcaaatgggctgctgagatcagagatcctcgcaagggcgtgcgcgtctggctcggtacattcaactctcccgaagaagctgccagagcttacgacgccgaggcacgcaggatccgcggcaagaaggctaaagtcaacttcccggatgaggttcctacggcggtttctcagaagcgccgtgctgctgggcctgcctctctgaaagcgcctaagatggacgttgaggaggagaagccgatcatcaagctcgcagtgaacaatatgaccaactcaaacgcatatcactaccctgccgtcgtcggccacaacatcatacccgagccattcatgcagactcagaacatgccattcgctcctctggtgaattatgctgccctagtgaacctgtcttcagaccaaggcagcaactcgttcggttgctcggacttcagcctcgagaacgactccaggacccctgacataacttcggtgcctgcgcccgttgccaccttggccgccgttggcgagtctgtgttcgtccagaacaccgccggccatgctgtggcgtctcctgcgacggggaacactggtgttgatctcgccgagttggagccgtatatgaatttcctgatggacggtggttcagacgactcgatcagcactctcttgagctgtgatggatcccaggacgtggtcagcaacatggacctttggagcttcgacgacatgcccatgtctgctggtttctactgaggctgaggcccagcgactggtgcttgtgtacatagggggggacaaagggtaagagcctgcagtaacagagattggctctttctggtacttgcaatttctatcccttcaactctttcttccgcccccgtgtttcaggaataatgttctggagatgaagaaacgcttgcgtgggcgtgcctgcaggcacgcgtgtagtagctgcggtattagtatatatgcttagatgttcagtcactttctttaagtacaatttggcgctggacgtgtaccttattttactatgtatccgtgacaacagctatgtgtctgctccttttattttcttgtctttgcttcaaaaaaatggctctgaacattgcgagtttgtactttgtagacaatatatatatgtgtgtgtatgtgcttggtttgcttaatccttcgataaaaaaaaaaagggctggctgtt

SEQ ID NO: 269615 - DNA, 406 bp, Zea mays
ccgcaattccgcatcacgcagaggcagagcgaccaacccagaaccccaccccaccgcccgcggccgcaagctcagattcccgtccccaccccaccccaccccaccgtcccgctcactccagcccagcccgcagtcccctcagcccagcgacagcgggcaccggcggcatccacccatgtgcggcggcgccatcctgtcggacatcatcccgccgccgccaccgcggcgggtcacggctggccacctctggcccgagagcaagaagccgaggagggctgcatccggcaggaggggagcccccgtggagcagcatgagcacgaggaggatttcgaggccctcttcgatgagttcgacgtggagtccgacgacgagcccaagcccttcgccgcccccaggagcgcgctc

SEQ ID NO: 269616 - DNA, 522 bp, Zea mays
agctggtagcgcctgcacggtacccgaatcgcagtttcggcccaggcctacgtatcctagtgcggcggcgccatcctgtcggacatcatcccgtcgccgccaccgaggtgggtcacggctggccacctctggcccgagagcaagaagccgaggagggctgcatccggcaggaggggagccccagtggagcagcatgagcaggaggaggatttcgaggccgacttcgaggagttcgaggtggcggcccccggcgcggggctcgagtccgaggacgagcccaagcccttcgccgcccccaggaactcgctcgccagaggtggactaagcactggtgactgctggtgtagctggccctgctgcaaattcagttaaaaggaagaggaagaaccagttcaggggtatccgccggcgcccgtggggcaaatgggctgctgagatcagagatcctcgcaagggcgtgcgcgtctggctcggtactttcaactcccccgaagaagctgccagagcttacgacgccgaggc

SEQ ID NO: 269617 - DNA, 1150 bp, Zea mays
tcggcggccgtctccgtcccgccttctgcgcctcctgtggcgtttggagcatcttccaattttaagctgacactacttgaacttaatgcggctctacgcacctgcgctctgtctgctgcgatcaagcacacatccccaccctaatcagttccgtgcaggattcacgcagagcatggcctcctggaagtgctcgcactcgccgtcaagcccgtaccttgcgaagtcgggtttagtcgattcttctcttaacaggaatgtaaagtcttctcagccacaaagtataaaatactttgtcagcttaatgggccagcagttccgttgcggattgtcaaccagggagggtagcctaagtgtaaagcttgacattccttcacacgaaaaatcaaggataggctggaactggaaaaacatgcatcaaaagataggaggtgtagctggtggactctgctttggtttctcggttactggagtagcaagtgccgaggttcctatcattagagtcaaagacaatgccgagacttcgtcatcatctaccagttcaactcatggaaaggaagtgtacacagattattctgtcacaggtattcctggagatggaaggtgtttattccgctccgtggtgcatggtgcatgcattagatcagggagaccaatacctaacgaagatcttcagagaaaactagctgatgaattgagagcaacggtcgcagatgaatttgtcaagaggcggaaagagaccgaatggttcgttgagggggattttgatacatatgtatcccatattagggagccacatgtgtggggaggcgagccagaattgttcatggcgtcccatgttcttcagatgccaataacggtttacatgcgcgacgaggatgctggcggtctgatagcaatcgcagagtatggccagcagtatggtaaagaagacccaatccaagtcctgtatcatggttttggccattacgacgctctacagatcccagcaaaggttggatcgaagaggaaactgtagacgctgcgcgccgcgagcttgaggtgcattcggtgggcaaccatctaaccttctactactacagagaaaattcggaaacaataagctgcatgcatgcatgcattgagatgtgtacctgtacaaatgtcaatccag

SEQ ID NO: 269618 - DNA, 385 bp, Zea mays
  unsure (1)..(385): unsure at all n locations
atgtgtggggaggcgagccagaattgttcatggcgtcccatgttcttcagatgccaataacggtttacatgcgcgacgaggatgctggcggtctgatagcaatcgcagagtatggccagcagtatggtaaagaagacccaatccaagtcctgtatcatggttttggccattacgacgctctacagatcccagcaaaggttggatcgaagaggaaactgtagacgctgcgcgccgcgagcttgaggtacgctccttgttccagtgtttatacaaccttgtcgaacactcatgctatatgcatgcgagtgtggaagaagacaagcttaacatgaaatggcgttagctcgcgccatgcataaatgttattaaaaaaaaaaaaaanaaa

SEQ ID NO: 269619 - DNA, 421 bp, Zea mays
gaactacgcgtacaacatgcgcaacaccatcaaggacgacaagatcgcctccaagctaggtgcggatgacaagaagcgcatcgagaacgccgtggacggtgccatcatctggctggacagcaaccagctcgcggaggtggacgagttcgaggacaagatgaaggagctggagggcatctgcaaccccatcatcgccaagatgtaccagggcgctggcgcggacatgggtgctgctgccggcatggacgaggacgcaccggccgccggcggcagcgccgctggccccaagatcgaggaggtcgactaagtgcttccacctgtggtcgtgttatcgtggtagaagttgaattgcttctgtttctgtgggaacagtaaactctgaggttgcggttgatctgatgatactttcctaattggttcc

SEQ ID NO: 269620 - DNA, 2052 bp, Zea mays
attctcagtagcagcggcatctccatccagaccccggtcggctagccccaacgccgccgccgccgccgccgcccgccgctcggggatcgcctgctttcctcctgccgaccacatctacaccgcatcaacggtccttccaagtgagctccaatcccctgtctgtagatggagagggtgctcaaggatgacgccgtcgaggagaagggcgagcgcgccaggatggcatcgtttgttggggccatggcaatctcggatttggtgaagaccacattgggcccaaaaggaatggacaagatcctgcaatcaactggcagaggacgtaatgttactgttacaaatgatggggctaccattttgaagtcacttcacattgacaatcctgctgcaaaggtccttgttgacatctcaaaagttcaagatgatgaagttggtgatgggacaacttctgttgttgttctagctggagaacttttgaaggaggctgagaagttaattaacatgaaaattcatccaatgactattattgcaggttacagaatggctctcgagtgtgccagagattctttgctaaaaaagaccatggacaacaaagaaaatacagataaattcagatctgatctcatgaatattgctatgactactcttagttcaaaaatactttcccaagacaaggagtacttcgctgaacttgcggttgatgctgtcttgaggcttaagggtagcaccaacttggaatctattcaaattctgaagaaacctggaggatctctcaaggattcatttttggacgaagggttcattcttgacaagaaaattggcattgggcagcccaagcgcattgagaatgccaaaattttggttgcaaacactgctatggacacagataaagttaagatatatggagcacgggtccgggtggattcaatgtctaaggttgcagatattgaagctgctgagaagcagaaaatgagagagaaagtccaaaagatcatagcacacgggatcaactgttttgtcaacaggcagttaatctataacttccctgaggaactctttgctgacgctggcatacttgcaattgagcatgctgactttgagggcattgaacggctggctcttgttactggtggtgagatcgcatcaacttttgataatccagagtctgttaagcttggtcactgcaaggtcattgaagagattatgattggggaggacaggttaattcatttctctggggtcgcgatggggcaggcttgcaccattgtcttaaggggggctagtgagcatgtgcttgatgaggcagagaggtccttgcatgatgccttgtgtgtgctgtcccagacagtaaatgatacccgtgtcttgtttggaggcggatggcctgagatgctgatggctaaagaagtggatgaacttgcaaggaagacccctgggaagagatcccatgctatcgatgctttctcacatgctctgcaagccatcccaacaatcatagctgacaatgctggtttggatagcgctgatttgatctctcagctacgagctgagcaccacaaagagaactccactgctggaattgatgtcatcacaggcactgttggggacatgcaaaagctagggattcaagagtcgttcaaggtgaagcaggccattcttctgtctgcaacagaggctgcggagatgatcctcagggtcgatgagatcataacctgtgccccgcgcagaagagaggataggatgtgatattacacgctgtttctcgatgtagcgggatgctcattaccctagttttgaggggtattatggtttaggggcgctcaagttggtcagatttcgagtgtttttggcccctaagcaactggtacttgttatttggttgaaacaatcagccttaggtttgtgttctattttctcatgctgtaccgtttggtagcgagttacgtcgtacgatatgcttgttccatcatgtttttctattccttttaacgtaagaatgggcttgtctttgtttccggaagtggctcctacatgtgttaatggttcccaccgtcc

SEQ ID NO: 269621 - DNA, 497 bp, Zea mays
gctggaatcgatgtcatcactggcaccgttggggacatgcaaaagctggggattcaagagtcgttcaaggtgaagcaggccatactcctgtctgcgacggaggccgcggagatgatcctcagggtcgatgagatcataagctgtgccccacgcagaagagaggataggatgtgattagacacgctgtttctcggtgtagtggggatgcttgttaccctagttttgatggtggttctggggcgttcaagttggtcacatttcaagtgtttttggctcctaagaacctagtaattgttatttcgttgaaacaaccaaccgtaggcttttttttttctagattctcatgatgtaccatttggtagcgaagttcttcctctgttcttttttatgtgtcgagttttagtttaaaactagacaacaaatattcgataatggaggtagtacattgtttacgaaaaaattgtgccatgtgcctctacatgttctcctattccttt

SEQ ID NO: 269622 - DNA, 1118 bp, Zea mays
cccacttgtccggcgaacggggccgacttctccgaatcgcatcccctcccccactcaagcagccaaaccctagattgggcaagatgctcggcggcctgtacggcgacctcccgccgccgtcgtcggccggcgatgaagacaaggcctccacggcttccgtttggtccagcgccaccaagatggcgcctcccaccctccgcaagccgtccaccaccttcgccccacccccatctattctccggaaccagcacctgcgcccgcccaaagccacctccatccccgctccccccgtcgttgccgccgaacccgccccggccacctccttccagcccgcgttcgtcgctgtccagtccaccgtgctggaggagtacgaccctgccaggcccaacgactacgaggactaccggaaggacaagctcccgcgcgccaaggaggctgagctgaacaaggagcttgagaggcggcgccgcgaggagcaagatcgggagagggaacgcgagcagcgggagagggaggcccccgagcgcgaggagaaggactaccaatccagggcctcctccctcaacatatccggcgaggaggcgtggaagaggagggcagcgatgagcggtagcggttctgctgctagaaccccatcgtccccacctcacggcgatggcttcgccattgggagctcatcttctgctgggttgggtgtgggtgccggcggacagatgactgctgcccagaggatgatggccaagatgggatggaaggaaggtcaggggcttggcaagcaagagcagggcatcaccgcgccactagtggccaagaagaccgataggaggggaggagttattgttgacgagagcagttctaggcccccagaaaagaagccgagatctgtcaactttgatgggcaaccaacacgagttttgctgctccgcaacatggttggtcctggtgaggttgacgatgagctggaagatgaggtggcatcggagtgtgccaagtatgggacggtttctcgggtgctgatatttgagatcacacaggcagacttcccagctgatgaggctgtaaggatattcatacagtttgagcgggcggaagaagcaacaaaggcaatgattgatctg

SEQ ID NO: 269623 - DNA, 373 bp, Zea mays
aaatgtcttggatgcatttttgttcagcgggagtcgaaaacaccagatttcaaaggtgtttcaggtgctgtatttgaaagaatccatcgtgctcatcaacagaaaaatgcaccaatgatgctactcttccctgagggcacaactacaaatggggattatctccttccattcaaaacaggtgcttttcttgcaaaggcaccagttcaaccagtcattttgagatatccctacaaaagatttaatgcagcatgaggattccatgtcaggcgcacgtcatgtatttctgccgctctgtcattttgtttattacctatacgtgctccgcttaccagtttactatccttctgagcaagaaaaagaagatcctatgctc

SEQ ID NO: 269624 - DNA, 331 bp, Zea mays
tctatgcgtccgcggacgcgtgggcgacactggagagttgagaccctctcccagcatcaacccgccccgcgctgccctcgtcccgatctccgacccaaatacccgatccaccatggccggaataaggcttacgcccgaggaacccgagatgcccgttggcacgccaccccgcccccagctcccacccttcgtcgccgcggcaggcggtggcggcggaggtctggaaatggcgtcggacgacgagcggtccattgcggcggattcatggtcagtgcggacgagtacgggagcacgctcgacgatgaccgcgctacgcgacgctgctgaggtg

SEQ ID NO: 269625 - DNA, 953 bp, Zea mays
cccgcggcgacccacgcgtgcgcgagaacctcaaccaaaacctttccttagcaccgccgcgtcgctccgcgccccgtcgggccagctctccgctgccgtccagtgaccccgccgcgccttgcagcggcgacggaggggccagcaagtcagccatgacgacccgcatagcgccgggcgtgggcgcgaacctgctcgggcagcactcggcggagcgcaaccaggacgccaccacctacgtcggcaacctcgaccctcaggtttccgaggagcttctatgggaattatttgtccaagcaggccctgttgttaatgtgtatgtcccaaaagacagagttacaaatttacaccagggatatggatttgtagaattcaggagtgaggaagatgcagattatgccattaagattttgaacatgatcaaactatatgggaagcccataagagtaaacaaggcttcacaggataagaagagcttggacgttggagcaaatctgtttattggcaatcttgatccggatgttgatgagaagctcctctatgataccttcagtgcatttggagtgattgtcactaatcctaagataatgcgagaccctgaaacaggaaattctagaggctttggctttgtgagctatgagtcctttgaatcatctgaccaagcaatagatgccatgaacaaccaacatttgtgcaaccgcccaatcactgtctcttatgcttacaagaaagacacgaaaggagaacgccatggcacaccagcagagagactgctggcagcaaacaatccaggatctcaaaagaataggccacacacaatgtttgcaagtggtccgccgacccaaggtcatccaaatggtggtccgcctgtgccacggcccgctggcaatggcacaattcctggacagattcaacacattcggcaaccacctccaccacctgttggacaatttccc

SEQ ID NO: 269626 - DNA, 975 bp, Zea mays
tttaattgcaatttttagtcccatcgcatgcacatacctaattttaacttatagattcagctgtttctagttttaacatatagattcagctgtttctagtgtgacaacagaaacagataaagcttttttcaacaatgatcagctgtgcctaaagccgcaagcaccacagccggagaaatcctctcgtgtggtctcttcagctctcagacggcaagacgatgctgccgccgaggtccgccgccgccgcgccgtgctcggttgcaggacttctgttccaccgattctcatcctactcgtcctcttctgtctattctgtccgccaccacgcctcgtctgctctctcctcccagccctccacccgccccaccaccacctggtcctcttccccccattccagcagccgcaggatcagggggtttgcggcctgggcttcggcgccggggccggcggggtctgcggattccctcgctacaaaggcgctagaggctaagatcaaggagcagctggaggcggacacagtcacggttgtggatacctctggagatggccgccatgtttgcatagacgtgatttccaaggcatttgagggaaaatctgctgtaaacaggcagagaatggtctacaaggctatatgggaggagcttcagagcactgtgcatgctgtggaccagatgactaccaaaacgcctgatgaagctgctgccaacaagtaatcgatagatgcacaatacctgtgaaagcacagattatctgtgcttcgaagatcaggccattgcttcgaccaaaatttttctcttgggtgctattactttgcgtgtcagctgaatggtcaataatctgcggtatggatagcgcatggcttaaaaattatatgtttttttttttgcattgatgtgtgtgtgtgtgtgttggatgggggacttgaacgctgcattggtgcccgaaggcgtgcttcatgtacgacattgctcgctt

SEQ ID NO: 269627 - DNA, 2361 bp, Zea mays
tcgctcacgcgtcctttgttttctttccgcctctctcgctctcgccttctcggcgcagcgcagtactacgagctagcagcaccaggaacctcttcccacacttccgcgctcctccctctgtctcgagactcgagaatggttgtgtaggcgggcgcaggagggagggaggcgagagggggagctagggtttttcgccgccgccttctgttatcctcaggctctgaaccccctcctgtccggtgcgcggcggattagactccgatggggaagtctccggcgaagtggatcaagtccgtgctcttcgggaagaagtcgtcgtccaggtccggctccaccaaggccaaagatttatcgaaaggtgcgagtaacaaaggagctgctgctgcggggaaggagcccgtgttctctgagagctccccagtgatctcggagcctgtgcttgttagcgcccacaacaatgagaccgtgcgggaggtggcgaagggtgagaattccagcgtgcaagaagtgccagtgaccgatgtcagtcaagacttggagaagcagggcagtgtggggtctgatacgtccaatgatgctgagagggtgagggaagagcgagcggccgtgaaggcacaagctgccttccgtggttatctggcacgccgagcattccgtgccctgaaagggatcataagactacaggcactgattcggggacatcttgtaaggaggcaagctgtttcaactctccgtgccacatggttgattgtgaagtttcaagcccttgtccgtggaaggaacgttagactttctaatgtttccattcaagcaactacggaactttcccaacagaacttcgggggttctaaacctggttcctggaaggagaagttgtcttcaaatgcatttgctcggaagcttctctcttcaccaattgtggttgaggctcttcacgtccagtatgatgagatggaccctaattcggccttcaattggttagagaggtggacagtaagtcatgtctggaagcctatttcccaaccaaagagagttggtgctgatgctaagcctcatacaaggaaggccagttatgcaatggaaacagagtcagcgaaattaaagcgtaatgcacggaagagccctgcagtgccatttgagccttctcaaacaaacaccaccattgaaaatgagaagacaagacggaatccaaggaaattaagtagcactcctgctgagtcagttcccgatggccagttaacagaacttgagaaggttaaacgtagccttaggaaggttactagttccatggttgaaacctcaaaggtgcctagcccaacaactgagattcctgaccgtcaagaggtacaatgtgagagaccactaagaagtgcaaagcaagctccaattcatgttgagaatcaagaacctcagaatgttaatctatcggacaatgcaaagatggatattctggtaccagatatccagcctgacgtggaagttgcttcagatctagtcacaatcacaaatgaagaaaaagttgatgagacaccgtctgttgttgctccagcggctgaaattatgccactgcaagacatcaacagcgaagaaaatgctttggtgaatgatgtggaagagagatccaaagaagaacatccatctactgataacctgaaaggcagcaagaggaggtcttcattctcagctaagcctgaatatccagaaaatggctccaaaaattctccagctctgccaagctacatggctgctacacaatctgcaaaggcgaaactgcgggggaatagttcaccaagacttagctctgattcagcagagaaaaacgggttcactcgtcgtcactcccttccgtcccctaacaatggtaagataatttcacattctccacgtacgcaaaggccagctaatgctggtggcaaggatggagcgaaaggtgacaaggctatgctgtcatcaagagatgcaagcgagagaccactgaaagctgagtggagacgttgacgcggcgaatcaaatccaaatcctccatttgattagcgtgaccgtttgggtggatggatcgcccttgcagtttgctcggatttgttttgtttgtgatgtaaaaaaaatgatgtcgtcatcgtcggcgagatgaatgaaccggctttgttgtgatgaatccgctgggagtcaacttatttattatagggttttccgtcatgccttttgtgatgtatagctgaagtattttcccggtttgttttggttcccagacttcctcccttctccttgttgagagctgctgatgttagagagaatgagaacatgcatggattgagttgaacaatcttacccatttggtgaaatgtgggccgcgttttgcct

SEQ ID NO: 269628 - DNA, 534 bp, Zea mays
cccacgcgtccgcaggagcctcttcccacacttccgctctccctctctctctttcctctcgagaatggttgtgtaggcgggcgcaggagggaggagagagaggggagctagctagggttttgcgtcgccgccttctgttacccttaggctctgaacccctccggtccggtgcggcggcggattaggctccgatggggaagtctccggcgaagtggatcaagtccgtgctcttcgggaaaaggtcgtcgtcgaggtccggctccaccaaggccaaggatttatcgaagggtacgactaacaaagcagcagctgctgctgctgctgctgccgggaaggagcccgcgttctctgagagctctccggtcatctcggagcctgtgcttgttagcgcccacaacaatgagaccgcgcgggaggccgctaagggtgagaattccagcgtgcaagaagtgccagtgactgatgtcagtcaagacttggagaagcagggcactgttgggtctgatacgtctaatgatgctgagaggttgaggg

SEQ ID NO: 269629 - DNA, 833 bp, Zea mays
  unsure (1)..(833): unsure at all n locations
ctcaatttcgtgcggggggtcttttcgtanggcgaggggagctcccaagtcgacgtggcggggatggctgcgacggccggcgtcggcggtggtggaggggctaacgcggcggtggcagagcagatagcacaggcagtgcggtccacctccaatctcctccagctcatggagcagtcctcccccgctcaggttcacttggcaaaactacccaagaacctgttggaaaaagcatcctttgcaaagaacacggagcatgtactgcaccagctacctcaagtaatttcatccttggatgcttatatggacaggagtttgcaaagtgcatctcaaattaagactgtcacacagctcttgtcaaacatggagaagacacagctgaagtccatgttgccttcctctcgaaggaaggaagatcagaagagtactgaacccttaagaactcagggttgattgacgtcaccgagacatagtggaaggataagcttttgccgtcttatgctagagagatctgagtatgatggtttggctgattggctctatgcatctatccggcataaggatccatcgctgcctaccgtttgcgccacattttaaaatttggttggggaatgctgttatggtgtaatggagctgttttttatgagttggaggtgctacaaggaaagcatgtctgtttatttgtcgtccgctaaatcattttaactaaattgcggcaaataaaaaagaacggatggattaattgccacgcctttgggtctacaaacatgctgttttcttgtaatagtattgattgtttctagcagaaaattaaggtagaaattaataagtgatcc

SEQ ID NO: 269630 - DNA, 1402 bp, Zea mays
acgtacacgcgtccgcacaccaattacaggaggggatgcattcatttatggtcactctgttcgaagcactgtgggaatgtcaaacatccgtaggatgatcggagtctgcccacagtttgatatcctgtgggatgcattaacagctaaagagcacatggaattgtttgccagcatcaagggattgcatccagcagcaatcacattagtagcagaagagtcattagccaaagtaaagctcagccaagtaactaatgctcgagcaggcagctacagcggaggaatgaagcgccggctaagtgttgcgatcgcactgattggtgacccaaaattggtttttctcgatgaacctactactggcatggatccaataacaaggaggcatgtctgggacatcatagaggaggccaagaagggaagagctattgtcttgaccacccattccatggaggaggctgatattcttggtgaccggatagctataatggcaaaggggaaactgcggtgcatcgggacatcaataaggctgaagtcgaaatttggaacaggatacattgctaatgttaatttctctggaaatggccacatgcagagccccaacatcaacagcaacactgaggctccggttaatccgaacatagaagctgtcaaatggttcttcaaggaacggcttgatgttaatccaaaagaggagagcaggacattcttgacatttgtcatccctcatcacaaagaaccacttctgacgagattctttggagagttgcaagacagggaaggggagtttggaatatcagacattcaactcggtctgacaacacttgaagaggtgttcctgaacattgcaaagcaggcagagctggagacctctactgctgaaggtaccctggtgactctcaacctgtcatcaggaacaacaattcagattcccaagggggctcgtttcgttggtattcctggaactgagacagaggagcatccaagaggcatcatggttgaggtgtactgggatcaggatgaaaatggatcgctctgcatttctgggcactctgacgagatgcccgtgccagttcatgctgagctgaggaggcctccgtcactttctcgtagggcctcaatggaccgtggacgtccagttgggtatatgattgacctgaaccaggtcccatgaaaaaaaagatgagtccaggtgcaacgtttagattggttttgatgcagattatctggtacatatagtatataggaatcttgtattcgtgtctttgtattagaagtcgtaaccttgtattgcagtagtaattggtaaagacatgctttgtaaaatatcctatagtgtaacacaatattttctgttgtgtggcaaccaaaggctcgaaaaatgccgcaatagaattacatggtaact

SEQ ID NO: 269631 - DNA, 531 bp, Zea mays
ggcccctacgcgcgcagccttaaccccatccgcagacatcagccggcgcctgtgttcctctccccgagccggtgcacgcaccacttcccccacttcgatctagcataatccgactccgccgactcgcctgaaccctagccagccgccgccatgccgccgcgacgcggtaggggaaagggtaagggtagggcaaagccaagagcgaagcccaccgagcccgagcccgagtccgatcccgaactagacgaagccgccaagtccgaaatcgaggcgggggacgcggaggctggggaggagtccagcgccgagagcgaggactcgaaggaagacgaatcggagagcgacaccgagtccatggatgcagaggccagcgaagaagctggcgagaacggaacggaggagatggatgcagagcctgaagccaaagccgtcgaggccatggctgtaacggtggccacggaggcggaggcgaatcctgacgcctcggatgaagaagctggtgagactggctcataccgcgaagcagatggc

SEQ ID NO: 269632 - DNA, 653 bp, Zea mays
ctcacgcgtccgcgttcgttcactttctctctctcgcctcccgtttgccccgcgtgcgctctgtgtcgctccctctcttgtgaggagtgaggacgactggggcgaccgccgccgccgccgccgccctacgccagatgcccaggtaggggccattcgctagctcttcttcgtgcccttcgccggcgacgagcattcaccagttgctgatgcaaggctttcaaaagtttaacagtctcacttgatgcaaaagcaacacaatcactctaaaggtttggatcagtcatttcagagcatgggttcgcggtttccatcccatcagctaagcaatggcttgtatgtctctggccgacctgagcaacctaaagagaaggccccagtcatttgctcctcggctatgccgtacactggcggggacataaagaaatctggggagcttggaaagatgtttgatctccatagaaaatctggtccattgggtaatcaaacttcaaggaatacttcctttggtggtgctgcctccaactctgggccagtttctaatgctgtcgggcgctccaactactctgggtctatttcggctgcaattcctaacactggaggatcttctaggacaaaaactaattttggacctctcaataagcttggagaaccaa

SEQ ID NO: 269633 - DNA, 480 bp, Zea mays
  unsure (1)..(480): unsure at all n locations
tctcgtctgttgtctccatagcctacacacacggtcgctcactttctctcgcctcctgtcccccccgcgtgcgcgcagcgctctctctctctccctcactctcttttgaggagtgaggacgactggggcgaacgtcgccgccgccgccctacatcaggtgcccaggtcgttgttcggcccttcgccagctctttttcgggcacttcgccggcgacgaacacccaccagttgctgatgcaaggctttcaaaagattaacagtctcaattgatgcaaaagcaacacaatcacactaaaggtttggattagacatttcagagcatgggttcgcggtttccatcccaccagctaagcaatggcttgtatgtctcgggccgacctgagcaacctaaagagaagtccccagtcatttgctcctcggctatgccgtacactggtggggacataaagaaatctggngagctnggaaagatgtttgatc

SEQ ID NO: 269634 - DNA, 399 bp, Zea mays
tttccccactccccacaccctgctgcctgcgagctcggcgatctcctcctctccgacggcgaccatggctgagacgaccctgctgacgaggaggtccaagcgcatcgctctgcgcgtttcccttgccggagccaaacccagctggcgtgactgggccggcctagcgccgctggcggtggagaagatcgccgaccgcctccgggacgaggacgtggcggacttcatgcggttccgcctggtgtgcaagctgtggatggacggcaccggcatcaggaagcctcgtgagctgggcgcacgcgttatcgaccacagcttccaccctcgccggtggatcctgctgacggatgagaagaaggaggctgatgaggcgacgcccacgcgccgtatgctgctcaacct

SEQ ID NO: 269635 - DNA, 1339 bp, Zea mays
gccccattttgatgcagagttgaattcggaactgggagcactgcaactggtgctggacctgcacatgatgttatcatgactgagtgtgcccatgattaacacgctcatgacgttagctactgagtactgctatttctcttgcatcggtgtccattacggcgcttagctgaacttctatctttatttgaggaaggagaatcatcacctccaattacattccatgacttcatgggacaacatgtgtttacggagcaagtagctgtatctgctgcaccagggacaactcatccttgcccatatgtggcatacttgcatcctcttccaccactgacatcgtcaagctcccatgtccctgagagaaccactgatcgtactgcataccatgatcattggaaccccatggttgggccatcagatgttaggcccatgcaaacaatgcaacctgctgatttccatcatagccattgggcacatgtgccccattcttatgctcaacccaacagcaacaatgagcagccaggaatcccttttggaacaagggctacacgggttgatggtgatagccaacgtcgaatatctgttgtttctccatcttacttcagcaatggatctagacctcccagtgttcctcctctgatgcctcagttcatgagggcccatggcagcatcagcgaacagtaccaacagacttcatcatctagcctatttgctggggcccataggtcaggaggcatgcgacctgccccgacacctctaccagagaaccccacctttaccttgttcccgccaggttcatctggccatagctcgatggagactgatgatgctgggggaagccggttctacgcctgggagggtgaccggtttgccccatacccgttgatgccggtagactgcgagacaagctggcggacctcacagcagcagtcccaccagagcacatcagagcctacatctgctccaaggaggctgtttgggcaatggctcgctgtcggcaggccatccccatcacccgaggggtcttcgtatcgtcaattgcactcaccgcggatgtagaccctcgccgctgaaagaaacgatgggaagcccattgtattaagttaagccgggctgtgccgtgaaactttgggacgatgctcgaggggacagaaactggaaacgatccggctgaggatatttcgatttggtttatgtgaattccatctcgtacatatttgaaatcaagttgggatgctgggagcttcgaatgtaacgtgatttcttatgctgcaattctgttgattgacggattttcaaacgcgattgaatttccgtcccaatggtacctgttgaaccgtag

SEQ ID NO: 269636 - DNA, 515 bp, Zea mays
cagatgttatgtccatgcaaacaatgcaacctgctgattttcatcatagccattgggcacatgtgccccattcttatggtcaacccaacagcaataacgagcagccaggaatcccttttggagcaagggctgtacgggtcgatggtgatagccaacgccgagcatctgttgtctctccatcttacttcagtaatggatctggttccagatctagacctcccaatgttcctcctctgatgcctcagttcatgagggctcatggcagcatcagcgaacagtaccaacagaattcatcatctagcttatttgctggggcccataggtcaggaggcatgcgacctgccccaacacctttaccagagaaccccacctttaccttgttcccgtcaggttcatctggccatagctcgatggagactgatgatgctgggggaagccgcttctacgcctgagagggtgaccggattgccccatacccgttgatgccagcagactgcgagacaagctggcggacc

SEQ ID NO: 269637 - DNA, 1083 bp, Zea mays
agaacaaatgcttccacggaagaaagagaagagcatttatgctaacatgactgaggttcagaagcgaatccaggatcacttagttgagaaaacctttgatgtctacttgaatgatgaatcagatattgtgttgcgtagacctggcatcaagacaaagctaaatagtctctttattcaattgaggaagaactgcgcccatcctgatcttttggaagctgcatttggaacaacaagcctttatccacctgttaataagcttttagagcaatgtggcaaatttcagcttctggacagactactaacttccctacttgcacgcaagcataaggttctaatattctcacaatggacaaaagttttggacatttctgagtattacctagattcaaaaggccttggggtttgcagaattgatggtagtgttaatttggaagagaggcggcggcagatagcagagtttaatgatttgaatagcagtctgaatgtctttattctgagcacacgggctggcggacttggtatcaaccttacttctgctgatacatgtatcctttatgacagtgactggaatcctcagatggatcagcaggccatggatcgatgccaccggattggtcaaacacgtggggcccagtgcatgtatataggctggctacctcatattctgttgaggagcggatcatcaagaaagcttttgggaagttaaagctagagcatgtggtgataggcaaggggcagtttgaacaagaaagagcaaagcctaacgttttagaggagggggagctgctggcgctgcttagggacgagcaggacgaggaagatcggatgatccagaccgacatcagcgacgaagacctcttgaagctgatggaccggagcgacctgtccggaccacctggtgctgccgatgccgctccactgatcccgctgaaaggccctggctgggaggtcgtggtcccaaccaagagcggtggcggtatgctctcgtcgctcaccagctgagcgatgccggcaccatgtttggggtgcccattttgctagtcactcatcatgtggacgatggggcgcttgttggccggtcgc

SEQ ID NO: 269638 - DNA, 428 bp, Zea mays
ggcgcaaatatacttgttgataacaaaggttgcattaagctagcagattttggggcatctaagcaagtagaaaagttggcaactgcaactgctgccaagacgatgaaaggtaccccatattggatggcaccagaagtcattgttggaagcggtcacaattgttctgctgatatctggagtgttggttgcacggtaattgaaatggcgataggcaaacccccatggagccacgaatatcaagagggttctctactttattatgttgggacgacaaaatcacacccacctataccagaacatctctccacagaagccaaggattttctgttaaaatgcttacagaaaggaaccagaaatgagatctgttgcatcagacttgttgcagcacccatttgttacacgagtattggaagatttttgtcagctta

SEQ ID NO: 269639 - DNA, 663 bp, Zea mays
tcgtccacgcgtccgcccacgcgtccgcccacgcgtccgcccacgcgtccggctgccgcatggccctggcctccctcgcggcctcgctcccagtcgccgccaccgccgccgcggtgagattcccattccgtttccgcatcggtcgcgccatggcctccgccgccgcaggggcctcgccggcgagggtggccgtggtacagatgacctccgtgggggacgtcgacgccaactacgccacctgctcccgcctcaccaaggaagcagctgcttctggagtgaaatttctttgcttccctgaggtcttctcattcattggatccaaggatggcgaggctatgaagctagctgaaccattagatgggccaataatgcagagatactgctcacttgcaaaagaatcaagcatgtggctatctcttgggggttttcaagaaaagggacctgatgattctcaccagtacaatactcatgtattaattgatgacactggaaaagttaggagctcatatcgaaaaatacatttgtttgatgttgatgtacctggcaatatggtgtacaaggaaagtcgtttcacagccgcaggtgatactattgttgctgtggatagcccttttggacggttggggcttactgtttgctatgatttgagattcccagagcttt

SEQ ID NO: 269640 - DNA, 1662 bp, Zea mays
gccttgctttcggcgagagaggaagaggcagaggagatcagggcaatgggcggggcggaggcgctgggccagcccgacggccatgcgaacggggccgtggtggaggagaagctggacttgctgcggcggcagctggggaaggcggacggcgacccgctccggatcgtcggcgtcggggcgggcgcctggggcagcgtcttctgcgcgctgctgcaggacgcgtacggccacctccgcgacaaggcgcaggtccgcatctggcgccgcccgggccgcgccgtcgaccgcgccaccgccgagcacctcttcgacgtcatcaacgcgcgcgaggacgtcctgcgccgcctgatccgccgctgcgcctacctcaagtacgtcgaggcgcgcctcggcgaccgcacgctctacgccgacgagatactcagggacggcttctgcctcaacatgatcgacacgccgctctgcccgctcaaggtcgtcaccaacctccaggaggccgtctgggacgctgacattgtcgtcaacggcctgccttccaccgacaccagggaggtgttcggggagatcaggaggtactggaaggagaggattactgcccccatcatcatctccctcgccaaaggaattgaggcctcgctggatccactcccacggatcataactcccacgcagatgattagcaatgcaactggagttccatcagagaatattctttatcttggcggacctaatattgcttctgaaatttacaacaaagaatatgcaaatgcacgtatttgtggagctgacaaatggagaaagccccttgcaaagtttttgaggcagcctcattttattgtgtgggataacagtgatctcatcactcatgaagtcatgggtggcttaaaaaatgtctatgctattggtgctggtatggtagctgcactaaccaacgagagtgcaaccagcaaatctgtttactttgctctgtgcacatctgagatgatctacatcacacaccttctggaagaagaacctgaaaaacttgctggacccttattagctgacacttatgtcacattgttgaaaggtcgtaatgcatggtatgggcagaagttagctaaaggtgaattgacattagaaatgggtgacagtattaaaggaaaagggaccattcagggtgtctctgcagttgatgcgttttatgagcttcttagtcaggatagcttaagtgtcatgcatccagaagccaacagatctgttgcgccggttgagatgtgcccgatcctaaaagcactacataggattctgatcacgagggaccgtcctgctgattcgattcttcaggctataagagatgagacaatgtatgatccacgcgaaagaattgagatggcacaaggccattcactctaccgaccatctcttcttggtcaaccaaaaggagacgtgaaaacctagaagtcattttctttccctttcctttgttggctaggacttggagcatcttctaagttgctgtatgtttatgcacggtgtgcttgttgttgtaacttgtaacattagtggaatctcagaacatatttatttagcttgttcaatattagtagccagtcttgtacgatgtactgtagagcatgcttttagggaaaaaaaaactaacccgatctcttttttttagtt

SEQ ID NO: 269641 - DNA, 462 bp, Zea mays
ggggaactgggaagggaagggagcggaagagaggtgggtgaccgccgctcctccgtccagccttccagttccaggcgtggcgaactacgcaagcggcaagctcaccgctcctcgagtgaggcccaggttccgtcgccgccgtactcagcagcggagaccggccagtcaacaggtagtagagggggaaggaggggagcagttcctgttcgcccggtcaccgcgcggcccgagcaatcccgctgctgcgtccgcctcagtttgccgtcgccctgttgcacgtacggctagggtttggagatagatccgcccgcagcgcccgccagctcgtgtggaggcgcgccgtggtgcgggggttccttgctccggaagcttcagggcgtgcgaaccggttcggtcgcaatgtcgggatcgtcggcggcaggggaggacatagtgcagcacctatcgtccaattctaacccg

SEQ ID NO: 269642 - DNA, 503 bp, Zea mays
gcaaagcttcaaagcatctctgcttggattttagcgagcggcaacgacgagcgacccaatggggttcgtgctggtggtctctctgcccttcatcttcctctccatcctcctcggcttcggctgctacttcctcggcaagcacaggggccgggaggagatgcggaccggcgtcggcgcgcagatctacggcacgccgctgccgccgcccggcgtcgtcggagcctcctcgccgccgcctgagccgttccacagcaagaaacaatggtccgaggctgtgtgactgagattcagacgtctctccatccatccattctactactactacttatatgtcttggtggtgatgttggatttatattcttaattctttcttctttaatttcgccctggctgtcttgagagtgtagattgagagtcaaatctgtgcttgtgtctaaagatggtgtgtgtgtgtggatgttgtgatacgattgcaatcacactttatatcttgggaaatttgg

SEQ ID NO: 269643 - DNA, 648 bp, Zea mays
ggaactggaattactttgctgccaatcgtcctgagaaaaaagccccgaagattgaggctacgcatagggagaaagccatggaactctatcagactcaagtactaaagcagcaccgcagtaatatgtttgctgcaaatggtattggaatcttatacgctgagaaggccaaatgggatgtcgctaaggagttgttcacacaggtgcatgaagctgcatcaggaagtatatttgtacacatgcctgatgtatggataaatctggctcatacatattttgctcaaggtcattttcaacaagcagttaaattgtatcaaaattgtttgcggaagttcttccacaatacagatgcaaccatcctattataccttgctcggacacactatgaggctgagcgatggcaagactgcaggaaaactttgcttagagctatacatttggctccatcaaattacttgttacggtttaatgtaggagtgtcaatgcagaaattctcagcttcaaccctgcaaaagacaaaacaaacagttgatgaggttcgcgccccaatcactgaacttcaaaatgccattagagctttcagtccgttatctggtgcatcaacgggccactcccatgggtttgatgagaggaaaatagaaactcatgttg

SEQ ID NO: 269644 - DNA, 1131 bp, Zea mays
cttgttcttgtttcgttaaaggcgattgacatatcaggtgtatcaatgttggtcattgatggactgagatgtttcgtagaccacaatgttagtgacaaaatattttctattagagacgccatatcaaacaatcttcagattactatcttcaccgatccatctgataaaaatattgcaacaatggctaaaaatctactccgtggaagaattacaaagctttctatcaatgattctgtttcttcacgaagtgcatttatagcccagcatgtacacttctgtccatcggaggagctgaaaacaacaaaggttaaggaaattcttgagcagatattgcaagatcatcctaaaaagacatcaaaggtgcttctagtagctgcaagcgataaaaaagcacggctcatgtcactgtcgctgaagctggaaaattgcacagtgattgatgactcatgtggcaactcctttacaatatgcagcagtgtggggctgatgaatgtcattgtgaaagaccgggagaacatgtcagtgacagatgtagaggcattcgaaaccgtgctggtggtggatctgcctccttcagtcgacgaatacattgagatcctcactggggctgctcttcatgtgattggaggcgaagtgcatagcatattctgtaacactgatgcttctgttgcaaaacctctggctcagcttcttgcagactgcggtcaggtggtgcctgaattcctcaaaagcctgaagtcttcatagcagagacttgtgtacgcaatcagagtagtcagatcacaccgtggcgattcagatcatatcggagcagtgtgtgttctacatgttattctcatttatcagcacagcattggtattcaggcctcgtccttggtatgtactattatgtcgtgcattgtgaaatgtgaatgccttgaggcccttttcctgggagttgtttattgtcaattgtgtcaaaggaactgagtcagtcatccctttgctccctccccagcttcctttgtccaaaggcaagcagaaacagggacctccactgagagatcttggcaccttcaaagtgcatcaaccaaaatgtcaaagacacagcttcttttaatcaagttatttttcacaaaaaaaaagaataga

SEQ ID NO: 269645 - DNA, 277 bp, Zea mays
gcggtcaagtggtgcctgaattcctaaaagcctgaagtcttcatagcagagacttgtgtacgcaatcagagtagtcagatcacatcgtggcgatttagatcattttggagcaatttcgatatcttcttgtaggactgctggtggcgacatggaagtagcatatagatgggccggacaactatgcttaaggtgctgaattatctcctttgatgcgacaatatatccaccacatgatccaaaagacttggtaaaagctactaatcttctgcattctgcg

SEQ ID NO: 269646 - DNA, 410 bp, Zea mays
ccgactcctaagctagaatcgcactccactccactctccagagtccagtcctcactcccacacccgtacgcttcgcggcgcgtcgcttttgccagccatacgccagcctgagcgcccgacgtcgcaggattcgccgggaccgcccacaccaccggccgcagctgaccaggcagacgagtagggtggtggtggtggtggtggcagcggtagcgcgggggcggggcggcgctgcgtgaccgacgccgcgggagatgaaggccaaggccctccctttcatcgccttcgagcacaagcgagacgcctatggcttcgccgtgcggccacaacacctgcagcggtacagagagtatgcgaacatctataaggaggaggaagaggagaggtccgacagatggaagaattttctggat

SEQ ID NO: 269647 - DNA, 589 bp, Zea mays
taatcggcaatagtgcgggcctgcggcaccgcagcagcgccatgaacgccgtcgaaccctccgccgccgccatcgccgaagaccccattactccggccgcctccgcagccccgtaccctggccgcctccgcgaagcacttaccgccctttccgaggcttgcgagtccggcaacttcaatgcttccgaaaccgcctccttcaccatctccgacattcttgacaccgcagccggcgtaagtggcgagctcgatgacgggagcgacgacagccaagacgcgtcgaggtcaggggcctccgaagtgctgcttcgcgaggtgctcgagttcctctctcgcccgtcatcgatctcgaaccagatggcccttgacgcgctctcgcttgtgcttcccaaacccgtggcgaagctaggggctcgaatggggagatgccgggatgttgccgcagctatcctaaagttcttcgtgacgaattgcaatccgagggacatgctctccatcctctgtgaggcattagatgcaccaatggagctaccaaatggcttatccagttgtgttcttctactcgatgcacttgctaacgtgtttacttt

SEQ ID NO: 269648 - DNA, 658 bp, Zea mays
gtcatgaaggagcaagacagtggacagacggtgattgagctgatgggctcgctgacagagtcgcttgtcatcgccgcaatgaggctgcttattgcgttgtccccgcagatggggcacaccattgccgagaagctgtgcaaggccccggggcagccagggaggcttgtcaagagcattggcctgcacgggcggatcatggagcggcacgccatgtcagctactctcctggcgaagctgccgtaccagcacatcgctctgaacctggcgctgatcaaccagggcgcgatggttaccgtgctagccaagatagaggagatgcagcgcggcgagacgcgggcaagccgccatgcgaaggcgtatatggagggcctcgtgggtgtgctggtccggctaacgacgacgctgtatgacccggacgtgctcttggcggccatggatcacaacctcacgtcggtgctcacagatctcgtgcggtccgcatgcagcgacgaggtccagcgtctcgccgcgattggtctcgagaacctcagcagccagtcgcccaacctttcccagcccccaaccgaggagcggcgcccgaagaagaagaacatcctccggcgcctgcgcgaggcgcacgcggggcgggtgcacgacaaccggaggccgccggcgcaca

SEQ ID NO: 269649 - DNA, 428 bp, Zea mays
agcatgagcatcgtagttaaggcactctcaccccttcttcaacataaaccgcaaccaccggcagccactactgacgctacagcaccgtcagatgcctgactttctcaaggagctatgaatcatgaatgttaagagaaccattttctcttcggtgcgtgcgctgttctagatcactatcgtgtgcctatgaagtgatcagtgtcacacaagcaacggcattgtgggctaaagcatatctccacctttacttagcttggtacaggcaggagacttcccattgtcattaccgtgttctatgctgagtcatgtgctgctttcgttggccgggtgaggtgtgcttgttggccagcggtcgtgaccacctaattaccgtgttatggtcatcactgtaacatgcgaaaggtctaattttttttcatgggttgttt

SEQ ID NO: 269650 - DNA, 2066 bp, Zea mays
cccacgcgtccgcccacgcgtccgggcagccagtcagccagaggagcctagagccagtcccgtcccgtccatcagccgccacaccacaaacacccaccactctgctctcgcccgcttgctttctctcccccgctccagcttatggcggaggcggcgccagcagccggcggcggcatcggggacatcctcgccacgagcgatcgggacttcctcgtccgcaactccggcgagcaggtgaagatcagcagcgttgaggcgagccctgtggccatctacttctccgcctcatggtgcccgccatgcaggaggttcacgcccaagcttattgaagtatacgaaaaactggcctcacagggcaagagcttcgaggtcgtctttgcttcggccgatcgcaatgaggaagctttcaatgaatactttgcaaagatgccatggttggctgtccctttttctgacagtgaaggccgtgaggcccttgatggccggttcaaggtctctggtatcccacaccttgtcatccttgatgcaaaaactggtgaagtttacactgaagatggtgttgaattcgtgagtgagtatggcgtggaggcttaccctttcacaccagatcggatcaatgaactgaaggaacaggaaaaggcagaaaaggagaatcaaactattcaaagcgtgcttggcacatctactcgagactatctcatttcaaacaagggagacaaggtacccatctctgagcttgaggggaagtatgttggtctttgctttgtggtggatggctttccaccactcgctgaattcactgaggtgcttgctaagatctatgagaaactcaaagaagtgggagagaaatttgaagttgtagctgtatccttggacagtgaagagtcatcatttaatgagagttttgcaaagatgccttggcttgcaattcctcaaggtgacattaagtgtcagacgctggttcgttactttgagcttagttctcttccaacactagttctgattggccctgatgggaagacactgaacaacaatgtcgccgacataattgacgaccatggttttgaggcatgggagggcttccccttcagtgctgagaagctggaaattcttgctgagaaggcaaagattaaagctgcatcacagaccttggagtccattctaatcagtggtcatttagactttgtcattggaaaagatggtgcaaaggttcctgtatcagaacttgttgggaagactgtccttgtttacttctcagcaaaatggtgcccaccatgccgtgccttcctgcccacacttgtcaaggagtacaacaagatcaaagagaagaacagtgattttgagatcgtcttcatctctagtgacgaggatcagagctcattcgatgattttttctctgaaatgccatggcttgctgtaccctgggaagatgaaaggaaagcatcgctgaagaaaaccttcaagatccgtggaatcccttcacttgtcgccatcggacctactgggcagacagtcagcagggacgcaaagtcccagctgatgatccacggtgctgatgctttcccattcaccgaggagagacttgaggagctacagaagaagctggatgagatggcgaaggggtggcctcagaagctgaagcatgagctgcatgacgagcacgaacttgtcctgctgcgccgtggtacgtaccgctgtgatggttgtgacgagatgggcagcagctggtcctacaggtgcgacgagtgtgactttgacctgcaccccaagtgcgcgttgggtgaggaaaaaatgagtgaggaagcccctcctgggtatgtgtgcaaggaaggcgtgtgcaggaaggcctaatctgaatgctgtgaaggatgccaataatcgtgagatggctgtgctttgatgtgaggtttttcggccgttgatgtttgtgtgttaataaatagtagttgcaggagcatatgtgtgtatgcaaaactatgtgagtattgtgtcagatcaaagtaatggttttgctgcatggtatttctggtcttaatcatatgatgttgttggcatttttttgcctt

SEQ ID NO: 269651 - DNA, 720 bp, Zea mays
ccacgcgtccgagtaaaagattctgagcatcatcagtctgaataaggatgttgatggtttccatcccttaaatgttggcaatcttgcactaagaagccgaaatcctttgtttgtgccctgtgctgcaaaggcttgcattgaattattgctccaatctgggattgaactgatgggcaagcatgtatctgtcattgggagaagcaaagttgttggattgccaacttccttacttttacagcggcatcatgccactgtcagtgttatccatgccttcacaacaaatccagaggctattacccgcgaatctgatattgtgatatcagctgctggtagtggccaatcttgtaaggggaagctggttaaagcaaggtgcagtggtgattgatgttgggacaaatccaatcgaggatccaaccagtgactacggttatcgcctaactggggatgtctgctttgaagaagcactgaatgtggcctctgctataactccagttcctggcggagttggaccagtaacgattgccatgcttcttggcaacacactcgattcagcaaaacgcgtttatggcctaagtgactgaactgacccccctctgaactgtaattctgtcgtgcttgtcctttgtaaactagttctcttctcttttcatccttccgtcgctctctattttagctgtaagaagaaggctgggatgtaccatattcttgctcaataagtat

SEQ ID NO: 269652 - DNA, 565 bp, Zea mays
tcgtgcatcgcggcatgggcgtggcactgccacccgacgcaccgcctgcttctgctgttcaatcgcgacgagtatcactccaggccgacgcagccggcgcagtggtgggcggcgggggaggaagccaaggaaatccttggaggcagggacgagctcggcgggggaacgtggatggggtgcacgagggatggtaagctcgccttcctgaccaacgtgcgggaacccagctctctgatcggggccaagaccagaggacagctcccggtcaggtttctacagggcagcctttgtccattggagtatgccacagaaattgcaaaggaagcagatcagtacaatggctttaaccttatattggctgatgtgaactcaggaaccatggtttacatctctaatagacctggaggcgatcctgtgattcaaacagttgctcctgggcttcatgtgctttcaatgctgcaattaattccccttgccaaggcaatgcgctaggacagagtttcaaagatatttgacatacacgatgatcagaagcctcttaaaacaaatgtagaagagtgatgat

SEQ ID NO: 269653 - DNA, 620 bp, Zea mays
gcattcttccttctcccaacgacggaagaaacttcctgcctggatatccatccatccaaccgctcctccctcgtccggcaggcgacgactcgattccttcctcccttcctcctcctcgtctctttcatcggcgactccgatcttctctgccgtcgccgccgccgccaagagatcgacccgaccccgagcgcccgacccgaccccccaatccaaccaccaaccgccggcgcgcgcggaagattcagatttggcccctcgccggtaagggagaaagcgaggatgggtgcgtggatgtcgcgcgtgtggttcctcatgttcccagcgcgggagtacaagctcgtcgttgtggggctcgacaacgcggggaagaccaccacgctctacaagctccacctcggcgaggccgtcaccgccgcgcccaccatcggcagcaacgttgaggacgtcgtcttcaagaacctgcgcttcgaggtctgcgatctaggagggcaagaaagcctgcgcacttcgtgggcgacgtactaccggggaacacacgccgggatcgtggtgatcgacagcacggatcgcgcccggatcaacatcatcaaggacgagctgttccggcttttgcatgacgc

SEQ ID NO: 269654 - DNA, 407 bp, Zea mays
cggacgcgtgtgtcgacaagcacgtctccttccttccccacccactgctccacctccatcctccatggctcctccgccgcggcgaaacccgccgcgccagaaccccacccggaggaagggcgaggagccgtggctcgccgcgagcctccgcccggcgaacttcctcccgggcctcgccatcgggttcctcctaggcctcctcctcgacttgtcctcgtcgtggaggcccaagtccagccccgcgccggctccggccgccgcacccgcgcgggcctccagctccaagcgggcgtcggggacctcgtttgcctcgggcggcgaggagcttaagatgggtttaggggggcgtcaggacctcaagatgggggctgggtaaaatagcttcccaatgtgccccatgcagcgac

SEQ ID NO: 269655 - DNA, 398 bp, Zea mays
ttttactccactccccctcaccacgagtcgcaattcagccccgcgccgcgcgtcgatcctatcctccagtctgattccagctccgcctccgcctccccctcacctcccctctcgatccctcgctattaatacatcccggcggttcactcccgatctccatccctcccagccaggcctgcctcctcgatcctcggacgaaacgcgccgccttctttcttcgtcccagtctcgcctcctgccctttttaggtcgcccggatctcgctctcgtcgtcgtcgtcgcgcgcgcgccgcgcttcttgtttctgtcggcgccgccgcggagctgggaaggcggctccttttcgcggtcacaacccacaacacgccctcgtgatcttataccttcttcttggaaaa

SEQ ID NO: 269656 - DNA, 1211 bp, Zea mays
gtgaatacaacgacaataacatgtattcggccacaacttattgggagaaattcgttgatcaagagaccaagaaagtggtgaacgaggtgaaactgacagccttgttgtcatcgtctcagcacagacagtcaatagtagctcccgacaaggtctcatgggtggagaaaccctggattcgtctgctctccgtggacgcacaccccaccgaaccatggatcataactggtcacgaatgtggacaccttgccattaggaaccatgacacacagatgctactgtgttcgtttaaagtttcacgtggcggagtccttctgtgttaaatttatagcgcaaaagccatggttcatttgcagcttaggagaaggcttcatacatgtgttcagttatgaaacccaagaaatacaaaatgtgaacaattttagagcttatgacgacaatagtcgctggctccccatatcactggccgttcatccatcccggccctatgtgttgtcgtggtgtcgctacgatagtgagataataatgaagctttgggactgggacaaaggatgggagtgcgcacgcacattccgaagtggaggcattaatgtagatcatatcgctttcgatccaaaggagaccaaccgctttgttgctaccgattgcttggatggcaaagtgatgatttggagcctcgactctcccgaacctgaatatcatctgcctaagacggattttaagggtatcatgttcctggaattcttcacacgttatggtcggcagtgtttgattattgctcatgaagatcataaagcacacgtatgggactttcggttgcgcaaatttgtttctgagaagcgaaaattattatctcgtgaagctcctgtcttctgacgtcctaatgtatcgttactacttacaccttcatctaaaggcactcgccgtttctgggacgctaagaaattcagtttttatggagtcattgacaattctgctggaggagatgtgctgggtatcgcttgtttgatggggtctaaaacaaggtttgtgattggacaatattatgcattaacaatattgcatcttgataatgcattatattaaaaggacccaaggcaatctattgagccacaattatgtgctcatacaaagcaaggagacacaagttctgaggagaaatatggggaggagatggtttggcatcatggaccaaacttcgattggcagcatga

SEQ ID NO: 269657 - DNA, 1093 bp, Zea mays
gtccatctttccccgccgccggccgtgatccctcctcgccgctgaccgccccgcctgccccggcattctcccgctccagatccagggccctcatagagcctccgctcgatctgcccccggatcggattggccgccgcgcatctcatgggtgaggaagctgtccacttcagcgtcgtcgacgccaaggactgcaaacagagtgcctttgaagtcggcgataagacgtatgttatttgtagatcagatgatgatttgaaaacatctgctgttaaaattcacgacaagctcactcagacttggctctcacccacaatacttggggaacagccacttctaaccaagtcacagtctgtgattcctgtcagtgatgagaagatattagttatcgagaagggtgttcccttgaatgagtccatctggttccttgagatagacaccccctttgttaagcaacaacggaaaatcaaggaaacagaagttgtttcttggagcaagggagtaatcggcgttggccaaaaaccagttgtgattagtgctccttctggtgttggtaaagggacattgattgcaaagttgatgaaagactatccatcgaagtttggtttttctgttagccacactacaagatctccaagggaaaaggaaatagatggtgttcactaccacttcacagaaccaatcaagatagagaaagatataagcgagggcaaatttcttgaattcgctcatgttcatggaaatgtgtatggcacaagtatcgaagcagtcgaatctgtaactgatgagggaaagaggtgtattctcgacattgatgtccaaggagctcgatccgtgagggcttcttctcttgaagcaatattcatctttgtatgccctccatcattcgaggaactagagaagcgccttcgggcacggggtactgaaacagaggagcaaatccagaaacgactcagaaatgctcaggctgaacttgatcagtccaatgaaccaggtctctttgatcatcttttggtcaacgatgaccttgagacatgctatgagaatttgaagaagttgctttctctggatgatgacaagaagattcagatgattt

SEQ ID NO: 269658 - DNA, 766 bp, Zea mays
cggacgcgtgggcggacgcgtgggcggacgcgtgggctccgcgtttacacccgccgccactcctgctttggcgccgtagctagcaaaggcgatatccatggcgacccctgcacggatcgagctggacaagctgagcgtggagcagctcaaggggctcaaggagcagacggatctggaggtcaacctcctccaggacagcctcaccaagatccgcaccgccgccacccgactcgagaacgcctccgccgcgctccaggacctatccctccgcccccaagggaagaagatgctcgtgccgctcactgcgtccctctacgttcccggttcactggacgacgcggagaaggtcctcgtcgatgtcggcaccggttacttcatcgagaaaaccatggctcaggggaaagaatactgtgaaaggaaaattaatttattgaagtcaaattttgatgaattggttgaggtggctacgaaaaagaaagccatagcagacgatatgggtttgctactacaagccaagctgaggcaagcgtcaccgggcccaagttcatgagagctggatgcacacctcgtctcttctacctatgttgtatcaaacatcatttagtaattttgaagttggagtcacgcagcagcgtagattgtattctttggcatcttctgtcgcacagcacactctttgaatggtttaattttgctcctactgctagcagcccgtggaactttcatgagcttgtctgggggggaccaatcatccgttcatacttcc

SEQ ID NO: 269659 - DNA, 862 bp, Zea mays
cccctcctctcgcccacaaaattttgtctccttccctccccacgtttccacccctcctcccaccactacttctgagctccctgcggctgcggctgcggcttggtgcttgcttccctcatctctagcctgtacactggttgcggttggagtggttgccagtgtcctcaccacttgctcctctcgatccactcccccacggacatgagcgtgcaaccatacatctaccggtgattgcttccttcttctgccctgaagctgaaaactcggcctgccgcgcctagcctgaccttgccttgcctgggggaaaaacttctgttttgctgctaccgctgctgtggtataaaagtggagtcccagcggagggaagattgctccgtcgccgcggtttcgcttcgcggcgggaaggggccgtgaaggaatcttgcaccgagattaatccctcctctgcccctccatttccggccggctgtcggtgctgccttccgcagcaaaaggtgggatctcgcgtccgccggcggtggcattgccggatcgagatatctccagcggcggcctgcgtatctccgtggccgatctgcgctgcggcttcccccggcggtgcggactgctgcggtgaggagcgttgctctgcgctgtggtccaagcgagggggcgggggggactgcacgccaggtgttcgacgaagaacccggcccgaggcagccatgagggacttcccttcctgcttcggcgagagcggcgtccagatcgcggacgcgtcgtcttcgtcgtcgtccagcgccggcaagggcgcggcgcagaacctggtgacctgcctctaccagacgcacttctcaggcaggcccctgcttgatctcgctca

SEQ ID NO: 269660 - DNA, 464 bp, Zea mays
gccagaccagtcgccgcggcccgtgcgcttcggtatcctgggctgcgccgccatcgcgcgaaagctggcacgcgccatgctgctcgcgcccggcgcagccgtcgccgccgtcgggagccgctccgaagtgaaggcccgcctcttcgccgccgacaacggcctcgacgtcgccaccacccgcctccacggctcgtacgatgcgctcctcgacgacccggacatcgacgccgtctacatgccgctccccaccagcctccacgtgcgctgggctaccgcagccgccgcacgtggcaagcacgtgctcctagagaagcccacggcgctgtgcgccgccgacctcgacgccatcctcgcggcttgcgagaccgcgggggtccagttcatggactccaccatgtggatgcaccatccgcgcaccgccaagatgcgggaaatcgtcgacgacaaggacgccatcggggaca

SEQ ID NO: 269661 - DNA, 457 bp, Zea mays
gaagtcctaagtctttttacagataacggcgattatcatcatcggcgccgtcattatgtgaagggcttactagttgatgatattatggggtacaaaatctatactcatgaattacgctcgggatatgctgcaaggattgataattgtaggagctatgacaccgtgagcaaagatgtaattcaaaggtggacatatcctatggtgcctgatgtagtatccagtcgtgatatccttggagagtagacttcataggcagggaatatacagggcatcatatgtaacattgtcaccttcttctacaaatctaagcatattctattgacgctagtgtgactagattagcaggtcactgcaatggaagtaattcagttattgatcatggctacataattgcgaaagatgaacatattaaatgctcatgtatatagcacaatgatatattaggctatgcatgcaa

SEQ ID NO: 269662 - DNA, 533 bp, Zea mays
cccacgcgtccgcccacgcgtccgctcaaaccccagcggtcggtccaattcaaaaatcgaatcctgcgctccttccccaagctattcccaaactgccccacgtctcatcctcgcgagtcgcgacctcgcaagcctctccgacccccagctcaacgagatcgggcgagcgaccccctcttccccgaccaccagatcgcagcgatggagccggatccggtcgccgctggggcatcctcctcgccgccgccttcaccagcgccggccacgtccccgccgtggcaaacgcgagatgacgatgagccgggagcggtggattgcgcggatcccggaggagacctgaatcccgcgccgccgccgtcgcctcagcaggctacagttgagaacgccgcggtgggcagcgaggtggagcaggaggagccaaagaaggaggcgatggcaggagtaggggagactctccgcagcttcatggaggagtttggggatcaaggagaggactccattatcttgtcaccgcggctgaaggatattagtac

SEQ ID NO: 269663 - DNA, 548 bp, Zea mays
gacccacgcgtccgcccacgcgtccggttcgcaattacagagatctagagagagagatagagggcagatctacgctagagcgacagagccacaaccaaccgagagggacagtccagtatggtggtggcgctcgggcccggccggttctacggcagcggcctgccgaggccgcgcttcttcccgggcgaccgcgtggacccgccggcgtccgtcaccgacccgctgctcgagtgggcgcgcgaagcgcactggtccatgggcggcatcagcgtgaagcgcctccgcctgcagggccgcatcgagggttccgtcgacaagctccgccgccgcgcgcaccgcgacgccagggtcaaggccaaggccaaggcccgcgccgctggccacatgccggcttcgctcgccgcgcttgggtccgacgacgacgcctccagcggcgactccgaggacgagcaggaggtggcggcgcgggagcgggccctgaagcgtgagcttgtcgacgacgacgaggactccgacgggtccggcgagtcggatgaggacgagcccct

SEQ ID NO: 269664 - DNA, 429 bp, Zea mays
  unsure (1)..(429): unsure at all n locations
gcttgcagtaccagcaatccagagcggggcagatctaccgagatccgcgtcacagaggagagagagatcgccatggtggcggcgctgggacccggccggttctacggcagcggcctgccgaggccacgcttcttcccgggcgaccgcgtggacccgccggcgtccgtcaccgacccgctcctcgactgggcgcgcgaggcgcactggtccatgggcggcttcggcgtgaagcgcctccgcctgcagggccgcatcgagggctccatcgaacaggctccgccgccgcacgcgccgtgacgccagggccaagaccaaggcccgctctgctggccacgtgcccgcctcgctgtccccgctcggctccnaggaccaagcggaagaggtggcggcgccggagcgggcgctcgtcgacgacgacgtggactcgga

SEQ ID NO: 269665 - DNA, 1417 bp, Zea mays
gccgcctcaccagcttgccaaatctctaaccctaggtgcagcggcggagatggcccccaagcgctcggctccacctccgccgcctccgcccccggctgcctcctccgaggagaccgcctctggttcgggctccgaggaggaggaggaggaggaggaggaggaggaggaggtgatttggagaccgcccactcaccgcctcccgtcgctcccaagagcgttgctccgctgccgcagaaggtccaggaacccgaagcgtccgacgaggatgagtatgacgatgaagatgacgagccgcagaaggtccaggaacccgaagcgtccgatgaggatgaagacgacgaagaggaggatatcgaagaggacgagaaggccaaccacgtggtcccttcttccgccaccaagaacccgcctccgccgccgcagactggcgaggattccgaggcttccgacgaagaagaggatagggaggcggacgacgagatgccgcagacgaagcccgctccaaatcaagaggtggaggctaagggtgcaaagcggccgagcgcgccgttccagcgcacctggtcgattgacgacgacttccgcatcctggaggccctcgctgcgcaacgcctggagcacggcgcgctgcctcaaacggacgtgctggccgacgccctcgctggcaagctcgacaatagtggctgcagcctctccgatctcaagaggaaggtgaggagtttgcagagccggtacgccaaagcggtcaagaaaggcgcgccaccgagcaaggatcaggatcgccgtctcttcgacctctgcaagaacgtctggccttctgttagcaatgccaagcctgttaccaaggcggttaccaaggcgtcggctaacggtggtgctgggagggagcctgacgagatgtgtgagctgtacccataccttgcggaggaggtgagggcgcttcagagggcacacccaggcttgttcaagcgggagtttgggatgatcgaagacagcaaggcccgtacactggacgagaggatcaagaagcagaggcgtgcactgatgaacctacatcttcgtcgccacgacctgaccaaggaagtgaccaggacgctcatggacctggctgagtgatgcagtggactgagctgagtatcatctaagaattctattttatggtatttaagtgcactgatgatcgattaccagcaaatgttgtatgacctactcaagcatggtaggtgaatcttgattttgttatctatctggtgtcgagtttttagttgttcatggtgtcagacatgttgcagcgtcagtgttaagtcaggaagtgcctgagtatgcacctgttcagttattatgttttgatatggtttctcaatttcttaggattactctgtagtctgaaaaaacaggatccgacttcttactaaag

SEQ ID NO: 269666 - DNA, 734 bp, Zea mays
ccggattcccggtcgaccacgccttcgggggccccttggccggccttcttggcctagcccttggttggcaagctggccattaggggttgcagcctttccgatctcaagaggaaggtgaggagtttgcagagccggtacgccaaagcggtcaagaaaggcgcgccaccgagcaaggatcaggatcgccgtctcttcgacctctgcaagaacgtctggccttctgttagcaatgccaaggcggttaccaaggctgttaccaaggcgtcggctaacggtggtgctgggagggagcctgacgagatgtgtgagctgtacccataccttgcggaggaggtgagggcgcttcagagggcacgcccgggcttgttcaagcgggagtttgggatgatcgaagacagcaaggcccgtgcactggacgagaggatcaagaagcagaggcgtgcactgatgaacctacatcttggtcgccacgccctgaccaagaaagtgaccaggacgctcatggacctggctgagtgatgcagtggactgagctgagtatcatctaagaattctattttatggtatttaagtgcactgatgatcgattaccagcaaatgttgtatgccccactcaagcatggtaggtgacccttgattttgttatctatctggtgtcgagtttttagttaaaaaaaaaaaaaaaaaaaaaaaaaaaaaagggcggccgccggggaattcggacggtactgcag

SEQ ID NO: 269667 - DNA, 358 bp, Zea mays
cggactcgtgtgcggacgcgtgggcgccaaactttcccctcggcctccgcccagtcccgcacttccaccaccgcacctcgcagatgccccagtaggctccaaaaatccaaagccgtcccttcccaaccctcccttcgatccctggggcggcggccgggaccatgacgaccggatccaacggcgacggaggcggcgcggggtcctggtacccgcagcgccgcccgcactacgggtacggcggggggtccgcctccttccgcggctgctgctgctgcctcttcctgctgctcaccttcctggcgctccttgctctggccgtcgcgctcgtcgtcgtgctcgtggtgaagccccgcaaacc

SEQ ID NO: 269668 - DNA, 679 bp, Zea mays
ctacgaccgcgcagagcaggccctcccggcgcgggacgaggtccgcaccctcttcatcgctggcctccccgccgacgccaagccgcgcgaagtctacaacctcttccgcgatttccccggatacgtctcctcccacctccgcacgggcaaatcctctcaggcgtatgcgtttgctgtgtttgcagatcaacagtctgcactagctgccttgagtgccacaaatggaatggtatttgatcttgagaaaaattgttctcttcatgtagatctcgcaaaatccaattccagatcaaagcgcttgagatcagatgatacttcaccttattctcctgaaaaaagaaacaggaaaccaaggggatttcctgattcaggtgctggaagcaatatttacatatctggaatgggtagtacttcacacagcttgagtggttatccttctgcacaaagttacacaagccttgagtctagtgcttctctcagcaaggacccatccacatttgcccctcaaaataatcctccatgccctactctttttgttgcgaacctggctccagcttgttcagagcaacagctgatagatgttttctcaagttgtgcgggatttgtgaaactcaagatgcaaaacaagcttggagctccagttgcatttgttgatttcaaggatgcaatcagttcaact

SEQ ID NO: 269669 - DNA, 306 bp, Zea mays
accctactaaatgttatatcagtaacttcatatcctcaatgaagtgcctccttaactcacatagctgaaaattcttacaaagcactcatcttgcacatctttggcacactttgcgccctatcaggtgctggaagcaatatttacatatctggaatgggtagtacttcacacagcttgagtggtcatccttctgcacaaagttacacaagccttgagtctagtgcttctctcagcagggacccatccacatttgcccctcaaaataatcctccatgccctactctttttgttgcgaacctggctcca

SEQ ID NO: 269670 - DNA, 468 bp, Zea mays
tgaagcgtactaacaaaaagcgcccgattcgcctcgcaaaatcgccgccgccatcacctacctactcacagaagttccgccttcctttcctccggcgcgcgccgcgcctgtcgccatggtgaagcgatggcttcccctcgaggccaaccccgacgtcatgaaccagttcatgtggggactgggggtccccgaggacgtggggttctgcgacgtgtacggcctcgatgacgagttgctcgccatggtgccccagccggtgctcgcggtcctacttctctacccccaggaccggagcaaggagtcccaagcttcagctacctcgtcggtggagaccaaggagcccagcaagaacgtatatttcacaaagcaaactgttgggaatgcctgtggcacagttggtattattcatgcactggggaatgctacttccagaatcaagttaggtgaggggtcatatcttgatagatt

SEQ ID NO: 269671 - DNA, 1101 bp, Zea mays
gccgtgtgtgaaaggaacccatgcttggagcctgtggacatctggatgaatggtggtgcaacatgttcagggtttagtgcatctttgcattcattcggaccttatcgaatggagggctcctaagttcatatcaacgacagtccacgagtagccctgaacacttactcatggacaaagatggctagcctcctcttggtcgactcgccagcaggtgtgggctactcgtacgctgatcatgaagatgactacaccacagatgacacaagcagggtagcggacctgtatgactttctgtcaaagtggttcgctgaatacgcagaatttctgtcgaatcctttctacgtagctggatgctcgtacagtggagtgatagtacctgtacttgcacacgaaattataaagagaaatgaagaatccggtggggtcaagatcaacttcaagggatattcactatgtaatcccgctattgatgttgacatagagaacaatgcacatgttccatatgcatttcgaatgggtttgatttcagatgaattgtttcagagtttagttactacatgtaatggaaagtattggaataactccaatccatcatgccaagagaacatggagcaattttatactcaaatcataggtattaacatggagcatattctatgtccgccgtgtcgatacaagatggggataaccaatcaattcattgaatatgattctggtcaaatgtttgagagcctttcgaaaacctccaagcatggtttagaatgcaatgatcaagagttggcccttgagaaactctttgatacaagatcaggtagagaaaaattgcatgccaaaaaggttgaagtatcaggaccatggaagaggtgccccaagcgtgttctgtacacgagggatattctaacattgatagagtatcacttgaacataacatccaaaggatatagagtgtttatttacagtggagaccattccttgcttgttccttttacttcaactttggagtggctaaagaaactaaactacaaggaaatcgagaaatggcacccttggtacttggagaatcagattgctgggtactcaactatgttccagaacaatata

SEQ ID NO: 269672 - DNA, 1910 bp, Zea mays
  unsure (1)..(1910): unsure at all n locations
ttcactcgtccgcagaagcgtttccggcagcgaggtttcctcccatcgatctgtacgccctccccaccggtgggtcgcgcacctccaccaacctaccttcccgccccgcccgtcgccgtcgacgactcgccgtccgtttccgccctccaaaaccctactacctcttaccttccagccccgcgtcctccatggccaccaacggcagctctccgagggttcgggacacggagagcagtctggagaaggtgaagcggcagctgtcatcggggtctgggaggtacctgctgcaagggcccctgctcaagcgatctgagacgttacggaaatggaatgagcgttgggtcatattgggcccgacatcaggaaagatggaatacatactccggagaaatgaaactgtcattaaggggaccattctgtttgacgcctcgagcaccattactttatctcctgtgaactttcaagggatgccaaaatacgatggctgctgcttctacatcggaactcctcaaaagaaggattactttctttgcgctgaaactcctggtgctgcgaaagcttgggtatctacattacatgcaactcagttagtcttacgagctcataaagaggcagtaaattctttggctgggaatggctctccagctacattaggcacagttgctactgcagttgctaatgctaatgcaacagccatggaggctaccaaggagatagaagctgcactaaaggtttcaatgagggcagctcttgggttggatacaaataactccaacgagggccaacttgatgacctaacaatcatgaaggagaccctacgagtgaaagatgaggaattgcaacatttggctaaggatattcgttcccgagatgctacaataaaggaaatagcggacaaactaacagaaactgctgaggctgcagaagctgctgcttctgcagctcatacaatggatgaacagaggcagcttttgtgttcggagattgagcgactaaaacaagccttggaaagacaaatagaacaatcagtgctgaagcttagacagtccgaagagaaggttatcagcctgagcaaagagaaggagcagttgatgaaggaaagagatgctgcatttcaggaggctcatatgtggcgcattgaactagtaaaagccagggagcaagcagtgatacaggaagcaactattgcccgagcagaggagaaggctagagtttctgaagcagatgccgcagctcggatcaaggaagctgctgaaaagttgcatactgttgagaaagaaaaggaggagcttctagccctggttggtgttctccaatcacaagtcctgagagagcagagcagcacaaagcaagtatgcgaggagaggtctgaatcatgctcaggcgccgataattcacctctgttgacaaagcatgttgacgcatcagacgatgatgtggacaaagcctgcgtaagtgactctagatcggtcccggtttcgagcgatacactgaggtccagctggctgtggatggggtggacatccgtcctgttggcgatgcagagtggagtagcttccagcagccagaagcgctgatcgctgatgtccgggaggtctccccagaggcggacggcggcagcttggatattcctgtggtcaatcccccaccagtcagtgatcatatccagggaggcggcggcgcaacccatccctgaaggcctgaggttgctgctaccttccgagattggtgtggttgctgagaacccaatagatagggatgtctaaatctggagagaagtgccgttgagagtgtatgcggattgtatgtccattgtattcggagtataagcccgaataaaaagatcgcagctgtgtttggctgtgggattgtaaccaccttttagcgctaaaaaaaaaaaaantgtaagg

SEQ ID NO: 269673 - DNA, 2059 bp, Zea mays
gccacatatggtgagcattgggggaccctattctagctatgttgttgctacagtcggacctggtggattgcctcaatcaacttatggtattgatatgatctatccaaatgccactgttaatccagtgactgagagaagagatgtcccgcctgaagtttatcacaaggaagctccacatgaagtcgtagctcctccaaacacagttcagttgccgacagcagcattggcaaaccatgctacaaatgtggatcaagcagctgcacatgcactgccaccaagacctaagagggtagcaagcagagagaacatcagcccaaaggatccccacccacacaactctttgttgaactgcaaagggccagatctgaatattccagctgaggatgtttctctccagaaacagtcagatcacaaaggtgatgacatctctaacccagatttactgagtatggatgatgggttagctacatctaaagctcagtcatctgagcctcaacctcctctggtaaatgaaggagttggggcaattaccaataaagtagaaggtgaagtccaccccaacgaggtttccaagagcaggccagcagattggatttcaggatttccagcttcagatggacgtctgcagattataaagaacaatgaccttgaagagctccaagagcttggttctggaacttttggaactgtctatcatggtgaatggtgaggcactgatgttgcaatataaagaatcaatgatagatgttttgctgggaaaccatctgagcaagaaaagatgcggtatgacttctggaatgaagcatctaaacttgctgatctgcaccacccaaatgttgtccgcgttttatgggtgttgttcttgatggacctgggggatccattgccacagttacagaatatatggtcaatggttcacttaggacagctttgctaaagaatgccaaaaccctcgatcgacgcaagacattaattattgccatggatacagcctttggaatggaatacttgcatagcaaaaacattgtgcactttgacttgaaaagtgacaatttgcttgttaatttaagggaccctcagcgtccaatatgcaaggttggtgatcttgggctttcaaaagtgaagtgtcagaccctcatctctggaggtgtccgaggaacacttccatggatggccccagaacttctgaatggtagcagcagcttggtctcagaaaaggttgatgtattctcttttgggattgttctctgggaactgctaacaggagaagagccatatgcagatttacattatggtgttataataggtggcattgtgagcaacactctacggccgccagtgcccgactcctgcgaccccgagtggaggtcactgatggagcaatgctggtcaacagaaccatctgagcggccaaacttcacggaggttgcgaataggctgcgctccatggcggcatcccagaaggtacaacaacactaagggaccaccaccggcacgcagaagttgtaccagggcagcagtcagtcaaacttgcaggttacatccatgggccgccaattcacgccatccgccatatatgcctaggatctgttcataacccttcatttgttcgtatattgtaatcaaaagttacccgccgtgtgtctacaacgtgtcgtcgcaatggacgcagcaggtgcctgcctattcattcattcataccgttttggtcgtcgagaggtgcgttcaataagttactagtccagtgtccgttataggggagtccggtagtgtccgttataggggagtccggtattattattattattgtttcatcttcttcttcgccctttctctgggtaataattgggttacttggaaactgttgatcagtgggtcagttagaatgtgaactggttgttgctgggtaagtatgtggtttgttggtatattgagtctggggacagagagtgaggtcctgatctgcttgtaacagtacctgctttggttttgtgattgctatatactgaaacccaaatccctctgttgctattctaaaaaaaaaaaaacccaccgtccg

SEQ ID NO: 269674 - DNA, 993 bp, Zea mays
  unsure (1)..(993): unsure at all n locations
tttattattggtgagatttcagtatctggtgcaacctacatatcgatggagtttgttggatcaactgtagaaagtctaaccatggaagaacgtatgacactatgcaacatggttgttgaagctggtggaaagaacggtgtcgtgcctgctgatgaaactacatttaaataccttgagggtaggacatcagttgattatcaacctgtctacagtgatgctgaggccagattttttagtgactaccggtttgatgtatcgaaactggagccagtagttgccaagccacattcgcctgacaaccgtgccctagcaagagaatgcaaagatgtcaagatcgaccgagtctatattggttcctgcactggtggcaagactgaggacttccttgctgccgcaaaggtgttcttagcctcgggaaagaaggttaaagttcccacattccttgtccctgccacacaaaaggtgtggatggacgtatatagccttcctgtaccaggatctggcggcaaaacttgcgcccagatattcgaggaggctggttgtgatacaccagcaagtcctaattgcggcgcttgttctgggtggccctcgcgatacgtatgcacggatgaatgaacctacggtctgcgtgtccaccacgaacaggaacttcccgggcaggatggggcacaaggaagggcagatctacctggcgtccccctacaccgctgcagcctcggccctgacggggtacgtcacggaccccagggacttcctcatgtgaacgatcttgaaacagccacagagtgcctgcactgctgtttttcatgttgaaccttagttaaggcgtgtgcccttcgttgagaaataactcccatgtcgggaggctgccattgccatggtatgtttttgccgtatatttattacagtgactgccgataacgtagttgagcgttacagggganatacattcattcttccagtatcgatgcagtcactagactccgttctacc

SEQ ID NO: 269675 - DNA, 506 bp, Zea mays
ggcaaaacttgctcccagatatttgaggaggctggttgtgacacaccagggagtgctaattgtggtgcttgtttgggtggccctcgtgatacatatgcacggatgaatgaacctactgtctgcgtgtccaccacgaacaggaactttccgggcaggatggggcacaaggaagggcaaatctacctggcgtctccctacactgcggctgcctcagccctgacggggtacgttacggacccaagggacttcctcatgtaacgtcttgaaccaacaacagatttcatgatgtaacagagtggctgtactgctgtttttcgtgctgaacttttgtctaggcatgtccttcgttgagaaataagctgcactagaataagcagcgacttctcgggagccatagcagatgtgacctcacatttatttgtgcaactttttttgtttttggctctgaagtcatgcaaggaaacaaaaaaaaaataataaataaaaaaataaaaagggcggccgct

SEQ ID NO: 269676 - DNA, 532 bp, Zea mays
tctaccgcatccttccacaaaaccctttcttccttccgccgcttccgccgccgccgcgaccggctaaacccttcatttcgccgcagcgacgaccacccgccgcgggccaactatggcgcccgttgcggctcccatacgcgacctgcttacctctttcagccccggcgcggacttcctcgcgctctcttctggggacggccgcatcaaggtatgggacgccgtgcggggccggctgcagaccgagtttgctgacatccctgcagtggaggcggtcgcggtcgctgagtcgaagcgcggccacctcgccctcgattacacctgcatgaagtgggtacaactttccagtaagaagaagaggaaggctgggagctcattgattgtgcttggtacaggcaagtggagatgtgcttgcacttgatgttgccgcgggacattggaagtggaaggtcagcgattgccaccctgggggtgtgacagctgtagaatactcgaaacatgggcggaatgtgtacactgcaggtgctgatggcat

SEQ ID NO: 269677 - DNA, 932 bp, Zea mays
atcacaatgtgacctccaaagtttcctggggtgatggtaaggtagcgagcaaccgaaaaggttgaggatcctctgcttgcatggtttccgccagaacgcatccagttttaagggaagaacgtcagcactttccaagaagctgaagcatatcactgagcttgtctttgtcgacgcgcctcatgagctttcctttgtatatcaaccaatccggggacactgctccgacaaaccctcacctctgtctgttacaccgaaacggaaattcgcatggctcattgctccaaactcccactgcaaccctgaacaaaactggagggctgcagatgtgccgtttgaccctcttcagtaccagcaacaaaccgaaggcttcgaggaatcatacacctatcttgaaaatgcaatctctcacatggggaaatttgatggaatcctgggcttctctcaaggcgctgccatggctgccttattctgcaggcagcagcagaagatgtgccgcttttccaaagttcaggtttgggatgttctgctctggatatccagcacctgtgggcgattttggcaacgaaccaatcaagctcccctcgctccattgtttcggcaatggggatggtcatgataggcagatagcgaacagggcaagcgctgaacttgctggtttgttcgagcaggattgctgctccgttgttgagcatgatatgggccacataatccccacccggtcgccctacatcgatcggataaaggattttctttccagtttcctgtgaaatgttttgaactgactattgcgttgtaagttggtatacacaagttgggttctgaatggcattgactgtgtttgctgatcattagtattttgcgtctgattgtgctaaacaaaatgggattctcctctctcgccgactcttagaggactacttgtgccacgacat

SEQ ID NO: 269678 - DNA, 595 bp, Zea mays
  unsure (1)..(595): unsure at all n locations
ctgttagcccgcgattgctcccaaacccagaaactgaagactgttgcagccgcgactcctgaatcccgacaactccagcgcctccgctggtccccactgcttcggccatggcggtgcgagccacggtctcccgcttcccggccacgccggaggcgctggagtcgtgcgccgtcaagtggggcgtcgccgtgacgcccttcgccgccgcggacgagcacggccaacccccgaccaccggcgccggcggggaccgcgtcccacgctgcgagcactgctgggcgtacttgagcagccactgcgatctggagcgctggggctggacctgcgcgctctgtggcacgctcaacggattcgacgacgaggccgagcgacggttccagcgtcccgacgtgtgccccgagctcaagtcctctttcgtagacctcgaaatcctagtggatgaggcagagggcggaggagacggtgtgcaggcgctgcctgtctatgtggccgcagtggatctcgcatgttctgaagagttcctggaactcgtcaagagtgcgcttcttgcggccctagaagctctngtccgggctccctatttgggctatgacat

SEQ ID NO: 269679 - DNA, 1671 bp, Zea mays
ggtcgagcacgcgtccggtttcaagatgatatcatcaaaggatttgtatacaatacaaattactcaagtccagaatgtccgtgctggtgacgttgtcacatttacacttctgagcaggtcaagaaattcgctcactccttccatcaaaagctcctccagtgaaagttctacaacagatgaagagcattataatgttttctcaaagtttattttgacatctgatgtggagttgtctgttcgagatgcaaaattggatcctagtaattggttgcaaatggctgacttaggccttgttgatggacttggggaaacttccatttgtgtctgctgctttggagcaactgggagagaagacgaaatattggattgattacagaaattatggtggtagtcctccatcaaaagatagcttctctcctggatctagtttcaagtctaggaactcttttgatgtgaatacttctcagcagatgagtgagcacaagatctctctttcagatagagatatggtcaatggtatttcagaactctccatgtctcccgagttgagtaaaacctctggtaaaggaacaatatctaaagtaaatgagaaatgtaccacaaccattgattcaaatgaacatgacccatacacattttaccaggtgtcagatggccaacacctaattctccatccactaaacatgagatgtcttctaaaccattttggaggttctgatatgcttccacctagaataactgccaaaatattggagctggaaactgtaacacagtctgaggctataaggaagcgctatcggtttttgagtcacttctcattaacaactacatttcagttctgtgaaattgacttgagtgatgtagtgtctcctaactcactggctccattcttggatgaaatcaagaagcgtgagaaacaaagaaaacgagccgccaagaaggaagaaagtgagagagtgaaggcggaagttgctgctgctgttcaggcatcagctatgcgatttgagtatacaaattcctctcaaagtcacaacgatgtcatgttctctctggatgactttgaagccctgggaaacaacgctgggccgtccaccagtccaccagcgagtgaaaggaagcttttctctgatgtaacacgcttgggttttgcatctgctcaagactcacctcccttaagactcggaactggggatgcaaatggccaaagtgaaacctcgagagaccaagggccgttagcgacacccgcattatcatttgccagcatcatatcttccagtagagccgtgactgcagctgacaactcggagatgcagaaagcaaatggcgctgggaagaagggtaagaaagcaactagagtgcttttgtcgactggtggtggccgtcgatactgaaggactatagatgcattggaacgaacagtttggttgtttccatataatgccgtagctcaatgcaatgtgcatagtacataacctggctgggatacgcttgtaagttgtaacactgagcggcagtcgtgtgtgttttgcctttcttgtgggtgtgcttgcgttgtgcccacatcctgtcccttgcatgatctggaaacgagcgcagagaagcgtgtaccataactaataaaggtggcgcaactctttagttgtggaacgccgctagtctgcccggagtgtc

SEQ ID NO: 269680 - DNA, 1026 bp, Zea mays
accgcgcccgcgcgcacaaccgcaaggccggcctcgactccccgcgctgcgaggtcgtctgcggcaacttcctctccatgccgttcccggacgcctccttcgacggcgcctactccatcgaggccacctgccacgcgcccaggctgcaggacgtgtacggcgaggtctaccgcgtgctcaagccggggggactctacgtctcctacgagtgggtcaccaccccgctgtaccgcgccgaggacccggaccacgtcgagtgcatccacggcatcgagcgcggcgacgcgctcccggggctccgccgccaggacgagatcgcgtccatcgccaaggaggccggcttcgaggtgctcaaggagcaggacctggcgctgccccccgcgctgccctggtggacgcgcctcaagatgggccgcatcgcctactggcgcaactccctcgtcgtccgcgtgctcaccatgctccgggtcgcgcccaagggcgtctccgaggtgcacgagatgctctacgagaccgcgcagcacctcacccgcggcggcgagaccggcatcttcacgcccatgcacatggtgctcctccgcaagcccgccgccgccgcctccaccgaggaggccaactagtgtaagactacacaccgccaccaatcagttactactcgcccaccgcaagggggagaaaatggggtggagggaggaaaaagatgcaagcagcagcagcaccagaggtaagaagagcaggctaatcggcgacttgaagaagttacaaattgatctattagagaagaagatactactaggaacgatgcttctctccgtttactcttttccctgttcgtagctttgagttttaatttttgttttttggtggacggattgttccggggaggtcgaggttgggatctaaatttattttcaatcggtggagatccatctatctatcagcagcagccatatttaaactcccagaaaaatctaaaaaaaaaaaaaaaaaaaaagagggcggccgcaccggcaattccgtaccggc

SEQ ID NO: 269681 - DNA, 643 bp, Zea mays
tgcacatggtgctcctccgcaagcccgccgccgccgcctccaccgaggaggccaactagtgtaagactacacaccgccaccaatcagttactactcgcccaccgcaagggggagaaaatggggagggaggaaaaagatgcaagcagcagcagcaccagaggtaagaagagcaggctaatcggcgacttgaagaagttacaaattgatctattagagaagaagatactactaggaacgatgcttctctccgtttactcttttccctgttcgtagctttgagttttaatttttgttttttggtggacggattgttccggggaggtcgaggttgggatctaaatttattttcaatcggtggagtatctatcatcatcagcagcagcagccatgttttctctccaacaatacattggaattgaattcctgacgggcagattggatccttagaaccccaattttattctaataatattaatttagacaaaggtcttttaaactaacatggttttatctataatatatttaggtactattattattggagatatttatgtgatacatttttactgtagagaaataggcttagggcatgtttgtttaccccaatggattatataatctggattatttttggaaggatata

SEQ ID NO: 269682 - DNA, 665 bp, Zea mays
ctacgagcgattcggcctgactcggcttctctttttcggcggcgacggctggtcgagttgcggcgctctgttcagtgttcattgtgcccttcgccacgacgattatcctccagtagtaagtcaccatgtcttcgtccatgcaatcttcataccttcctgctaccactgagtccgtagccaaggctcaggaggccaaggacgcttctgagtccatctcaatcctctaccgcgtgcttgaggatccctcttcatctgcggatgcactgagagtaaaagagcttgccatcacgaatctcacaaactacctcacaaaagagaacagagctgaagacctcaggaaccttttgacccagctcaggcccttttttgcattgatccccaaggcgaagactgcgaagattgtgcgtggcatcattgatgccgttgccaaggtgcctggaacatctcagcttcagatctcactgtgcaaggagatggtagaatggacccgtgcagagaagcgaaccttcctcaggcagcgtgtggaagcaaggctggcagcccttctgttggagaatcaggagtatactgaggctcttacactcctttctggactcatcaaggaagttaggaggctggatgacaagttgcttcttgtggacatcgaccttttggagagcaagctt

SEQ ID NO: 269683 - DNA, 408 bp, Zea mays
cttttactcctgccattaagcacacagcaggattgaccttatgcggttgcaagcctgttcctaacatgggccagattgcctctgaacataactaccagatcactggtggtatggatagcgatcaaagaatcatcttttcagaacagatccggggtgcagtagaacaatcagctgcacaagctaaaagtgcaagcattgactcagtggaggcagttcagcacaaggagggcatatggagccatctatctacaatctcaaggaatagagcacctccaaaagtggaagagaaacttacctaagttgcacctgctgatgaagcagcaaattttgttgcaaacgtagatgcagaagctgtcaagatggcgtcagatgctgcattgcatgcaaaaatgatggcagatgaagctc

SEQ ID NO: 269684 - DNA, 574 bp, Zea mays
tttctactaattgcacttgatatgggtgcattgattgctggtgcaaaatatcgtggagagttcgaggatagactcaaggctgttctcaaagaagttacagattctgatgggcagaccgttcttttcattgatgagattcacacagttgtcggagcaggtgccacaaatggtgcaatggatgctggtaatcttctcaaaccaatgcttgggagaggagagctacggtgcattggtgcaacaacccttgatgaataccgcaaatatattgagaaagatccagcactggagcggcgcttccaacaagtttttgttgatcagccttcagttgaagatacaatttcaatactccgagggctaagagagagatatgagttgcaccatggtgtacgaatatctgacagtgcccttgtagctgcagctgttctttcagaccgctatatcagtggacgattcttgcctgacaaagcaattgatctggttgatgaatcagctgccaagttaaaaatggagataacatcgaaacctactgctctggacgagattgatcgtgctgtcttgaagcttgagatggagc

SEQ ID NO: 269685 - DNA, 556 bp, Zea mays
ccctttaaaacgcacaactccataaaccctagcggacaaagccacttgctcacaccagaaccctctccgcaatctccccgcctcgctcccgcctccacccaatggcgtctctccctaacggtggcggcgccgccgcctctggctcatgcggcgcgcgccctgtggacaaggaggtggacttcgccaactacttctgcacgtacgcctacctttaccaccagaaggagatgctctgcgaccgcgtccgcatggacgcgtaccactccgccgtcttccgcaacgcgccccacttccagggcaaggtggtccttgacgtgggcaccgggagcggcatccttgctatctggagcgcgcaggccggggccaggaaggtgtacgccgtcgaggcgactaacatggcggagcacgcgcgcgagcttgctcgcgccaacggcgtcacggatatcgttgaggtgatacagggcaccgtggaagacgttgaccttccggagaaagttgatgtcattatatcagagtggatgggctactttcttttgagagagtccatgtttgattc

SEQ ID NO: 269686 - DNA, 1376 bp, Zea mays
tgtcctccacgcgtccgcacacacaaaaaccccaatgcgagcgcccctggcttgtcggcgtcgcctccttcagccaaaaccctagcttgcatacgcgcccgaacaaagcttcgtctgcgaggggcgtcctcctgccgccagaagctttcaggagcatcagcgatggtgtggttccaatgcgaggactgtggcgagaacctcaagaagcccaaacttgccggccacttccgctcctgctccgcgtacaagctgtcatgcatcgattgcggcgagttattcagccacgacaccgtgcaggggcacacccagtgcatctccgaggccgagaagtacggtcctaagggacagaccaaaccatccaatggtgcacagggtaaggcagataagccaaagccaaatgcagatgtcgatatcaatgttgggctgtcgacacggcctccttggttctgtagcctatgcaagaccactaccacaagtaagcaaactctcttactacatgctgatgggaagaagcatagggcaaaggcgaaagccttccatgtgtctcagaaacaaaaagatggtgcagaacaaactccagatgtgaaggaagctggagttgtacccacaaaagaatctgctcaagtaaatggtggcgtgagtggtgatcatgaaagacatgaagataaagatgctgggaaaaggaaacgaatggatgacatgaccatagagccaggtaacacaaaaagacagttgacacagtctggagatgagaagtcagacaacaaagcgaagagtaaggccgatgaactagcaagtggtaccgactgcaaaagtgttcaaaacaaaagatcaaatggaagaagattattactaaaacattgaaggcgaacgcagatggagttatgaagctaaagaagctacaaaagctagtctccaaggagcttcaggaatgtggtgtctccaaagacaaggaggagctccgtgctaccttgatggataaaatagcttcaagttccagattttatgttgatggcaagaatgttagactggtggccaagaatgaagaagaatcttagaaagaggttgtcagtcatttttttggcattgttgctggtttcattctttggtgtcaactttcagatggcttatagccaagtgttggttaaattgagtccatgaaccatcaattatatccatgacgtgtagacggtatgggaatttagcatctgaattttctcgacaaccgttcaaaagtgaaatgtttactctttatgctgtcaagcaatggcaatgatggttgatagtggcggcgtagtcgcaggggagagatgagagatgatacaaataatgttcattggatttgagtaagggagaagatgttatgtagtgctctg

SEQ ID NO: 269687 - DNA, 1234 bp, Zea mays
cgatgacgataacatttgccaaacagagtatgtatgcgctgaatcagaattctatgatttttcaagaataagatttctccaaaagttttcatctgggcaaatctgggctctctatagtgatatagataaattccccaattactatgcattcatacagaaagtcgatcttaaaaatggtacagtacaagttagatggctggatgtctgtcctcgaggagaagtggagaaaagattgtcccaagaagaacggaccattggcattggaacctttaggcttggctatatcttcgatatgatgacttacactggtacagatcccttttctcatcctgttaaggccagagctactggcagaaaaggtgaatatgaaatacttcctcgtcatggtgagatatgggcggtttacaaaaactgggaggctgtatggactgcacaggattttgaaaaatgtgagtatgaactggtggagatacttggccatactgattcctccatacaagttcagcttctaaggaaggtcgatggttataagatggtatttatgtcatacagagcagagggttctgtgatgacaataaggaacgatgagtaccccaagttctctcaccagattccttgctttcgtctcacacatgaaaaaggtggcaagcttcgaggctatttggagcttgaccccttatcagtaccagaggaatttctcgactgattccatctgagataaactttatcaaccacaaatctggaaccttcttgtgatgaagtttctgtaactgaggctcagttaatgttaaggtcgacaggtcaacattgttcaaatgacactgacataagatgtctggatttcagcattcatagcactaacgttcttaaggctctgttcgtttagtccggattggaggccagaaccattccaactcatcaagctaatacaaatttgtgaactattctaatccggaaccaatccagtaaagtattccggaagaaccgaacgggcactaaaggtggactaccaatctgcacaatgaaggcattgactgttggactctttgctgggtggctgtcctgcagctgtaattcacaatccgagtaaattgtttgtagttagcttcagctgtatctggggtttatggtgtaaaaactgccacttctcttgtagtgtactctggtagtgctgtatttgagctgtggggtgccatcctgattaattatcagaagagttctatttgccaccctt

SEQ ID NO: 269688 - DNA, 1548 bp, Zea mays
ttgtggaaatccatcccttcaaccttgtgggctgtcaacgctctccagtcctttagtgactgctcgagcactaagtgaggcagacattattccaccagctgataatacagcccctgatgacattggtaacggtggcggattcagcatactagagattgcctccataacttcagcatcagcaattgttgcagttctcttggctctggtcatcctttatatttacacacgaaaatgtgcatcaagaccatcaaggcgttctctaagaagggaagtaactgtttttgttgatattggtgctcccttgacatatgaggctgttttacgtgccagtggaagcttcaatgcaagtaattgcatcggaagtggtggcttcggagcaacgtacaaagctgaggtagcaccaggaaaattggtggcaataaagagacttgctattggaaggttccaaggcattcagcaattccaagcagaggtcaaaacacttgggaggtgtcgccattccaatcttgtaacactcataggataccatctcagcgattcagagatgtttctaatatataattttctgcctggtggcaatttagaaagattcatacaagaaaggactaagagaccaattgattggagaatgcttcataaaattgctctagatgttgcgcgtgcacttgcatatcttcatgacaattgtgtcccccgcatcttacacagggatgtcaaaccaagtaacatcttgcttgataatgattacactgcctacctttctgattttggattagcaaggctgcttggaaattcagaaacacatgcaaccactggtgtggcaggtacttttggatatgtagctccagagtatgcgatgacatgccgcgtttctgataaggcggatgtgtatagttatggagttgtacttcttgaactcatttcagacaaaaaggcactggatccttctttctctccttacgggaatggattcaacatagttgcctgggcttgcatgcttttacaaaagggtcgagctcgtgaattctttatagaagggctgtgggatgtggccccacatgacgaccttgttgagattctacacctgggcatcaagtgtacggttgattctctttcttctaggcccacaatgaagcacgttgctcggcgacttaaggaactcagaccaccgtcttactaggaatagcaagcagagactggcttgcttctgcataatgagaccaagactgctggctgtttgggtgactgcaacagccagtaatgttccaaataaactggtggcaactggcaagcaattcaaatgtcatttctcaagggatcctcaagcaggacattcatggtatttaatcatttggtcgtcatggtcactgtatggaacgccgatatcgcttcaatgccactgcaagcaagcatcaaggatgcctgaggaagttcttctatgcctgccaaatctgatgactggattaggctctgttcgtttagtccagattggaggccggaaccattccaactcatcaagctaatacaaatttgcgaactattccaatc

SEQ ID NO: 269689 - DNA, 1796 bp, Zea mays
cttacgcgtgggctcctttgttgacaggcaaggaaaccatatcgagatggggctgcatgtgttcttcgggtgctacagcaatctcttccgcctcatgaagaaggttggcgctgataataatctgctggtgaaggaacatacccatacttttgtaaataaagggggcacgattggtgaacttgattttcggttcccggtgggagctccgttacatggcattcaagcattcctaagaactaatcagctcaaggtttatgataaagcaagaaatgcagttgctcttgcccttagtccagttgttcgggctctggttgatcctgatggtgcattgcagcaagtgcgggacttggatgatgtaagtttcagtgattggttcatgtccaaagggggtactcgggagagtatcacaagaatgtgggatcctgttgcttacgctttgggtttcattgactgtgataatatcagtgcacgttgcatgcttactattttcaccttgtttgccacaaagacagaggcatccctgttacgcatgctaaagggttcacctgatgtttacttaagtggccccatacagaagtatataacagacaggggtggtaggtttcacttaaggtggggatgcagagaggttctctatgagaaatcacctgatggagagacctatgttaagggccttctcctcaccaaggctacaagtagagagataatcaaagctgatgcatacgtcgcagcctgtgatgttccgggtatcaaaagattacttccatcagaatggagggaatgggaaatgtttgacaatatctacaagttagatggtgtccctgttgtcactgtccagctccgctacaacggatgggtcactgaacttcaagatttggagacatcaagacaactgcaaagggcggttgggttggataacctgttgtacacggcggatgcagacttttcctgtttttcggaccttgctctctcatctcctgctgattactacattgaagggcaaggttccctgatccaagctgtgctgactcctggagatccatacatgccattgccaaacgaggagatcattagtaaggttcaaaagcaggttgtagaactgttcccatcttcccggggcttggaagttacatggtccagtgtggtaaagatcggacaatcgctgtaccgtgaggctcctggaaacgacccattcaggcctgatcagaagacgcccgttaaaaacttcttcctctctggatcttacacgaaacaggactacattgacagcatggaaggagcaactctctccggcaggcgaacgtcggcctacatctgcggtgccggggaggagctgctggccctccgaaagaagctactcatcgacgacggcgagaaggcgctggggaacgttcaagtcctgcaggctagctgaacaacccctcctgcactgcagagaagcttggatctttccaaccacacatacatgctggaatggacaaaccaaccaaccattggcttttctcgcttcagggtgctggcgattcccgcagcgacctcctgtgtatcgtatccaatttgagcattagatctgccccccctgcaggcgtttctttcctatccctgatccgagaagcagggtgtagtctaggtggctggcataccggattacatcaggcagtgtgtaagttcagccggaactcgattggtaattgggatggatgattgatgatatatatatagcacacactgttcttgcgtcttgcaagaaaatatagcaagcgatgatccggcgacacttgctgggagactgtacc

SEQ ID NO: 269690 - DNA, 374 bp, Zea mays
tttgttcttccttcccgaaccctcgcgccgcgaccgccttcgtctagcattttcctacacccaatctgatctgaccaagccctctgaacaccaccgcccatcctcctcctcctccgccgccgccgcccaagatgggcttcgacgtgggcctcgtcccctacaaccccgacgggtggggtccacctgaagttgccgccgcgccgccttccctcggtggtggctcctcgtctgtccccttcgctcccttctcccgctccgacaagctgggccgcatcgccgactggacgcgcaacccgccgggccccggggctttcgccgcagctcgcgacgccgttttcgatttagcggggctcgaggactccatcgggctcgcg

SEQ ID NO: 269691 - DNA, 379 bp, Zea mays
gtcccgtactctctgccccggcctataagatctcgttcccggccgtctgccgctcgggcctcacccgtcgccgtcgtccccctcccggtcccggccttccaaatcgtcagcgcagggcgcaggcgcgcagccgcacacgcttgcccgcgccgcccagcagctcccccatagccgtcgcgccgtccccgccctccaagattctgattggtgttttgctggaaccatgtccactccgtgcagccctatgagtatggaggaagacgaagagatccaagagctcgatgccgaggagcagcaggacggtgagcagccgcagcacggtgatgggctgcaacatgggtccacagcttaagcaagggcacaacaaaccggaaagaaa

SEQ ID NO: 269692 - DNA, 671 bp, Zea mays
ctacgcgtccgaataaaccccgcctcccttctgtcatcccgtacgtctcgacctcgcagccgcaaacgcgaaaccctagcctcgagctctatctccggccacagctggtcaggttagcgacgaaggatgagcaggcgctggagccgcacgatctacgtcgggaacctccccggcgacatccgggagagggaggtggaggatctgttctacaagtatggtaaaattgttgacattgacctgaaggtccccccaagaccacctggttatgcttttgttgagtttgaagatcctcgtgatgctgaggaggcaattgctggacgggatggatacaactttgatggacaccgtctaagagtggaggctgctcatggtggtagaggtaatgcttcctcgcatgatcgttcaagtggctttggtggcggtggtggagcacgtcgtggtgtgtcgagacactcagagtatcgtgttcttgtcactggactgccttcttctgcatcatggcaggatttaaaggatcatatgcggaaggctggtgatgtttgtttctctgaagtgtatcgcgaaggcggcggcaccgtaggaattgtggactacacaaattatgatgatatgaaatatgctataaagaagctggatgatactgaattcacgaacgcctttgggcgaaccta

SEQ ID NO: 269693 - DNA, 556 bp, Zea mays
ctcactcagtccacaccaccaggcacacggggctcaagacagcacagccaccacccaccgagctctatcgccggaacagcgccgttcatctagcagaggtacgagaccaatgagaccttccacggctggcgctctggccgccgcggccctcgtcgcgacgctcgcgctgagcgtcggcgccaccccggagacgacgtgcgcggcggcggcggcccacgaccggcgcgtggactacggcttctgcgtgtcgaggctgagccaccaccacgacagccccgacgcggacacctggggcctggccaaggtggccgccgacgtgggcgtcgccaccgccggggacgccgtctacgacatcaaggccctgctggccaataagccgccggccgacgcccaggcgcgggcggcgctggagcagtgccagaggctgtacgacgcggcggagatggcgttcgcggaggcgtacgacgggatcaaccgccgcgactacgcggcgggcaagggcaaggccacggaggcggctgcgctggcccgccggtgcgacgacgccttcgcgcgg

SEQ ID NO: 269694 - DNA, 467 bp, Zea mays
tccaagggtactcgagctcgagctacactcggcgtttacggcgccggcgatcacccaccgcgtcctccgccttgtcctctttcctcaacctaacccccatccagcgaggtttctccgctctcatatagaatcagatatgaagagggcggcgccgtctcaggagcccctcgacgtttcttccggggactcctcgggctcggattccgatcaattaggcggcaaggataagggcgggagcgcctctaaagctgctgcaggggctgaagatgtgaagagggtggtgctgcataaagaatcccaggacgtatcttctgatgatgacctgagctcggattctgatgatgatgctgggaaggggaatgcttggaatgcctttgggctgcccaattcctccaaagctgcttccaccgcagaaggagctctgatcaggaaggccgaaatgtttcaacaatacatgaagcgcattc

SEQ ID NO: 269695 - DNA, 519 bp, Zea mays
ccctctcgtccgcccacgcgtccgcccacgcgtgggatcttgctcgcgcccgacagccacgtcctgtactccaaccgctcggcggcgtacgcgtcgctctggcgctacgcggaggcgctagatgacgccaagcggaccgtggcgctgaagccggactgggccaagggctacgcccgcctcggcgccgcgcaccttggcctcggtgacgcgcccaaggccgtcgaggcctacgagaaagggcttgcgctcgagccgtccaatgaggcgctcaaatccggcctcgcacaggcgcgccagtccgcatcggcgccgagacgtccggtgggctccggggctgacgccgttggcaagatgttccagggccctgagctatggagcaaggtcgcggccgatcccaccacgcgtggctacctcgaccagccggactttgtgcagaagctgcgggaggtgcagcgaaacctccgcagactgaacagctacctttttgacccacgaatggttcaagtgctcaccctcatg

SEQ ID NO: 269696 - DNA, 489 bp, Zea mays
ggttcgccaaaaggttcgagacgcgcaccgccagccgatacgaatccgacgagctcgatcgctccacttccccgatcgcacgccaatcagcaccagccaccgtggcgatgacggaggaggcggaggcgaaggcgaagggcaacgcggcgttcgcggccggccgtttcgaggaggctgtccagcacttcagcgacgccatcgcgctcgcgcccgacaaccacgtcctctactccaaccgctcggcggcgtacgcgtcgctctggcgctacgcggaggcgctagatgacgccaagcggaccgtggcgctgaagccggactgggccaagggctactcccgcctcggcgccgcgcaccttggcctcggtgacgcgcccaaggccgtcgaggcctacgagaaagggcttgcgctcgagccgtccaatgaggcgctcaaatccggcctcgcacaggcgcgccagtccgcatcggcgccgagacgtccggtgggct

SEQ ID NO: 269697 - DNA, 715 bp, Zea mays
ttcatgatcgcgagcggcgccctttttttttggttggtttttttttttttttttttggggcccccttttttttgttttttttttttgaaagcttcaacgaagcaaaccatcagcggttttaataatctattatgaacgcggctaaaccagcctgaggcatctgattccaacaaatacatagctgctacacgctactttccaccaacaaactgataaaagaagcatgaaagaaactgcccaaattcggccaggttgccaagctgcaagcctgcatctcgatacagcaaagcgtctattacataacataatacatgatcaacgaagcacctacattaaataaatctcatctagtctagatcccaacaacacattacaggccatcgcgtcgcatcagtttatgtttccccagatggcgtgtcctgaggtcactttgttgcttggccttgctgtcagttcatacacgatccgagcaaatgtgtccgagtatttcccttctgatgtcaggatctcagcaaaagtgttctcgtgtacgaggagatgcatcctgttctgcggctcagagacgaggctctccagtatcatcgacgtcttcctgcagacctcaggcacagggtgcggcgttttcacaatctttaggagtctatcgacagcccatcgctcactggcaagcttgagcctgcaatccatattcacttcgagaaacattgtagagtgc

SEQ ID NO: 269698 - DNA, 1349 bp, Zea mays
tttcgattccgatccactcccgtcccgtccatcccgtctcgtctcgcctcgccctccacgccggcgaccggagaaggggccgtgcagcgcaggcgacgcccacaacgaatccgtccccccgcgccggcttcgcccagccccgcggcgacgcaccaggattgaaggaggcatgagaaggtggacatcattgctatagcgatttgattactggagatggtgttggtggtaaagcagcaccgctgcacacactctgcgagctgcgtttgcatcaagggccacctcagtgaggatgctctgttcctcgtcttccgccacatgaactggaacccgaggctgattgctatcttgtcgtgtgtgtgcaagtggtttgacgaggttgccaagcaggtgctgtggaaggagttctgtcatgcaagggctccaaagatgatgctggatttgcattcaggtggcagccacattgttgatgggaactggaaggcattggggaagctgctcatctattgcaatggctgcacaaaaggggggctgtttaataacattcacgttccaggccattttgtgttcaggacacgcttttctaggactgcgggcaggagtttcctgcctctgccgtgtaagtcggatgtcctgtatgtgtcagatccatgcgagcatcttgatcagggggaagaaggcgacataggtttcttccgaggcatctttatgtcatttgccacttcaagggtaaagaagatgttgattgagaagcgggcgaggtttcatccaagggagttgtgcccttattgtaaggccaagctatggaacatgtttcaggaaaatatgatcccaaggagtgcttccgcaaggctgggtgcctatgatgactctgtggagtattttgtatgcctgaatggacatgttattggactcggtaccctactaccactctcagactcagaggaggcagcagatgagtgatcatcaagaacatgaatcaggtttagaagattgaagcccagggcttgtgaaatggtactgaatcttggttgtgactagcagataatgacattggttctgcaaactgttgcacgacaggaacctgtgatgggatctgcatcgaactgcagctgtgttcttcagggggtgccttgcatcagattgaaaaaaagagctactttatagtgcctctcctttatttattgatatgtcattacttgtttttgtaactccaatcaagatactgggacgctacccgcttgcctgtttagacatgttcacatcatgtgtagtgaggtgttttatttaacgagatgttaaatttgtgctcatgataaaaaaaaaaaaaataaaaaattatgtcggccgcc

SEQ ID NO: 269699 - DNA, 1087 bp, Zea mays
tcttttcattgccctcactaaattttctattggagtagaatttttttctcaaccagcaaggggtctacaccattgtcattgggagccacatctcagccatctaccactacggcttcgcaaaccttatgatgcgcaggtatgttgaggccactcgtgaattcaacaagattcttctgtatatcctcaagtacaagcagtaccaccagaattcccctcagtatgatcagatactgaagaaaaatgagcagatgtatgcattgttggcaatttgcctatctttgtgcccacagaacaagctcattgatgaaaatgttagcacccagctgaaagaaaagtataatgacaagatgacaaagatgcagaggtatgatgatgaagcatacgctgcttatgatgagctattctcgtatgcttgccccaagttcattacaccgtcgcctccaattctggaccagccgctaacaaactataaccaggatgcataccgtcttcagttgaagttgtttctctatgaagtaaagcagcaacagttgctttctgggattcggagttatctgaagctatattcaacaataaccattagcaaacttgcccaatatatggaagtggatgaagcaacactaaggtcgatcctgatgacatacaagcacaaaatgcatgcagttgacagtgaaggaaagatagtatcaagtgcagactttgacttctacatcgtcgaggatgtgattcatgttgtggagtccaaacctaccaagcgtcatggtgattactttttgagacaaattttgaagtttgaggaaatgattggtgaactggagaaggtacagcttgactgaaatctgatagcgatcatggagagaaatgtcactgtttcctttttgctctcttttgtactccgttgaaaccccatcttttttttggtttccttcttgactctgaagcccgttgaaaccgaccattattaaccgtgtaccgtgtaatgttacttactagtaaattgctcgctccttgcgcgagtcgtcggttgatgcctttacccaaaaaaaaaaacaacaaaaagggcgaccgctcgcgacccacgagtcaa

SEQ ID NO: 269700 - DNA, 557 bp, Zea mays
ttgcttgagccttgaggacagtaaatgattctgccatccggtaatggaagctgaattttgtttagggttaagatttgcatattggtatgttatacaatatattcagtgatcatttatggacacttgaaggaccaatgctgggtgctggagcagaaaattgatgctagcctcaccagtgtggaccctttcagccagctccatgcgatgcattgcagttttgggaagacaaactgggtaactaggagcccagcttaccagcagctcagacttccactgttgttaccatggaaatgcaagtcgtttggctttacgtttgtgcattggtttaaatgatctggtatgcaaactagagaatatggcagtggacatacctgctacattgtcctgtcaccagaatatgctgacatttttgagaagttagttcatgtcggtaacggtaaaattggttccttgttgggaatagcccagttctccaagacatggttcccagacgctctatgaatttgctccttgtccgtgataacgagctttgctgtcttaggactagactttctcat

SEQ ID NO: 269701 - DNA, 805 bp, Zea mays
gctagcggtgtccggtccggcgcccccctatttcctctcgcagcctcttctccccaaaccctaatcttgctcctgcctatctctgctccaatccgttggtggagcggcggcgatggaggggaaggaggaaggtcggatcttcgtgggcggcctgtcgtggcaaacggacgagcgcaagcttcaggacgcctttggtcgcttcggcaaggtcgtcgatgttcagatcatgctggagaggcacacaaaccgccacaggggctttggcttcgtgacattcgaagatcgaagggcagttgacagcgctatcaaagagatgcgtggccaagagttagatggtcgtaccatctcagtgaacaaggctgagcctaagatgaatacagatgacacaaggttcgacaatggcggtggacgagactatcgaggtggtagaggtgatggtccaccccctggcaattgctatgagtgtggccgtcctggtcattgggtccgtgactgccctagtgctgctggtggtcgttctggcagattcccgtccaagttcagtggtggtggcaggggagaccgcttttctggatcagataggtttagtgatcgttacatggatgatcgttatgatggtggtcgttatgggtaccgtgatcaagttgatgcaagggacaagtatgctggtggccgtgatcgctatgccaatgaccgttacccatctggtggcgatcactttggtggagacaggtatggaggtggtccggattgttatgtgccaagtggttatggtagggagcgagaaagaagcttcgagagagat

SEQ ID NO: 269702 - DNA, 486 bp, Zea mays
gaagtaactgccgcatctcaagtctcaaccctcgcctccaatcgcaacgctcccgaggagagccaggaggaggtgacggcggcgcgcgaggaaggagggatcgatcgaggatggtggacgtctcgcgcgtgcagaaggagctcaccgagtgcaaccgcgaccgggaggtatcgggcgtctccatcgcgctccacgacggcgccaacatctcccacctcaccggcaccatcgccgggcccgccgacagcccctacgagggcggcacgttcgtcatcgatatccgcctgcccggtggatatccctttgagcctccgaagatgcagttcatcaccaaagtatggcaccctaacatcagcagccaaaatggagcaatttgcttggacattctgaaagatcagtggagcccagcccttaccttgaagactgcgctcctttcccttcaagctctgctttcttctcctgcacctgatgatcctcaggatgctg

SEQ ID NO: 269703 - DNA, 494 bp, Zea mays
cccacgcgtccgcccacgcgtccgccctcgcctgcctgccgttccgcgtttgaccaactcccccgcaccgtaaccctagcagcagatcggccatggagagctgggcgacctgggtggggacaagcgtcacctccgccttcttcgcctccctcgagcgctgctcctgcatcaacctctccaccgacgacgacgacgacgacgaggaccacgacgaggccaaggaccggcccctcatcctcgccgccgccccacgccacgactccgccgccaagcccgatccagactccgccgccgaggaccaggacgaccagaagcaagagcagccgccgctgccgcccgtatgaatcgaacccgattccttgcttgtactagctgctactgctggtatgtcgccaaataaagtcgtgtgtgcgtgtgcagtcagtactactgctctgctgctactatcctagtcctagtatattagtatattatacagtcctctgtgaaatttg

SEQ ID NO: 269704 - DNA, 1787 bp, Zea mays
agctggtatcgcccgcactgcacgggcccggactgactggctgggtcgacgcacgcgtattttgctctgttagcacttaaccgcctgctctctctgtctgacgcgccggcgccgccctcgcgatcgatgatggcagctgcggcgtggttgtgtggactcctctcgctcctggccctcgccggcgctgcgtcggctgcggatggggcggagggtgagtgggagccgctgatacggatgccgacggcgaaggggagtgacgctgcttctgctccggctgctgaggatgatgaagtggggacgaggtgggccgtgctcgtcgccggatccttcggttatgggaactaccggcaccaggccgatgtgtgccatgcgtaccagatactgcagaagggaggagtgaagaaggagaacattgtggtgttcatgtatgatgatattgcccacaacattctgaaccctaggcctggagttatcattaaccatcctaaaggagcaaatgtttatgatggtgttccaaaggattacacaggtgatcaggtcactactgaaaacttctttgctgtcctcttgggcaatagaagtgctaccactggagggagtaagaaggtgatagacagcaaacctaatgaccacatcttcatctattactcagatcatgggggtcctggagttcttggtatgccgaacctgccatatctgtatgctggtgacttcatcaaggtcttgaaaaagaagcatgcttccaatagctactcaaaaatggttatatatgttgaagcatgtgaaagtggcagtatctttgaggggttaatgcctgaagatctaaatatttatgtcacaacagcctcaaatccagttgaaaatagttggggaacttactgccctgggatggaaccatcaccccctcctgagtacattacctgtttaggtgatttgtacagtgtttcttggatggaagacagtgaaacccacaatctaaagaaggaaaccatcaaggatcagtatgaagtggtgaaaacaagaacctcaaactcaaataagtacaaagagggttctcatgttatggagtatggtgataagaccttcaaggatgagaagctttccttttatcaaggttttgatcctgctaatgccaacattgcaaacatgctgctttggccaggcccaaagggtgcagtcaatcaaagagatgctgatcttctcttcatgtggaagaggtacgagcagttaaatggggggaccgaagagaagctgagggctctcatagagattaaagaaactgttcagcacaggaagcatcttgacagcagtatcgatttcgttgggaggctcgtcttcggatttgagaaagggccttcgatgcttgaggctgttagaacctctggtcaaccattagtcgatgactgggactgtttgaagaggatggtgcggattttcgagtcccagtgtggttcacttactcagtacggcatgaagtacatgagagcgtttgcaaacatctacaactcggcgaggtggagcccgatgtccctgtgagcgagctcgtatcatcttgggactgtggacccatcgtcggttgtacatatcatgcacttatgctcgtgcctatgtaaagtagtaataccaactcaactctgatctccatccaaataccgaaatgattaaaagatcagatgtgaatgctgttgcgatgggtgatcgcaagtaggccataatcagtggaccgaaaatgatgacccaaatcaaggtagtgctcctctgatcgatagcccaaatctattgctaac

SEQ ID NO: 269705 - DNA, 614 bp, Zea mays
gcacaggaagcatcttgacagcagtatcgatttcgttgggaggctcgtcttcggatttgagaaagggccttcgatgcttgaggctgttagaacctctggtcaaccattagtcgatgactgggactgtttgaagaggatggtgcggattttcgagtcccagtgtggttcacttactcagtacggcatgaagtacatgagagcgtttgcaaacatctgcaacagtggtatatctgagatgaaaatgagggagtcgagcatcagcgcttgcagcagctacaactcggcgaggtggagcccgatggctcggggacacagtgcttgatggtaaagatcaaatagcaaagcccccccgaggtctgctgccccatgtccctgtgagcgagctcgtatcatcttgggactgtggacccatcgtcggttgtacatatcatgcacttatgctcgtgcctatgtaaagtagtaataccaactcaactctgatctccatccaaataccgaaatgattaaaagatcaggtgtgaatgctgttccgatgggtgctcccaagtagggcataatcagtggaccgaaaatgatgacccaaatcaaggtagtgcttctctgatcgatagccc

SEQ ID NO: 269706 - DNA, 401 bp, Zea mays
tcggcgacttcgagaaccctagtatcaagcgcagaactccgtcatgctgcgtgcggcggcggctgccgccgccatattcccggcgcgggtcgccgctgcgccggctgctgcggcggcggaggaacttaggtatccgctgctcagggttattgggacgctgaggggcagccgcggctcggtgctgctggggaggagggtgcgtttctgctccaactcctccgcgagcgactccgaagtggcggcggcagatgcggaggcgaatgccgaggatgcgaccgttgcggaggaggaggcgggcagcaaggcgtcttccgccatcgtgccgaccagcaccaatatcgacgactgcctctctgttatagcgttaccttttccacatcggccactcttttctggatttt

SEQ ID NO: 269707 - DNA, 472 bp, Zea mays
aggcgaagaagaccaaccaaagcaaagccaacgggatctccctctcattccagaggactccgcgtcgtcaggcccgcttcgcgtgcgacgccggcatatagggtttcgccggcgccggcgatggacccaccccccgtgagccccgatcgctgggggcccagtcagggcgctggcgtcgggccctccggcctccgccgatatggcctcaatttctccgcctccagcctcctccaggcccccatcgcggccctccttgagtactccggcgtagtccagtccggccctgccctggcggcgcaccacccgtccgcggggccctcgtcgccgttgtcggcgtcggaggtcgatggtcttctctccgcatgccgccgctggggacggggaggtttcgatccggattcaggtgcggccaagcgacactgaggccactggcgggccggatgcggagacctcgtccgaggatttgatcgag

SEQ ID NO: 269708 - DNA, 158 bp, Zea mays
cacagactccggcacaaactctagcccgagcgcgactgatcttcaaatcaccattccgcaccaccgatcgacattcacgccagtctcggtctcttccgaaggcgtcccgcgcggttgtttgagaggcgaggcggaagatgagggagtgcatctgcgtc

SEQ ID NO: 269709 - DNA, 1204 bp, Zea mays
ttcagaaatcaggctatgaggtgtacttgctggaggcaccatacaaggatccaacgggctgtgctgcaaggaatgtgcatggatttacattggatgagataaaaaagatggcagcggactgggaggaggctccaccattatatctgcagctagatatacattcattattccatgatgataaccttcgtggccattctatacaagaggtagatatggacactgtggatgttgatgatgctaatgacgcaactagcatcattgctgagagctcgcagaaggctgtacaggatccaccaaacgaaggcttctcaaagccaggggaggagtggaactcagaagtagaagatggcctggatagtttaaaagaactaggacagagtaaatggtcaaaagattttgaggatgaaaccacaaagtccgagaatacagaggaaaacacacatgctctttctggcctggcccggacatatagcacaggacccaaaagtgtcagttggggtgatcggcttgaaaagggtgggttttccatttatgcaactaaaagaaaacttacttcgtcactaatcatagggcctggatcagggtacaatttggtatccaaccccttggctgaagatagttccacaggtacaaaagggaagacgaataacgagaccaaaaaacggttcagtgaacaacttcgtgacgaaggtgaatccttcagggcagtttttgacaagacaaagcagcacattggagtttttgagaatggagatgaggaataatccttgactagaggttcttttagttgtttgcccttaagcgttttggatgctcaggatgatacttcacacttacggaggggactagtgcagacagcttggagtcactttttcccccttccgcttgtcatcctgcagcaagtcacaatattgagccattcagtgaatcgtgggatcaatattctttagtccaatcgccttcatcaagcgcaatgagcaatagttccaatgtgccgttcaatgaaagcaatgcggatttttttggttcatgggcttgttgtccttgtaaaggcaactcacacatgccacaaagatgtactgtacctatgtatcaggcacgcacactgaatagtggccatcagtttttacatgtttctgttatatatgtgttgttgttaccacgagaaactattcggctctcgtctcttactactgtgacgagt

SEQ ID NO: 269710 - DNA, 612 bp, Zea mays
ctgagagatccgtcccaacaatacggaccaagcccaataaaccagggtttttgtaaggaaaatccccgtcgttctcgcgtctggagctcggcggcggagcagggcggcagggggagggcgatggaattctgcccggtgtgtgggattctgctgcagatcgatccgggcaccggaagccaccgcctgcgcctcttctgccccgtctgcccctacgtctgccccatcctgaacaagatcgtgaagaaggcgaggttggtcaaaaaggaggtggagcccatctccagcacggcggatgagatgaaatcggcccctaagaccgcagttacatgccaaagatgcaaccatggagaagcatacttcaagcagatgcagattcgatcagctgatgaaccgatgacaacaatatacaggtgttgcaaagaagaatgccagcatgaatggagagaggactgaccatagcattcgcactttgcttacacttcgctccctgtgcttcttcagttttgagtgttgggatgccctgttgcacatgtaatgcttctaaatagcgtatacttaagtacaaatttttggaaatgtatgttctatactatggcatccgcttttggctgc

SEQ ID NO: 269711 - DNA, 919 bp, Zea mays
accggccggagtccggacgcccacgcgtcccgtacgacttttcgaacgcccacgcgtccgcaaaaggggaccccaccaccactccgcgggggagcatttcgtcaggtcatcgccaccgccctcctccgctcccgcgtcttcttcccctcgtcgtcgtcgggttggtgggtccacctctcgccgtgccccgccgtcgacccgcctcagaatcaaagataagtcaaaggaaaggtcggtatgcgccggtggttttgctgcacgaggtttaatgcttcataccgtgaacatgaaaatgaacgtcccatcactccagaggagaaagaaggaaatggtttttctgttaaaagtgatcccatcaaggcaccaccttccattgaagtccctgaattatcatttgaagaattgaaagaaaagaccgacaattttggttcaaaggctttgattggtgaggggtcatatggaagagtatattatgctattctggacagcggaaaacatgttgctgttaaaaagcttgacgcttcaacagaccctgaacttgataatgagtttttgacacaggtatccattgcctcaaaactaaaacatgataattttgtggagatgcttggatattgtgtggaaggagatcagcgtctagtggtctatgaatttgcgacaatgggttctctgcatgatatcttgcatggaagaaagggtgttccaggtgcacagcctggcccagcacttgattggatgcagcgggttaagattgctattgatgctgctaaagggctagagtatcttcatgaaaaggtgcagccttcaatagtccaccgggacatacggtctagcaatattcttctgtttgaggactacagagcgaaaattgcagatttcaatctttcgaatcagtctccagatatggctgctcgtttgc

SEQ ID NO: 269712 - DNA, 819 bp, Zea mays
ccaaaaaggactctggcgaggaaaaaaaaagaaaagaaaggaaggagcagcagcgctgcggaagcagagcgcgaggaaggagacggatttgctcggctgggatcccccgccaggggtccacatggcggcgtcgccttgagccgggcctctcctacccgcgacgtcctgcgatgccgccgcggggagcggcgctcctcctcctcctcgtcgtgctctgcgcagtgcaactgggaacatcaagctcaacaagtcttgcatcatacttattcggattctggagtagaacccaccagcatcgctttcctgcactagcccctggcccagccccttctcctcaacctgaaggcgccattattgctcacccagtgcataggcatcacagaagaagacaccatgcttccccaccaccttcatcattttcgccagaaagacaagattgcagcagaacaacttgttctgctccacttacgtcgactccaattggttcaccctgtggttgtgtatatcctatgcaaattcagcttgatcttggtgtggcgccgtatcaattgtttccaagaattgatgaattagaaatcgaggtggcagcaggtacattcttgaaacagagtcaagttcggataatgggtgctgggagtagtcttcaagatcctgaaaagacaacagtgtccattgttttggtgccattatggccagaaatttgataggacttcagccttactgattagcaacagatttttgcaaagaaaggtgccaatatactcattcacttattggggattatgtttctacatatgtttattatccaggccttgcttt

SEQ ID NO: 269713 - DNA, 1130 bp, Zea mays
cgccacggctggaggtgctcacagcgagcggacggaggcgagggattcggccgcgcgcatggcgacgcctctctgaccgaagctgctccacccacttggccaggcgcgccgccctctcccggtcctccccacccccatccctcctcacggcacgggactcgcctccccccctcctcttcctcccctcccgcccacggctggaggtgctcacagcgagcggaccggaggcgagggattcggccgcgcgcatggcgacgcctctctgaccgaagctgctccacccactcggccaggcgcgccgtcctctcctctcccctccccttatcctctcgttacaaaatggcgatgatggtggatcctccgaatggaatcgggaaccaaggaaagcattactactcaatgtggcagaccttatttgagatagacaccaaatatgtaccgatcaagcccattggtcgaggagcttatgggatagtttgttcatccattaatcgtgaaacaaatgagaaagtagcaataaagaagatacacaacgttttcgacaaccgtgtggatgcactacggaccttgcgggagctgaaactccttcgccatctccggcatgagaatgtcattgctttgaaggatataatgatgccaatacacaggagaagctttaaggatgtgtacttggtatacgaactcatggatactgatttgcaccagataatcaaatcacctcagggcctttccaatgaccactgccagtattttctttttcagttgctccgaggactcaaatatctccattcagcagaaatactccacagagacctaaaacctggaaacctgctggtgaatgcaaattgtgatctgaagatatgtgattttggtctcgcacgtacaaacagtagcaaaggccagttcatgactgaatacgtcgtcacccgctggtacagagctcctgagctgctcctctgctgcgacaactacggcacatccatagacgtctggtctgttgggtgcatctttgctgagctccttggccgtaagccaatatttccaggaactgaatgcctgaatcaactcaagctcatagtgaacgtgctcgagaccatgagtgaggctgacctagagttcatcgacaaccc

SEQ ID NO: 269714 - DNA, 412 bp, Zea mays
ctgacggccgtgggggcatcgacggccgggcgacgcgacgcgatgtgaccatgacccggcagtcagcagtacagggtggcgatgatggtggatcctccgaatggaatcgggaaccaaggaaagcattactactctatgtggcagaccttatttgagatagacaccagatatgtgccgatcaagcccattggtcgaggagcttatgggatagtttgttcatccattaatcgtgaaacaaatgagaaagtagcaataaagaagatacacaacgttttcgacaaccgtgtggatgcactacggaccttgcgggagctgaaactccttcgccatcttcggcatgagaatgtcattgctttgaaggatataatgatgccaatacacaggagaagcttttaagatgtgtacttggttt

SEQ ID NO: 269715 - DNA, 857 bp, Zea mays
gttcgtgtgaagccattgagttcagaagttgaagttgatttgagtatcaatacacagagtgaaaattatgaccaagaggcacctttgaggctgacaaaacagacactatcgtcatccaaggcagttgatgttactaattacgcggttggagttcttaaaggcaacttggtccatttgaatcatattgatgcagtggtgcaaatgcgaccatcaatgtcacatattatttctggccgagcacatactaggcaggcttcacaaccccgtgaaatgaatgggggagctagtacctggatggattcatctcataagggaaatgagcgccctgaagattccaaggacggagcagaagattctgagccatggatttctctcatctaccaaccagcaggaagcaatactgcaactaagtaccatgataagatgatagcaaatgagggtgtgcctattgatttcacaatgagctcctcttgttatttgacgtccttgtgtcctggggcctctactagcagaaagcgtatcaacaaattccaagcaataagggagatgcttttgctaccactggaagaacgcctcaagaaatggtttactgaggtttcaggagtaaatcgatttgatgctctgaaggaccttgctccaacctgttcagaggttgaaattttgaaaatgcttccagagtgtgcatatttggtgcgtggattgtgggtctgcaaaagttctttgttgtttgatggtgtatattctggtcccatggatagaattcttcttgagtttacaaaaagggatcccgtcccatcaaatattctggaaccatttatcaatctgattggcaatcgtgctatgagagactggatact

SEQ ID NO: 269716 - DNA, 427 bp, Zea mays
  unsure (1)..(427): unsure at all n locations
cttctcttctcgtggatccccaaatcctctccggccaccggcatcgctcctctcccgcccgccgacgccgaccgctcctatccacgccaccgcgtcggtgctcgagttgcctcagagagggagagagagagagagagagggagggagggagggagggagggaacggcgctcacgctgttccgattcgaacgagctcgcccggcgatttttttcttcctggaacgggctggctccgaatctcggcgaagtgtggggagcggctccaccctccaaccaagcaccgcagggtcaaccagaaagcgggcgcgcgggcggcaggcggcggtgctgagaacacgggtggcactgtctggacggacgctgcggatctcggcgattcttcgcgggctgcgtcaagggcggatcggcagcnatgatcggcggcggc

SEQ ID NO: 269717 - DNA, 979 bp, Zea mays
gatggaggtgccctctatgctcttggtttgattcatgccaaccatggtgaaggaatcaaagagtttcttcgtgagagtcttcgcaacaccacttctgaggtggtccagcatggtgcttgtctgggactcgggcttgcagcattaggtacatcagacgaggaaatatgcgaggacataaagaacattctttacacggatagtgctgtggctggtgaagcagctggtattggcttgggtttgctcatggttggcacggccagtgaaaaggccacagagatgcttgcttatgctcatgatacccaacacgagaaaattatcaggggtttgtcacttggaattgcattgacagtgtatggcagggaagaagaagctgacacattgattgaacaaatgcctagagatcaagatcccatacttcgttatggtggcatgtatgcattggctctagcatacagagggactgcaaataacaaagctatccaccagcttctgcattttgcggtgtcggacgtgagcgatgacgtgcggaggactgcagtgttggctctcggcttcgttctctacaacgagcctgaacagacacccagaatcgtgtccctactgtcggaatcatacaatccacatgtccgttacggtgcagctctagctgtcgggatctcctgcgccggaacaggattaagtgaagccatctccttactggagcctctgacatcagacgtcgtcgactttgtacggcagggcgcgctcatcgccatggcaatggtgatgatccagaccaacgagtcctacgatccacgcgttggagcattcatgcgccagttggaaaagataatcctcgacaagcacgaggatgccatgagcaagatgggcgccatactggcttcaggcatcctcgacgccggtggcaggaatgtcaccatcaagctcaagtcgaggtcaaagcacgacaggctcaccgctgttgtcgggctagccgtct

SEQ ID NO: 269718 - DNA, 402 bp, Zea mays
actttttggacctcccagaaacatccaagactcatcttacatatggcgctcttctcaattcttactgcaaagagttgatgactgagaaggccgagtcccttatggagaaaatgaaggagctcaactttgctttcactgccatgtccttcaacagcttaatgacgatgtacaccaaagtcaaccaagctgagaaggtccccagtatcattcaggacatgaaggcagatgacgtattgccagatgtctttacttataatgtttggatgagggcgcttgcagctctcaaggacataccaagggttgagagggtgattgaagagatgaaacgggatggccgtgttgctcctgattggacaacatacagcaacctggcttccatatatgttgaagctggaatgtttg

SEQ ID NO: 269719 - DNA, 1676 bp, Zea mays
gcatagctagggtttcttctctgcccccttcggcaactcaggagagagcgcggctcctacccggcggcggtgaagccgcgacgatccaacggagcagaggcgccatggctgctcccgaagcgcccgcatgctacgtcgggatcgcgcggcagtccgccgccttccgccttatgaagcaaatgggatgggaagaaggtgaaggccttggcaaagacaagcaaggcataaagggtcatgttagggtgaaaaacaagcaggacacactaggtgttggtgtagatagccctcataacaaatgggtatacgataccacccaatttgacaacatattgaagaaactgaaagtgcaatcagctaatcctgttcaagaagaggttgcagctgtagaaagtgattcacctgacatcacacccaagaaagacaaatcagcaaaacatgaagttactaaagttactcgacctcaaggaagatacaagaaaagagagagggggaaaagtgtgaactcttattcagcaacagatcttcaaggcatactcgtacgcaaaaatgaagataattccaaagtggatcagaaacttgaaccgacatgcttggatgaacctgatcccatcatctgtccggatgcagtatcccaagctgatgatgtgaactggtgggggcacaaatttggatttttatcaggagggtttctaggagcaaaatcccgtaaaaataaatcttcacaaaaagatcctgctaatgtccgccagacatttgcagaggaagatcaagaaaatttgtacaatcttgttcaggataaagctacttctggaaagcagggtcttggcatcaaaggcctgccaatgaaagttgctggccaacgttggaagggaaacaaaacttcgtttgttgatagtgatgatgataattcagcccagcccgatgaatattcagaaatcgaagagaatggcgatgaggaagaacatatcagtgcttctgaatcaatagacacagataagaatgcagacaaagaattgcttgtggctgctagacccaaaaccaaggtcaagaaactttgcaaaagaatacttcgtcaggccccatctcagtcaatgaaattgaaggatcttaaggtcgccgttgaggaacactcaaatgttgtattttccagcttctctggtagacgcgaacccctgttgtttttgaagaaaaaacttcaaggaagcaggaaattcaatgtggacggcaagaaagttcagctcgtgtcatgaaagccaagcaaataggaattctttacgttgttggtgtctttgggttgatttccgtttcttctcgttgtgttctgtagcttcaaggaagcaggaaattcaatgtggacggcaagaaagttcagctcgtgtcatgaaagccaagcaaataggaattctttacgttgttggtgtccagcactcgtatttgttgttgctcgaggttccaaacagatgtaggagcacattgagctatgtagtactagtactggtatagataaatagtcaaaacctatcgcagatgcggaggtaaaattttgcaaattttcgtgaggggcagagttcctaataagtgtgcggcgcattcgatgtaaccgaggcttatttggtttgcatgaaatgtgcaaactgcaatgctatgtattgctcgtaaaatatgtctatggattc

SEQ ID NO: 269720 - DNA, 450 bp, Zea mays
cgttgaggaacactcaaatgttgtattttccagcttctctggtagacgcgaagccctgttgtttttgaagaaaaagcttcaaggaagcaggaaattcaatgtggacggcaagaaagttcagctcgtgtcatgaaagccaagcaaataggaattctttacgttgttggtgtccagcactcgtatttgttgttgctcgaggttccaaacagatgtaggagcacattgagctatgtagtactagtactggtatagataaatagtcaaaacctatcgcagatgcggaggtaaaattttgcaaattttcgtgaggggcagagttcctaatttgtgtgcggcgcattcgatgtaaccgtggcttatttgttttgcatgagatgtgcaaactgcaatgctatgcattgctcgtaaattatgtctatgcattcacataattggagtattaaggcatgt

SEQ ID NO: 269721 - DNA, 524 bp, Zea mays
atctgacccaaagtgggctgaagtggcggacgagtggccgacgctgaggcgcattttgtgcctgaggaggccaaggctgtagaagggagggcgaagaaggctgaggagcggctgctgtccgttgacccgaggagtggagatccggtgcctgccattgaggagtggaaggaagatctcaggccaaaccgtgtcgattggatatctctgcttgagcggattaaggcacggaatgtcgagttatacctcaaggttgctgaaattctgctagatcaagaatcttttgaggcaaacatccgagattactcaaaattaattgatcttcatgctaaagcaaataatgtggaaagtgcagagagagtacttggtaaaatgaaagagaagggtattgcacctgatgtcatcatatccatcgtattagtccacatgtatagcagggcatgcaagctagagcaagccaaggaggcttttgattttattcgtagggaggattttaaaccagatcggaaactcttcagttcaatgat

SEQ ID NO: 269722 - DNA, 590 bp, Zea mays
aagtcgacccacccgtccggactccttgagccttctcgtctccccccttcgtccgcaccctataacctttgcatcatcttccttgcccgcgccctaacccttgcaccctcctccttgctgccgccggggccgatctccgctgccgccagccatggaggacttctgcgtggtgtgcgcagatacgctggagtgggtggcctacggtccgtgcggtcaccgcgacgtgtgctccacctgcgtcgctcgcctccgtttcgtgatggacgataagaagtgctgcatctgcaagaccgtctgccccttcgtcttcgttactaaggccatgggtgaatacactagagtggttgctgatttctcagtgttccccattggggtaaatgagggcaaagctggtgatttctggtaccatgaggatactcaggcatactttgatgatgtggaccactacaggatgatacgggcaatgtgtcgactttcttgtagcgtttgtgacaatgcagaagatcaggttgcccttgctgctcaagcaaagcgcagaagcaagttcaggagcatcgatcaactaaagggacatttattccatgtgcata

SEQ ID NO: 269723 - DNA, 712 bp, Zea mays
gggtagacccattcgtcttcccacgcgtccgcggacgcgtgggttggaactgaactgggaatgacgaggccgtggacaaaagcaaattgacaccttctccgttcccgacgactcccgtgagcgtggagcggcgactaggcgaggccatggcctccggcatcggctccggccagcagcaacccccagcgccggcggcagatgctgacccgggagccgtcggcgacaagctcgtcttcgaagcgccgcctcagcccgtgagggaggactacgtccagaacgccgtcaagtttctctcccaccccaaggtcaggggctcccccgtcgtctacaggcgatccttcctcgagaagaagggccttagcacacaggagatcgacgaggccctccgaagggttcctgatcctcaacccagcactacggctaccacttctccgcagcagcaggtcaacagccagaatcaatccgtcggggtgcaagcttatgcgccagcacaacctgtgcacccagcaaacgctggccctgtcgtccttccaacgcagcccaggtttagctggtaccaagcattcctggctgcagggctcttgcttggttttggtgctagcgctgctgtctttatcaagaaactgttccttcctaggctcaagtcttggatccgcaatgttgtagcagaaggtgatggcgctgaaggcaaccaacttaagcacaggattga

SEQ ID NO: 269724 - DNA, 631 bp, Zea mays
ctatttcagtttggaactgaactgggaatgacgaggccgaggacaaaagcaaattgacaccttctccgttcccgacgactcccgtgagcgtggagcggcgactaggcgaggccatggcctccggcatcggctccggccagcagcaacccccagttagattggatgccctagcagcgccggcggcagatgctgacccgggagccgtcggcgacaagctcgtcttcgaagcgccgcctcagcccgtgagggaggactacgtccagaacgccgtcaagtttctctcccaccccaaggtcaggggctcccccgtcgtctacaggcgatccttcctcgagaagaagggcctcaccacccaggagatcgacgaggccctccgaagggtgcctgatcctcaacccagcactacggctaccgcttctccgcagcagcaggttggcagccagaatcaatcagctggggcgcaaacttatgcgccagcgcgatctatgcacccagcaaccgattgccctgtcgtgcgaccccggttcagctggtaccaagcattcctcgctgcaaggctcttgcttggatttggggctagcacggctgtctttatcaagaaactgttccttcctaggctcaagtcttggat

SEQ ID NO: 269725 - DNA, 380 bp, Zea mays
cggaacgactccttcagttccgtcccgttcgtgacgacctccggtcccgggagggggagggggagggggagggagaggcgaggtcatggcctccggcaccggctccggccagccgcaacccgcagcagctgatgctgacccgggagccggcgacaacaagctcgtcttcgagacgccgctgcagccgcagcccgtgagggaggactacgtcgagaacgccgtcaagttcctctcccacccaaaggtcaggggctcccccgtcgtctacagacgatccttcctcgagaagaagggcctcaccacacaggagatcgacgaggccctacgaagagtccctgatcctgaacccatcactaccgataccgcttcttcacagcatc

SEQ ID NO: 269726 - DNA, 765 bp, Zea mays
tggagagtctagtagggttctaagcctcggccgtttcttcgtctccacagctcccgccgccgcggaccagcgcgtcactctaccgggttccggcgtctccccgtagcgcggcatccatggcggagcagacggaaagggctttcttgtcgcagcccaaggtgtttctctgttccaagaaggccaccaaggggaacaaacctggcaagggaggaaacaggttctggaagaacattggccttggtttcaagacacccagggaagccattgaaggaacctacattgataagaagtgtccattcaccggcactgtgtctatcaggggtcgcatcatcgccggaacatgccaccgtgctaagatgaataggaccatcattgttcgtaggaattatcttcacttcgtcaagaagtaccagaggtatgagaagagacactccaacatccctgcgcacatttcaccatgcttccgtgtcaaggaaggagatcatgtgatcattggccagtgcaggccagtgtcgaagactgtaaggttcaatgttgtcaaagttattcctgcaggttcgaagagtggagcagtgaagaaagctttcactgccgcttaagatcatgacgagttcatcatccatggcccggaaaagctctgtgttataacgttttgatgctgcctattagcctttttccccgtaactactatatgtgtacttggaattggacttgaattacatccggaccttgaactcgtgaaaaaaaaatcaaacccttttgtct

SEQ ID NO: 269727 - DNA, 699 bp, Zea mays
tcggaagacacaccatctagttccacatccaagagacgtcgtgtggttgtgacagataaaggtaaaaaaccgaaggccccgggaggacaatggatgcaagaccagatgtctaaactttttgaattgaataagcagactacaacatcttgtgagtctatggtcctggcaagaacacaagagacacctggatcttctataaaagatgttatgcaattagataaaggtaaaaaaccgaagactacgggaggacaatggatgcaagaccaaatgtctaaacttgttgaattgaataagcagacaacatcttgtgagtctatgttcctggcaagaacacaagagacacctggatcttccataaaagatgttatgcaattggtgaaggcatgtggtgctatagctggcagcaaagagcacttcattgcaactcaagtctttaccaaaaaaaatgaaagagaaatgttcttgactttggatacacccgaggagcgctttcagtggttatcaatgaagtatgaatggatgacaatgaacaagaagggctagttagagctactttgttatgcatttatcgtgtcgtttgttgtttttaccttaccaatcttatctattatttcctcatttgtattaactgatcagaccattgctatgtgatgctaatatttgtttatgaaaattatggaacatgacctgctattttat

SEQ ID NO: 269728 - DNA, 1953 bp, Zea mays
cttacgttctcgagaaactggaggtgccttaggtggcatggttagacagctctcgattgaccagtttgagaatgaaggtagaagggtcatttatggcacccctgagaatgcaactgcggcaaggaaattgctggatcgacaaatgtctattaatagcgtgcccaaaaaggtaattgcttctctgctgaaacctcgtggctggaagccccctgttcgaaggcagttctttcttgactgcaatgagattgcagatctatgtgatagtgctgaaagaatattttcaagtgaacctagtgtcttacagctgaaagctcccattaagatatttggtgatctgcacggtcaatttggtgacctcatgcgcttgtttgatgaatacggcgctccttcaactgctggagacattgcttacatcgattatcttttcttgggagattatgtcgatcgtggtcagcatagtctggagacaatcagtcttctccttgcactgaaggttgaatatcctcacaatgtacacttaatccgagggaatcatgaagcagcggatatcaatgctctatttgggttccgaatagagtgcatagaaagaatgggtgagcgggatggaatctggacctggcaccgtgtgaacaggctatttaattggcttcctttggctgcgcttatagaaaagaagataatctgtatgcatggtggtattggtcggtccatcaaccatatagagcaaattgaaaatcttcaaagaccaattaccatggaagcaggctcagttgttctgatggatcttctatggtctgatccgactgagaacgatagtgtagagggactcaggccaaatgcacggggccctggtcttgttacctttgggcctgatagagttatggagttctgcaacaacaatgacctgcagttgattgtgcgagcacacgagtgcgtgatggatggcttcgagcgtttcgctcaaggtcacctgatcactcttttctcagcgacaaattactgcggaacggcaaacaacgcaggagcgatcttagttctcggaagggatctggtcgttgttccaaaactcatccatcctttgccgcctgccattacgtcacctgagacctcaccagagcaccacattgaggacacatggatgcaggagttgaatgccaatagaccgccaacaccaaccaggggccgccctcaagcgcccaataacgaccgaggctctgttgcttggatatagcggcctggccatattatgaaacagtcagatttctcgcctcccaccagtggcttgaggcttatattatccatccatcttgggcacatgcaggcggtctgtgctgaaagcacatgcttagcccaaaacaacatcgaaagggaactgttcagggagcgagactaagcggtgctctgaagacagaaggccagagaagactcaccagtcaccgtcgacagtgctctccaaatccttcccctccaaatgacatgagaagtagaagaacagaaccaagtgttggcaaaccacagggtcttgcctgaggtcacgcctgtacatactcagatgccagcagataggcggggttgtgtactgtgttctttttgtcgagcgtccaaagtggtagcagcggtccattgtgctaggtattcatttgctgtagggtttttgtttcttgtccctcatgttgcagagtatggaagtgataaaaatgggtcgttctgtcaggtcgtgtataatagcgttgtcgcttgtttatgggtagtagcagcgagtcagctgtcagcacgccttacacctccctcgccgtgttgtaattcccgtcaccggtgctgagagtgtgcacaatatatcgttgtctgttgtccaaagttttgggtcatggacgggtttgatgatttgagttgatttattagagaagcaatgtgttgttcgattctgagcttaaaaaaccaaaaagaaatgca

SEQ ID NO: 269729 - DNA, 388 bp, Zea mays
gcttaaagtacctgttaaaatatttggagatttacacggacaatttggagatctgatgaggttattcgatgaatatggtgctccttcgactgctggtgacattgcttacattgattatctattcttgggggggtatggtgtgtttttggcatccaatttggaatggcaaacgtaatagtgttattgtactaggtattctttcctttctctcggggcctggaattttctcatgtcgcaaagtatttttgagttgccacagggatttgtcaggagggttcgcggtccaagctgttttgtataatagtgctctcaacctcaatgtaatttcagacagacgctgatgtgtacatttttgtgttcttaaagtttgagaatttttgcggtggag

SEQ ID NO: 269730 - DNA, 1366 bp, Zea mays
catcgacaacccctccgatctccttaggccttcccgtcgcataaacccccgccgccgtgacctcgcagccgcccgcccccccgtcctggctttcattgcaggcctcgcgtctccagtggcagggcaagagaaaggagaggatggcgtcgccgataccgcgcgagtgggtcgggctgcagcagtttccggcggctacacagaccaagctgcacgaactcctcggcaaactcaaggaggaggatgtgagcacattaacaattctggtgatggggaaaggtggagtgggaaagtcatccactgttaactccatcgttggggagagggttgcctctgtcagcgctttccagtctgagggtctgagaccaatgatgtgctcgcgcacaagggcagggttcactttgaacattatcgacactcctgggcttattgaaggtggatacattaatgagcaggctgttgacatcattaagagatttcttctgggcaagactattgatgttctcctgtatgtggatcgtttggatgcgtacagaatggatacactggatggacaggttataagagccatcaccaattcatttggaaaagatatttggcgaagatcattggttgtgttgacccatgctcaactctcaccacctgatggaatcgagtataatgatttctttacaagaaggtcagaggcacttttgcgatacatccactcgggagcaggaatcaagaaacgagaatatggggatttccctttgccaatagcattggtagagaacagtggaaggtgcaagactaacgagcatggggagaagatacttccggatggaactccgtgggttccaaaactgatgaaagaaattactgttgtcatctcaaacgggagcagtcccactcatgttgatcagaagttaattgatggtccaaaccctaacaatcgccgaaagttgttcataccacttatccttgctgtggagtacttcttggtggtaaaaggaatccggagggcgatccatgcagatatcgcaaacgggaaggtagatgactgggagcagcgttaccgggacctggtgggaagcagggacctcgtagagcagaaaggttctacctcccggaaccgcaaagcctaagttggtgtaccagaaaggattctattcgtgttgagacccacccactcgatctgctgctccttttcctaaatatgtgctgggggctttatagagttcgctggttctacttgaaaaataattgctcgtgttgtagttgataagaatatcttttccattttatgatgcttggccctcttcgcaattttgaatattgttatcaaatccctgctattatgtttagcaagttgttaaatagctattggagt

SEQ ID NO: 269731 - DNA, 528 bp, Zea mays
cttcggtcttcccaaacccccagcatccatgatccatctcatcgacaccccctccgctctccttatcccttccattcgcccaaacccccgccgccgtgacccctgccagcccgcggccttcccctcgttctaggcttcaactgccggcctcgtgtcttctgggcaagtgaagagagagatggcgtcgccaataccgcgcgagtgggtcgggctgcagcagtttcctccggccacccagaccgagctgcacgagctcctcggcaagctcaaggaggaggatgtgagcacattgacaattctggtgatggggaaaggcggagtggggaagtcatctactgttaactccatcgtcggggagaggatcgccactgtcagcgctttccagtctgagggtctgagaccgatgatgtggtcgcgcacaagggcagggttcaccttgaacattatcgacacttccgggcttattgaaggtggatacatttatgagcaggctggtgacatcattaagagatttcttctgggcaagac

SEQ ID NO: 269732 - DNA, 774 bp, Zea mays
cccacgcgtccgcatttattgatctacttacagatcttgtgaaatggctcagttgcatgtgtttgcccatgcttcctcttttacatacatattattatgcgaagaatacaaaattgctctggccaatcctttaaactttgtattttatatatatgcaggcggaagcgcttgttaaagcccaagatgatcttagagaaactgcggggcacttgggaatgacattgattaagctggcaaaatttgaaagagagcaggcaacatgtaattccctaagaagacgtgctggtgaaatccataattttgcaaattctgttttaaagatgagcaggtcacagataaaattaaactctgaaatggtgaaacacctgggcagtatccatgaatacttggagatgatgatatcagttcatcatgcatttacagatcgctctaatgctttacattacgtgcaaattctgtcagcagatttgttttccttgcatatcagggcaaggagacttgaatcgtcgtcagcaagagatatggggcacgagtggtcaacatatcagaaagtagaggggttgaaagaaacaataagatcagcggaagcagccaaaagtgatgcagttagagaatatgaaagtattaaggaaaacaacaagattgaaataaaaagatttgacaaggaaagacgccacgatttcatcgagatgctaaaaggttttgtgataactcaggtgtcttattcagaccattttgctaagatgtggacaaaggtaacggaggaaacagaag

SEQ ID NO: 269733 - DNA, 1130 bp, Zea mays
gaagtggcgtaataagttaacttaaactgttggggatattgggtatatcctgcataagcaccataagcgtatgacggatcctgagcatatccatatgcatcatacccatagccatagtaagcgtttgcccactgatttggatctgcttgctgactccacacagctgatgaatcctgtttactcgcaggacttcggccccatgaaagccgaacagcttgttggccaatcattgtgccatgaagacgttgtactgcctcttcagctgatgccctagatgcatactgtacaaaaccacatcctttaccaacaggaattttcacatatataagttctccaaactgtacacatatctgcctcagctcatcttctatcacatttgggtccaaattcccaataaatatcgtagtgtttgtaggatcactgtcagggagaactgcctggagctgaggcattgcatacgctgttgctggatacaccgctttagcagctgaatactgaagctgagagccagtggatttcttaggtattgcagcacttatccgcataggtctcgttgaacagtacacaccattcatttctgtcattgcacggttcttttcattttcatctgcgaactttacaaatccatatcctttagatctcccggtatttggatccgtgacaaccttagcacctctaacagatgaatagttcactcggaatgtttcctgtagtaagtaatctgtgacatcaggtgccaggtcccctacgaaaatcgaatgatcagatcctggatcagggcgcctctcaccagagctgaaagaggcccaattcaatctgaatgtgtgttcagttccaggcatctgtgtgccattgtaagtctggagaattttctcagcagcttcatgtgaaacaaactctataaacccataaccctcaggaaggcttgttactttgttgcgtattattttaacagattgtacctccccggtgtgagcgaagcagctgtagaggtagttctcgtcggtccagtactggaggtcgccgatccacagagtgcggacctcctccaggctcgtaggctggtgatacggcgccgccatcgagcagcgtgaggctgcttgggggtcggaggccggtttgggtttagt

SEQ ID NO: 269734 - DNA, 453 bp, Zea mays
cagtaaagcggcacacgagcctccggtgctccctctctatctgtcctcactcactcactcactcggtcactccacagcttaattgctcccatttctcctccgcggtttggagcctgcttcctctctcgctgctcctttggaagccccaagcccgccagggcgcctgcaaggagagacgacgacagcaatgccggtggtggacaagggaggcgaggccgccgagttgcccccggacatccgtgggctcggcgtcggcggggagaccagcaggccgtcgcaactccacggtggttctggctcgccaccgatgtagtccaatccaaggcgtccaccaccgccaagcgccgccgcgagacttggggctccaagtcggtgcgcgcgtcgtggaggtggtgtggatgcggcggtgcgtggaggtggaaggacaaggatgccatggtcagtcgcaagcga

SEQ ID NO: 269735 - DNA, 1299 bp, Zea mays
ttttgcgccggctcaaggtacattgcgtgtcctagccaagacacgcagctcagctcagcctcacacgcagagcaagagcgaggcgtgattcgccatgggcggcctcattatggaccaggccttcgtgcaggcccccgagcaccgccccaagcccatcgtcaccgaggccaccggcatccctctcatcgacctctcgcctctgtccgccagcggcggcgccgtggacgcgctggccgccgaggtgggcgcggcgagccgggactggggcttcttcgtggtcgtgggccacggcgtgcccgcagagaccgtggcgcgcgcgacggaggcgcagcgcgcgttcttcgcgctgccggcagagcggaaggccgccgtgcggaggaacgaggcggagccgctcgggtactacgagtcggagcacaccaagaacgtgagggactggaaggaggtgtacgagctcgtgctgcgcgagccgccgccgccggctgccgtggccgacggcgagctcgtgttcgagaacaagtggccccaggatctgccgggcttcagagaggcgctggaggagtacgcgaaagcgatggaagagctggcggtcaagctgctggagctgatcgcccggagcctgaagctgaggcccgaccggctgcacggcttcttcaaggaccagacgaccttcatccggctgaaccactaccctccttgcccgagccccgacctggccctcggcgtggggcggcacaaggacgccggcgccctgaccatcctgtaccaggacgacgtcggcgggctcgacgtccggcggcgctccgacggcgagtgggtccgcgtcaggcccgtgcccgactcgttcatcatcaacgtcggcgacctcatccaggtgtggagcaacgacaggtacgagagcgcggagcaccgggtgtcggtgaactcggcgagggagaggttctccatgccctacttcttcaacccggcgacctacaccaatggtggagccggtggaggagctggtgagcgaggacgatctcgcccaggtacgacgcctacaactggggcgacttcttcagcaccaggaagaacagcaacttcaagaagctcaacgtggagaacattcagatcgcgcatttcaagaagagcctcgtcctcgcctaactactgctactgctaggatccatgccattgccatgtcgtcttcagattcagagcacgccatgtcgtcgctagcttcgtggtagaacaaataatgatgtgcgtgctgtgtgtaagcatggatatggatgtgaatatgtaatatgatgagcactc

SEQ ID NO: 269736 - DNA, 602 bp, Zea mays
agttgctctcaccggtggaaggaagtgcagtagaaggctggaagcggaagcattcgatttccatcgtggggcatggcggcggaggggaagaggaagggcgtcccggcgctagggtggtggctgatgctagtcggctccctccgcctcgcctccgtctggttcggcttcttcgacatctgggcgctccgcgtcgccgtcttctcgcagacggagatgactgatgttcatggccgtacatttggtgtctggactcttttgacctgcaccctgtgcttcctttgcgcactgaacctggaaaataggcctctgtacctggccaccttcctatcattcgtctacgctcttggccatttcctcacggagtacttgatatatcacaccatggctgcagcaaatctgagcacagttggcttctttgcaggaacgtcaatcatatggatgcttcttcagtggaattatcatgggaacccccggggttcctatgctgggaagcagtcatgattgatgcttgggctgttagctttatgtggtccagggggaggaaggataccttataaactgtcagaaaagctcatttcatacttcatttttcatcatgttat

SEQ ID NO: 269737 - DNA, 883 bp, Zea mays
aaaccaaacagtgccgcagtatcccaagtcccaacaaggtcaagtcgcgtggattcgccactagcgggtattgattaccttgccgccccttgaccaaaccaaatcaacacaagtccccattgcttgcaccctacagctcctcacacccaaggtatggaggaggcaccaacgagggagccgaagaggctgcgccaggacgccgcggttacttccgccgcggcggcggctgaggagcctcagtacgtgtacctgcctatcgccgacgccatgaaggttcccggcgtccgggtttgcctcttcgccgttgtctccgagatcggcatcaccgaccgcagccgtggcacggatttcactcttaggttgaggattgtggatcaatcatgcatggatggaatctctgtaacagtttttgctgacaaaactactctattgccttgtgtcaagtcaagtggagatgtgatcagtctccataacgtcatgataacgatgcatggggagttctttgtttcatttaacaaagaagattcttcatttgcgctatatgaaagcaaagtagctgagtgcagcccatatcagacttctgtgaaatatcatggcagcaaacatgacaaagaacttttaacccagatgagaacgtggcttgcatataatcctctaggtctgaaagattttgaattgcagttaagaagtttaaaatctgattctacttttgatctagtatgcaaggttgttcatgtccatgaagataacgacaaattgatattttatgtttgggatggaactgatacccctgctgttgagtttcaggcaactttggatccaaaggcagttgaatcaccccctctatttgaagggccacctctacccagggaggttttgtgca

SEQ ID NO: 269738 - DNA, 437 bp, Zea mays
  unsure (1)..(437): unsure at all n locations
tggcatgaccagggaaaagaaaataaaggntatcttagaaaaaacatttgttgatgtcagncacgtcactattttcactttaacttacctgtttttttgtgcctctttgatattgattggtgaacatatagtttggatccaaaggcagttgaatcaccccctctatttgaagggccacctctacccagggaggttttgtgcacaatgccaattatcggaactgttttgaggattttttcagatatgcctatcaaggaagtatcccacatgcaaaatagggtttattgggccagattctgtaacattacttgcaaggaagagtttggcatttggaaaggcattttgctggcctctagtaaagttcggcttttatctcatgaagatggtagccgtcctgctcgtcgaaagttgtctgccattcgtaaggccaaccaagt

SEQ ID NO: 269739 - DNA, 1034 bp, Zea mays
cctcacttactccccgcgcgatccacggccccctccccccgcgctcctgtctgctgtgcctctggggaatggcgacgccctcggccgtgggcgccgagtgcctcctcctcgcgcgggccgactggccggccggcgtcggcgaccgggcgcgcccgcggcggctccagcgcgtgctgcgccgccggtgcgtcgcggagctgagcagggaggggcccgcgccgcgcccgctgtcacccgcgctgctggcgcccccgctcgtgcccggcttcctcgcgccgccggccgagcccacgggtgtagccggcatcgacgccgccgcccgtgcccggcgccggcctgggggacctcggtctcgaacctgaagggattgctgaaggctccatcgataacacagtagttgtggcaagtgagcaagattctgagattgtggttggaaaggagcaagctcgagctaaagtaacacaaagcattgtctttgtaaccggcgaagcttctccttatgcaaagtctgggggtctaggagatgtttgtggttcattgccagttgctcttgctgctcgtggtcaccgtgtgatggttgtaatgcccagatatttaaatggtacctccgataagaattatgcaaatgcattttacacagaaaaacacattcggattccatgctttggcggtgaacatgaagttaccttcttccatgagtatagagattcagttgactgggtgtttgttgatcatccctcatatcacagacctggaaatttatatggagataagttcggtgcttttggtgatcatcagttcagatacacactcctttgctatgctgcatgtgaggctcctttgcaccttgaatcgggaggatatatttatggacagcatagcatgtttgttgtcaatgattggcatgccactctagtgccagtacttcttgctgcaaaatatagaccatatggcgtttataaagactcccgcagcattcttgtgatacataatttatcacatcaaggtgtacagcctgcaagcacatatgctga

SEQ ID NO: 269740 - DNA, 662 bp, Zea mays
tcttgtttgtgaaaaggtgccagtgaggacgaatccaagcacacgcccccactcgcttgaaactgccgcagagccccgcaaaggcaacgactgaaactgctccggcgaccacgagcgcacctaaaccccgcctgcgtctcgtcgccgagaagaatcttcgccttcgcgaagcctctccatctcccctctccgccgccgccgcttcctcgccgggactcgggagtcgggagcaatgcagctggaccaccacccctattcgctggacagccagaaggtgcggatggcgctggatgagaagggcattgactacacatcttatcacgtcaatcctctcaccggcaaaaacatgaatgtggacttcttccgcatgaacccttccgcgaagctccctgtcttccagaatggagcgcatgtcatctatcgcgctatcgatattattcagtacatagacagacttgcagtgcatttaagtggtgaaatcccccctgtgaacactgaggtccaccaatggatgcagaaagttgatgcttggaaccctgagatgttcaccctcacgcacaccccatccaagtaccgtgcgtttgtctccaagttcataaagcgggtgctgattgctcgcatggctcaagcccctgatttagccagcatgtatcatgtcaagc

SEQ ID NO: 269741 - DNA, 957 bp, Zea mays
aaggctggcccccccgcgggccccggcgcggattccgcggggcgccaccacgcgcgctttacgacttgccagccgcgctagatacacactattcatcacccggagtgccggacggacgcacacgcatcgcttgcttgtcggtctccactcctcttcccccgctgctcgcctctcgattccgcctcatcgcgtccgcgaactccatgtccactgcgaccgcgaccctggccgccgcgcgatccccggctgtcgcgcttctcagcctgcgccgccgcgcacccgcggctgcccccattcgcttccccggtctccgcgtcggctctggttgccgtcacatagctatggcttccgcggcgcacgcccgcgcccccaccgacccgcttcccaagggtgctgatttatttttccgggcagtaatctcgaacatggaaaaggtttatttgagcaggaatcctacagccaaaaccattctggagcttgtgcgatcttatgatggtgatcatatttgctatgatcactttgctttccggacatttggggtcaatggttatggtataaactcactttctgattttttcactgattttggttatttacctcgcgaagaactcagatttccagctaaaaagcttagggcactatggttttccccgcccaccaatgacggctactctggaactggtacatatggacctttgccaaggatattcatttcagaacttcttgtggatgagttgactactcaaagccaggaaattatacataaatacattacaacttctggcaatggaaataatcatgctgctattgcaagtacatctggggagctaacatgggagaagcccatttattcagatttccagattttgtctaggaaaagtgaatatgctgcatggactcttgttaatggctatgcactaaatcatgccacaattgccacccatcgcctagaatcag

SEQ ID NO: 269742 - DNA, 458 bp, Zea mays
cggacgcgtggccgctccaccttcggcacaaaatgcaaaacatgtttaaatcttgtcatttcaagaatcaagctgctgcgcaacaggagggagttacaactaataaatatgcgcaaagaaatggttcaatatcttcagactggccaggaatcaatcgcgaggattcgagtggagcacattattcgggagcaaaatatattggctgcctatgagatcgttgagcttttctgtgaatttgttctggcaagagtccctattgttgaggtccaaaaggaatgccccttagaactgcgtgaagccattgctagtataatctttgcatcacgaaggtgttcagacttgcctgagctaatgcatctccgtaatttgtttaccaccaagtatggaaaggagtctgctgctggtgctatggaattgcgccccgacagcagtgtcaaccgcacaataattgaaaagct

SEQ ID NO: 269743 - DNA, 363 bp, Zea mays
ggcgaggagtgtttggaggcgtaattctgaacatgcatttgcattggaaaaaacatgaaactgtgaaggtcatatgtaagccctgcaaaccagggcagatccaggaatatgcaaacgagatagcccgactgagcggtggcatccctgtcaacgtcattggagatgacaccatagtcttctatcgaggaaagagctatgttcagccagaagttatgtcacctgttgatacactgtcaaagaaaaaggcacttgaaaaatcaaaatacgaacagtcgctggagacagttcggcgtttcattgcaatatccgagaaggaacttgagctttattaccggcatgtcgcactttatggaatttcacaat

SEQ ID NO: 269744 - DNA, 500 bp, Zea mays
acgccctgctcccccaccccatgtcaacggccaccgcgccgtctccgtccccgtccccttctccctcgtctggaactcgccctctgctccggatcggcgcggcccgtcgtttcgccatggcatttccgccatgggcggctctgctctttgcggggctatctggtgctggtgttggcggcggcgggagcggacgcgggaggagggagcgtctgcttcgaccggatgttcagcttcggggactcgctcacggataccggcaacttcctgctctccgtgcccgacgacttcccggaccccgcgcggaaccttccctacggccagaccttcttcggccgcccctccggccgctactccgacggccgcaacctgctcgacttcttcgcagaggcatttgggttgccatatgtgccaccttacctaggcagtggggacttccagaatggcgcaaactttgcagtcggcggcgcaactgctctcaatggctcgttcttccgtgagcg

SEQ ID NO: 269745 - DNA, 546 bp, Zea mays
acggccacgcgtgcgcccacgcgtccgcccacgcgtccgcccacgcgtccgcccacgcgtccggcaagatcaacgtcgtcgttcaagccagccattcaagccagcggtagtagagactacgaccgaggctagctaagctaagagatggcggatcaccagtactcggcgtggacgacttccgctgctcgtcatcgggtcttctcctgtgcgctcatggctcttgttagttttgtggctgcaggacgacccatggtgctcgccgacgccatcgtctttcacgtggcgaacaggtgcccgttcccggtgtggccggcgtccgcccctaacaccggccacccagtgctcgccggcggcggcttctacgtcccgcagggcaagtcgaggcgcgtcgtcgcgccggccaactggaacgggcgcttctgggctcgcaccgggtgcaacttcaccgcgaacggcatgggcgtagcgggctgcctcaccggcgactgcgagggccggctcgcctgtaacgggtccgtgggcgccccgcccgccacgctagtcgag

SEQ ID NO: 269746 - DNA, 378 bp, Zea mays
gcagggactccttttcttctttcttttgtgggaatggccgaagtacttggctggacatataggccacctatagttgctcattgtgatcgcaagcgggtcctttcatcttgggctccatactgtaggaatgtggtaccacttgaatatcaagttgaattttcaaaggtcaggtccctgtctccgacgacaatttgttgacaggctatcaaaggatcttagaataaacggtgtcgtggcaggtgcaacttacaggtttggttacaaagccatctggtgacgcaactgcgttagtgaaactatgtgaggcatttagtttaagtgccttccatgtacgctctgtcatggccacagccaaaagatctcttactggattttcag

SEQ ID NO: 269747 - DNA, 665 bp, Zea mays
caccagcgttttctcctatcgccccccttcggccttccccactgtactctccaatctcgccgccaagcctcaccgcaccatggcgaccttcaccgcggcctcctccctctccctcctcttctcccacccgcactcccactcccgccaaccatccgcccaggggcccaccgccagctcccacctccacctgcatccgcgcgccagccgcgcgcgctgcgcctcttccgacacgacggccacgaagcaccgccgcccagcggaggagaacatccgcgaggaggcggcgcggctccgaggcccggcccagggtttctctgcgtggtacgagcccttcccgccggcgcccggcggcgacccgaacgagcgctactcgctggacgaggtcgtctaccgctccagctcggggggcctcctcgacgtgcgccacgacatggaggcgctggcccgctacccggggtcctactggcgtgacctcttcgactcccgcgtcggccgcaccgcctggccctacggctcgggcgtctggtccaagaaggagttcgtgctccccgagatcgactccgaccacatcgtctccctcttcgagggcaactccaacctcttctgggcggagcgcctcggccgcgagcacctcggcgggatgaacgacctctgggtcaagcact

SEQ ID NO: 269748 - DNA, 431 bp, Zea mays
gcgcagaaaatgaatagcggacatcagcagattggaagacctactgaagaagacttaggaagttggggacatcactgtgacccatcaactgtacctgatactatactgcagtgttctgctggcgaagaggtttcttttgttttcaccaatcaggttgacggaaaacttgttccagttgaatctatggtgcgatcagcagctcatcaacaaaacggaatagcagccaccggagaaaaaggagtgcagatacccaaatctcctagcaaacctggaaagcaatccttaaatggcaagaatttgaagatgggatttcatttaaagaattcgtctttgaaatgttcaaccatatccagaccatcaccaaattgcttgcaagggttgatgaaaaccagcccctttttggatcaacctcaaattaaaagcttcatgtg

SEQ ID NO: 269749 - DNA, 387 bp, Zea mays
ctccgcgccgccgctcccaacatcgatctcctctaccaaggacgcgctctctcttctcaccaccctgcagacgcagctcttcgaggccgtcgccgagctgcaagagaccctcgacctgcaggatgcgcgcgctcgccttgtccgtgaggcgcgtgccaaggatgcttcgctggtaacctttgcgaagaagctgcacgaggctcaccaggtacttgaccgcctcgtcgacgattacgctgactaccgccgcgatcccaaacgcccacgtggcgccgctgcggctgacgatcccgagccggcgtcggaaggcgacttcggcacattcctacactccagccttaagctggatgacatactgacctacgcgcaccgcataagttacacaac

SEQ ID NO: 269750 - DNA, 1093 bp, Zea mays
cgcactcatcactcctcactcactcactcaaaacgaaagccagctcagctctgctcagctgctcacacctcacacccacaggcctgccgccacagcaccgcggatagcagagcagagcggcagccaggtcggtcgtcgtcgtcgtcgtcagccatgagcaaggacaagcaccacaagcacgagcaccacctgcggcgttgctgcgggtgcatggcgtcgtgcctcctggcgctggtcctcatcgtggccttcgtctcgctggtggtgtacctggcgctgcgcccctcgaagccgtccttctacctgcaggacctgcagctgcgcaggcccatctcgctgggcgacccgtcgctgacggcgtcggcgcaggtgacgctggcctcccgcaaccccaacgaccgcgtgggcatcttctacaagcgcctggacgtgttcgtcacctaccgcgacgaggccgtgacggtgcccgtgtctctgccgccgcagtaccagggccaccgcgacttcaccgtctggtcccccgtgctgtcggccgagtccgtgcccgttgccgcctacgtcgccgacgccatgaagcaggacgtcgccgcgggcttcgtcgcgctgcaggtcaaggtggacggccgcgtcaagtggaaggtcggcagctgggtctccggcagctaccacctcttcgtcagctgccccgccgtgctctccgcgggctaccccggcgtcaacaacaccgtgacgtcgctcaagttcgcccagcccacaggatgcagcgtcgaggtgtgagtttgtgaccaaacaagtgccctccctgtcctgccccctacgtattgttgcgtgctactcaaatttcatctctgggtgcgccggccgccgttaactgggttcttttaattttgttcatgtctcgttgtcaattctcattctcttgtgggccgggggaataaattatttatttgctttcgccagatggctgtccagaaacttcaactcagttgtaccatgacgtgtattaattatttgatttcgtccttttattatcctcaaatgtttttccaaaaaaaaaaaaaaccaaaaaaaaaaaaaaagggcggccgacaaa

SEQ ID NO: 269751 - DNA, 386 bp, Zea mays
actcatcactcctcactcactcactcaaaagttcaaaacgaaagccagctcagctcagctcagctcagctcatctgctcacacctcacacccacaggccggccgccacagcaccgcggatagcagagcagagcggtgagctgcagagcagggcagccgaggtcggtcgtcgtcgtcgtcgtcagccatgagcaaggacaagcaccacaagcacgagcaccacctgcggcgttgctgcgggtgcatggcgtcgtgcctcctggcgctggtcctcatcgtggccttcgtctcgctggtggtgtacctggcgctgcgcccctcgaagccgtccttctacctgcaggacctgcagctgcgcaggcccatctcgctgggcgacccgtcgct

SEQ ID NO: 269752 - DNA, 306 bp, Zea mays
cactcactcaaaacgaaagccagctcagctcatctgctcacacctcacaggctcacacccacaggccggccgccacagcaccgcggatagcagagcagagcggtgagctgcagagcagggtagccgaggtcgtcgtcgtcgtcgtcactcgtcagccatgagcacggacaagcaccacaagcacgagcaccacctgcggcgttgctgcgggtgcatggcgtcgtgcctcctggcgctggtcctcatcgtggccttcgtctcgctggtggtgtacctggcgctgcgcccctcgaagccgtccttcta

SEQ ID NO: 269753 - DNA, 381 bp, Zea mays
ccccaaccttccaggaaaaaaaacccggaatccgcacacccccatccatggccgccgccctgctccgccgctcgccggcggtgcgcgcgctcctctcgccggcactctcgtcccgcctcgtcgcgtccaagccccactcctcgtcccccgcgccgccgccacctgccaaggccgcctccagcacgaagaccttctcgatctaccggtgggacccggactcgccgtcgacgaagccgcacctcaaggactaccacgtggacctgtccgactgcgggccgatggtgctggacgcgctgctcaagatcaacaaggagcaggacccgtcgctcaccttccgccgcagctgccgcgagggcatctgcgggagctgcgccatgaaca

SEQ ID NO: 269754 - DNA, 367 bp, Zea mays
aaaggcccccaaccccaaccttgcaggaaaagagagagagagagacgagcccccaaatcggaatccgcacacccccatccatggccgccgccctgctccgccgctcgccggcggtgcgcgcgctcctctcgccggcactctcgtcccgcctcgtcgcgtccaagccccactcctcgtcccccgcgccgccgccacctgccaaggccgcctccagcacgaagaccttctcgatctaccggtgggacccggactcgccgtcgacgaagccgcacctcaaggactaccaggtggacctgtccgactgcgggccgatggagctggacgcgctgctcaagatcaagaacgagcaggacccggcgctcacctt

SEQ ID NO: 269755 - DNA, 901 bp, Zea mays
cctcctctctccgtcgacctcgctctcgcctcgccgcctccgacccgcagcagcgcctccattgctctctctcacgagtcccggcgttccagtggggggcattcatggcggggcagtccgacccgcacctctccatcttctcgccctccgaggtggagttcgtggctgaggatgagattgtcgaaatcgtccccaacatccgcatggacgccctcaacatgatctgcggggatttcgggcccttcttcccccagattcccaccaaggtgcctctctggctcgctgtcgcgctcaagaagcgtagcaagtgcaccatccgcaccccggactggatgactgttgaccgcttgacacaggtattggaagcggaaagagagtcgccacgagaattccagccattaccattccactatattgaaatttctaagcttctgtttgatcatgctcgtgatgacatctcagatgcatacctggtaagatctctaattgaggacatcagagatgtcagatttcacaaggttgagactggattagagacgatatctggacgcacccatgccgtaaagctcaaaaatctctctgcaatggaagtgaacattgtccgccctttcatggtgagaactttgcaggcattctataagcacgatagtgcacagatgattcagcaagcagataatatagggagcagagcaacactggttacagaccgtggcccgagaagagatctaaggcgcaggtagtccacttgtattctgccaaaaaaaatgtatatctgaggacagcagcaagtggttgccttcttgcaataataccagctaagtatgtgctaatgagtcctgagatgtatcagatagtaaagcaatggtggatcatagtttgtctacttttatagagggaactg

SEQ ID NO: 269756 - DNA, 825 bp, Zea mays
ctctttgcgtgtccgtccgggtttccgcctgtgcgttgcctgctgcctctgatccactgatcagtggcctcgcctccccgcgttccgctcccccctcccgccccctgatcccgcgatcggcggggcgcccgccctctccctctccgtgagcgtagcagatccggcgacccgcacgccctccgccggccgccccgacccgccggacgatctagatccacgggaagcatctgctatcattttgttttcttcgaagtaatccaagaaaagttgcttccagatgtcaactgcaaaagtgttagatcctgcttttcaaggggctggccaaaacgttgggacagaaatatggcggattgaagattttaagccagttccgctgccaaaatctgattatggtaaattctactgtggagattcatacatagttctgcagacgacctgtactaaaggtggtgcctatctatatgatatccacttctggattgggaaagattcgagtcaagatgaagctgggactgcagcaatcaagacagttgaacttgatgccatccttgggggtcgtgcaatccaacatagggaactccaaggttatgaatctgacaaattcttgtcatacttcaagccttgcattatacctttggagggtggtttcgcctctgggttcaaaaagcctgaagaggagaagtttgaaacacggttgtatatttgcagagggaagacagctattcgggttaaagaggttcccttcgcccggtcatcattaaaccatgatgatgtgtttgtcttagatgctgaaaataagatataccagttttaatggtgctaact

SEQ ID NO: 269757 - DNA, 1033 bp, Zea mays
aaccaccagacatattgcagtctgccgtacaagtgaaagggtttggtgaaaaattccggccgcctcagcgtcgcgaggtgggggacgagacgaagccagagcgccccaaacccaaaccccagaaccccgacatagggttacgccatcgccatgggatctgttgcctccgcagcagcgccaccttctcctcactcagcgctaccccaggagggcgcgccgccctatggccccgggctcgccgggatcctcccgcagacgtcagtgggagaggagaagaaggaggagaaggtggactacctcaacctcctctgccccgtgcccttcgaggagatccagcgcgaggctctcatgtctttgaagcctgaactttttgaaggattgaggtttgacttcacaaaaggattgaatcagaagttttctcttagccacagcatttttatgggctccttagaagttccagcccaggcatctgaaactattaaagttccaactgcacattatgaatttggcgccaattttttagatccaaagttaatgctcattggaagggtgatgacagatggaaggcttaatgctcgcgtgaaatgtgatttgacagacaatctgatgctgaaagtaaatgcacagcttacccaagaggcacattactcacaaggaatgtttaactttgactacaagggaagtgactatcgagcacaattccaaatagggaacaatgcattctatggtgcaaattatattcagagtgttactccgaacctatcaatgggaactgaaatgttctggcttggtcaccaaaggaagtctggaattggttttgcctgtcgctataacacggacaaaatggtgggcactctacaggtcgcaagcactggaatagttgccttaagttatgtccagaagatttctgagaaggtttcccttgcgtctgatttcatgtataaccatatgtcaagagacgtaacttccagctttggttacgattacttgcttaggcagtgccgtctaagaggcaaaattgactcgaatggtg

SEQ ID NO: 269758 - DNA, 479 bp, Zea mays
  unsure (1)..(479): unsure at all n locations
ttccttctcngtcncgaaaattccggccgcctcagcgtcgcgaggtgggggacgagacgaagccagagcgccccaaacccaaaccccagaaccccgacatagggttacgccatcgccatgggatctgttgcctccgcagcagcgccaccttctcctcactcagcgctaccccaggagggcgcgccgccctatggccccgggctcgccgggatcctcccgcagacgtcagtgggagaggagaagaaggaggagaaggtggactacctcaacctcctctgccccgtgcccttcgaggagatccagcgcgaggctctcatgtctttgaagcctgaactttctgaaggattgaggtttgacttcacacaagggttgaatcaaagttttctctcagccacaggtaagatcattacataagggcagacccagggccagaggctcccacatgagtgtggcctggggaagggataaactgaaccaag

SEQ ID NO: 269759 - DNA, 386 bp, Zea mays
cccacgcgtctgtccacgcgtccgccgccacgcctctcaaagaggcgattccctcctccctcccactcccacatggccggcgagctgcgccaccgccgcgtgccgtcggaggacggggacgagggcgccgccgcctctcaaggacccgatccagccgccggcaacggcaaggccggcacggcgtctgagggggcggagccgcggcgcggcaagagggacgcgctcgggtggctggagtggggccgcgggtggatggccgtcgtgggggagttcctattccagcgcatcgccgccagccacctcgccaacccgctcgagctgcccccgctcgacggcgtctccgtcgtcgtcaccggcgccaccagcggcattgggctcgagatcgc

SEQ ID NO: 269760 - DNA, 968 bp, Zea mays
gcaggggcccgagagcatcaccttcgaccagcagggccatacacgggcgtcgccgacggccgggtcgtcttctgggacggcgagcggtgggtcccattcgcgatggccttcccgtgctggacgcaggagctccacggagggccgaaggcctcgccgctggagtatctcccagcgagcatatctgcaaccgcccgctcgggctctgtttcgataagaagaccggggacctgtacatcgccgacgcctacttcggcttgcttaaggtcggtcccgaaggcgggctggccacgccgctcgcaacggaggccgagggcgtgcgcctcaacttcaccaacgacctcgatctcgacgacgagggcaatgtgtacttcacggactccagcatccactaccagagacggaatttcatgcagttagttttctcgggggatccctctgggagacttctgaaatataacccacagacaaaggaaacgacagtactgcatcgcaacctccaatttcccaacggtgtgtccatgagcaaggatggctcattctttgttttctgtgaaggatcgcgcggcaggttgagcagatactggttgaaaggcgagaaggcaggcactgtggatcttttcgctatcttgcctggcttcccagacaatgtgagaacgaatgagaagggcgagttctgggtggcaatccactgccgccgaggtctgtacgcccggcttatgagccgccatgtcaagctgaggaagtttttgctcagcctcccgatccccgccaagtaccactacctgatgcagatcggtggcaggctccacgcggtcatcatcaagtacagcccagagggccaggtgcttgacatcttggaggacaccaagggcgaggtggtgagagccgtcagcgaagtggaggagaaagacgggaacctctggatagggtctgtcctgatgccgttcatcgctgtctttgacctcgcg

SEQ ID NO: 269761 - DNA, 810 bp, Zea mays
tcgtccacgcgtacgaccacgcgtgcgtgggaaaaaagaaaaaaagagaaaaagaaaaaaaggaacataaaaaggaaaaaaaaaaatattaagtggaacaaaaaaaagaccaggaacaaacaataactaatcagcagttgcttttggccagcgcgtcttttgattcaactatcaagctttgggaagtcgagcaaggatgccttctgtacagcttgtctggtcataggcaaccagtgtattctgttgcatttagccccgacggcgaatacttagcgagcgggtccctggatcagtgcctacacatctggtctgtgaaagaaggcaggatcctgaagacgtacagaggtactgggggcatattcgaagtgtgctggaacaaagaaggcagcaagattgctgcctgtttctccaacaacacagtctgcgtgatggatttccggatgtagtccaaccagtagggtggtgcatatcaatcctaacacaaggctagatcataaatccgtcccatgcaaatttgtgaagagcggagttgttagcaaaatgtagatcctaggtggcttcaacttttgtccatgcacatttcgtttttcttggtcatacttaccttagagtagcaatgtagtagtggaaatgccttaacagggtttagtagcatggaaatgttttggtggtaaattaatgaattaatctgagatgtactagtttgtagtttgcacataccgtcgtgtcaatgtcttttatattgaaaaaaaaataataaaaaaaaaaaaataataaaagaaaaattaaaaatttaaaaattttaataac

SEQ ID NO: 269762 - DNA, 374 bp, Zea mays
tgatgattggacagcaaagatatggagtatgaagcaagacaaatgtgtatttgatttcaaggagcataccaaggaaatatacactattcggtggagcccaacaggcccaggaacaaacaatcctaatcagcagttgcttttggccagcgcgtcttttgattcaactatcaagctttgggaagtcgagcaaggatgccttctgtacagcttgtctggtcataggcaaccagtgtattctgttgcatttagccccgacggcgaatacttagcgagcgggtccctggatcagtgcctacacatctggtctgtgaaagaaggcaagatcctgaagacgtacagaggtactgggggcatattcgaagtgtgcttgaaca

SEQ ID NO: 269763 - DNA, 901 bp, Zea mays
cccgcccctccccagtcgacacaatagaccactgatttcacaatgaaaagggagacaatgccttcatggctagaactgttgcttgcaacacaattctttacgacttgtgctaaccatcttcttgctagtcgcaatgaatgtaacctattttgcacccagtgtgagaccaaaccagctgctttctgtaactattgtcgttcaagtgatcattccacccaccgtgtaatccagataaggcgttcatcgtaccatgacgttgtgagggtgtccgagattgaggatatccttgatgtcagcgatgtgcaaacttatgtaatcaatagtgcaaggattgtattcctgaatgagcggccacaactgcgtgcttctagtgtccccatttgtaaggcacccacatcatcaacacatagctgtgagacatgtagccgtgtgctacttgatgcatttcgcttctgctctcttggatgcaatcttagaggcttaaatatggaagctggtatgcaagctatggttggcaacaaccctcggtccaatggtatggatcatgtggctaggattgacaatgttggttcaagtactacaaatgaccaaaacagctgcaatgacaagaactacgaagaaccaccaccaaaaagggttgctcgtcacagacgcaagggaattccccaacgtgcgccattcttctaatctgaacatcatgacaatgtccagtaaatgttgtgggaaataagaagagataatatttgtcatgggtgaaatgaatgaatgaaataaataaaagaatgaatgaatggcccccgttctatgtaaaaaaaaaaataaaaaaaaaaaaaaaaaaaaaaaaaaaaaaaaaaaaaaaaaaaaaaaaaaaaaaaaaaaaaaaaaaaaaagggcggccgct

SEQ ID NO: 269764 - DNA, 431 bp, Zea mays
cattccaggatctgataccccgcgggtcacggttccgcaaagggaaagcctcaaaaggcgacgcgcaagggccgaggagagaaaggaacctgaggaaggcacaccagtttcaagcaatccctaggccgtggcgacgtgctgggaaggattcaaatcaggggcgaagcctaggtgacggcgctgttagtcgcctctagtagctgcgcgacgcgggctggcttgtccgatcggtttgcctcggccatgtcgactaagaaagttctttgcaagttcttcatgcatggagcttgcttgaaaggagagtactgtgaattctcccacgactggagtgatcaagcaaataatgtttgcacattctaccaaaaaggtgcatgctcgtatggtagccgttgcagatatgaccatgtcaaagtttctccgaaccccacagt

SEQ ID NO: 269765 - DNA, 534 bp, Zea mays
gagaagtcggtcaacacgatccggttcctggccatcgacgccgtcgagaaggccaactccggccacccgggcctccccatgggctgcgcgcccatgggccacgtcctctacgacgaggtcatgcgctacaaccccaagaacccctactggttcaaccgcgaccgcttcgtcctctccgccggccacggctgcatgctccagtacgccctcctccacctcgccggttacgacagcgttaaggaggaggacttgaagcagttctggcaatggggaagcagaacaccgggccaccctgagaactttgagactccaggagttgaagttaccaccgggcctcttggtcagggtatcgccaatgccgttgggttggcacttgctgagaagcacctggctgcccgcttcaacaagcctgacagtgagatcgtcgaccactacacgtacgttattttgggagatggctgccaaatggaaggtattgctaatgaagcttgctccttggctggacactggggtcttggcaggctgattgctttc

SEQ ID NO: 269766 - DNA, 770 bp, Zea mays
gtaacgggagaccacttgcgcaagctatgatcagaaaaaaaaaatcaggtcgtccttgcaaactggtttattttttttcacaaatatcaaaacgcacactacatctacatgaaaccggaaaacgaataaaagaaaaagaaaaacaggaggagcaaaacctcctacaagagcaactgtcccaagcgcgcacctactatactactagtaactaatagcggacgcgtgggccaccacctctctcacgtgtgtgaggtggcgagcccgaggaggagcggcaggccacaggtccgatccccccgtatctaatccgctccgagagcgcagcggctcgttcctcgcgggggcgcacggttggcatttcgagtgctgagacatcggcttcattgaatcctaaagcacggttgagccatggctggctcccttgctgcctcaggcttcttccctggcccaggggcttctccggcagcatccgccaaaacatcaaagaacttggctggtgaattaccggataatttgagcgtgcgtggtattgtcgcaacgcctaatgccccttcggggaacatgcaagtcaaggctcaagcacaagcccttcccaaggttaatggtaccaaggttaacctcaagaatgcaagcccagacacagaggaggcgataccctacattgctgccaagacatctgtcagcctactagaccattggagcatgcttcttagcggctgtcactaccattctttcttgcagcagagaagcagttgacactgcttgactgg

SEQ ID NO: 269767 - DNA, 436 bp, Zea mays
cggacgcgtgggttttttcagagaaaacagagggaggaaagaaaaagctcacccccctctctcttcccaccacctctctcacgtgtgtgaggtggcgagcccaaggaggagcgggaggccacaagtccgatccgcccgtatctaatccgctcgagcgcagcggctcgttcctcgcgggggcgcacggttggcatttcgagtgctgagacatcggcttcattgaatcctaaagcacggttgagccatggctggctcccttgctgcctcagccttcttccctggcccaggggcgtctccagcagcatccgcgaagaacttggctggtgaagtaccggatagtttgagcgtccgtggtattgtcgcaaagcctaatgccaattctgggaacatgcaagtgaaggctcaagcacaaacccttcccaaggttaatggcacc

SEQ ID NO: 269768 - DNA, 1000 bp, Zea mays
aggcgatcgcatattcgcacccacccatcacacgacaaaatccctcaccctcgtgagtcctgacgccctcgcccgtgctcgcagttggtagggttgtagccatggcgtggagcgccgccgccgtctccaggttcgccgccgcctccccacccgcggcacccatctccgtcaggcttggagccgccgcttctcgctcctccctgtccttctccagtgggcgccgacgccccgtggccgcgtccctctcgacctctgccaccgttgtaaaggaggctgttcagacagagaaggcaccaccagcactaggcccttattctcaggccatcaaagcaaataatcttgtgtttgtttctggagttcttggcttgaatcccgagaccaggaagtttatctctgaaaatgttgaggagcaaactgagcaggttatgaaaaacatgggcgagatattgaaagctagtggtgctagctattcttcagttgtgaagacaacgatcatgttggctgatctgcaggatttcaataaagtaaacgagatctatggcaaatatttcccggcgccagcacctgcacgatcaacctaccaagtggcggcgctgccactgaatgcccggattgagattgagtgcatcgctgctctctaatcagatcatccaaccactcattaaatcatcaataagcacccaggaatttgtggtagaggtacctgtaccagttcagtgtctgaaaactgcgggtaacaaacctttgtgtcccggataagtgatgtgtgtgtgtgtgtgtgtgagtgaacagtgcatctagtaggagaattgttgcgtggtttgttacttggattcttcgctctttagacaagaagtaccatggcatcaacatcaatagcctactgttttcttcccaataagaaaaaaaaaaaataaaaaaaaaaaaaaaaaaaaaaataaaaaaaaaaaaaaaaaaaaaaaaaagggcggccgcccgggaatacggacggtacgtgcag

SEQ ID NO: 269769 - DNA, 1167 bp, Zea mays
gacccacgcgtccgcccacgcgtccgcacgaatatacccatcccattccccacaaggctccgtcccttcggcggcggcggcgatgtctctcccccctggcccggcggacagtggcgccggcaccggagacgactggttcctcgactgcggcatcctcgacgacctgcccgccgcggcctgcggggccttcccgtgggacgcgtccccgtcgtcttccaaccccagtgtggaagtgggcagctatgtgaacaccaatgatgttttcaaggagcccaatgatgtcttcaaggagcctggcagcaataagcgtttgaggtcaggatccaatgatgtgcatgtgccaacatctaaagcttctagggaaaaaatgaggaggaacaagctgaatgacaggtttcttgaattggggtctacattagaaccagggaagccagtaaaagctgacaaagctgctatcctaagtgatgctactcgcatggttattcagcttcgttcagaagcacagcagctgaaggaaactaatggtagtcttgaagaaaagatcaaagaactcaaggccgagaaggacgagcttcgcgacgagaagcagaaactgaaactggagaaggagagtctagagcaccagatgaagctgatggcatcggctccagcctacatgccccatccgaccctgatgccggcgcctttcccccaggcgcccctagcgccgttccatgcccaggggcaagctgcagggcagaagctgatgatgccctttgtcagctatccggggtacccaatgtggcagttcatgccgccttcagaggtcgacacctcgaaggacagtgaagcgtgccctcctgttgcataatcgcttcgactggcggctggtcctgctcacaccatgcgaattagtcgcaactgaagcccccccccctagctgtcgatccattgattggctataactgctgttgttatatttgtagttcgttggtgaccaagtaagctgctgatatctgtggcggggcgccctactatagaggctactgatacccctttaatggctgtacattttttttactgttattctttttgcggagaaaagaagaatgttcgttcttgttctccacagcaacaatgtcacataccctattattctatatatatatcgtgtattttatatttaac

SEQ ID NO: 269770 - DNA, 742 bp, Zea mays
tcgcccactcgttcgcccacgcgttcgcccacgcgtccgcccacgcgtccgcccacgcgtccggccacgcggcccggatgagcttcgtgatgagaagcataagctgaaattggagaaggagagtttagaacaccagatgaagctgatgacatcgactccaacctacatgcctcatccgaccttgatgctggcgcctttccctcaggcacccctagcgtcgttccatgcccaggggcaagctgcatggcagaagctgatgatgccctttgtcagctatccggggtacccaatgtggcagttccatgccgccttcagaggtcgacacctcgaagaacagtgaagcgtgccctcctgttgcatgatcaccttgatggggctggtcctgctcacaccatgtggattagccgcaactagttgtcgttgtcgatccattgatggggtataactgatgttcttaggctatctccagcagcctctctatcctattctctatcttactccctattttaaattttactctataaacagtacagtctatagtgtaagacaatgttttgcatgtttatatccacactttgctggagatgggcatggtagtctgttggtgaccaaggaagctgtgatatctgtggcgaggtgccctgctagaggctcctttaatgggtgtacaattttcgtggtggaaagaagaatgttcgttcttgatctccatagcaacggggaaaaaaaaaggaaaggacga

SEQ ID NO: 269771 - DNA, 404 bp, Zea mays
cccacgcgtccgcccacgcgtccgtccactcgtccgagccctcccggctcccagggtctctctgcggcggcggcgatgtctctccccccggacccggcgggcggcggcgccggcaccggcaccggcaccggcgacgactggttcctcgactgcggcatcctcgacgacctcccggccgcggcctgcggggccttcccgtgggacgcgtccccgtcttcttccaaccccagtgtggaagtgggcagctatgtgaacaccaatgatgttttcaaggagcccaatgatgtcttcaaggagcctggcagcaataagcgtttgaggtcaggattcaatgatgtgcatgtgccaacatctaaagcttctaggggaaaaatgatgaggaacaagctgaatgacaggtttct

SEQ ID NO: 269772 - DNA, 967 bp, Zea mays
gcacagtagtcgtcaccaatagtaacagctcaatgacttgttcataatgtcttgacaagcattaccaaataacagaaaaaacacaaccactataacttaacataatgtaacctatcaaaattacctctccggaagctaatgtgctgtttgggaagaagagaaatcttgggcccgagcagactgaaatgcccgagggaaaaacccaagacaatccccccttccaagcacgcttatcaaaccatcaaccctaacatattaaggcactgacttaattcacacgcagaaatcaacggtttgcaggaaatcgtccatgccgcggccgaggtcgcagccaggcatctccgggaagacgtcgttgatatcgtcgaggtcgaggtcgatctccagttcctcgtccccgaagtccccaagcagcagatcctgctcgtcgtccaggcagaagggcgcatcggagacgtccagagcgtcaagcccggcacggaagtccatcgggctgatgtctggcagctgcaggccgcggagaaggtcctggtagaactccgggtcgtccggcagctccgcggactcatcggacggcaggacgagcgttggtgtcgcgaccagctccggggactgcgggttcagcggcgcctccttggtggcgggtccaagaacagacgacggcgacgggtgcgcgaacggagcagtcgaggtggacgacgaagaggaggccgtcggggtggcgcttgccgaaggaactggtgaggaagagggcacaggctgcccgcggcggcggcgcttctcgtcggcgaagctccgggaagcggataggtaggctgcggaggccgcgccggccgtgtcgaaggtgccaagccactgcctcttgcccgtgaacgggttgcggatctccgccgcccacttgccccacttgcggagcctcactccgcggtagctctccggggccccgccaaaagcgcacgcggcgaca

SEQ ID NO: 269773 - DNA, 498 bp, Zea mays
tcgcttgcttgttttgttttagttttaccgcgcaacttattttttcccctgtcattgcttaacagtaacagctcaatgaacttgtccactacaatgtctttgacaagcattaccaaataacaaagcaaacacttaggcactataccttaaaccttaaacataatataacctaccaaaattacctctctccggccgctaatggtggtgtgttcggcaaagaggaaatctcctgggcacgagcagatccaacttgcccggggaaaaaacccaagatatctcatctcccctttccaagcacactctcaggggctcgtttatgaaaccaaacaaccctaacatatcaagggcacactccctttcaattcacacgcagaaatcaacggtttgcaggaagtcgtccatgccgcggccgaggtcacagccgggcatctccgggaagacgtcgttgatgtcgtcgaggtcgaggtcgatctccatctcctcgtccccacgcgtccg

SEQ ID NO: 269774 - DNA, 837 bp, Zea mays
catctgctccggacagagccctcgctccacaccgccggcgacctttttcctcctccgctcgaggagtgggccaacggagggagaccatatgggcgcggaggcagcgcatgggcatccgcagcagcagcctccctcgtccctccgacccggcagggaggccgcggcgccgcccgctgtggtggggctgcagctctcggcgctgatcgaccacgtcgcgcgcgtcgactggtccctcctcgaccgcgtccctggcgaccgcggcggctcgcagcaggtgtccattgtggagctgaatcatattcttaatgaagtgaatacccacatccttccttcccacaatgatctcaccccaataactacaatagccggtggaagtgttgccaacacaatccgtgggctctcagctggttttggaatatcaactggaataattggagcttgtggggatgacaaccagggacttttgtttgtcaacaatatgagctttagtggtgtagatctcacaaggttaagggccaaaaaagggcacaccgctcagtgtgtgtgcttggtcgatgcaagcgtgaatcgcaccatgcggccgtgcctatctagtgcagtcaagatacaggccaatgaatttagaaaggaggatttcaaaggctccaagtggctcattgtgagatatgcacaacagaacatggaacagattgtcgaagctattaggattgcgaaacaggaaggcctttcagtatcattagatttggccagtttcgagatggttcgtgactctaggtctaaactcgaaaaccttttggagactggtaacattgacctttgcttcgccaacgaagatga

SEQ ID NO: 269775 - DNA, 401 bp, Zea mays
ttgtagtgccacacagcgcgaggcattttgggagggccgtcgtcatgcccaacctgaagccgccggtgaccacaacggcgcgggccgtggagtacagggaggagataatgagggcgctgccgccagggagtagcttcgagccgctcatgacgctatacctcacagacaacacacgcccagaggagatcaagctcgcaagaaagagtggtataatttttgctgtgaagttgtatcccgctggagcaactaccaattcccaagatggtgtcactgatatatttgggaagtgcttgccggtcctcgaggagatgggtcacgcaggaaatgctcgctgcttgttcatggaggaagtcacagatccacatgttgacacatttgacccggagaaggtttcaattgac

SEQ ID NO: 269776 - DNA, 668 bp, Zea mays
atcagactacagtgcggttggaggaagggaaccggacaaatcaccccgtcgtctcgtcccgtagtcactcgcagagtcgcagtcgcagcccctgcgcccaccgggatcgtgatggagagctgggtccgcgcggtggtggaggccatccactcctctcgctcccagacagtcatctacctcgccggcggtgcatcccaggcgctcggttggctcctctccgtgcccggcgcttcgggcaccgtcctcgaggtcgtcgtgccctactctagggcctccatggcgcagctccttggcaagatgcccctgcaattcactagcaagcaggctgcagaggacatggcactggccgcatacaatcgagcactcaagctttctggaccaggtctgcaagttatgggtgttggatttactgggtcactggcgagctcacgtccaaaacatggtgaccacaggttttacgtgtcaacatggacacataattgtctcaggacatcacatgttaccttgtcgaagggtttacggagtagggaggaagaagacaaggtttcaagctactttttgcttaaggcaatagcagatacctgcagagtttctgcaaccattcagtcagacattcacaaatctgaaattccagaagaaatcatggaacaatttgatgaagatcaaga

SEQ ID NO: 269777 - DNA, 1838 bp, Zea mays
gtggggagcacatgctagttgatgagatgaaaaattctgattcatgggcaacagttctgatagctgaacttgatcagttcaagaatgccaacaacgacacaagaaatcttgtgaataattcggttgaaattgacctgatggatgatttcctcgagatggaaaagctggctgcactgcctgaagtagactgtgtaagctctagctttggagctgaaactgattctgaccaaggtgtgagtagagataaatcatcaaaagttaaaactgaaccattgcagtgtcaggtgacagatttgcacgcaaagatcgagaagattgaaggtgagaaaagggagcttgaaatggcccttgcagatgccagagttcagcttggcacatcatgtgatgctctaatggtggccaacaacaggttgattgatttgcagatgcagttggacttggcaaatgagtccaaacatgctgctttcggagaagctgagcgactgaatggtgagaggaaagatttggcattgcaactggagtccaggtcttcacaagttgatgagcttcagctgatggtggcatcgctggaaaagaatgtagacaggaaggtgttggaattgcagttagagttagtttctgtggaggctgcagatctgcgcaagacagtggcttccctggaagagaagattgatgcagagataactctctctatgcagcacaaaacaaatgcagacctggcagaggcgtccaaagaatcattagaggcgcagctgcagtctgcaaacacagagatagggaaactgaacgggattgtgcaaactttagagagtgaggtgaggaaagagacagattctcgtgaagaactactgaaacagatagaggctatgaaaattgagtcagagagatcactatctgtggtgtctaccaaagagtcattagaggtgcagctccaggtggcgaattcagaagttgcaaagttgcgtgggatggtgaatgctctggagtgtgatgcggcgaacgagaaggcatattcttgagatcttcagatgcaacttgaggcagtggaaggtatcaggaaggtgttggaatctgagcttgagtcttcacaccaggaggtgatgaggctgaaggagaaagcttcgtccttggaagcaaggatcaaggaccagacctcgttgcttgtagaatatacagctaaatcagaggatgcagtgtcccggagaaaaggcaatggagagggtcaactagaagcagcaaatctggaagttacaaaactgagaaacaaggtgagcctgatacaaggcaaggtggagcaggagaagcttctgtcagaagagtacgaagcaaaatgccgcaagctggaggcgcaggtgttgagggacagccgagaggcgaaactttggcgcctcacgaactcaaacggagacctgaaggtgaagcaggagaaagaactagtcagtgctgccgggaagcttgcggagtgccagaagactattgctaaccttggccgccagctgaaatcgctaacagatcttgatggcgtggtggccgatcctgaaaagctggaatcgagggacacgcacctggacttcagagatggcggagacgtggctgatggactgtatgaactgggtcttcctaagaggaacggtagctgcctctcaccccttcggtcggatccgtcgccgaggggtttgccgtcccttagtagctacctgagcaaaacaaaaaggtgaaaagtctgatgggatcattcaccattgtgcttgtgcataaattatttgacagtctatggatgatgtgagttgtgacttggtggtagatcggtgtacatttacagaacttgatggttgctc

SEQ ID NO: 269778 - DNA, 951 bp, Zea mays
tcttaacagcgatggcatttaaagacgggagcgagctcgtctcttccgtgaacaacagtcagatactcatcgacagtgtttctgaagatgatatgttggtcttggatgtattgaatagcctggtgaatgcaccctctaaaatgtcagaactagagattaatattccttcaggttcgcttggaaaaactgactctgtgttaagggaggaaggccaccctaccattgatctgtctaaacaagggaagccagttcgtaaatccagtgcttccaagactaggaagaaaaaacctaagaagatattaggtgcagaggtgcctgctgaagcacaaaaaaaatgtgacgataatttagtcctgccggaaacactgagggttgggatcactgatgattcttccttgtgtactgactctggaagagcgaggacaccggaagcatttgaagatatttctgctgaagtccccaatacacaaacagaagccaagcctgaatttataatgtctggaaggaccaggttgaaatctcagatgcattgctaaacaaagcctttgtcgtgcaatgaaggttcagataattttcaggcaaagaagttgctgcactgtttgtcatctgaaccacttcgtagatggtgcacatatgagtggttctacagtgcagttgattatccatggttttcaaataatgagtttgtgcactacttagatcatgcaaaattgagtcatctttcaaggttgactagatcagaatggagcgcgattcgaagctcccttggtaaaccgcggcgattttcaaatcattttctggcagtggaaaaagaaaaactcgaggattatcgggagaaagttagaaaaatctatgctcaactcaatgatggttcacgggattctctacctgcagacctagctaggccattttcaattggtcagcaggttattgttcgtcatccaagttcta

SEQ ID NO: 269779 - DNA, 498 bp, Zea mays
cagcgaaagtccctgccgcctaaaacgctagcccccgcctctacctccgctgctcgccttcccctctcagtctctcacacgcagccgcacgccaatacttagccttcagacgcctaaaatgggtcacaacgacggagagcacgagcacgagcacgagggcgacgacctctccgctgacgactcttcgtggagcgacggcgtctggtccgaggacgacgatgaggagacgttgtcgtttgaggatagcgtctccggctccgacggtgagtcccacgaggctgcggtcgcggaagagagcgactcttcggaggatgaggtggcgccaaggaataccgtgggagacgtgcctcttgagtggtacaaggacgaagagcacattgggtatgacatcgatgggaggaagatcaagaaacgtgatagggaggggcgcattgaagcctacctcaggaacgcagatgatgccaagaattggagaaagatctatgatgagtataatga

SEQ ID NO: 269780 - DNA, 455 bp, Zea mays
gcactcccagtcccggctcccgccgtcttctcgacgcttcccccctcttcctccgccgccaacccagcgagagagctcccagtccgcgaagacatggcggggaagaagcgcaagtccggctccgagaagccgacgaagcaccgcctcccgctgggagccgatgccgacgctgtcgccgaagcctcgaagcgccgccgatcgggcgccaccaagcagcaccaggcggacgaggaagcgtccatcccgccctctctcagcgccaagatcctccgcgaggcgcgcaagcagcaggaagaggagatgcgcgccgactccagcgacgaacagcgaccctcagccgccgaggcgaccgcggggccgtccacgtcgtcctcgtttcccgtccccgccgccgatggcgagaatgaggaggacgacgttgatgagttcgacgggtttgacgcgctgagcgagta

SEQ ID NO: 269781 - DNA, 771 bp, Zea mays
tcgacccacgccttccgtccggtctttccgttacccggcggcttaaaccctagttcccattccatcttcgtttccgctccgccgccgtcgatggagttctggggtctcgaggtcaaacctggatccactgtcaagtgtgagcctggacatggctttatcctgcacgtttcccaggctgcccttggggaatcaaagaaaagtgacagtgccttaatgtatgtcaaagttgatgacaagaagcttgccattggaacgctctctatcgacaaatacccacagatacaattcgatttggttttcaataaagagtttgagctgtcacacacatcgaaaactaccagtgtatttttctctggttacaaggttgagcagccaattgagggagatgaaatggatcttgattctgaggatgaagaggaggagctaaacattccagtaatcaaggaaaatggcaaagctgatgggaaggaggagcagaaaaatcaagagaaggcagtagctgctacagcttcaaaatcaagtcttggccttgaaaagaaaagcaaggatgactctgatgattctgatgaggatgagtctgatgattctgatgaggatgattctgatgattctgatgaaggcgagggattatctcctgacgaaggcgatgatgattcaagtgatgaggatgataccagtgatgatgacgaggaagaaaccccaactcctaaaaagccagaggccggcaagaagagaggtgctgaaaatgctctgagaaacgctctttctgat

SEQ ID NO: 269782 - DNA, 686 bp, Zea mays
ttcctttcgtccgactgaattaggatgtttgttcttttgctacctttgttaaacaacatcagatcattcgtattgtatccttcctcggattgcttcttttgttctactacaaatatgcccaacatggcagggagaggtctcgaggtcaagcctggacccactgtcaagtgtgtgcttggacatgactttatcctgcactttccactgctgcacttggggaatcaaagaaaagtgaaagtaccatgtcaaagttgatgaccagaagcttgctattggaaccctctctattgaaaaatacccctagatagaaattgatttggttttcaataaagagtgtgagttgtcacacacatagaaaactacctgtgtatttttctttggttacaaggttgagcaaccaatcgaggaagatgaataatggatcttgattctgaagatgaagagaaggagctaaacattccagtaatcaaggaaaatggcaaaggtgatgggaaggcagttgctgcagcttcaaaatcaagtcttgggcttgaaaaaaagcaaggatgagtatgagtctgatgattctgatgatggagaacgtggaaccggtgaatgaggagatgtggttgtgcatggacgacagcatcaagaaacctgcaacatgcaacctgatgttaagaaatctgccaactgcagcatgactg

SEQ ID NO: 269783 - DNA, 369 bp, Zea mays
aagatgaataatggatcttgattctgaagatgaagagaaggagctaaacattccagtaatcaaggaaaatggcaaaggtgatgggaagcaggaccagagaagtgaagagaaggcagttgctgcagcttcaaaatcaagtcttgggcttgaaacacagcaaggatgagtatgagtctgatgattctaatgagggtgagtgattatctcctgaagaaggcaatgttgtgatttgaagggtatggtgcagaaaagttttgtctgcatgtcatgacagtttcatacaatgcacgggcgaacgcaccgggagcctaccacctcccgtggtcaccattgctgtgtttgatacctgactactactgctgttacttt

SEQ ID NO: 269784 - DNA, 1307 bp, Zea mays
tgaagatttctaccagacttgttataagtgcagtggcaacagtgggagctctcctattggtggctttaatgtgtttctggggttgctttctttacaaaaattttggaaagaaagatatgcgtggtttcagagtggagctctgtggaggctcttctgtcgtgatgttccatggggacctcccttactcctcaaaagacatcctcaagaagctagagactatagatgaagaaaatatcattggagcaggaggcttcggaactgtttataaacttgcaatggatgatggcaatgtctttgctttgaaaaggatagtgaaaacaaatgaagggctagatcggttctttgatagagaacttgagatattgggaagtgttaaacatcgctatttggtcaatctccgtggttattgcaactccccttcatcaaaacttttgatatatgattatcttcaaggtggaagcctggatgaagtgcttcatgaaaaatctgaacagttggattgggatgcacgtattaacattatacttggagctgcaaaaggcttgtcttacttgcatcatgactgttcgcctcgaataatacatcgtgatattaagtcgagcaacatcttgcttgatggcagtttcgaggcccgtgtatcagactttggacttgcaaagcttttagaggatgaagaatcacatattactacaatagttgcaggaacatttggctatcttgcaccagagtatatgcaatttggcagagccaccgagaagactgatgtctacagttttggggttttggtactcgaaatactcagtggaaagcggcctactgatgcatccttcattgagaagggactaaacattgttggatggttaaattttctggctagtgagaaccgggagagggaaattgtcgacctgaactgtgaaggagtgcagactgagaccttagatgctctgctctctcttgccaagcaatgtgttagctcctcgccagaggagaggccgacaatgcacagggtggtacagatgctggagtcggatgtaattacaccgtgccctagcgacttctatgattcagagtagtctcctggacaagccacgctgctgctagtttcccgtgggggcgcattcctttattctttgcgtatattgtgtaaatgcattgccgcggtgtttggtctccaatcggctggctcaacgggtgactcttttttgcgtctgtatacctatgtatgtatctgtcatgctacaagttggctatatgctgatttaataataagagagaactagaacttactagtagactattgtatgttt

SEQ ID NO: 269785 - DNA, 396 bp, Zea mays
aaggagtgcacaccaaaaacttggacgccctgctctctctcgccaagcagtgtgtcagctctttgccggaggagcggccgacgatgcacagggtggtacagatgctggagtcggatgtaattacgccgtgccctagcgacttctacgattcagagtagcctcctggacggacaagccacagtggtgccgctagtttcccgtggaggcgcattcctttattctttgcagatattgtgtaaatgcattgccgcggtgtttgtttggtctcctccaatcggctggttcaacgggtgacatttttgcgtctgtgtttatctgtcatgctacaggttggctatatgctgatttaataagagagaacttaccagtgtgtgtttaaacaaaacaaataaatgt

SEQ ID NO: 269786 - DNA, 619 bp, Zea mays
cgttgaaggaaatgagtatccgagtaccgagaacaaaagaagagcttttggatataaacggcctcggcaagacaaaggtcaagaagtacggggaccgcttgcttgcaaccatcgaggacttcctcagcaaacacccaaatccaaggagaaacagcggcggaggtggcggcggcaacgagcactccgatgcggcaaagaagcgaaggggctccaccgccatctctgcagcgagttacggcgacgatgacttcgacgaacgcacgggccagcagtccaagaagcgcgcggccaagacgcgaactgtctctgcccacggcccccgctgcacggacgccgatctcgatgggcctgaggtggtggaggtgggacggcgagctgcgcaagcgtccggaagcccgtggcgtatggcaatggcagggttcttcccaagtgggcacccctctaacttattccaggaatttgggtacgtcaagtagagtagagtaccgctagggaataggaatgtaggcttgcacatatgtaatctcccaggttggctcgtgcacatgcagcgatgcagtgatgtcaagggttttctgtgatgcagttgtacattggaactgtggcgtcgaatgtacgt

SEQ ID NO: 269787 - DNA, 930 bp, Zea mays
agatgaggttgccattcagaacttgcagacctacaaagagaagaaatttgtggatatcagcaaagaggatctggaattgggtgatgaagaagaagagactaaagaaaccaaacaggagttcactctcctatgtgattgggttaaacaacagcttggcgacaaggttgcgaaggtccaaatatcaaagcgtttaagttcatctccatgtgttctcgtatctggcaagttcggttggtccgccaatatggaaaggctcatgaaggctcaaacacttggtgacacatcaagtttggaattcatgaggggaagaaggatctttgaaatcaaccctgaccacccaattatcaaggatttgagcgctgcttgcaaaaatgagcccgaaagcacagaagccaggagggctgtagagctcctaaacgaggctgctttaatctcgagtggatatactccggagagtccagcggagttgggtggcaagatctatgagatgatggcgattgccctcggcgggagatggggaaggtccgacatggaggaggccgaagcgtcgacgggtgaggccagcgcagaggcagactcatctgaaggcaccgtagcagaggtgattgagccctcggaagttagacccgagagcgatccgtggagggaccagtgagttctcccacgggcatcctttgttagaactccatatttagcagtgccggggaaaaaaactaagccatgggcaagaacatatttggtcacagttgcttctatatgggttcttgccgtggcaattttttgtaggcttagactttgccggccactaaaatcttattgaggaggtagtggccttagaaaagaataataaagcatgaagactgatgattacatagcaaaattgtgctgtccccctcaataatatttataatgcaaacaacttatttctgc

SEQ ID NO: 269788 - DNA, 445 bp, Zea mays
gagagtccagcggagttgggtggcaagatctatgagatgatggcgattgccctcggcgggagatggggaaggtccgacatggaggaggccgaagcgtcgacgggtgaggccagcgcagaggcagactcatctgaagtcaccgtagcagaggtgattgagccctcggaagttagacccgagagcgatccgtggagggaccagtgagttctcccacgggcatccttaactccatatttagcagtgccggggataaaaactaagccatgggcaagaacatattgccgtggcaatttttttgtaggcttagactttgccggccaccagaatcttattgaggaggtagtggccttagaaaagaataataaagcatgaaggctgatgattacatagcgaaattgtgctgtccctctcaataatatttataatgaaaagaacttatttctgc

SEQ ID NO: 269789 - DNA, 299 bp, Zea mays
gcctaaagcccttcctctctcctcggcgccgcaatggcgcaaagcggcggcgagtccactgtggaggttcctattcccgcttccgcgtcggctacgaggccgaaggcgaaacaccgtatagagatcgaggggtaccctgtggatggcgtctccattggcggtcaagagacttgcgtcatcttcccgacgctgagcctcgccttcgacatcggccggtgcccgcagcgcgccgtctcccaggagttcctcttcgtctctcacgggcacctcgaccacatcgggggccttcccatgtatgt

SEQ ID NO: 269790 - DNA, 441 bp, Zea mays
gttcgtctccctcctcgcgttccgctgttccgctcgccgccgccgccgcatccgtcaccttcacactgcgctccctccctccctccctgtctgcgacgactgggtggtctaccgccgccctcgctttcgcgggcgaagagcgctcaccagtttccttggatctttgagctttggaagatgccgaggtggacagagaattctgcttccaccaaatcagctgaattggtgaaacaacaagaccgtttggagtttgacgatcctgatgaggtagacgaagaggaagaagttgagtatgaggaagttgaggaggaggtcgagtatgaagagacagaggacgagtatggacagactgaagctgtacgccaagttgatgctaaacatgacagtaaaatggtggatgctgatacggatgagggtggaaaagggagtcatgatgaactt

SEQ ID NO: 269791 - DNA, 425 bp, Zea mays
ctcaaaaccaagcaacaccgtgccgacgcaagactaccagagatgaagaccggcgtcgtggcactacagctactcaccatcaccatgtttctcgtgctgtcgtcgcctgcagatagcacggcggccaggattgggccagactacttccaggacacctgctcggcgaggatttctccgggggcacggtgccggcctcgcaagtgcgccgcggactgcaccaggcaattcaggggcggcgtgggcggctgtgaccgctcggggtgtacgtgcgtctacacctgccctgcggtcccgccaccggcaaagaatcgatcggtcgcgtgaccctgactgcctcgatgcacaagtagtgacgtgacggacgggctagtagccgacctgtgacggctttgcccgtctgatgaaaatcgtgaatgagtctgatg

SEQ ID NO: 269792 - DNA, 636 bp, Zea mays
ctcgcctcattgccccccgtgctgcctgcgcttttgccagcgcgcgccccaccaccaccggaaaagaaattccccaattctactccacccggcgcgctctccccacgcgcatccggatccgtccgctctgatcgagtgagttgatctggactctgtgcctgcctgtgagggcgaggagggcatggacgagttcgagctggaggacaacctcgagttcatcctccagagcatccaggagctgatggaggacccgggggacaacaacgccttcggagacgccaaccagaacgagctcttcgccagcatcgttaactacgaccaggagaacatgctgcccgacgtgtctgcagcggacgttgctgcagggaaggacattcaggggatcccgtgggagaagatgctcttcgggagggataagtaccgggagatgaagatgaagaactacagaaattaccagaatctaagttacgcacgggaggatgctttgcaggagtgcaaacaagtgaagaacgatagtccttactatgatttccactacaacacaaggcgtgctcggccatcaattgtacaatttcagctacggaacctagtgtgggcaaccacgaaacatgatggttatacaatgcatgatcaatc

SEQ ID NO: 269793 - DNA, 301 bp, Zea mays
ctggctttcggcaacgccctttaccacatctgaatctcacccacccacccccgcgtgccccacctcatggcgccggcgatggggctgaagcggcctgcggcgggagcaggggcggcagcagcgcagaccgtcacgctgtccgcgcctgccgtgcgggacgcggtgcgcaccgccgtaagggaggccgaggccacggcgaaggctaccgccccggccgccagggtcccggcgacggcggcagtgccggcggagatcgctagggatggggtgctgtgcctggaggaggtctacgggaggcggt

SEQ ID NO: 269794 - DNA, 648 bp, Zea mays
  unsure (1)..(648): unsure at all n locations
gaagacccaaaaatgtctcattcaatgtaggtgcactcctcttaggattgctcactcactgatgaacaaaggggagttcaacatgagacttcgctccagggatttcagctttcatccatgaccacaaaaaacaaaccgcggcgaattttctctctggatttcctggatgtggatgcaccctatatcccagagcagttgtgacgaaaaaaacacagatcagctcttgacgagcctccagcggcttagggccctggcgacgggcggcgtgagcgcgatggtgatggggaccctcacgaggtactgcaagaagagacggagcgagagcggcagccccgcatctggacgttggagctcgtggcgtcaagtggcggcgcgggcgcgctcgctgtcgtctgcaacaaggcactattccccgcgagggtccccatcaccatcgcgctcacgccgcccgtcgccagggccctaagccgctggaggctcgtcaagagctgatctgtgagtccgtttgccgcttcagattgccctctgctattttagtttcagagtcaaactttggtgcnacctttaacttcaatatgctgttggatgatgtgggcctattcataatttgtgtgaggttctgttgattaaatggtgtgccattgaaat

SEQ ID NO: 269795 - DNA, 464 bp, Zea mays
tttagctcgtcacagcgccgcccccgaaccataaacctccacctcgccggcggccatggcgttctccggcaggatccaggagctcgtgaggaagtatggcaaggtggccatttgcgtccacctatccgtctcctgcgcctccatcgccggcctttacgtcgccatcaacaacaacgtcgacgtcgaagccgttttccggaggttcggtatctcccccggcgttaccgtaggcggcgaggcctcacccgcccccgtttcccgcgatgaacacctgcgcgacgtccccctgccgcccatggccaacgaggtactgcaagaagagacggagcgagagcggcagccccgcaacaggacgatggagctcgtggcgtcaagtggcggcgcgttcgcgctcgctgtcgtctgcaacaaggcactattccccgtgaggatccccatcaccatcgcgctacgccgcccgtcgc

SEQ ID NO: 269796 - DNA, 569 bp, Zea mays
cgcagagtagcagacatatcagcgatcgaacacccgacgatttttacctgccacaccgctcatcctctcccgcgcgcttggccctttccgcttggccttccgcccctcctcttctccgcacggagcgccgccacaggtgattgctagggtttcggggccgccgcctgcagcagccctaccgccagcgctcctacgcctgtgtccctgttcctctccgtcccgttctgccagcgtaccacggctgacggccgacgccctgcagatccagcaaaggcaacgctgagatccctacgacttcgaacggcctgtgacctgtggatctgtgccagcctgttggtcgagctacctgctccagcccgagcagcccgtgttaaagctagctaaggaaacagggcctaagtgagctccagaaaaaaaaaaggaacggaatggaggaaggggactgcgggtggacctcgacaagctccccatcaagcgccttgaggccattgaggagacttccaacgagcactacccacctaacactagcaacgaggagcagcgactcgcggccatccgccggattgact

SEQ ID NO: 269797 - DNA, 789 bp, Zea mays
aaaaacccgctcggccgacggcaactcgacggccaaccgcgccaccctgccgcggcagccatggtgcatgttaacttctaccgcaactatgggaagactttcaagaagccaaggcggccgtatgagaaggagcgcctagatgctgagctgaagctggttggtgagtatggcctgcggtgcaagcgcgagctgtggcgcgtgcagtatgccctgagccgtatcaggaatgcagccagggagctgctcaccctggatgagaagaacccacgccgtatctttgagggcgaggcgctcctccgccgcatgaacagatatggtcttcttggtgagggacagaacaagcttgattacgtgcttgccctcactgttgagaacttcctccagcgccgcctccagaccatcgtcttcaagaatggcatggccaagtccatccaccatgctcgtgtcctgatcaggcagcgccacatcagggtgggaaggcagctcgtcaacatcccgtcgttcatggtcagggtcgaatcagagaagcacatcgacttctccctcaccagccctctgggtggaggtcctgccggaagggtgaagcggaagaaccagaagaaggcctcagggggcggcgacgctgaggaggacgacgagtaaagccggcggggggcacgtaggattctgggacggcaattggtttaaatgtgaggtggacactttagttgttgtgcctgagtgtgtttgtgttgtaatgaattcggaaattctactgtggtagacaattttgcagccccactactgaca

SEQ ID NO: 269798 - DNA, 1402 bp, Zea mays
gtcgcttccgccgacacctgagtcttgtcgctgccgccgggatggccggagtcaccgccaccgggatggccggggttcccgccaccttctcctcagccaccgctcagatcgggggcttcctctcgaagaagccttacgcgccgccgttgtgggccacgcacctctcccccatgccttgccataccttctcgctcggccatttcccaacaccgattcacaagtggaatctgcccaatttgccggaaggaacggaagtgtggatcaagcgagacgatttatcaggcatgcagttgagtggaaacaaggtccggaagctggagttcttgatggcagatgccgtagcacaaggcgcagactgcgttattactgttgggggtatacagagtaaccactgccgtgccacagccgtggctgctaagtatctcaatcttgattgctacctgatactacgtacctccaagcttcttgtggataaggaccctggtttggttggcaatcttcttgtcgagagactagttggggcacacgttgatcttgggtcataagaagaatatggaaaaattggcagtgtggctttagctgacctgctgaaaaaaaggcttctggaagaagggaggaagccgtatgtgattcctgttggtggatcatactcattgggaaacttggggatatattgaggcaataagggagattgagcagcaaattcagcaatcttctgatgttcactttgatgatattgttgttgcatgtggcagtggtggaaccattgctggccttgctttaggatccagattgagcagcttaaatacaaaagttcatgcattctctgtttgtgatgaccctgaatacttctatgactatgtccaaggcctgattgatggacttaattctggtttggattcacatgatatagttagcatcgaaaatgctaaggggttaggctatgccatgaacacagctgaggagcttaagtttgtcaaagacatagctgcatcaacaggcattgtccttgatccagtctacagtgggaaggcggtttatggattgctaaaagacatggctggcaatccagccaaatggaaaggtcgaaaagttctgtttatccacacaggtggtcttcttgggttgtatgataaggctgaccagttgtcatctttggctgggagctggcgcagaatggatcttgaagattctgttccacgcaaagatggcactggtaagatgttctgatcagtatggtccatgtgattccatgatggctcattcttgcaaacattgtatccattacagagttgttactcttacatttgtgcaagaaaatgcagaatagatggttcacattgttagagcactgatgcatttaagaataagcgcatcttctgccatttggaataataatttt

SEQ ID NO: 269799 - DNA, 1132 bp, Zea mays
gctgcagctgcgacggagactgagcgagaagccccccctccctccctccttccttcgacgtcaagctccgccccactccatggattcgatctgggaggcgaggagctgaggccaggacagggggaggagctgctggggggcagggacaggatagcgcggctaagcggcaacggcggcagccatgagctggagacgaggcggaagcggaggcgatggcggggtctcgaggaggtgggccgtcctgctctgcgtcggcagcttctgcctcggcctgctcttcaccaacagaatgtggacgctgcctgaggcaagtgagattgctaggccgaatgcgaatgtggaggaaggcaccgtgccgattgccgcggagtgtggttctaaaaaggtccaagaaaagcaggattacagagatattttacaggttcaagatagccatcatgatgtacaaacactggataagacgatagcaagcctagagacagagctctcagctgcaagatcgctgcaggaatccctgctgaacggctcccctgtcgcggaagagtataaagtttctgaatcaatcgggaggcgaaagtaccttatggtgatagggatcaacaccgcattcagcagccgcaagaggagagactccatacgttacacctggatgccccaaggtgaaaagaggaaaaagcttgaagaagagaaggggatcattattcggttcgtcattggccacagtgctatatcaggtggaattgttgatagagcaatcgaagcagaggacaggaagcatggggatttcatgaggatagatcatgttgaagggtaccttgcattgtcaggcaaaaccaagacctactttgctacagctgtttcactatgggacgccgacttttatgttaaggttgacgatgatgtccatgtgaacatagcaacgctcggacagattctgtcgaaacatgcattgaagccgagagtgtacatcggatgcatgaaatctggacctgtcttatccgaaaagggcgtgagatattatgaacccgagcactggaagttcggcgaatcggggaacaagtacttccggcatgctaccggtccattatacgctgatcaaaggacctggcgacttatatatgtataacaagca

SEQ ID NO: 269800 - DNA, 483 bp, Zea mays
  unsure (1)..(483): unsure at all n locations
gcccgtcccccagccacacagggactgagggacgcatgacaagacaggaagcactgcctgctcattttctgcctgtgcgcgtacagagatactactagcgagcacgccatggagcaaaccggggcggcggcgcgcggcgcgcctggagcgggagtggaaggtggcgacaagacggcgaggaaggcgctgaaggtggtggcggccgtggacgcgagcgaggagagcctgcacgcgctgtcgtgggcgctggacaacgtcgtgcggtgccacccggacgcgacgctcgtcgtcgttcacgcccagcacgccgncgaccacttcgcctaccccgtcgccgcgcacggcatcgtgtacgccccgtcctcggcggtggagtccgtgcgggcggcgcaggaggagagctcccgcagggtcgtggcgcgcgcgctggacatctgcaaggagaggcaggtggacgccacgggggccgtcgtggagggcgac

SEQ ID NO: 269801 - DNA, 396 bp, Zea mays
gtattcttatgttaatgcccccctgcaaaaggaattattggcagattaagtggggaacacggcagcattcatggtgtctcctttggcatcagcaaacactggttcaacggtttacgttgccaatgggctcaacacaatgggacttgcacttgacagccccactttatccacatgagcacatttcagcagaatgcggcgcagttaggtttgaattacgtgcaggcctgagcacggcagtctggttttttgaattaatctgtacgatgctagattttgcaggagatttcgttttttgttttcaataacttggactatcagttgcctgttagaaataagaactgtgataggctgcagtctcctggtcaatgcaatgcgctaatcctgaattgcggattt

SEQ ID NO: 269802 - DNA, 1036 bp, Zea mays
gcgcgaccgacgcgtccgcagtagcaggagcgcagccagcaagctcaggcccccagccctactgccaccgcgccgaacgccatggccgagccggcagagcaccgtccagcggaggaggaggaggccgcggcggccggcgaggatgaggacaccggcgcccaggtcgcgcccatcgtgaagctggaggaggtcgccgttaccaccggagaggaggacgaggacgcgctcctggacatgaaggcgaagctctaccggttcgacaaggaggggaaccagtggaaagagcgcggcacaggcactgtgaagctgctcaagcacaaagacaccgccaaggtccgcctcgtcatgcgtcaggcgaagacgcttaagatctgcgccaaccatctcgtggtggcgacgactaagatgcaggagcacgcggggagcgacaagtcgtgcgtgtggcacgcgctggacttcgccgacggcgagctcaaagaggagatgtttgctatccgttttggatctgtcgagaattgcaagaagttcaaggacactgttgaagagatagctgaacagcaaggaaagagcgaggagaaagaaaatgatgaagtctccactgccgcttctgatttggcacagaagttaacagtggcagagcccagcaaggaggaaaatgcagagaaagaggaggctcctgcatccgatgataagaaggatgataaagagtgaaggttgaaggcaaacaagggtcaaatggatgccattccattcatttcgtttccaaggttcagcttccccgcaaattttcattgtgttttctccgagatgaatgtttgtgttcggtgaaatcagagtcgtcagtcatctacatagcttttcttggttgatagactgttattttaagtcgcatgtttatctgggatggctggggtcagcatgtttgtacaattatttggagttgcttttggaatggacgcggtttgatgagttgcctacaaaaaaaaaaaaaaaaaaaaaaaaaaaaaactaaaaaaaaaaaaaaaaaaaataaaga

SEQ ID NO: 269803 - DNA, 647 bp, Zea mays
ccggcaggtcccggaccggaccggaaggcccgtttcgacccactttttttagctgcccctttctcaccgccgcgggcggcacgcgcagcagcaaccgagcaggagcgcagccagcaagctcaggcccgagccctactgcaaccgccgctgctaccgcactgaacaccatggccgacccggcggagcaccgtccagcggaggaggacgaggaagccgcggcggccggcgaggatgaggacaccggcgctcaggtcgcgcccatcgtgaagctggaggaggtcgccgttaccaccggagaggaggacgaggacgtacttgtcgacatgaaggcgaagctctaccggttcgacaaggaggcgaaccagtggaaagaacgtggcacaggcactgtgaagctgcttaagcacaaggagaccgccaaggtccgcctcgtcatgcgtcaggcgaagacgcttaagatctgtgctaaccatctagtggtggcgacgactaagatgcaggagcacgcagggagcgacaagtcgtgcgtgtggcacgcgctggacttcgccgacgggagctcaaagaggagatgtttgctatccgttttggatctgtcgagagtgagcacctagaaccatatcttacctgcctcttaatcccttctt

SEQ ID NO: 269804 - DNA, 313 bp, Zea mays
cagacggtgggccggtagcagcctagcaggagcgcaccagcaagctcagccccccaggccccagccctactgccaccgcgccgaacgacatggccgagccggccgagcaccgtccagctgaggaggaggaggccgcggcggccggcgaggatgaggacaccggcgcccaggtcgcgcccatcgtgaagctggaggaggtcgccgttaccaccggagaggaggacgaggacgcgctcctggacatgaaggcgaagctctaccggttcgacaaggaggggaacagtggaaagagcgcggcacaggcactgtgaag

SEQ ID NO: 269805 - DNA, 364 bp, Zea mays
gtttcccgtctcccgcatagagaggttcccaaaccattctctttcgctttcgtctccgcaccctagggtttctgtgcctcgccagcgaacgagtgcagccgccgcaccaaccgccgatgaacgggcaacactcccagcctccgccgcaaggacccgtggtgcccatgcctccgcagcagcaggcgcccccgctgccgtactaccagcagcagcaggcgccgcagtactaccaacaggccctcccgcagccgtgggggcagcagcagcagtacgctgcaccgccgccgcagtacccgcctccgcctcagacgcagcattacgctacaccaccgcagcagtacgcacctctgccgcagcagcagta

SEQ ID NO: 269806 - DNA, 683 bp, Zea mays
cgccatcatcctgcacgccaccagcgacgaacacgcacgcgacgcgacgcagccttgtcacgccaggacaaatccagcgctccccaaagcagaaagaccgcgacccaaagcaagctcaagccgctccgctcctccagtctccagtctccaccgcccgccaaccccgagatatacctcccttcctctcgaagcttcgtctgcagacgaagtcgccggctcttccctcggcgctggtgccggtgggttgccagtggcggtgggtgggtggcccggtggtggggttgctgggatgcccgccgcgacggcgaccgcagcccgcctccgcgtgccgctgccaaaagccccccaccactcgccctgctcgagccggcgccaccccgactgccgtcgccgctgacgaggcgagctgccacacgcttggcgagcgcgcgccatggacgcgttgtcccgccctgctgtcgtcatcgacaacggcaccgggtacacgaagatggggttcgcggggaatgtggagccctgcttcatcaccaccacggtcgtcgacgtcaacgattccttttcttgctccgccccatcggcggcgaggggcaccccgcctgggggaactggctcgctcagcacagcgtcggtgtcatggctaacctcgacttctacatcgacgacgaagcgctggcacgatcctg

SEQ ID NO: 269807 - DNA, 681 bp, Zea mays
cacacgcgtccgcccacgcgtccgcccacgcgtccgcccacgcgtccgcccacgcgtccgcccacgcgtccgcccacgcgtccgcgctctcacccatccggcctatcctgggagtagtgttaacagcgccgcaccacctcgtgccgtgggaggtcgagctcatcgatgcgacgctcctcggagagcagcgcctcctcctgcgcggtcttctttggcgcgagggcgggcgggacggagggcgccgaggaggaggcggcggcggaggagctagggttagggttcgccgccgccgtctgagctgcggcgtcgaggttgctggggtcggaaccggtagcagctgcggcggaattcgcggagggcgccgacgtgccggccttggcgaggagctggcggtgctcgtcgcggcgcttctggagctgcttctgctccagctccgaccgccgcacgaagctcttgcccccgaagtcggccgtcgccgccttccgcttcttctccagttcccgcttcagcagatccattacgcccgccgcccagttcggcttcgattctccgagaggaggtgcgccgtgccggcgctgcggataccggccgtgtacgcgtttttgccagtacagcaggactcgacccaacttggatcgtgttgtgggcagactaataaagcgtgcaagtctgttaccgacc

SEQ ID NO: 269808 - DNA, 1181 bp, Zea mays
ggactaacttaatcaaagagagcatcagaatgggctacaatgacattggtgatttcttctatgcccatggccaactttcagatgctttcaaaagctacatcaggactcgggactattgcaccacttccaaacatatagttcagatgtgcatgaatgtgattctggttagcattgagctggggcaatatgcacatgtttcaaactatgtccgccaagccgaagcaaacccccgactctctggatcctaccattgttgcaaagctgaaggcagctgcaggattagccaacttggaaacaaagaaatacaaatttgctgctcgtaagtttgttgagacaggaattgaactaggaaacaacttctctgaagtcatagctcctcaagacgtggcagtctatggtgccctttgtgcacttgcttcttttgaccgttcagacctgaagagcaaagtcattgacaatatcaacttccgtaactttctggagctggtgcctgaagtaagggagctggttaatgatttttatgcaagtcgctatggatcttgcttgggtcatcttgagaagctaaagcctaacctgctcctggatatccatttgcatcagcatgtagagactctgtatatggagattcgccacaaagcgatcatacagtacacacttccttttatatctgttgacctcaacacgatggcagccgcctttaagacttcggtctccatgctgcagaaggagctggccgcactgattactgaggacaaaatacaggcccggatagactcccacaacaagatcctttacgcaaggcatgctgaccagagaaatgcaactttccagcgtgtccttcaaaccggcaatgactttgagagagatgtcaagtccatgcttttgcgtgccaaccccctcaagcatgattacattcagaagacaagcggaccaaggaagatgtaaagattgcgggcgtcgctgctaggcaaggcttcctgctgcatgcctctccacttttttttttgaagaattgttctgtgacataaaagggaccgaagtctgtctaaatgccctccccctctttctttttattggttgatgaaagttattgtcgaagtaatgtatggttgagcatctggatgtgattaaaaaaaaaaaaggggggcccgccgattagtaaccccttagccccggaattt

SEQ ID NO: 269809 - DNA, 625 bp, Zea mays
ggtttctgagctggctagggaaaaaaccaatgggtacaaactcgacaagtctcacatctttgcagtcaatttgctcgatgatttcgagaagtacatgaaagttcctgacacatggacccctgctgaaattaagccatacactgctggagaaaatcttctgaagtggctaactgatgaaaaggcccgagatcaatttgtcattcgtgctggcacactaactgaagtttattggaatgatgcaagaaagctagcacctgagcttgtttttcaaaagcagtactggacagatagtttcattcagtggtcccctctgggaacctacatggcaacggttcataggcagggatcacaggtgtggggcggtgaaaatggcttcgagcgtttgatgcgttttgctcattccatggtgaaactgattgacttctctcctggtgagaggtatttggtcacatacagcagccatgagcccagcaaccctagagacacacatagagttgtcctgaatatatttgatgtaaggactgggaaagtgatgcgagactttaagggaagcgctgatgattttactactggcgggcatattggggtttctggccgcctcaccgcctctctcaatcggataccg

SEQ ID NO: 269810 - DNA, 681 bp, Zea mays
  unsure (1)..(681): unsure at all n locations
cggacggtggcggacgcgtggggaaaaaaataactcggaaaagaaggagacgccgaaaattcgaaaggggagggggaaagcaaagctgatggcggaggcccaggggaaagcaaagcaaatggcggaggccccgagcaagatcgaatccatgaggaagtgggtcgtcgagcacaagctccgagccgtaggttgcctctggctaggtgggatcagcagttcgatcgcctacaactggtcgcggcccaatatgaagcctagcgtcaagatcatccacgcaaggttgcatgcgcaagctctaaccctggctgcattagttggttctgcatgcgtggagtactatgaccagaagtatggttcttctgggccaaaggtggacaaatacacaagccaatacctggcccattcgcataaagattaaaggtcgccatgttggttcctgcatgccggattaattttgggctcatctcgggttgctcatgacccgcccatggatgctggatgtttattctttttttttgtcttcataattacaaaatggtggtgtacttgccaggcaaatgttaatgagggtataatgcagatattgtcgtcataatttggcctcatgttgcattatctaagctcaactttgtgactgtcagcgactcagcgtctctgatttttttanaaatattttttgag

SEQ ID NO: 269811 - DNA, 712 bp, Zea mays
gaataaatcggaaaagcaagagacgccgaaaattcgaagggggaagaggagaagaggggaaagaagcaaatggcggagtccccgagcaagatcgaatccatgaggaagtgggtcgtcgagcacaagctccgagccgtaggttgcctctggctaggtgggatcagcagttcgatcgcctacaactggtcgcggcccaatatgaagactagcgtcaagatcatccacgcaaggttgcatgcgcaggctctaaccctagctgcattagttggttctgcatgcgtggagtactacgaccagaagtatggttcttctgggccaaaggtggacaagtacacaagccaatatctggcccattcgcataaagattaatggtccccatgttggttcatctcttgactcttggtgctcatgacccgcccgtggatgctggatgtttattctttttgtcttcttactttaaaaatggtgtacttgccagagaaatgataatgggggatataatgcagataattatcatcataatttagcgttatgttgcattgtctaaccgctctgttgactctcagcatcttcgaatattctttttatattttttgagaaaaggaaagaagatcctgatttgttgttagattattgtgtgtattagtgatgtaacgggccttggtctagcccaggtactcttatacatgaatgcactaacaaattgctgtgc

SEQ ID NO: 269812 - DNA, 1309 bp, Zea mays
cccactcgtccgcccacgcgtccgcccacgcgtccgcatctagccgtcgccactcgccgcggctaacccagctcccagcccccgtctcgtcgccatgggaaccaggaatcttacgcggaaccgcgccgcttccatggcgacggcatccactacgctgctcctctcccttgccttcctcgccttcgcctgggcggcgtcgccgtcgccggatgcggaggcgatctcccggttccaggagtacctccgcatcgacacggcgcagccggcgccagattacgccgcggccgtggccttcctccggaaacaggccgccgaggctggactcgaggcgcgcacgcttgagctcgtcgccgggaagcccctgctgctgctgcggtggcccggtcggcggccgtcgctcccctccatactcctcaactcccacactgacgtggtgccgtcggagccgaacaagtgggaccacccgcccttttccgccgccctcgatgagccatccggtcgcatctacgcgcgaggctcccaggacatgaagtgtgtggggatgcagtaccttgaagccattcgccgtctccgttctgcaggatttgttccagatcgaaatatctatataacatttgttcctgacgaggagattggtgggcatggcggtgttgaaccatttgtttcatccaaggagttcaaagatatgaacgtggcattagtccttgatgaagggcttgcctctccaggggaggagtaccgtgtgttctatgcagagcgtagcccttggtggcttactataaaagcaacgggcgcaccagggcacggtgcgaagttgtatgatggtagtgcaatggagaatttgatgaagagcgtggaggctattaggagattcaggacatcacagtttgatctagtgaaatctggagagaaggctgaaggagatgttgtatcggtgaattttgcgtacctgaaggctggcacacctacaccaacgggttttgtcatgaatcttcaaccatctgaagcagaggtaggtcttgacatccggatccctcctagtgcccatgtggaagcactggagaggcgccttgttgaagaatgggcaccaccttcacgcaacctgaccttcgagtttaaacagaagatgtctgtcctggacaactttgggaagccagccatgacagcagcagacagcacaaacccatggtggacgttgctcgaagaagctgtgaagagcgctgacggcaaactcggcaaggcggagatattcccagcctctactgacgctcgctacttccggaaaatcggattaccagcatttggcttt

SEQ ID NO: 269813 - DNA, 731 bp, Zea mays
tcgcggatcgatacacgcctctaggctgactcatataccatggtggacgttgcttgaagaagctgtgaaaagcgctgacggcaaactcggcaagccggagatattcccagcctctactgacgctcgctacttccggaaaatcggattaccagcatttggcttttcacctatggcgaacaccccgatactgctccatgaccataacgagtttctgagcaaagacgagtacctcaagggaatcgggatatacgagtccatcatcagggcactggccactcatgaagatggcggcaaagatgacgaatccagggcagagctgtgagcctgtgactgaggagaaccttgaaccttacctcgcttttgccgcagaccaaatggagcactggaagtcatgtttcggcattatgcagctgcttgtgcttctgctgcggcgtcggagcgatagaaccacaaacatcatctttgtacattctcgcaagagggcttatgcgcttaataattgatgaaattgagatatgtagttcgtctgcgcagttcagggctcaccctgttgctacttgatgctgctttggcattggttgttgtatcaaaacttatattcacgtcgcttcgtgcttcattgcttttgtgcctttgttttcatttcatatggtagcatgacagtcgattatgcacaaaatcctcggaggggctcgtttagaaactcattcttttgtgatgctctttcattt

SEQ ID NO: 269814 - DNA, 635 bp, Zea mays
cccacgcgtctaatctcgccttccgaggaaactcaccagcccaccacagacccgagcggaagaagccatgtccgggcgcggtaagggtggcaaggggctcggcaagggcggcgcgaagcgtcaccggaaggtgctgcgcgacaacatccagggcatcaccaagccggcgatccggcggctggcgaggaggggcggcgtcaagcgcatctcggggctcatctacgaggagacccgcggcgtgctcaagatcttcctcgagaacgtcatccgcgacgccgtcacctacactgagcacgcccgccgcaagaccgtcaccgccatggacgtcgtctacgcgctcaagcgccagggccgcaccctctacggcttcggcggctaggctgatgggctcctcgcgatgttctccccttctgcagatgcgacgttttctggccgtgcccacaagtcttgcggtcaagaaagtttcaggaactcttgttagttcatctctggctgtggtaggtttatctgaatcgtgagactagtaggtttatctgaatcgcgaggctagcaggtttacctgaatcatgaagcagggatgaaattatgcgtgcatcggatgttggaaatcgagcttgccatgcaatttggtactt

SEQ ID NO: 269815 - DNA, 431 bp, Zea mays
caaaaaccaaacagaacaaggacccaggcgggatccactgacggcaagagataggagggagatctcgtgatttccggtggcaaggttcggttttgatcccaaccccaggttcctcaccccgaggagaaaaggatccagattttcttcctctctagtaagttgcagttcgcggtggcgccgccccccgccgctgcctccgtgttgcgcggttccgatttggagtgagggggagcgcgtgccgtgggattcccgttcggatctacggagtgggcagctttcctgctccaattcggtcggccagcaacgaaggcccttgaatcttgttgatgcgcagccagatgcgttaagcgtactgggataacgtttcttggaatcttcgtccgggctccgtggagtgaggtccctcgcccgtcgggatagcaccgtcgtcc

SEQ ID NO: 269816 - DNA, 1913 bp, Zea mays
cctggcttgtcccaatcttcctttaaccttttcaacttttctcccggcgcacgttcccttcccgtctcttcgtggagctgtgttgtcacccggccttcgttacgaaacaccggggcgggtgtagcctagcgggcgggccatggcgtcaacggtgctggaggcgacgcgggcggcccatgaggatctggagaggctggagcggctcgcggtgagcgagctgcaacgggagcccgctaacccgcgtgaccgcctctttcagtcccaccgcgtccgccacatgctcgacctcgtcgtctccacctccggcaagctcgtggaaatttacgaggacaaggacaatgctaggaaggatgagatcaacactcatcttactgcacccacgcaaagtggactgtttagcaagtactatgaaaggctcaaagagatccgtgaatatcatcggcggaacccatctgcccgctttgttagtacaactgatgactatgaagagcttctaaaggaggaaccagttattgaattcactggcgaggaaacttttggccgttaccttgacttgcatgagctttataacgagttcataaattccaagttcggaacactgatggaatattcagcttatgttggctgtttctcccagacggacaagatctcacatagtcataaagctaccagaaaatacagagaatacttggaacacattttggaatatctgacatcatttctgtatcgcacagagccattgcaagacattgataagatttttttaaagctggagagtgaattcgaggaacaatgggccaatgaaggaatacttggatgggggaataaagggacagaaaaagagtctgaaatagatctcgattactacagcacagttgaagaacttgttgagcttggcccagaaaaattaaaacaggctttagctgctcgaggtttgaagagtggcggtactgttcaacagcgtgcagatcgtcttttcttgttgaaggttacaccgttggaacaactagataggaagcattttgccaaagttccacatactaaagatggctcaaacacagctcctaatggtaatgctttcaaggaggatatgaagaaagaaattgcattgatggaagtgaagatgaaacgtctttgtgagctgctagatgaggcctttgtaaggacaaaggaaaatgcggagaagaagcttactttgacatatgaagagatggaagcagaacgggaagaggaggaggtacaagttgacactgagagtgatgacgaagagcaacaaatctacaatcctctcaagttgccgatgggttgggatggcaaacctatcccctactggctgtacaagctacatggccttgggcaggaattcaagtgtgagatatgtggaaaccatagctattgggggcgaagggcttatgagcgtcatttcaaggaatggcgtcatcagcatgggatgcgatgccttggcattcccaatactaagaatttcaatgaaattacatccatcgaggaggcgaaagcgctctgggagaaaattcaagcacgacaaggggtgaataagtggcggccagacctagaggaagagtatgaagatcaggaaggcaacatctacaacaagaagacctacactgacctgcagcgtcaaggcctgatctagggctcctgctggttaaagttgtcgggatttgttcagaacttatctcatgtagttgtaactctgaaaatattggcccatctggcatacattttatgtaataacatgattctccggaactcatgtgcttttcccggttgtcatggttgtctcgtgtgtctgtttgcccagcttggtcgtccctagctatgttatgttttatataatagaaaaaaaattcttgtattaagcccaaaaaaaaaaaaaaaaaaagggcggccgc

SEQ ID NO: 269817 - DNA, 510 bp, Zea mays
ttccctcgcgtccgcggacgcgtgggcgggcccaaaggtatcgctaacaggcctcgtctcgtcctcgtcctcgtccgccgccaaatcgaacccccccaaaccctagctacccggcgcaacgtccccttcccgcctctccgcggcgctgcgtgacacccggcctccgctacgaaacaccggggcgggtgtagcctagcgggcgggccatggcgtcaacggtgctggaggcgacgcgggcggcccatgaggatctggagaggctggagcggctcgcggtgcgcgagctgcaacgggagcccgctaacccgcgtgaccgcctctttcagtcccaccgcgtccgccacatgctcgacctcgtcgtctccacctccggcaagctcgtggaaatttacgaggacaaggacaatgctaggaaggatgagatcaacactcatcttactgcacccacgcatagtggactgtttagcaagtactatgaaaggctcaaagagatccgtgaatatcatcggc

SEQ ID NO: 269818 - DNA, 970 bp, Zea mays
gaattgaatctcggggtcgaccgcacgcgttcgatcatacctggagtcgtcttttcttgcggtctcgcgagctcttcctccttccgcttctcttcgacagaaaactagggttttgctcttggaatctctctccccgctgccgccgccgccggacagtgcaccgacgatacgacctcctccttcctccgatctggcctttttaatccgcggatcccgtacaagatgcttcccctctcgctcctcaagaccgcccaggggcacccaatgctcgtggagctgaagaatggtgagacgtacaacgggcatctggtcaattgcgacacgtggatgaacatccaccttagggaggttatttgcacctcaaaggatggtgacaagttttggaggatgccagagtgttacattcgcgggaacaccattaagtatcttcgagttcctgatgaggtgattgacaaggttcaggaggaaacttctaaaagccgatcagataggaagccaccaggtgttggccgtggaagaggaaggggggacgtcggttctaaacctggaggcagaggcattggacgcggccaagatgatggaggtagaggcagtggtggccgtggaaggggtggagttggtgccaaaggtggtaacaaaggtgggggccgtggtcgtggctgaagctggtcgacacaagggagaatgccgctttttgaggcctgtaattgtgttgcatagattgcttaggacaccatgaatgaaccgagttggctggttgtatgggggcacaaaccagaatggttcctgtgatctagacaccgaggatgcggcggtagccaggcttgttgctgttccccaaaactgtttggttgatatcatgagtatgatccaatctgttcagttgcttagagttatcccggttagatgactaattaataaatgttgcccattattttgctaaaaaaaaaaaaaaaaaaagggcggccgc

SEQ ID NO: 269819 - DNA, 305 bp, Zea mays
gtgggggccgtggccgtggctaaatctggtggacacatgggagaatgccgctttttaaggcctgtaattgtgttgcatagattgcttaggacatgatgaatgaaccgagttggctggtcggtttgggggcaaaaaccagaatggttcctgtcttctggacattgaggaagcggcggcagtcaggcttgtcgctgttctcaaaaacggtttggttgatatcttatccaatctgttcagactgttcgttgttaaaaaaaaaaaaaaaaaaaaaaaaaaagggcggcagatcgcgatctagaacttag

SEQ ID NO: 269820 - DNA, 856 bp, Zea mays
gagaactgctggtaaccctaacatagtctaggattctcctgcaccatcagcaggatcgcgtggtggcaatgacagtctatcggggggaggcagcagcggaagcattggtaacaatgggggttcctctccgtcttctgctggagtcattgtaggctcagtggctggtacagttgctggactaggccttgttgctgcattaggattctattgttacaagagaaaacagaagcctttcggaagggtgcagagtccacatgccatggttatccatccgaggcactcaggttcagatgacatggttaaaatcacagttgcagggggaaatgctaatggtggtgctcgcgcaagtgagacatatagccaagcgagcagtggtccacgggacatccatgttgttgaaagtggaaatatggtcatttcaatccaagttctccgcaatgtgaccaacaacttcagcgaggacaacatccttggtcgaggagggtttggcactgtttacaagggtgaacttcatgatggcacgaaaattgctgtaaagcggatggaggctggtgtgatgggtaacaaggggctaaatgagtttaaatcagagattgctgttttgaccaaggttcgtcaccggaaccttgtttcgctgctgggctactgccttgatggcaatgagaggattcttgtgtatgagtacatgccacaggggacactgagccaacacctgtttgagtggtcagagaacaatttgcgaccattggaatggtaaaagcggcttagtattgcacttgatgttgcaaggggcgttgagtaccttcacagccttgcccagcagacctttatccacagagacttgaagccatcaaac

SEQ ID NO: 269821 - DNA, 655 bp, Zea mays
cgctcaccgtacctcctccgaatccgccgaccgccggcgagcccctcctcctccacgacacgcgcttccccggctatcatggattcagatccatcatcacagaacccaacagatatgactgcatttgtccagaacctccttggacagatgcaaacaaggttcgagtccatgtcgcagaacattgtgtcaaagatagatgaaatgggaaccaagattgatgagctcgagcagagcatcaacgatctcaaagctgagatgggcactgagacgccggtcaagaagcctgatgagccaaagcctgctgactctgcctaacttgggtgtaacccagagattgttgtgtgaagatttgatgatggtacgtgatcgtatctgttttcatgagtcctggcagttatgtagacacgaacccatcgtatgaaagatgaatccatgtttgggctctccagacatcaacgcatgttcttagcttttctgtcatctttcggcaactatttatttgtttgactgttataagatgttatgcaacatctactccatttgaagtaattgtcttgtgtagagcaaaaaaaaaaaaaaaaaatataaaaaaaaaaaaaaaattaaaaataaaaaaaaaaaaaaattttaataaaaaaaaaaaaaaaaaaaatag

SEQ ID NO: 269822 - DNA, 587 bp, Zea mays
ctgagccgcacccacgctcaccgtacctcctccgaatccggccgacggcggggaagcccctcctcctccacgacacgcgcttccccggctatcatggattcagatccatcatcacagaacccaacagatatgactgcatttgtccagaacctccttggacagatgcaaacaaggttcgagtccatgtcgcagaacattgtgtcaaagatagatgaaatgggaaccaagattgatgagctcgagcagagcatcaacgatctcaaagctgagatgggcactgagacgccggtcaagaagcctgatgagccaaagcctgctgactctgcctaacttgggtgtaacccagagattgttgtgtgaagatttgatgatggtgtgacaaatttcagcagtacgtgttccttcccgtatcgtatctgttttcatgagtcctggcagttatgtagacacgaacccatcgtatgaaagatgaatccatgtttgggctctccagacatcaacgcatgttcttagcttttctgtcatctttcggcaactatttgtttgactgttataagatgttatgcaacatctactccatttgaagt

SEQ ID NO: 269823 - DNA, 1666 bp, Zea mays
tcacagactctgaacgccacccgaagatgagcagtggttccagagatggaagaacttgtagtgcacattctctgagttctgttttgagccaatacagaggcgatgatgatacagacttccctggttcagaggctacttctggttccaaacgatggggtaatgttgccgatgttacttatggacggcagaatcagaagcaaagggagcctctgaatttccctcaaagaaaagggcctctggacggcggatttttcagtcgcagatctttcaaggagattggcggcagcgatgaaatgctaggtgcgttgagaaattttgatttccctcgtccgtctcatatccaggctatggcatatgggcctatcttagaggggaggaggtggcgttgttgctgatcaaagtgggtctggcaagacactggcatatctttgccctataatacaaaacttaagccgcgaagaagttcaagggctccataaatcatcccctaggaaccccagggtgatagtattgacccctactgctgaacttgcttctcaggtccttaacaactgccggttgatatcaaaatctggggttccatttaggtccatggttgcaaccggaggatttcgacaaaagactcagttagagagccttgaccaagagctcgatgtaattatagcaacacctggccgtttcttgtatctgcttcaagaaggctttgtgcaactagctaacctcagatgtgttgtgttggatgaagtggacattttatctggtgaagaacgtttccagcaagtgcttcatcagttgatcgccgtggcaccagtgacaacacagtatcttttcgtgactgccactcttcctcttgacatctataacaaggtcgttgaaacctttcctgactgcgaggtgatcatgggacccggtgtccaccgaacaagctctcgccttgaagagatccttgtggactgcagcggagatgacaacgaagaaaagaatccagaaaccgccttttcgaacaagaaaacagcgcttttgaagattatcgaggagtctcctgtccgcaaaacaattgttttctgcaacaagattgagacatgtagaaaagttgagaatgcgctgaggcgggtggacaggaaggcctcgcagatcaaagttctccccttccatgctgcgctggatcaggcccagcgcatcgcaaacatcaaggagttcctgaacaagcaaacggctgactccatgttccttgtgtgcacagatagggcgtcgcggggcatcgactttgcgaacgtgaaccacgtggtgctcttcgactacccccgcgacccgagcgagtacgtgcggcgcgtcgggcggactgcccgcggcgcgtccggcaacggcaaggcgttcgtgttcgcggtgggcaagcaggtgtccctggccaggagggtgatggagaggaacatgaaggggcacccgctgcacgacgtgccgtgcgtctagagaccctggagggggaggtgtctgatgcgtgcaattgctgcctaaactctaagcatgttttttgtttcggaacgttgtgggtcatctatcctatccctcgcttgactcttctcggaaaaggttctcgttcccatgaatcttgatctgcctcctggtattgatagcgattgacccaattcctactctggtttgcgcc

SEQ ID NO: 269824 - DNA, 466 bp, Zea mays
cggtccggaatccccgggtccaccgaaccctaaccaagaatccgacccggcgctagacgattcggacggaaggaagacgagaaggccccgaggcgagcgggggatcaaagaagaagatgaaggtccgtgcggcggtgaagcgcctgtgccggttctgcaaggtggtgaagcgccggggaatcgtcttcgtccaatgcacggccaatgccaagcacaagcagcgccagggcttctccaccatcgccgaagcagccgccgtctcgtgcgttcacctgcctccgccgccgcccgctagcggttccgcctccgccgcagcgttcgcagaggcttcgaaggtggcgaggcaagagatgtctatgaagttcaattggcggctgggtttagctgccctgttcaagaatggagaaaaataatgtatcaggcctactaccatacgctaacatttttaagcagatgttgaataggg

SEQ ID NO: 269825 - DNA, 376 bp, Zea mays
gggccgagcacgcgtccacggacacgtgggcggacgcgtgggcataattcttgatgcggccaagcaaaggacagcagatgcagtttctacagtggagtcccttcctcgccccaccagcacaaggttcctttcatacgaagaactgaaagtggcaacaaataacttcgagccttcaagtgtgcttggagaaggtggttttggccgtgtcttcaagggggtactgggtgatggcactgctgtcgctataaagaagcttactaacggagggcaccaaggagataaggagtttttagttgaagtggaaatgctgagcaggttgcaccaccggaatcttgtgaaactgattggttattacagcagccgtgaatcatcacag

SEQ ID NO: 269826 - DNA, 887 bp, Zea mays
cacgcaacttgaccgatccatcgccgcatcgcggacctcgaccccgccctcactgagctaggagcagacgaggcttgagaacgagcgacggagacctagccgaagcaggagctccccatggcgaccggcaacctggcgagcgtggtggtggctgtagacggcagcgaggagagcatgaacgcgctgcagtgggcgctcgacaacctccgcctgcgccccgacggcgagctcgtcgtgctgcacgtccagccgccgcccaacatcgccgcgggactcaacccggcgcccatccccttcggcggccccagcgggttggaggtgccggcgttcacgcaggccatcgaggcgcaccagcggcgcataacgcaggcgatcctggagcacgccctgaagatttgttccgataagaatgtggaggtgaagacggaggtggtggtcggggaccccaaggataaaatctgcgagattgcggccaaccgtaaggccgatctgctcgtcatgggctgccgtgccattgggccgctcaagagggtgttcttgggcagtgtgagcaactactgtatcaaccatgtgggctgccctgttgttgtgatcaaggggacatgagattccatcagcccagcattctttggtgtacttccattcaaggtttttgaggcttctgctgtgacatgtgtaatcctgtacgatatattactgctttactgcacattatgcttttggtggtgctgctgagggatgaaggttgctatgtggtccctttcgttataaaggaggaagctttgtcggtcgtgtaatcgtggtaataagttggtcctgtggcggattcttgtgtatattcttgtaatcgttcaaagacatggttctgtctgaagtcccaacagcgc

SEQ ID NO: 269827 - DNA, 660 bp, Zea mays
aactcgtcccattatttctctaaaaatccaacaaataaatccttgtgccagcagaaagtatagatcgtgttagctaaaagacatccgcgatgacgtcgacagcggtggggggcgagccggcggcgggccacgggtactggcggtggagcaaagccgactttttcccggagccctcgttccagagctggcgcgcgtacggcggcgcgctcttgtccactgggccacggctgcgcgaccgcgtcacgagtcgctcatccgaggccgtcgaggcggggacgctgctcgcccagagcgagaaccccctccggcggtgcctgtcgtgggtggatctcgccttcctcggattcggctccgtcgtcggctcgggcgtcttcgggctcaccggccaggaggcgcggttcgacgccggcccggccatcccgctggcctacgccgccgcgggcttctcggcgctgctctcgtccttctgctacgcggagctcgccggcgagatcccgtcggctggcggctcgttctcgtacctgcgcgtcgagctcggggacctggccgcgttcatcgccgccgggaacattctgctcgaggctcgggtgggcgcggcctgcctgggccggtcctggacgtcgtacctcgcggcgctcatcggccgcgacagcgacacgc

SEQ ID NO: 269828 - DNA, 639 bp, Zea mays
  unsure (1)..(639): unsure at all n locations
gctttgtcatgctgtgataatatggttgaggaggacccatctagctcttgtaacccagctttggcatgctgggatatggttgatgttgctcctgtccaggagggaaatgatgcacatgaagcgatggtgtttgttctgagctatcttggcttacgtgacatcctctctgttgagatggtgtgcaagtcattgcattcagctgtccggaacgaaccctttttatggaagtgcatccatattgactcgcgcttggggaagaagatgtctgatgctgatcttctgtgcctgacacaaaagtccccaggttctatgcagggcctgagtcttatgcactgtgacaacatcacagatcagggattgaantgtgttgtttatagtgttaacttggagaagagcagatnnatgagttttggggctttccggattacttatgaagggcttattgacagtctgaggtcatttaatatggaaacagatattggtataaagaaactcaaaggtacaaatcacgtcactgcatcagaagcgcaatatgaagagttgttgtccttgatgaaaataaacaaaaagatggcatttcacaaacaggagccttggatctttcattctggtccgcttttactagatctttatggtgga

SEQ ID NO: 269829 - DNA, 337 bp, Zea mays
gtcattgcattcagctgtccggaacgaaccctttttatggaagtgcatccatattgactcgcgcttggggaagaagatgtctgatgctgatcttctgtgcctgacacagaagtccccaggttctatgcagtgcctgagtcttatgcactgtaacaacatcacagatcagggattgaaagctgttttaaagagtaatctacagttaacaaagttgggcatttttggtgctttccggattacttatcaaggtcttattgacagtctgaggtcatttaatatggaaacagatattggtataaagaaactcagagttacaaatcacgtcactgcatcagaa

SEQ ID NO: 269830 - DNA, 359 bp, Zea mays
tcgggttagccgcagggctcgggcagcaaggcggacctgtacgaagccggcgtccgcgagggcgccatcggcctcctctgtctgctccgtcgcgctcggcgtcacctccttcttcatccccaggctgtgccggaagctcacgtcccgggtcgtctggtccgtcagcagcctgatggtgttcgtcctcatgacggccatggtcgtcctcggcatggtctccatgaagggctacaggccctcgctcgccgcctccctctctggccccgaccactcgttcaagggcggcgccctcgccatcttcgcgctcatcggcatccctcaggccgtgctctacagcgtgccttgggccgtggcgtctg

SEQ ID NO: 269831 - DNA, 704 bp, Zea mays
ctcgagccgaatcggctgagcgctcccccggttccccttctctgctcgccatcttttgctctccgcttggctcgtcaatcacctcctacgctccacacgccgccggcgactacaactgcttctgccgtggttacagagaagaagggtttggggagaagacaacctaaatcaattggatctgggagtatcagatctaaaaagtcaggttttcatcaaggtagaaaaagaaacttttctgtccggtcatggctttcccaactgcagcagctgttttgcttaatgagaacatgcagattcataaaggaaacagggttgatgcaccaagtgccaaaccactgaaatcatcagccaaacctgagagaaaggctcttcaggatgtgtctaacattcctaaaggcactgctttaaagaacagatccacagtcaaagaggggtccgccttgaaagaaaggcctgcactccacaatgtgtctaacaacctcaaagagaggtccatcctgaaagagaggcctcctcttcaggatgtgtctaacacccgcaatgagaggtccatcctgaaagagaaatctgccctgtgtagccatgaagctattaagaacccagtgaatatttttgctgatgacgaagagaccaaagggtgccatgaatgggctaaggatggtatggagggcactcacttcactggaaatgattctcagaagttg

SEQ ID NO: 269832 - DNA, 2232 bp, Zea mays
cggactcgtgggcggactcgtgggcggacgcgtgggcggacgcgtggggtcgaatctctgccagttgaaccgttggagcctagtgatttgaagccagagaacagtagatatgatgcacaaattagtgtctttggggctcagcttcaaaagaaactggagcagtcaaaaatcttcatggttggttctggggctcttggatgtgaattcttgaagaaccttgcgttaatgggtatttcttgcagtcaaaacgggaagctgactgtgacagatgatgatgttatagagaaaagcaatctcagtcgccagtttctcttccgtgactggaacattggacagcccaagtccacagttgctgcaactgctgctatggcaattaatcccgagcttcatgtggaggcccttcagaacagagcaagtcctgagactgaaaatgtgtttaatgatgccttttgggagagcttggatgctgttgttaatgcattggacaatgtcactgcaagaatgtacattgactccagatgtgtatatttccagaagccacttcttgaatcgggtactctgggtgccaagtgcaacacacagatggtcattcctcacctaacagaaaactatggggcatccagagatccaccagaaaagcaggcacctatgtgcactgtacattcatttcctcacaacattgatcactgcctgacatgggctagatctgagtttgaaggtctacttgagaagactcccactgaagtaaacgctttcctgtcgaaccctggtggatatgcaaccgcagcaagaactgctggtgatgcacaggctagggaccaacttgagcgagttattgaatgccttgagacagacaagtgtgagacattccaagattgcattacctgggcccggctgaagtttgaggattatttctccaaccgtgtaaagcagctgacattcacttttcctgaagatgcaatgactagctctggtgctcctttctggtccgctcctaagcggttcccgcgacctctggagttctcatcttctgactcaagtcatcttagcttcttgttggctgcttctatattaagggcagaaacatttggaatacccatacctgattgggcgaaaaacccaaagaaactagctgaagctgtggacaaggtcattgttccggatttccatccaaaacagggtgttaagatagagacagatgagaaggctactagcctatcctctgcgtctgttgatgatgctgctgtcattgaagagcttattgcaaagctggaagcaatttctaaaacattgccaccaggattccatatgaaccctatacagtttgagaaggatgatgataccaatttccacatggacttgatcgctggctttgccaacatgcgggctaggaattacagcattcctgaagttgacaaattgaaggcaaagttcatagctggaagaatcatcccagccatcgccacctcaactgcaatggccaccggccttgtctgcctggagctttacaaagtccttgctggtgggcacaaggttgaagactaccggaacacatttgcgaacctggcgatccccctcttctccatggcggagcctgtgccacccaagaccatcaagcaccaagacatgtcctggaccgtgtgggaccgctggacggtaactggcaacatgacgctgagggagctcctggagtggctgaaggagaagggcttgaatgcgtacagcatatcatgcgggacctcgatgctgtacaactccatgttcccgagacacaaggagcggctggacaagaaggtggttgatgtggccagggaggtggccaagttggaggtgccttcctaccgccgccatctggacgttgttgtggcctgtgaggacgacgacgacaatgacgtcgacatcccgctcgtgtcaatttacttccggtaaagagggacacactgcccgtttatatacatgaatcttgtgcgatgtttgtcagaaggatcgtgtctataagttgcgcatgcaacctccaggactaggctttgcttaaacgcatgctgatggatttcccgagctgggtagagctggctgggaatcgtcgctgagatttgggttcaccgttatggaattcttggaatgacagttactgcaaggcactgttgctgccaagtgttgttgtctttgtacttgggatcttcgatgcgtgcatgtgccggtgttatgcttgcgattttttcagtgatgtcc

SEQ ID NO: 269833 - DNA, 570 bp, Zea mays
tagccttccaagctttggacaagtttaggactgaattgacacgatcccctattgctgggtcagctgatgatgcacagaagctgatagatcttgctattggtattaatgaaactctgggtgagagtaagcttgaagaaattgacaagaagctcttgcagcatttcgcaagtggttccagggctgttttgaatcctatgtctgcaatgtttggtggtattgtaggtcaggaggttgttaaagcatgctcagggaaattccatccactttaccagttcttctacttcgattctgtcgaatctctgccagttgaaccgttggagcctagtgatctgaagccagagaacagtagatatgatgcacaaattagtgtcttcggggctcagcttcaaaagaaactggagcagtcaaaaatcttcatggttggttctggggctctcggatgtgaattcttgaagaaccttgcgttaatgggtatctcttgcagtcaaaacgggaagctgactgtgacagatgatgatgttatagagaaaagcaatctcagtcgccagtttctctttcgtgactggaaca

SEQ ID NO: 269834 - DNA, 336 bp, Zea mays
cggacgctgaggctgtacaactccatgttcccgagacacaaggagcggctggacaagaaggtggtggatgtggccagggaggtggccaaggtggaggtgccttcctaccgccgccatctggacgttgtggtggcctgtgaggatgacgatgacaatgacgtcgacatcccgcttgtgtctatttacttccggtaaagaggagggtgtcgctacctgtttacatggaacctgtctgtgcgacgtttgtcagaaggatcgagtctataagttgcgcatgcaaccgagaactaggctgtgttcaatgtaaacacatactgatgagtctataagttggct

SEQ ID NO: 269835 - DNA, 674 bp, Zea mays
cccactcgttttcccacgcgtccgcccacgcgtccgtccacgcgtccgtccacgcgtgcgcccacgcgtccgctgcacacctctcaccagtccccacacggccacaccacacccagctgtccccatcgcgcgcacactctctcggtctctccctcccagtcccagcgtttgcggtccagtccagagagctcgagcagccatggcggctcccctgttcctcctcctcctgctgctggctatgttcacaggctcagacgcggcgttctgcgtgtgcaagacgggcgtgcccgacccggcgatgcaggcggccatcgactacgcctgcgccaagggggccgactgcgcctccgcctccaagggcgcgccgtgctacggcaacggcaacaaggtggccgtctgctcctacatctgcaacagctactaccagagccgcagcggcatgggcgccacctgcgacttcaacggcgtcgccaccctcaccggcaccgaccccagctccgggacctgcaagttcgcctccggccccagcagcgtacgcaccggcggcggcgctggtatgggcacccgcggagcaggcgctggcgtcggcggtggcacgggcgccggcgccggcactggagcaggcacgggcgcgggcatgggtgccggcgctggaaccggagcaggcacgggca

SEQ ID NO: 269836 - DNA, 502 bp, Zea mays
  unsure (1)..(502): unsure at all n locations
ggccaaactgctagctgatattatgattcgtgacgaaaagatgaagcaaatggatgaccacctaaatcagcttcagttagagcatgccaagccgtccgcagaattggacaatgcacacaggtcctggtcagagctgcatgcgcaggtttctgagctggaagacgaggtagagaagcagaagcttgtgatatccgagagtgcagagggaaagcgggaggccatcaggcagctgtgcttctccattgaacactaccgcagcgggtatcagcagctgaggcagctgctgcaaggccacaggaggccgttggtgatggcaacctgataaatgaacaaagtccgtttgccaacaaattgcgcagttgcttgtctctgggcgtgttctatttgtagctctgttctttcacaacttgtgccgtgtagtttatgttataaagaattctgtgtggtatgtgtgtagaatgtaatgggatgggatatttatgttgntccttcatactcctat

SEQ ID NO: 269837 - DNA, 570 bp, Zea mays
ggcagtttaacttccggggcttcgacccgcacaccgacccttctagcagcgactccatcgatctgctccgccgcagcggcatcgacttcgacctctttgcggctgagggggtcgattccacccgcttcgccgagctgatgatgtcgtccggagtcgtgctgaacgacgatgtccagtgggtgaccttccacagtggccacgacttcggctacctcctcaagctgctcaccggacgggaaatgcccaacaccttggatgagttcctgaaactcaccaagaccttctttccggtgatgtacgacatcaagcatctcatgaagttctgtggcggtggcctatatggcgggctgagcaagcttggggagctgctcaagattgagcgtgttgggatcagccaccaggctggatctgattcgctgctgaccctgcagtgcttcatgaagctcaagcagttgtatttaaaggagtctgttaagttgtatgatggtgtgttgtttgggcttattcctggggaagtggagatcaaacctgttgctccacccattgaatgagttatggtagttcaataac

SEQ ID NO: 269838 - DNA, 975 bp, Zea mays
cacaaggcgataggagataggcttcactgtgtttttgttgataatggtctatcaaggtacaaggagggagagcgagtaatgccatcctttgaaagtgatttgcacctgcctgtgacatgtgttgatgcctcagagcaatttctcagcaagtttaagggtgtcgaagacccagagaagaacactatgatcattggcaggcaattcatagctgtctttgatgactttgctcacaagctggaacagaagataggaaaaaggcccgaatatttagttcaagggactttgtaccctgatgtaattgaatcatgcccacctcctgggagtggaaggacacattcccacaccatcaaaagccatcacaacgtaggtggccttccaaaagatatgaaattaaaacttattgaaccactcaagctcctattcaaggacgaggtgcggaagttggggggtattttgaatgtcccagattcatttttgaagcgacacccatttcctgggcctggtcttgcagtacgtgtcctaggtgatgttacacaaggcaatgctttggaggttcttcgtcaggtggacgagatatttgttcagtctattaaagacgcaggcctgtatgataaaatttggcaagcttttgctgtgttcttgccagtacagacagttggagttcagggtgaccagcgaacccactccaatgccgttgttttaagggcaatcaccagtgaggatggcatgactgcagattggtactattttgagcatgcattcctggtagatgtggtaaacaagatttgcaacaatgtgcgtggcatcaaccgcgtttgccaggacatcacatctaagccgcctgcaacggtggagtgggagtaggaggatgggagggaccctatggtctggtctggtctgtctgtcttgggttaaaacccgctatgtcatgtcactgctctcaacacgttgcatggatgtcacaaatagcaagca

SEQ ID NO: 269839 - DNA, 900 bp, Zea mays
attccttccattttacccctccgtccgtccgtctctcacactgtctctttccaccctctcgctctccgacgaggcgacgacgggtaggccaccgccgccggcgccgtcccactacgacaagtgctgaggccttcatcgctttcttcgccggcgacgagcacccaccaactaaggtcatggaagagatgatagatctaacgggggatggaggtgttcttaagacagtagcgcggaaagcaaaagatgatgctatagcgccatccgagagcctgcccttggttgatgttcattacgaaggtacacttgctgagactggtgaagttttcgataccacccatgaagataactctattttctcatttgaaattggacaaggcgctgtcatcaaagcatgggatatagccttaagaactatgaaggttggcgaggttgcaaaaattacatgcaagtcagaatatgcatatggagctgcaggctcgccaccagagatacctcctaatgcaacccttatttttgaggtggagctagtagcttgcaggccgaggaaaggttcaagcttaggcagtgtatctgatgagaaagccagacttgaagaacttaagaagcaacgggagctagctgctgctaccaaagaagaggagaaaaagaagagggaggaagcgaaggccgcggcagcagcccgggtgcaagcaaagcttgatgccaagaaggggaaggggaagggaaagggaaaatagatcgtgacgttgctgctgactattgttgtaaccaagaaataattgtgggagcgtcctcaaattgctccgtcacttgctgttgctggctactgtgcttgatgttgtagcggactgatgtatcgataagagctaagtataaataatgtctggtatctacattacc

SEQ ID NO: 269840 - DNA, 1528 bp, Zea mays
  unsure (1)..(1528): unsure at all n locations
ttcccgaatcggccggcccgtccacgcatgcgccggctccgatcccaactgccatggcgctctccatctacacgcccacctcctcctccctcgtcccgccctccattcaggaggtcaggttgacttcgcgaccgccaaagcccgcgactttcagcctacggaggccacatctggccgcgcgggccgccgctggcaacgcacccacgtccccggtccgcgaggtcgtcactgagctcgacgcggtcgccggcttcagcgagatcgtgccggacaccgtcgtgttcgatgatttcgagaggttcgcacccacggcggccacagtgagctcgtcgctgctgcttgggatcactgggctcccagacactaagttcaagagtgcgatagatactgcactggcagatggtgagtgcaacgcactggagaaggctgaggacaggatgtcctgttacctcaccaaggctcttgcaaatgttggcgctgaactggctcatcaagtccctgggagagtttcgacggaaatagatgctcggttagcttatgacacccagggcataatccacagggtacatgaactgttgaatctatacaaccaacatgatgtctcaactgaccgcctgttattcaaaattcctgctacatggcaaggcatagaggcctcaaggttgcttgaatctgaaggaattcaaacgcatctaacatttgtttacagtttcgcacaagcggcagcggcagcacaagctggtgcatctgtagtacaaatgtttgtgggccgattgcgggactgggcaaggcatcactctggtgacccagagatagatgaagctttgaagaatggagaagatgctgggctttctttggcgaagaaagtatatgcctatattcacaggaatgggtacaaaacaaagctgatggccgctgccatacggaacaagcaggacgtatttagccttctggggattgattacattattgcaccactgaagatactgcagtctctggaagaatctgtcaccgaccccgacgtgaagcacggctatgtcccgaagttgactcctgctattggcaagacgtacaacttcactgaagaggagcttgtgaagtgggaccagctgagcctgtcagctgccatggggccagctgcagaagaactgcttgcttcagggctagaggggtacgtgaacaagcacgccgcgttgaggagctctttgggaagatctggccacctcccaatgtttaacaacggcgttgagagcaatagcaatgtgatttgcctggcaggctcacaatgctgcgcggaagacgctttgcttcttctttttggataatacacgaagcactcccgtgtttacgttgacttgacttgcagtgtgcatgtattctgtttttgtttttgtaattcagatgatttgctggatccatgagaacctgtcgcctgatattccctgcaactgcaatcgtcctggtaagtacggctggcaccccttaaatgcacactcaaaaaaaaaaaaaaaaaaaaaataaatnnaaa

SEQ ID NO: 269841 - DNA, 491 bp, Zea mays
cgcggaaaacgctttgcttcttctttttggataatacacaaagcactcccgtgtttacgttgacttggcgtgcagtgtgcattgattctgttttttttttgtaattcaaataatttgctggatccatgagaacctgtcgcctgatcttccctgcaactgcaatcgtcctcgtacgtacggctggcaacggcttcttggttcagggcaggtgggcaatgtgcctgccagtgttggttccataagaaaatcctctatgcaacaacatcacctgagctgcagttacatgattccatttatacacacacgtatctgcctgctatcagaagtcatttctacgctggttagccaagttcatgttttgaggatacaatcgcccacctagcgtcaagatctcccttgtgaagcgtcatgctgaatgtatgaatttaccatatgcttttgttacttggcctgattttattaaaaaaaaaaaaaaagaaaaaattatataa

SEQ ID NO: 269842 - DNA, 581 bp, Zea mays
agcccacgcgtccgaacaatccgcctccgcctccgcctccctagggttttgctctcggctcgtcggatccagttcgggggatcctccatggcgtcgcgtccgtcgctgaagtcgaagcccaagggcaagggcgggaagaaggccaccgccgacgacgaggacgccaccgcggcggcgaccacggtgcggctcatgaaggagtggaccacgtggacgatgaagaaggcgaaggtggtggcgcactacggcttcatccccctcgtcatcgtcatcggcatgaactccgagcccaagccctccgtgttccagctcctctcccccgtctgatcggatcatgacagggcccggatgaggtcggtccgtagtagtttgtagctggtacttcatttgcttacatatgtccgagatcgagttgaagaaggtggatcatgctttctgggcgaatttgaaggatttggtttaataattttgtagtggcggatgtcttctatacatcggatcaaaaatgtcttggttatgtgatctgcagtgcttatgattgtatgacctaaaaaaaaaaaaaaaaaaaaaagggcggccgc

SEQ ID NO: 269843 - DNA, 673 bp, Zea mays
cacaaggccacaatccaagccgaagaaccctaggcggtggcggcgcatcctgcataccccgcggtagtggcagcgagccagcgacctcgagtagcagcagaggctccgcaggggcgaaaaggtgtgaagcttccttcggagatcccagtagcagaagcaacgcaggcatcggcttgcgacaggagaggacggagatgacgcagaagcagaccctgttcaaggggcagagcaagaagaagactatccctcccaaccgccacggcaaggcgcctcatgttcgtaaaggaaagagagccgtcaagcccaccaagttcacaaaggacatggacgccgagaaggaactcaccaagttcatcaaccagtgcaacgaaataaaagctgcgaatcttgctagcaaagagggcggtgacctcaacatagtgaaggcggatggtgaggaatctaaatcaaagaaataggaagccagaaactgaaaacgagtgtgtgaaacgtgatgcgtggtaaactgttaatgcgatgtattctgctgaagaaaattcagttccgtatggctgggtagatgaacatgtttagcgcaaagtgacggtgtaactgcaaccggggtaatggcttgcaagttttgttctgtgccatctctatttctccaattattatattgatgaagtttgtgtgc

SEQ ID NO: 269844 - DNA, 520 bp, Zea mays
gcggaacacgaaagcggggaggaacgacagcagccatcagaagaaagctccaatctttctcgccctctcgcggttcggaggagggacccgggcgcaaagactctaaagcgcaggtgagctccgggcggggaagatgttccccagcctgatccaccacgctagccacggccgacccgacgtcgccgtcgccgaggacgcaccacgcagtggctgcgggttagggctgcccgggcacggcggcgggcccagcgtggtgctcacggccgatcccaagcctaggctccgctggacggccgacctccacgaccgcttcgtcgatgccgtcgcccagctcggcgggcctgataaagcaacaccgaaagctatcatgaggacaatgggagtgaagggcctcaccctttttcacttgaaaagccatcttcagaaatacagattgggaagacagtctggaaaagagttaacggagcaatcaaaagatgcttcttaccttatggaagctcaaagtggaacaactttgtct

SEQ ID NO: 269845 - DNA, 589 bp, Zea mays
cccacgcgtccggctatgaaggccgcaggagacggggctatgaaggtggcaggggagggggctatgaaggaggcaggggaggcggctacgaaggtggcaggggagggggctatgaaggaggcaggggtggcaatgctcagggtggaaggggttacggtggccgtggaaggggtagaatgggtggtcgcggacgagggaactagtgcagttctggcgtttccttcaaaatgcatgcctcacctataccaggggaaacgacaagttatctgagcattttatgtttgaagccatgtgactgaggtctgttattttttcccctgagcgcgaggtttggttgtgagcataatgcatttgcaaagttttatcttgtacgtcatccttcaacgtttcaagttttatcatgtacggcatccttcaatgtttctgctgccagaggttttcccagtgatcgttgagtgctgagcatgttgtccaatgttcatgcctgcagtattaacagatggccactctttccctgtgaaattgttaattgcatttgagccgtttattttccttctcttattaaaaaaaaaaaaaaaaagggcggccg

SEQ ID NO: 269846 - DNA, 679 bp, Zea mays
gggtgggccgcgctgccggtgccggaccggttcgcaggttcggccaggcgaccgcttcggcgagagacgggcaggggagaggaaaaaaaaaatctaaccctagcatccgcagcgctagggttcgggggttgcgatggcggcggcggcgagacagcgggggacggtgaagtggttcaacgacaccaagggcttcgggttcatctcccccgaggacggcagcgaagatctcttcgtgcaccagtcgtcgatcaagtcggagggcttccgctcgctcgcggagggcgaggaggtggagttttccgtctcggagggtgacgacggccgcactaaggccgtcgacgtgaccggccccgacggatccttcgtcaggggcggcggaggcggaggaggaggcggcggcggctacggctcccgcggcggtggcggatctggcggcggcggtcgcagctacggtggtagctggggcggcggccggagatccggcggcgggggcggtcccggcgcgtgctacaagtgcggcgagcccggccacatggcaagggactgccctagcgccgacggcggaggcggctatggcggaggcggctacgggggcggcggctaccgaggacgaggaggaggcggtggctgcttcaagtgcggcgagcctggccacatggccagggactgctccagcggc

SEQ ID NO: 269847 - DNA, 1597 bp, Zea mays
gcctgcacagcattgaccgccgccttcgctcctccacctccccgctcgctctcctgcctccgcgcgggccgcggatcccttcactcgccacagcaagcgctagaagagggaatggagcccggcctcgcatcccgcgtcgcccgttcagccgctcagccgctttccggctgcctgtcgcggcactcgctctcgccgtggctcaagatccagaaccacatttatccgatgccaagtctctgtcacaaggttcctagcacgggaaaatgccacgcttctatgacaacaagttacatggaaacatcagatgtcactgatttggactgggaaaaccttggctttggcctcatcgagactgactttatgtatgttgcaaaatgtggaactgatggaatcttttccaaaggtgaagtcctaccatttggtcctatagcactgagtccttcagctggagtcttaaattatgggcagggattgtttgaaggcctaaaagcatataggaaaactgatgggtccatccttctatttcgtccagaggagaatgctataaggatgctaagcggtgcagagaggatgtgtatgcctgctccaactgttgagcaattcgttgatgctgttaaacaaactgttttggcaaataaaagatgggtgcctcctactggtaaaggttccctatatatcaggccactcctaataggaagcggtgcagttcttggtcttgcgcctgctcctgagtatagctttatcatttttgtatcccctgttgggaattatttcaaggaaggtttatctcctattaatttgattgttgaggataaatttcaccgtgccagccctggtggaactggaggtgtgaaaaccattggaaactatgcctcggtactgaaagcacaaaagattgcaaaggggaaaggatattctgatgtcctttatttggatgctgttcatgacaaatatcttgaagaagtctcttcctgcaatatttttgttgtgaaagacaatgttatttctacgcctgccattaaaggaacaatacttcctggtataacgaggaaaagtatcattgaagttgctcagagcaaaggtttcaaggttgaggagcgtctggtgtgtgtagatgagttgattaacgctgatgaagttttctgcacggggactgctgttgtggtgtcacctgtggggagtgttacatatatggggaaaagggtggaatatggcaaccaaggagtcggtgtcgtgtctcagcaactatacaagtcccttacaagcctccagatgggcaatgtggaggactggatgggttggaccatgcaacttaatcagtagcggatcacagatattgccttggcagatcccagattattacagctactgggtgcgatagggttttttttggcagatccatcttgagcatatttgactgtacctgtttcccttgagactaagacgaaagtgatcttactgatcttttgtttcaaatctgtaacgataaaataaaatgtggtttgcaccttgccatgtactgtaagaatggacccaaaaaaatattcatgctgctgttgcttgatatctgaccccgtttatttgttgcagccccccc

SEQ ID NO: 269848 - DNA, 319 bp, Zea mays
gcaagacggggaaaagtgagcacattcttgcacgaagcttgccgccgccgagctggggaactgggaagaggaagagatcttgcctaggtctagcgaggaggaggtcgatcgatcgattggctaggactctaggaggaggagctggctcataagcagacctactgacccacccatcgactgtacttgttcggaggaagggatggccgatctgctgagcttcctgaagacgatcttggaggccgggttcagtataatgagcgcgctggagaaggctggccacaacgcggacgactgccgcaggatcggtcagctcctgcaa

SEQ ID NO: 269849 - DNA, 641 bp, Zea mays
atcgcgtaccgcgtccggtcgtattcccctgccgcgcacagttcactcgcgcacctctcgccccctcgctctacgacgactagtgggccgccgacgctggcgccgccttacgccaggtgccgaggtcttcgttgatctcttcgccggcgacgagcacccaccagctgggaaaaaatctatagccaaacataataatggctatgattgatgaacctctctacccgattgctgtactgattgatgaactgaaaaatgaagatattcagttgcgccttaactccatcaaaaagctttctacaattgcccgggcattgggtgaagaaagaacaaggaaagagctgattccattccttagtgaaaacaacgatgatgaagatgaggtgcttcttgcaatggcagaagagttgggcgtttttattccttatgttggaggtgttgagcatgcacatgttttgcttccaccactggaaacattgtgttctgtggaggaaacctgcgtcagagacaaagctgttgaatcactttgtcagattggtgcacagatgaaagaaaatgattttggggactggtttgcccatgtcgttaagaggttggcggtaagtgagtggttcacagctcgagtttcttcatgtggccctttt

SEQ ID NO: 269850 - DNA, 1227 bp, Zea mays
cgggcgcaatagaaaaaacaccgaacgcgccgccgctcctgccctgccccccgtatctataccaccgaaggcgaggagggggggccaaggacgagcgccttttcgtgcccgctggccattgccgctgctcacgagcctcccgcctcgcgctgccctgccctctgcggctctgccccaacgagccccaggagagccagccagccagttaaaggagccgtcaaaagcccccgccgaggagagcacgcaaggtcagacatggcgtcaaccgttaccttcagcccagttagcacccaagctgggttgatccataagccaaggaaccttggagccacaagctacgctggcttaaaggtgccgagctttggctctgagtcatcattcttgggtaggaacgcatcccttcgggcggctgttactacaaggattgtgcccaaggcaaagtctggatctcagatatcgccacaggcatcttacaaggtggcgctgctcggtgctgctggtggcataggtcaacccttgggcctattgattaagatgtctcccctggtgtccgagctgcatctgtatgatattgctaatgtcaagggagtcgctgcagatctcagccactgcaacacgcccgctcaggtacttgacttcactgggccctcagagttagccagctgcttgaaaggcgtggatgttgttgtcatccctgccggggtcccaaggaagcccggcatgactcgtgatgacctttttaacatcaacgcgagcatcgtcaagacacttgttgaggctgttgcagacagttgcccagaggcgttcatccatatcatcagcaacccggtgaattccacggtgccaattgcagctgaggttctgaagcagaagggtgtctacaatcccaagaagcttttcggggttaccaccctggatgttgtcagggccaacacatttgtggcgcagaagaagaaccttaagctcatcgatgttgatgtcccagttgttggtggccatgctggaatcacaattctgccactgttatcgaagaccaggccatctgtcaccttcacagatgaggaaactgaggagctgacaaagaggatacagaatgccgggacagaggtggtggatgccaaggctggtgctgggtctgctaccctgtccatggcctatgccgcttgcagattcgttgagtcttctcttcgtgcgctggctggcgatccggatgtttatgagtgcaca

SEQ ID NO: 269851 - DNA, 518 bp, Zea mays
cgggcgcaataggcacaccacggcaccgacgcgctcctgcccgcacttttctaccaccgaagcgagggcgagggggccacagacgagcgctttttcgtgcccgcctgcctgcctgctggtcattgccgctgctcacgagcctcccgccccgtgccgccctgccctctacggctctgccccaacgagccccaggggagccaggaaaaggagccgtcaaaagccgccgccgaggagagcgcgcaggtcaggcatggcatcaaccgttaccttcaacccagtgagcgcccaagctgcgctgatccaaaagccaaggaaccttggagccataagctatgctggcttaaagatgccggcatctgttagctctggctcagagtcgtcattcctgggctggaatgcatcccttcgggcagctgttactccaaggattgtgcccaaggcaaagtctggatctcagatatctccacaggcatcttacaaggtggcagtgctgggtgctgccggtggcattggtcaac

SEQ ID NO: 269852 - DNA, 358 bp, Zea mays
tttcggcagggtaacgaagcaccatctcctctcgcttgcccttcttcgattaggggggatcccagccgccgccgctgcagtcacgcatggcatcaaccgttaccttcaacccagtgagcgcccaagctgcgctgatccaaaagccaaggaaccttggagccataagctatgctggcttaaagatgccggcatctgttagctctggctcagagtcgtcattcctgggctggaatgcatcccttcgggcagctgttactccaaggattgtgcccaaggcaaagtctggatctcagatatctccacaggcatcttacaaggtggcagtgctgggtgctgccgggggcatcggtcaaccctt

SEQ ID NO: 269853 - DNA, 504 bp, Zea mays
ccgccactcaccaacaactgttcaatggtgacacttctcaagatcaacaaggaccttgcctacttgcagttcgagttgcgggcatgcatgaaccaatatgatggaatggtttactacggggtggttaataacattgctgacgaagaatctggccgcggaacataagtactctgtgccccagatcgcattctacaagggactgctagaagcaatagtccaggaagctggaaatgatgggagcataaccagtatcgacgccctcaatgtccggcttgataaccaggtcgcagtattagacggttcacaggacagccagtctcgccttcctagctccataaagaacttctcaatgagccagaaggagaaaactctcgatgagctgatacgggaccgctggttgtcgtacaccgcgacaggcaagatcggcctgagcaccaggtcatttcttgaccttcggagctggttccgtggcaacgatattccgtcttgtgttgtctgcaacca

SEQ ID NO: 269854 - DNA, 519 bp, Zea mays
cctattccctcgtgtcatggcgcttctcctgcgcctcgctgctccgtcggtgccgccccggcggagctccggcctcagagcattgccgcgcgtcgtccttccggaggtcgtttccaaacaatcatttcttcgtttactagttgacagcactgcaagtatgccctgtcctattaagtgttctgcggctcggtgtgccccatcattgactgaacacaacgattctaggaataatggcatccatgcatctagtgtatatggacatgatctcatgaagtccatgtctgatctccaggaagttgtattttcctcctttagcaaagcatgtcttctcagtagttgtatcatatatggtctaccacccagttgtatagcagaaccatgtgagcaagaatactttctccctaacatgcctttgctgttcgcaatagccatggttggtgctactgatggaaggctccttgcgagacagaggagatgggagcttgcacgtctaaatgatcaattgcgtcagataaatgc

SEQ ID NO: 269855 - DNA, 781 bp, Zea mays
cccacgcgtttgcccacgcgtccgcccacgcgtccgcccacgcgtccgccgccttcttggtgataaactcacagaagatcctgtaatagtccaaaatacatggacaatatctgatgattggggttctgaaaaccgttgcccatctcctgattcagatgctaaggacactacaaaagtggatgatctagaaaaatgtagtagcatggtaggtgaggaccagaaagaaatccttccctctaagtttcattcaaatgtttcggccatgccacctgcaagtaagaagaaagcagaacctagaaagtattttccattcagacagggatatcttgccgtagcaattcttcggatcggagcacatgggatccatatgactgtagatggcaaacatatcacttcttttgcattccgagaggatttggaaccagggtttgtaggtgaagtaagaattgcaggagacattaaattgttatctgtgatagcaagtggcctgcctacaacagaggacttcgagcatgtcactgacttagaaatattgaaggctccacctgtgcccatggataaaccggttgatcttttcattggggtcttctctacagcaaataatttcaaacgccgaatggcagttcgcagaacttggatgcagtatgattctgttcgatcaggaaaagttacagttcgattctttgttggcctgcacaaaaatgagttggtcaatgaggaactctggaatgaagcacgaacatatggagacatccagttgatgccatttgtggattactat

SEQ ID NO: 269856 - DNA, 1210 bp, Zea mays
ccacgatccagatcagaaacgcaaaggacaatcgacacggacgcgacgcgaaggcgacgcaccagcaccacctaaaattctaaaaaggcaggggccgtttctccgaccaccgcccgacgaatcagcgcgtccgctacaactccggcgacccccgccggcgacgacccaccagggcagcgatccacgcaggcgaacaacgatgggcggccgcaagatcgcgctgatggtgggaatcaactacccgggcaccaaggccgagctcaagggctgctacaacgacgtcgaccgcatgcgccgctgccttgtcgaccgcttcggcttcgacgaggccgacatccgggtcctcaccgacgccgaccgatccgcgccgcagcccacgggggctaacatccgccgcgccctcgcccgcctcgtcggggatgcccgccccggggacttcctcttcttccactacagcggccacggcacgcgcctgccagccgagacggggcagcacgacgacaccggctacgacgagtgcatcgtgccctgcgacatgaacctcatcacagatcaggatttcagggaactcgtgcagaaggtccctgaaggttgcctattcaccatcgtctctgactcatgccatagtggtggcctgctggacagtgctaaggagcagataggtaatagcaccaagcagaataagacccagtcccgtgaacctgatgagcctcgtcattctggttctggcagcggcttccggtcatttctcaaagagactgtccgcgatgtgttcgagtctgaggggattcacatccctcatagtcgtcgccatggggatgatgaccaggacgacggttacgcacagccaactggaaatggccgcaccaaaaaccgctccctgccactctcgaccctgatagagatgctcaaggaacaaactggaaaggatgacattgatgtgggttctatccggatgacgctgttcaacatctttggtgatgatgccagcccaaagattaagaagttcatgaaggtcatgctcggaaagttccaccagggccagtcaggtgagcaaggcagtggtggtggtggtgtctttggcatggttggtgcccttgctcaggagttcttgaaggctaagcttgaagggaaggaggaagaggctttcaaacctgcattagagcaagaggttcacagtgttgacgaggtgtacccgggagtaaggcct

SEQ ID NO: 269857 - DNA, 389 bp, Zea mays
gttactatctctgttctcgaatatttgtcgtccgttagtttatttttgaactaaatcgcgacaaataaaaaagaacggagggagtatttcgttggacaaaagtagcggcaaagctttttttccttcgtctgatgcttttcttttgtcatttttcatggaaaaagttcagtgtcaaaattcttgtttcaatctgcagatcaggatttcagggaactcgtgcagaaggtccctgaaggttgcctattcaccatcgtctctgactcatgccatagtggtggcctgctggacagtgctaaggagcagataggtaatagcaccaagcagaataagacccagtcccgtgaacctgatgagcctcgtcattctggttctggcagcggcttccggtc

SEQ ID NO: 269858 - DNA, 564 bp, Zea mays
cggcaatcggcatcgccaccggtagtgggagggagcaagggggggacccaggccaacgccgcgcacctttgccctcttatcatcatcaacatcaccacgggcgggggagacggccctcgaagcgtacccgtccccatcctccttttccgaaccaccggagcgcggcggcgcggcgcgagacccttcccggcttctactcctccgatcctccgcaccggctgacgagtagcccactcactgggggacgtgggatcgatcggcggctgatgggaggctagattccgcaatcccacagactagacacatccccttcgcggttgactttggcgaatcgaccttgatctgaaaatggggctgttccgggcggcgtccggcctggcccgtttggctctgcgaaggaacctcttgcgcgccgcggcaagccccttggccgccgggggtggcgccagcccaggtgccgagccggcgcgctactttcactagacctggccgagccggttcggtgcgcccacgccccgtgctgtgccggtctcgagccttaccgacagattccttgatgggacc

SEQ ID NO: 269859 - DNA, 401 bp, Zea mays
cacgcccctcaaatccagagaacaaaaaggagagagagagagaaagagagagagagagagagagagagggaggcagagagcttgccatcccaagcaaaggttccctctccttccccacctcgcgctcaacccccctcatcctcccacatccgattgtgccctgcgctctgccgttctcttatccaagatttcgccggcggcggctcagggagcggacaaagattgtttttttttcgggctatggagacgaggcctgattcattcagccccgggcggtggagtggcttcctgaccgggtctgattcgtattggttcaaatgatctgggcggcttaattggttgcatccgcttccaccggggaatcggagctagggctgtggtttgttggccggctggtggga

SEQ ID NO: 269860 - DNA, 382 bp, Zea mays
tcgcacgtcaaagcggaaaacctcagaaaaccacaataaatcatcctcgtccaccactgcccccgctctgctgcaactccactcggcccggccgccctttccacccaccttgatcctctgatccgttggtgcttgaccgatccatggacacccatatcggatccgtgaacggggcggcgtcgaaccagacggttggctgcccggcgtcggcgccggggtgcccgatggcgtccacgccggcgcagcccgcggcgaccctgtcggcgggggaaggcgtcgctggggcgccacctcgcgcgtggcctcgtgcaggtcggcgtcaacgacgtctttcgggttccgggggacttcaacctcacgctgctcgaccacctgatcggcg

SEQ ID NO: 269861 - DNA, 1085 bp, Zea mays
ttccacgcgtccgcccacgcgtccgcccacggaggctcttctcctcctcgcctcctctccctagcctccacgacgcaagggagagtgacggaaagcgacgcggcgcgagcgaggagggccaaggcgaagaggggaagcaccgcaccaggacccttgttcgccgccgccgcctctgatctccgcgaggttgtcaggattcaatatgtcgaccagcacattcgctacttcctgcacgctgttgggcaatgttagaacaacgcaggcctcccagacagcggtgaagagcccttcgtctctaagcttcttcagccaagttacgaaggttccaagcctgaagacctccaagaaactggatgtctccgccatggctgtatacaaggtgaagcttgtcgggcctgaaggtgaagagcacgagtttgatgctccagacgacgcctacatccttgacgcagccgagactgccggtgtggagttgccatactcgtgccgtgctggggcttgctccacctgtgccggcaaaatcgagtctggttcggttgaccagtcggatgggtccttccttgatgacgggcagcaggaggaaggttatgtgctgacatgcgtctcctacccaaagtccgactgcgtcatccacacccacaaggaaggcgacctgtactagggctagggcttttcaatttggcgagggaccaaaaatgctctcgagtggtgtgttgtcaagcaaagctccatctgcgcgccctaccccgttgtgcgaactgtttggcatcaaacttgtgtggttgctgtcttctatgttctgctagtttatgttcggagtccgtgggaatatactagctaattaataaaaagaaaaactgatgtgatgccataatagtataatttcatggttttttgttatgtttggagaagtgatgttgtaagctattgattctgaatgccactgtggcatgttggcatcaaaaaaaaaattaaaaaataaaaaattcttattataaaaaaaaaataatataattaagtggggcgttttttaaaaacttttccaattggaaaacaccttgggttttcccggctttatctttttt

SEQ ID NO: 269862 - DNA, 360 bp, Zea mays
cccacgcgtccgcccacgcgtccgctcctcctcgcctcctctccctagtctccacgacgcaagggagagtgacggaaagcgacgcggcgcgagcgaggagggccaaggcgaagaggggaagcaccgcaccaggacccttgttcgccgccgccgcctctgatctccgcgaggttgtcaggattcaatatgtcgaccagcacattcgctacttcctgcacgctgttgggcaatgttagaacaacgcatgccttccagacagcggtgaagagcccttcgtctctaagcttcttcagccaagttacgaaggttccaagcctgaataccttcaagaaactggatgtctccgccatggctgtatac

SEQ ID NO: 269863 - DNA, 494 bp, Zea mays
gtgctgacatgcgtctcctacccaaagtccgactgcgtcatccacacccacaaggaaggcgacctgtactagggctagggctttccaatttggcgagggacaaaaaatgctctcgagtggtgtgttgtcaagcaaagctcctccatctgcgccctaccccgttgtgcgaactgtttggcatcaaacttgtgtggttgctatcttctatgttctgctagtttatgttcggagtccgtgggaatatactagctaattaataaaaagaaaaactgatgtgatgccataatagtataatgtcatggctttttgtcaaaaaaaaaaaaaaaaaaaaaaaaaaaaaaaaaaaaaaaaaaaaaaaaatcaaaaaagggggggcgcccccataaaggccccccccccccggaaaatttttccggggccgagccgcggggggggacacgcttcccccaaggggtgcggctaacgccttgggggaaccaagtgcccaaatgttt

SEQ ID NO: 269864 - DNA, 1069 bp, Zea mays
gcaatttcttccagcatcttccagtatcaagggagatgtgcttcattacatacaagaaaaggtcagtccgtgcatattggattgcattttccagcatatcccagtaaaggccgctgcgccgagtgggaagaaaaaggacaccgagctagcgcctgaagcagaagctgctgccaaagcttcgaagaatgccatagctacttgttctttgcttccgtacttggagtctctttggcccatcgggactttgcagatggcctcacttgcaggctcactgtacgggatgatgattaggctgctgccttcttttgtgcgcacatggtttactaccttgagagaccgttcattgtcatactcaatcgagtccttcaccaaacaatggtgcagccctcctcttcttctagatgagttttctcaggttaaggagtccgtatacggcgatgagaatttctcggttagcgtcaacaggtcggctttcgagatcgttgctacatacaaaaaggaggagacaggaatcgaccttgtcatacgcctcccgagctgttaccctctgcgccacgttgatgtcgaatgcacgagaagtttgggtatcagtgaagtcaagcgcagacgatggctgctttgcctcacgtcattcgtccgcagccagaatggcgcgatagcagaggcgatccgcacgtggaagagcaatttcgacaaggagtttgagggcgtggaggagtgcccaatctgttacagcattctccacaccagcaaccacaacctgccgcggctggcgtgcaagacgtgcaagcacaagttccacggcgcctgcctctacaagtggttctccacgtccaacaaatcgacttgcccgctgtgccagactccgttctagtcctagctctagacacatgcttgtttgttggcaccacaccgttcgatccttcgatgtaaatggcgtgtgtacgcagcgcagtgttcagcgttttggctgttaaatactctcgaaacaggacgggacctgcagagactgagttcagaggtcttataatctacaattaccgtggattcgctagattatttttaggtt

SEQ ID NO: 269865 - DNA, 429 bp, Zea mays
ggccgtttcatcttcaatgtcaccaatgtctcctggtggcgtagtccagccagctgctgcaccgttgatatgcggtgggaatgacaacagctttggcggcataccaactggccaacctttgcaggggactgatgctgcattccccagttttcctgcaggcgaaaattttccaggcgcagcagttcaacaggccgctcctgatgtataatgagttgaacaatatgtagtgcactgcccccttttcttcctatttaatcaggtgtacaatacgagaaatgagattccgggtattagtttatatgactataaattggcttttccacaatttctgatgatcttgtggtgaattgacgcatggatcttgtgtgttcttgtgctgaatttcatgaaaaggagatgttgtccagacaacaaaacaaagggcggccg

SEQ ID NO: 269866 - DNA, 487 bp, Zea mays
tcggtggcattggattggaccgcactagaagacaggttcttcatggagaaagaggacatgatcatagctcgtgcatggcgaaagttccttgagaagacgagactgcaaaagctgttctcaagaaagaaaaatagtatgccaaagatagattccaagaagaatgatgatttagctagtgaaatagaagacaaggagctttatgttgaacgcatacgtcttgaaacaatggatttaagctttgggaatttatttggcaaggtcacaattcaagagcctacatttgaagaggtgattgtcttgtataggagaaaaagtccaaagggccaggatgatagggcaattcatgtaaagcacttcaaaaatatcccaatggcagacatggagttggttctgcctgagaagaaaaacccgagcctcacacctatggactgggttcaatttattgtttctgttgtcattggacttgttacactcatcagttcactgg

SEQ ID NO: 269867 - DNA, 1369 bp, Zea mays
gaaacatgtccgaagcaaggaacttcatcttctggtcaagcagaaagaaacacaacaatcttgagtgattacaccatacaacaaaaattggtatttagcttaaaggggaaagagcttgaccggtctgttactctatatcagtcaatcctgcaggatcatatcaatgcagggtctgagataattctggacatgcagttttggcgcagtgtacatgacataactttcagagctgctaatccagaagcaaatagaacagctgttaacccagaagcaaatgattctcctatgcattcctctactgcaatgtcatcaataaatgagaatacaactgggtttacatggcagatagctcccattcttttctagtatgttgcttggtaaacttccttgcaaacttgacagatcaggtgcttcgtatgacatattgtttatgttacacattttagagggattaaacaggtattcctttcacctcgtgtctgatgagagaaaccgttcttttgcccatggaaggataactaaccttgatgatctgaaggctgaagttttctcgattcctcagcaagagtttgtctgcgccaaattgacagataaattggagcaacaaatgcatgatccattagtttcaaggtcttgctgcctgcctttatggtgcattgaactgatgtctgcatgtcctttcttattttcatttgaggcgagatgaagtatttccagttgacggcatttggttctttgaaaaatcatcatggccacatgatggatgcaagtgttaacagtgttgcggaaagggggtcttcccactcacggaaaaagttcaaagttgatcgtgatgatatactggtttcagcagcaaaaatgatgaagtcccatgctaagagcaatgctctacttgaagtagaatataaagaggaagtgggcactggtttaggtcctacaatggaattctatacattgataagtcatgaatttcagaagtctggtctaggcatgtggagaggggaacttccttgtaaatctggtacccatgatactcatgtttctagatttgtggttgcctctaatggacttttccctagaccttggtctgcttctgaagatcctgcttcctttcaagaagtgagcgagcgattccacttacttggtctggttgttgcaaaagcaattaaagacaacagaattcttgacattccattttctaaagcattctacaaacttatccttggacaggagcttaatatatatgatatccagtcattagattctgaactggccatatgccttgtggagtttcaagcgcttgcttgtcagagaaaatatgcagagtccaatttgacaagggactgccagatatcagatttgacttatc

SEQ ID NO: 269868 - DNA, 1559 bp, Zea mays
cccacgcgtccgcccacgcgtccgctttggttctgccctcgcacgctatgcccgcgagtcggctccccgcgcccgcagcccccgccgccatcccgattcctccgcccgcttcccctccccgcacacgcagccccgccgccatcccgattcctccgtccgcttcccctccccggtccccgcgcccgcagcccccgccgccatcccgattcctccgcccgcttcccctccccgcgcccgcggccccgccgccatcccgattccggcgccagcggcggtgcccaaggggaagaaacgggaggcggaggaagagatcgagaaggccgtgagcgcgaagaagcagaaggcggcgccaccggcgaaggccgtgccgacgtccaagaaggacgccaagaagtccaagaagcagcctccccccaagaaggctgagagcagcagcagtgactctgaagaggactccgagtccgaagaggaggttaagaaggtacagccaaagaaggcgcctgctcccaagattgctaaacaagagtccagtgatgatgacaccagcgatgagacctctgaatctgatgaggaacctgcaaagaagcctgctgctaaacccttggctgcagttgcgaaaaatggttcgaagacagtcaagcaagagagcagcagcgatgaggacagttctgaagatgagtcggatgacgacagtgatgatgaacctgcaaagaaggctgctgctaaacccttgggtgccgttgctaaaaatggtttgaagaaaggcaagcaagaaagcagcagcgatgggagcagttctgatgatgagtcagacgatgatgttaaacctgctgccccactaaagaaaacatctgtggctgttgcacaaaagaaaaagggagattcttctgagagtgactctgatgatgactcagatgaggaagtgcctccaaagtcaaaggctccagcagcaactatcaaaaaggaagattccagtgaaagtgagtcagagagtgattctgaggttgaggatgcaagtaaaactcagcctgctaagagagctgcttcaaaaatgaaagatgaatcaagtgatgactcagacactgatgaggatgaagaacctcctcaaaagaagcagaaggaagcactttcagctgcaaaaaaagaaagcagcagtgaggatgaagatgacagtagtgaggaaagttcggatgatgagccaacaaaagttgaagaaaagaaggctccaaaagtatcagaaaacagtggatcggaggatgaatcttctgaagacgagagtgataaagacagtgaagagcctgctaatactccaaagaaggctgctgtgcacgcctctgaaaagaaaactgctaccaaagaacctaagacgcctactggctcccaaagtgaatcaacggaggtgaatacactttttatgggaaatgtcccctggaaagctgaatttgatgatgtgaaagaattttttgaggacgttggtgaggttgttgatgttcgttttcctacacatgatgatggcaatcgtaaaggattatgctatgttgaatttgtttcagctgaag

SEQ ID NO: 269869 - DNA, 576 bp, Zea mays
cagaaatattagtatttctacaggttaacaaggtacatacaaagaaggcggctgctcccaagattgctaaacaagagtccagtgatgatgacactagcgacgagacctttgaatctgatgaggtatgttatcatttttgggttttaatgctgaaaaaaaccagcaaccaacaaattgaattgttaatgtagttttcagagtttttagatgccaattcatcttctcattaaggaacctacaaagaagcctgctgctaaacccttggctgcagttgcaaaaaatggttcgaagacggtcaagcaagagagcagcagcgatgaggacagttctgaagatgagtcggatgacgacagtgatgatgtgagttgaagtttcctcggcgtccctgcatcgcttccaccagccctccccacacgcggcgacagggtcgtcgtcgtcccggctccgcgtcggccacacccgaatgaccgtctccatgtcgtgccgtctccagttatgcgagcgaggctggataaggtcgtggggttccaacaaggtggtgcagctccattcgtccctccacctcacccgccggcc

SEQ ID NO: 269870 - DNA, 774 bp, Zea mays
ccctttcgttcggaaaaagcaagaaaaatctcgcgagggaatgatcctgaaaactaaggatgatcttgctgctgctgaaaaggaacttgaagatctacagccttatgaacttcctaaagctgaaatggcacaactaacagaccaaattgcacgaataagtgttgagataaaaaacttaaaagcggaaaggaatgccatggagtctcagttagctcgagaggaagaaagcttgaggagatgttctgataggttgaaggaaatggaaagcaagaatagtaagctactccaagcattacgaagtgctggtgctgataaaattattgaagcataccgctgggtgcaagctaacaaaaagaatctcaggcaagaagtttacgggcctgttctccttgaggtaaatgttcaggataagcttcatgccacttacttggaagaccatgttccaaactatttatggaagtcattcatcactctggatgcttcggaccgtgactacattgctagagaaatgaagcagtatggcattcctgttctgaactacttagtgcgcgaaggcacaaggagacggccattaaacatcactccagagatggagcaacttgggatctactcccgacttgatcaagtatttcaagcccctgacactgtgaaagatgttttgattagtcaggcgggtttggatgattcgtacataggtacagatgaaactcatcgcagagcagatgaggtgtcaaagctaggcatctatgacttttggactccggataatcatta

SEQ ID NO: 269871 - DNA, 710 bp, Zea mays
cgtcaatgtaaatagcccgttgcttgatctggaattctctcagtcacaagtcaatgttcatggtaaagtctcatgcaaagagcaatgcagccagaacattctggtctcacttgttagattggctggcggagttgaacaggaaaagaagacaactacgttggaacaagataatgttaattttgtgtttaagaaagtatttcctggaaaatatcgtgtagaggtgaagaattctttacccgagggcttagctaaggatgattggtgctgggaccagagtatcttgaatatagatgttggtactgatgatgtgagagacattgtgtttgtacaaaaaggctattggattgagctagtttcaactcatgatactaatgcttatattcagcagccagattcttctagacttgatttgttgataaagaaaggatcacaaagaatttgtgttgaaacttcagggcaacatgagattcatttaactaatccttgtatttcctttgggacctcgtctgttttgtttgatacagctaatttaatgccgatccatatcaatgcaaagaagtatcttgtaaaaggtgaaatccatgtggacatgagctccattcaggaaaacattgatttcaaggacatagtcgtggatatcttgaagagtgatggcagtttcattgaaaagatattcacattacttgttcttggaaaggacaattaaaatg

SEQ ID NO: 269872 - DNA, 855 bp, Zea mays
aacacctcacctcctccggcgacgcacgcagctcccggcgtgcgctcgcctatctccaatcatccaccgcgccgccgcagaggcctcgtcctcaccttccccgtaggaagccgaagtacagccagcagcgtcgccatcagcaccgatcatggccgactacgagcaggagcaggatatggaggtggaggcactgcaggccatcctcatggacgacatcaaggagatcgacccgagtgagagtgggatcgccaccaccgcccggtgcttccagatcctactctctcctcaggatgatgattttgatgagtcagcttatgtcccagttcaactggccctgatttttgcgcacactgagaagtaccccgatgaacctccactactaaatgtgaaaagtgtacgagggattaaaccacatgatcttgcatccctgaaggaaaagcttgagcaagaggcaaaagagaatcttggcatggctatggtctacactcttgtttcatcagccaaagagtggctaagtgagatatatggtcagaatggtggtgatgaggaacctgaagaaactgaagcagaagaggaggttattataccacatggtgaagctgttactgtagagagctttctggcgtggagagaccgatttgaagctgagttggccttacagcgtgctaagtaaactttctattttgtttacatattaagtttttctcgatgatcacatgggaatctcttgtttacttgtgatatcttcaatctaatggtgtttgcttcccatattatataagtacccaaatgtgtgtttagattatcttttgcattttgttgggcatgcagacttatgccaggatcagctcttac

SEQ ID NO: 269873 - DNA, 864 bp, Zea mays
gggattaaaccacatgatcttgcatccctgaaggaaaagcttgagcaagaggcaaaagagagtcttggcatggctatggtctacactcttgtttcatcagccaaagagtggctaagtgagatatatggtcagaatggtggtgatgaggaacctgaagaaactgaagcagaagaggaggttattatacacatggtgaagctgttactgtagagagctttctggcgtggagagaccgatttgaagctgagttggccttacagcgtgctaaacttatgccagattcagctcttacatcctcaaaggaaaagaaactcacaggacggcagtattttgaaagtggaaggcatgcagtgaaaggagcaagcacagttgctgatgaagatgaagacgaggaggaggatattgaattcgatgatgattttgaagacgatgaagaggacatgcttgagcattatctagctcaacaatcagagaactcagcagcttaaccttctaggccaaacaaagtaccttttcgggcgcagctttaccttaggaagccaaatgtggttatatgttgcaactgtagctctagtgcgcactattttttttatgtttctcatcatttggttgtatttgtggatgctttctagttttatcaagggggctgtgggttctcattaatatatacgcttggaggagatagaagatcaagctgcctaatacttcgctgtataatttactgtatttttgatcggctactacgtgtattttggcttgtggatcatgttgcgtatttgggacaagtcatttatggaaagatattcaatactcctatctctaaaaaaaaaaaaaaaagggcggccgctcgcgatctagaactag

SEQ ID NO: 269874 - DNA, 428 bp, Zea mays
ttcttcccacgcgtccgcccacgcgtccgctgctgtcccggactcccgggaccggggaggccgggatcgagaagggcaacgagcgcgtcccgtgctcgccactcctcgccgatggcgtcctccactctgccagcctcccccttccgtatgtctcttcccggactacgagccccggaccctgctaaggttaagcacgtatccgttcgagcccccgctcgccgtcttcccgttgcagcctccgcggcaccatcaggcgccgcggcggcggcggcggcggcgagggagcgcacgcgtttcctggagcgctacgggctcaacccaaacgacttcgaggaagatgcagaggagaatccgagggaagagagaaaggacaggcggaggcggcggcagtcggcgagaggggagcaaactgcggaagcggcagtgac

SEQ ID NO: 269875 - DNA, 471 bp, Zea mays
tgaagccaaagatcttgaggggaagcagcatacaaacccctatgcaaaaataattttcaaaggcgaagagaagaaaacgagggtcatcaagaagaatagggatccacgatgggaggatggattcgagtttgtgtgtgaggagcctcctgtaaatgataaactacatgttgaagtcctaagtaaagccccgaagaaagggctgatatatggcaaggaaactttgggctacattgatgtcaaccttgcagacgtgatcagtaacaagagaattaatgagaagtaccatctcatagactcaaaaaatggtcagatccaaattgagttgcagtggagaacttcctagacagaaagaacacgaatacctgaatgtggtatacatatgaatattcttgtgctgagtttgcggatacctgtaattgagctcatgtagatattccctttgtttcaagacacaaaaaaaaaagggggggg

SEQ ID NO: 269876 - DNA, 423 bp, Zea mays
tgtctgtctctctcggccccctctcgctctccgacgactggtgggccgctgccggcgccgccgccttaacccaggtgttgaggctttcgttggtctcctcgccgtcgacgagcacccaccaggatgaattctaaacgtaggaggagtcatagcccagttgaatacaaggaaggccgtgacaaagattatgggacttctggaaagaaggataagtcaagagatctagatgacacatgtgatgctagaagaggtcatgaaaccgataggcactctgataagcattcctttggaacatcacgtgaatccaagaagcatgatgactatcggaggtaccatgataagtatggtgatgattatggtaggagccatccaagagcctctcggtcagaccgggaatcaagggctgatactttatatgatcgc

SEQ ID NO: 269877 - DNA, 460 bp, Zea mays
ggccggtcgaaattccgggtcgagcacgcgtccgagtcaccacagaatcaaagaaaagctttcccccgatcctctcgcggacaccagcgatgggttcccgctacgaggtggaggtcaccgtcggctccgcccgggacctcaagaacgtcaactggcgcaacggcgacctcaagccctacgccgtggtgtggatcgactccggcagcaagtgctcgacccgcgtcgacctcgacaacggcgagagcccgacgtgggacgagaagctcctcgtcccgctcccgcccacctcccgcctcgacgacgccgtcctctacatcgacgtcgtccacgccaacgccgccgagggcgtcaagccgctcgtcggctccgcgcgcctcccgctccgcgacgtcctcgacgacgccggggtcgggggcaaggcctcgcgcagcctccgcctcaggcgcccctcgggccgccc

SEQ ID NO: 269878 - DNA, 903 bp, Zea mays
agtggagtcaccacagaatcaaagaaaagctttcccccgatcctctcgcggacaccagcgatgggttcccgctacgaggtggaggtcaccgtcggctccgcccgggacctcaagaacgtcaactggcgcaacggcgacctcaagccctacgccgtggtgtggatcgactccggcagcaagtgctcgacccgcgtcgacctcgacaacggcgagagcccggcgtgggacgagaagctgctcgtcccgctcccccccgaacctcccaaccgaaggatggagtgggttgtacagcggcctcaagccctctctcatcggcactgccgcgtcgcagggaatctattactacttctaccagatcctcaagaacaaggtggaagatatagcggttgctcgtagcaagaagggccttggggatggtactgtcgggatgctttcttggcttggtattgcagctgttgctgggtcaatcaatgttcttctaaccaatccaatatgggttcttgtgacacgtatgcagacacatactcaagcgaaaagaaaaatattggagtctaagagggagcttttactgaaagaaatgtctagggcgaattcgttggaggttgcagttctgaaggataggctggttaaattggagtcagaaaaagctcgtccatatggtactcttcaagcgacagatccaggaggtttaccatgagtctggtgtaagaggattttggaaagggcttattccaacattaatcatggtatgtaatccatcgattcagttcatgatctatgaaacattggcaaagcgtctgcagtcaaagcgttctggaaagcagctaccaaaaaggcacctcacagctatggaggtttttttattgggtgcattagcattacttgggagctactgtagtcacc

SEQ ID NO: 269879 - DNA, 536 bp, Zea mays
  unsure (1)..(536): unsure at all n locations
cccgccgaccgacgcgtacgcgtacgcctnntcttattctatctcatgtagtcctcacctctcatcctctccgtctctccccccctcctctccatccaaagccgcgcgtagacagtaacccacatctcctttcctcgccgcggccacggcgccgactgagcgaggtcttcatctgcgcttcaccagcgacgattatccactaggtaggggatcatccgatcatgtcgagcgcggcggtgaacgggctgtccggcgccggcggcggcatcatcgcgcagatcatcacctaccctctccaaaccgtgaacacccggcagcagacggagaggtcaacgaagaagaggaaggccaggagcggcgccagcgccaccccagcctccaccatgtaccagatgctccagtgactgcagctgattcaaaccgaaggatggagtgggttgtacagcggcctcaagccctctctcatcggcactgccgcgtcgcagggaatctattactacttctaccagatcctcaagaacaaggtggaagatata

SEQ ID NO: 269880 - DNA, 1096 bp, Zea mays
ccgatccgcatctccgatccgcatctccgcttagtatatacatggggattggtagcgagcgattgattacactgggtgaccatcatcatcagtaactaattactttagattagaaccaaagggaagcgaagcaagaatgaatcgagtcgagaagatggtgcagttcggcaagtggctgaggaggcagatcgagcggagcctcccggagtggcaggaccagttcctgcgctacaaggagctgaagcggtgcgtcaaggcccgctccggcggctgcccgccgttgcccgcggaggaggccgagttcgtggccgagatcgacgcggagaccgagaagatcaacgccttcttcctcgaccaggaggaggagttcatcatccgccaccgggagctgcagaaccacatcgagcgcgcgctgggccgcggcaggcccaggccggcgccggcgctgcacgaggccgaggtcgccgccatccgcagggagatcgtcaacttccacggcgtcatggtgctgctcctcaactacagcagcatcaactacataggcctggccaagatcctcaagaagtacgacaagcgcaccggcgcgatgctgcggcttgccgtgatggagtcggtgctgcagcagcccttcttcaagacggagacggtgtcgcatctggtgcgggagtgcgagtccttgatggaggccgtgttcccggaggcgcgcgatcggggccaggccgccgccgcggcgctcgccgtcgcggaggcggagcagggcatcttccgcaacaccgtggccgcgctcctcaccatgcaggacgtccgcgcggggagctccaccagaggaagccactcgctgccgccgctcaacctgccggactccgactggctacggtccttcgacccgccgtttccgatcccgacccgatgacacttgttgctcgccgctcctagttggcttgcgccagcctcctcgatctcccttccttttcgtctagcttcttggcccgcccggtcccggcccggtacatgctgtgcactgtgcttgccttggttttccattttcccgctttctaagttctaattaactaatgtatgtagagtgcagtagtga

SEQ ID NO: 269881 - DNA, 1158 bp, Zea mays
gattctttcgaattttccttctcttctctgaccgactgatcttagcgatcttctccctcgaatcttagcgcagcggtagcgccgatcctgttcctgtgccgtgccggcttggattggaaaataggagggagaagatcaacgccgccgcggtgcggcctgtggagtattaaacaaagatgcgcaccgcccggctgcgccggcggctagcagccaacgcgaaacttcagcttccgctccgccgtccccctcccggacccaaacaaacaaaccatcgtcacccaatagccaccggccaactgtcaagcactccttcggtgcttccccatctgcgccccccgatccctccggacccgcgagcgaggccgtcgccggcgcgcgcgagatttgagctgaggccatggagtcaccgttccgggccgacgtggtcaaggacaaggcggcgctggtcaccggcgggggatccggcatctgctttgagatcgccgcccagctcgcgcgccacggcgcgcaagtcgccatcatgggccgccgccgggaggtcctcgacaaggccgtcgccgcgctccggtcccagggcctccgggctgttggtttcgatggagatgtccgcaaccaggaggacgcggccagagtgcttgctgcaacagttgcacattttggcaagctcgacattcttgtcaacggtgcagctggcaacttccttgcttccccggaggatttgacgcccaagggattcatatctgtttttgatattgtttctttttgtcttttcttgtctttcttcatattcttcttttcctcttcttccccttcctttctattctttattcattctttttattttttttttttttttacctgctttctcattctttcttttctttcttctcttttttccttctcttttctttattcttcttttttcactctttttttctcttctcttatttttttttcctctttattttttctctttctctcttttcatcttcttcttcttttttgttcttctctctatcttttatatttttctcatttttccttttccttcttttctctttcttctatctattttttctcttctacttttcctgttttttctaattcttctcttatcttttttcctctattacttccttttttttttttactcttacc

SEQ ID NO: 269882 - DNA, 1059 bp, Zea mays
caaggacaaggctgcgcgggggaccgtagtgggatccgcgcctctgtttttcgaccgccgcccagatcgcgcgccacggcgcgcaggtcgccatcatgggccgccgccgggaggtcctcgacaaggccgtcgccgcgctccggtcccagggcctccgggctgttggtttcgatggagatgtccgcaaccaggaggacgcggccagagtgcttgctgcaacagttgcacattttggcaagctcgacattcttgtgaacggtgcagctggcaacttccttgcttccccggaggatttgacgcccaagggattcagaactgttcttgagatcgacactttgggtacttacacaatgtgctatgaagccctcaagtatctgaaaaagggtgggccaggaaaaggcccgtccactggtggactaatcattaacataagtgcaacactgcattacagtgctttttggtaccaaatccatgtctctgctgctaaggctggggttgatagcatcacaagatcactggctctggagtggggaacagattatgacattagagtcaacgggattgcacctggaccaattcaagacaccccggggctgaggaagcttgcacctgaagaaatgagcaaggggcttcgagaaatgatgccattgttcaaatttggggagaagcgggacatagcaatggctgcgctctaccttgcttctgatgcaggcaaatatgtaaatgggacaacactggtggtcgatggaggtctttggttaagtcaccctcgccatattcccaaggaggaagttagggagctgtcgaaggtggttgagaagaaggttagggcctctggtgttggtgtaacatctagcaaattgtgatttgcatttgtgtgatctgtagcatcgatcaatatgttattacagaactttattgtctgtgtggctcttgcaatctaattagcgagtttgtttagttgagtaacttggcatatttacagtacatttctttcttctaagttccatttgagacagttttgattgatatgtcatgccagccaagatgtttgtcgcc

SEQ ID NO: 269883 - DNA, 543 bp, Zea mays
cggacaacatggatctatacgtgtcctgcaccttcggcgccgacgtcgcgacggactgccgccgcgcgcaggacctggacatcgtttacagagcgcaccaggtggtggaggacgaatatgagttctctgtcgaccgacagctcgttacctttttttttgtccccaactaccgcaagctcggctgctccttcaccatcatcaagctgaaggcggacagaaacagcagctcgcccctcgggtgttcgaccaaatgtcccagccaggcactgcaccccattgtcaagcccaatctagtagtcgtgctgaatattgcaggtgctgggggcaagttctgtggaggatttgatatcaacgttttcacaagggttcaccagactggggatgtatcgcttatgccaaacgtatccattgagcttgtgtcaaacatgatggaacagggcatacaaccttctgttgcaggcattccaggtcttgcattgggtggtggcctagaagtgactatgagttgtcaggctcaaatacctactcatgttgctcacacca

SEQ ID NO: 269884 - DNA, 511 bp, Zea mays
gaatacggcgtcggccacgcgaccgctttcgtgtacccttcccatccccgccgttctctctctcttttcccactctcccacacttcctccattgttccctttttctctcgcggagtagcggtgatccagacaccgagtgtcctacgcgtcacggaccgtgcacatggcggcggggtcgatccgggtcaccatggaggtgggcgccgacggcgtcgcgctcataaccatcgccaacccgcccgtcaacgcgctccaccccatcatcatcgccgggctcaaggacaagtacgcggaggccatgcgccgtgacgacgtcaaggccatcgtgctcaccggtgctggaggcaagttctgtggaggatttgatatcaacgttttcacaaaggttcaccagactggggatgtatcacttatgccggacgtatctgttgagcttgtgtcaaacatgatggaagagggaaaaaaacctttgtgttgcacatataggtgctctattgtggggtggcccaaa

SEQ ID NO: 269885 - DNA, 715 bp, Zea mays
gacccttccaaacctgaggagttgtgcagtcaggcttgcacagatcggctggcagaatatggtcaagaaatggtgaggcgccatgaaaaggactacgaccggagaaaagcaccaatcgatcccatggtggtgtatgctactggaggcagaaagagtcatcgccgccgctccatgtttaatggagtgattgactccagagaggttagatctcacaggtcggggtcttcctccgaacgatcaggggctagaactcatcgccaatcagagcatgagttggacgttgcaacggtgcaagaggagataaggcaacgtgatgcattccaaaggcgcaacatgagtactttgcctcattcttggcgcagcagcagaccgtgcttcaagcaactttccaacagcaggggataaacgtagtccttccacaatttcaacctccaccactgccaccaatatggggatcgggtacccaataccttctgcaagtcaaacggccgatgctggaactacatttgtaaatgcaatcttcggtccaccctctggaggcagcggccaaaactccaatcatctgagaggtggcttgtcacactcggatttaagggcaaactcgggcgcatctcaaatgtgtgctaggatcaagtctcacacatatgatggctcatggtacagaaatcaatgtcatatctttattaaataaatcgagtttttttacaaaataact

SEQ ID NO: 269886 - DNA, 743 bp, Zea mays
ctccggtaaccacacggaggccgcccgcgtcttccagacattcacagacgcccatggcgtcaagcccaacactgagaccttcaatgccatcatcaaatcattcgccgagtctggcaccataaggtccttttactcggttttcgatgaaatgtgcaagaagggcttgaagcccaacgccatcacatttaccactgcgctcgctggtttctacaaggaggagaagttcgatgacatcaagaaggtattagagctcatgaagaagaatggatgtggtgagtccctgccggtatacaatgtgagggtgcaaaagttgtgcaaactcggtcggagtggtgaggcgagggcattagtggacgagatgatgaagaagggcacaaagccaaattgggtgacctacaaccatctgatttatggattctgtaaggacggggatttggacgaagcaaagcgtctgtacaaggagatgggaagaaaggggcttgttggggatagcgatttctattttatgcttatttattacctttgtaagggtgatgatttggacactgcccttggactatacaatgaaatagcagctaagaattgggtgccatgcttctcaaccatgaaaatgcttgtgaatggacttgctgggagctcaaggatcgatgaggcaaagggaatcattgagaagatgaaagagaagttcccagataaaactgaggggtggaaggaggtggaggaagcatttcctcattagagta

SEQ ID NO: 269887 - DNA, 402 bp, Zea mays
  unsure (1)..(402): unsure at all n locations
accgacctcgtgctgccccaaccgttcataggaaatgtcgacaagtgatggcgaccaccgcatcgcctcacccaccatccttcgtcccacttccccccatcgcctctcccgacctcacgccgaccccaaccaactagaggaaatggcggcgagcgaggccaaacttgagcacgtgtcccgggcgcgatgacaatcagacgacctgngttattgctcttgtagcgagcgagtgcatcaatgggtaactggaggaggtccttgatagcgagtgggttattgctcttgtagcgagcgagtggaacctgaaacccccgcttgtccaccaccattgtgcgacgcctncaactgcgcccgagccatcagcgcggccaccttcaacagcgcccgagccatcaacgcagc

SEQ ID NO: 269888 - DNA, 699 bp, Zea mays
tcggtcggggcactggaacaggtcgaggggtacagggatgaggtcttcgcgctgattcccagcctcaagtacctcgatggcgctgacgctgagggcaacgagcgtttggagacggatgacgacgacgacgaggaggaggacgacgaggagggagaagaagggccggagggagaggaggagggcgatgaggatgatggagaggaagaagatgatgaggacggtgaaggggacgacgaagaagaaggtgatgaggaggctgaggacgaagacggcgaagctgaggatgacgagcttgacgcagacgcagaagacaaggagaacatcgaaagcaaggcaggatcttccctgccaaataagaggaaaaggaataacgaggatgatgccaatggatacaagtaaaacggtgagggaaagtagtattttcctgaacttcggaaacgttcctgtgcactgattattatttgtatgcttttcgagtcttttttttcccgcacttgtaatagactagagcatagttttttttaggcggttccacttctgaagtatcgtttggattctggaagttgtctgactctgaaaccatgagtaggatgtgtccccagcacgtatatacgctttgtttggtgtgacttcctgatgctactaatcgagatcccagattatattaaaaaaaaaaaaaaaaaaaaaagggcggccgcc

SEQ ID NO: 269889 - DNA, 720 bp, Zea mays
gccgcagacagacctcctgctgtcggggttctaccgctgggccggcgatgccaacacgttcaccggcgatgaatgcatcgagctggtctgctcgccgaacaaccccgacggcgccatccgcgaggccgtcgtgaggtccgccggcgccaaggcgatccatgacctggtgtactactggccacagtacacgcccatcaccggggccgccgcccacgacatcatgctcttcagcgtgtccaagctcaccggccatgccggcacgaggctcgggtgggcgctggtgaaggaccgcgaagtggccaggaatatggtctacttcgtcgaccgcagcaccaccggcgtatgcaaggagtcgcagatgcgcgccaccaagatcctcggggtcgtctccgacgcctacgaggtcgtcccgccggccagggccagggccagcggcgcggtgccccgcctcttcgacttcgcgctgcggcgcctggaggagcgctggcgcatcctgcgcgccaccgtggctgccaccggcgccttcagcctgccggaggagacctccggctactgcaacttcgccaagcaaaccgtgacagcttgccctgcgttcgcgtggctgcggtgtgagaaggagggcgtcgaggactgcgccgagttgctcgccggccacaatatcgtgggtagcggcggggagcagttcggaggagactcgcggtgcgtcaagatcaacatgct

SEQ ID NO: 269890 - DNA, 1618 bp, Zea mays
ctctcttcttccccttcctcggcggctttccaccattcaggttcagactggaggggccttcgtgccaatctccagtgcgtgttcttcagtggaggcgccggccggactcgcgatggagcgggacggccagcagacccgccgcgacaagctcatcatcgatacggatcccggcatcgatgatagcatggctatcctaatggcgttcagagcacatactctggaaatcattgggctcacgaccatattcggcaacgtcgacacagaaggcgcaacatgtaatgcactattgctgtgtgagagagcaggacatcctgaggttccagtagcagagggcagccacgagcccctaaagggaggaaagccccgtattgctgattttgttcatgggtcagatggcattgggaatctgtttcttcctgcaccctctgctaagaaggttgaggaaagtgctgctgatttcatggttaataaggtctctgagtttccaggagaggtctctgtgcttgctttgggacccctgacaaatgtagcattggccatcaaacgagacccttcctttgcaagcaaggtgaataaaatagttgtactgggtggagctttcttcgtggctggaaatgtcaaccctgctgctgaagcaaatattcttggagacccagaagcagctgacatagtttttacttcaggagcagatgtcattgtggttggcattaacataacaacacaagtctgtttgacagatgagggtctcttggagctaagaaactcaaaagggaagcatgcaccgttcttatctgagacgtgcaagttctacagagattggcatgtcaagtctgatggcttccatggaattttccttcatgatcctgtgagcttcactgccgtgcttcatcccgagtacttcacattcaagaagggtgtggtgagagtggagacccagggcatttgcactggccacactttgatggatcagggattgaaaaagtggaattcagagaacccttggtcagggtataaaccgatttcagttgcatggacggttgatgtgccaaaggtcatcagctttataaagaagctgctcatggcaccatgagcaaagtacaaccatttaacgacatgtcgacatcagcgctctctgttgtccaagaaaatttgacgagtacagatcctctttctcagctgcactgtaattagttcctggacctaggatggttcctattcctccaatagtaagaggaacctttcattgtgaaaggtcatgcagcagtctcgaataccatgaagcaaattctggcatacgacatcatgtctcacacatttgtatcaatacatttcgaatcaataaagtttccctcactctttactgtgcacttttctcaaagatcacaatcttgttgtaatgtgcctcatgtaaagcaaactgcgaacaaggcatatgatagttttgatacaacaaaaaaaaaaaaaaaaaaaaaaaaaaaaaaaaaaaaaaaaaaaaaaaaaaaaaaaaaaaaaaaacaaaacaaacaacaaaaacccaaaacaacaacccccccaaacaacaaaaccccccacacacaacaacccccacccaaccccccaacaaaaaaaaggggggccc

SEQ ID NO: 269891 - DNA, 903 bp, Zea mays
ggaattgcggggacgacccactcgtccgacccgcggttccagatccatggagaccctgaagcagctgacatagtttttacttcaggagcacatatcgttgtggttggcattaacataacaacacaagtctgcctgacagatgaggatctcttggacctaacaaactcgaaagggaagcatgcagcgttcttatatgagatcgccaagttctacagagattggcatgccaagtctgatggttttcatggaattttccttcatgatcctgtgagcttcactgccgtacttcatccagagtacttcacattcaagaagggtgtggtgagagtggagacccagggcatttgcactggccacacttttgatggatcagggattgaaaaagtggaattcagagaacccttggtcagggtataaaccgatttcagttgcatggacggttgatgtgccaaaggttattggctttgtaaagaagctgctcatggcaccatgagcaaggtaccgccatttagcgacatcaatgctctctgatgcccaagaaaatttggcaagtacagagccactctcccagctgcattatacttatttcctggacctggaaagcttcctgttcctccaatagtaagaggatcaccatggttcttttagttgaggtcttaatgatttagatcgacttctatactgcgactaaaaatatcgatatcacaagagtggataaccgtgtctaagccatttcgtccttcaaatctgggagtcaaattgtgaaagcttatgcagcagtctcaaataccatgatgtaaattctggcgtatgacagcatgtctcacacatttgtatcaatacatttcgaatcaatgagatttcccataaaaaaaaaaaaaaaaaaaaaaaaaaaaaaaagag

SEQ ID NO: 269892 - DNA, 283 bp, Zea mays
tggcccgcaaacaacaccgctagccatgtggcgccgcgcctcccacctcctcatccgcaccgccgccgccgccgccgccccgacccgccgcctcccacttcctcacccgccgctacccatcgccccaagagtggcctccgcatcctcatcctatgccacagcggtcgcggcgagggcaccgcggacggtagggaccctgctgcggctcaacgacctgtgtgacaacccgggcgcgcggaagcagaaaacgcgcaaaggacgcgggatcggcttcggcaaaggg

SEQ ID NO: 269893 - DNA, 977 bp, Zea mays
ttaaaatccacccaacccttccggaaaatcttattaatattccggccatggccaggaaaagaaagcatggcaaagattcctcaaaagcaactgattctctttctggtgcccccaaggctcatccagttagttctgaatcacgtcgagtccaagctgacatagagcaaactctagctctcgtgcgtaagcttgatgctgagaagggcattgatggcaatgtactgtcaagtggtgatcatgacaagtcagatgtagacaaatcacacataggatctatggggcctatagttataatcagaggtttaacgactgtcaaaggcctggaaggcgttgagctcctagacactattcttacctatttgtggcgtattcatggtgttgattactatggcacatcagagtcgcatgaggccaagggccttcgtcacgtgagagtagacagtaagacttctagcacatctgatgtcagttctgctgattgggagaagaagctggatactttctggcaggaaagactgaatggtcaggaccagctggtcatacttactgccaaggacaaaattgatgcagcagctgctgaagttttagaacctcttgtcaggaaaatcagggatgaaaagtatggatggaaatttggctgtggagccaagggctgtacaaagctttttcatgctcctgagtttgttcacaagcatttgaagctcaagcatccagaccttgtattagagtcaacgtcaaaagttcgagaggatctttattttcaaaattacatgaatgatcctaacgcaccaggtggtaccccagtgatgcaacagtctgcaccagacagaggaagacggttacctagcatggacagtcgtctgaaattggaccgtggcagtaccagagaccatgttaaagctgttagaaatggagtaaggtttggtgaagggaacaactttccaagccggattgggcctgttgtccaaatgtttgat

SEQ ID NO: 269894 - DNA, 331 bp, Zea mays
gcttattttgatctccacaagaatgaagattggttaaaagacaagtaccacccatctaacctgttgtctgttatcgaaaggaggaatgaacgttgcaaggttatagcaaaggatttctttcttgatttgcagaatggaactctggacctaggccctggaataactgggggtgcagcaagtaaaccaggtggtagtgatggaaattctgaggatgacacggacaatgacaagagaagaaagcatggcaaagattcctcaaagggaactgattctatttctggtgccctcaaggctcatccagttagttctgaatcacgcgagtccaagctga

SEQ ID NO: 269895 - DNA, 421 bp, Zea mays
cccacgcgtccgcccacgcatcttcgtgaccttcgtaggcggcgagcacccaccaggagaaggcatggcttcacgcatgacaccttccaagaggccttttcagagaagatcttcagactacgatggccggggcaagtggcagaagacgaagcacccttctccacataaatctcagttcaaaatcgagcctggtgttcccattttccgtattctctgcccggcttcaaaatctggtaatgtgattggcaaaggaggtgccattattgcaaagatacgtcaagaaaccaggatgagaatcagggttgatagggcagcccccggctgtgacgagagagtcatcttcataactgctgccaacaaggatgaagaagctggcagcgagcaaggcggagagaatgacggaggtgctgctgcttctact

SEQ ID NO: 269896 - DNA, 1227 bp, Zea mays
tggattcttttaaagccaaccaacccttccggggagcgcaacgcggagaaggcgaccggcggcgacagacatggcggagcagcacaaggaggagtcgggcgtgacagtgctggacaagatctccgacaagctccacgggcgcgggggcggctcgtcttcgtcgtcggactcggacgacgagcgctcgtcggcgacggccgccgtgaaggccaagatctaccgcatcttcgggcgcgagaagcccgtgcactccgtcctcggcggcggcaagccggccgatctgtttctatggaggaacaagaggatctctggtggggtgctcgcaggcgcaactgccttctggctgctgtttgaggtcatggattaccacctcctcaccctgctatgccactgcctcatcctcaccctggccatcctgttcctctggtccaatgccacgactttcatcaacaagtctcctcctaacatccccgaggtgaagatcccagatgacctggctgtgaatgttgcacgttccctgagatatgagatcaacaggggttttgctaccttgagggagattggccaaggccatgacctcaagaaatttctgattgtgattgcaggactgtggatcctttctgttcttgggagctgctgcaatttcctcaccttgtcttacatagtttttatggtactgtacactgtaccggtcctgtatgagaaacatgaggataaggttgatgcttttggtgagaaggccatggtcgagctgaagaggtactacgccatcttcgacgagaaatgcctatcaaagattccgaagggcccattaaaagacaagaagcaacattagaagcttagaatcagataagggtctgcggtgatttatcatctcttttgaccattattcgtcggttttggtggatggatgtgattccatgtctaaatacctggacgtgctctagtgttttagtgtggtcagtagcaatgttctaaattatctgagattacgctgaatcatgttctgaagtccacgtttaacgttgctctccctatcctttggaagtggcaatttcctcaatgtctgtaatatatctagtctagtgctatttcttaatctgacctagcgtcatgatgaacccttcttggatatttatttatttgtgccactggacatggtaattagagagcacgtaaattgtacaaaaaaaaaaaaaaaaaaaaaaactcaagactagttctctc

SEQ ID NO: 269897 - DNA, 1878 bp, Zea mays
ggcgctgccacgccacggccgacgcttgagacgctccccgccgcctgccaggccgccaccgcgcgtgacttcgcctcatcctctccggagatggacttccaggtcgtcgtcctcgccggagcacctccgagaaactctcgcccctcgtttccaaggacgttcccaaggcgttgctcccggtcgccaatcgccccgtactctcttacgcgctggacctccttgaggccagcgacctcaaggacctcatcgtggtggttgaggggcacgaagcagcgcagcttgtcgacgcttgggtatccagtgcgtacctggatcggcttcgagtggaggtagttgtggtttctgaagaccttggaagtgctggtgcattacgagctatttcaaagcgactgatggcaaacgatattttggtagttagcggtgacctggtaacagatgtgttgcctggggctgttgctgctactcatagaagaaatggtgctgctgttactgctttactatgttctgttcctgtcagtggtccttcagacacttcttcttctagtgggaaagataaagctaaaaagccaaatcgtttgaacatagtaggactggacaggagtaaacaattcttgttacatattgtgtcaggaactgatgttgaaaaagatattcaagttcataaaagaaaaatacaggctgttggtcagatggaaattcgaagtgacctaatggatgcacatctttatgcttttaagaggacaatattacaggacgtactggaacaaaaggaagcataccgtagcattagacttgaagtcctcccgtatttagttaggagtcaattgagatcaactccatcaggtggcagtggaacatcagttgacgaaattgagagtagtgccgttcagtccagtggtaatttgcagtgtttgtcgcagcatcgggtcattgcaccatctgctttcaagcaggatgtattatcaagatcaagtggtgggcataggtgctgtgcttattttgctagtaaaagcaaatactgtcaccgcttgaactcaatccagtcatattgtgatatcaatcgagatgttataggggaagttagccacctgtctggttattcgttttctgcacaaaacaatattatccacccatcctctgttcttggatcaaagactacaataggaccacactgtattcttgctgagggttcacagcttggtgacaagtgtagtgtgaagcgatctgtgattggtcgtcattgccgaattggttccaatgtaaagatcgtcaactctgttgtgatgaatcatgttgttattgaagatggttgccacatccaaggttctgttgtatgtaataatgttcaactgcaagaacgggcagttctgaaagattgccaggttggagctggttatattgtgactgctggcagcgagcacaaagcagaatccctagcaagaaagtacagtgagctttgactggtttgttagatcctgaatgttttttttttgtgttcacttgagatgcaccccctcagaaaaaagggtagcagttgtccaaattttataaaatgtcattatgtacaacagcacagttcagtgcgaaaggtttggttgcttatctttcctaccaggcggcttgttagagcgaaaggtttggtcgcctatctatcctaccagctgcttgagcaagttgcatgctgtctgaggacgatgggttgatagttggggcatgtagttgggacctactattgtcggaaattctggattcggtttctcttccgccttgtgtttttgtgaggccaggtgattgcctcttataccccttaggtcctcttaggaccacaggtttcttcccatgcatgaataggaaaaatgcaggaaaaaaaaaaaaaaa

SEQ ID NO: 269898 - DNA, 456 bp, Zea mays
agcctcggcccttcaggctggctctgctcctcctcctcctcgccattgctgtgcgttctccacctcaccagatttcgcaacagaaccttcgttccctgccgtctcttgtcggtctggccggccgaggtgggtgatctgtagagcgaaacgccgagccttgagaggagggaggccgcaccggcgattgtagaagcagaaccggtggaggagtagaggagggcgccgaatcgatgcgcggctccgcggacgccgtcgtggttgctcgggacgtggtggcctcgtcgagcccgtccaaggccgcgtcggcgttggacatgacgagatacccgaggctcagcccagatggcctcccgctgcccaatggcagcggcagcggcgcgagcaagaagcctgcacgccggtgccgtccgcccccagatcgagcaggatgacgtggcactgccgtcgccccgacag

SEQ ID NO: 269899 - DNA, 1234 bp, Zea mays
ttttcacgcgtccgcccacgcgtccgcccacgcgtgcgcccacgcgtccgctccggttccagaaaaaaactcggaaccagatctcaaaccacacaatccacggctgctccttcgctggacaccgagaaaccgtcaaggcgcaacgaacgaacttgcagcaaaatttcccggagaccctcgagcaaaaatctggtctggttcaaactcgccttttgcctgcgggcggcgggcgttcttacgggccatgtcgcagcgcgacggcgacctcaccggagctcatccggaagaaggagaccgccacgccgttcgaatggatggctccgacgacgatgagctggaccaacctacgagtaaagcgactgagcacatcacggctatggacgtgaggaaggggaaggatatgcaagggatcccctggaacgtgatgccgactacaagggacaagtacaggcagtcacggctgcaggggtacgccaactttgagaacgtgcctaattccggaaggctttctgagaaggaatgcatgcctgcagagaaaggccaactctactacgagtttcagcacagcacgaggtcggtgaaaccgaccatccgtcatttccagttgaggaatttagtgtgggcaacaacaaggcacgatgtgtatcttatgtcaaacttttctgtgcttcattggtcggcaatgacttgtaagaagcaagaagtcattaatcttctaggacatgtgacaccgtgcgagaagcaccatcggaattactacgaggggttttatcggactccagtcagtactttggcggtgaagcataacttgcttgttactggtgggtttcatggggagataatatgcaagtttctggatcgtcaaggagtaagctactgttgcaagacaacaaatgatgacgacggtattactaattctctggagatatttgagaagcctagtggttctctgcacttccttgcgtcaaacaatgattgtggacttagagactttgacatggaaaaatttcgaatatgcaaccacttccattttgcttggcctgtgaatcatacatcgttgagcccagatggtaaacttgctgctattgtgggggacagtcctgatggacttctgattgacgctaattcaggaaagacggttcacaaactccatggccatttggattactcctttgcgtcggcatggaatccagacggacgaacattcgccacggggaaccaagacaagacgtgc

SEQ ID NO: 269900 - DNA, 569 bp, Zea mays
cccgtcttccctagtgcctcgcttcgatatttcgattggattggattaccaagggacagagggagggaatcccacacacacctctggccctcgcgaggccaagggaagggaagcactcagcactcagcagcagaaggaccgccgtaaatggcgctgccggtggcgaagctggggaccctggcgctgcggacgctgtccaagcccatcgccagccgcctcaagagccaggccgccgtccaccccaagttccgcaacttcatcatcgccatcgcccaggcaaaccaccagatcaccacaaagatacagaggcgcatttatgggcatgccacagatgtggcgatcaggcctttggatgagcagaaagctgttcaagctgctacagatctcatcggggaagcctttatcttctcggtgcttctctaaaccattcataaatcatgtacatctgcaggaactctcagctaatggtacactgtttacttcttgttattgtcataggtcgctgttgctgctctaatttttgaggttcagagaaacgcaaggtctgaggctaggaaggaggaagctta

SEQ ID NO: 269901 - DNA, 841 bp, Zea mays
tggacgcgtgggcgcggcgacgggcgtccccagcggcagcggcggcggcggcggcggcggctgtgccttcgctgcttctgttcgccgtgctattcgtgggccgggcggcggcagcgttgggcggcccggggccggcgctatacaagcacgcgtcgttcttcgaccgcgacggcgacggcgtcgtctccttcgcggagacgtacggcgcgtttcgggccctcgggtttggactcggcctgtccagcgccagcgccgccttcatcaatggcgcccttggcagcaagtgcagacctcaaaacgcgacgtcgtcgaaactggacatctacatagaggacatccggagagggaagcacgggagcgactccggctcgtacgacgcccaaggaaggttcgttccggagaagttcgaggagatattcgccaggcacgcgaggacggtccccgacgccctgacctcggacgagatcgaccagctgctccaagcgaacagagagcccggggactacagcggctgggctggcgcggaagcggagtggaagatcctgtacagtctcggcaaggacggggacggcctcctccgcaaggacgtcgcgaggagcgtctacgacgggacactgttccaccggctcgcgcccagatggaaatctcccgacagcgacatggagagaagctgataagcgtggtccgggagaactgaaccgagaggaccgtcctattgatgtcgtcttgcgctgggctgctctgaactgaacaagtctggacatgccgtcaagcgacatgtgggtgtgaacactctttcgggtcagattattaacaagaagggtgtgaccgtgtgagtgtg

SEQ ID NO: 269902 - DNA, 481 bp, Zea mays
cggacgcgtgggcggacgcgtgggcggacgcgtgggcgaacagagagcccggggactacagcggctgggctggcgcggaagcggagtggaagatcctgtacagtctcggcaaggacggggacggcctcctccgcaaggacgtcgcgaggagcgtctacgacgggacactgttccaccggctcgcgcccagatggaaatctcccgacagcgacatggagagaagctgataagcgtggtccgggagaactgaaccgggtctggacatgctgtcaagcgacatgtactggcggtgtgaacgggtgtgaactcactttcgggtcagattattaacaagaagggtgtgaccgtgtgagtgtgaacagaatcggccgaggaggtccaccagaccagacgacgacgaatgcttcggttgcgtgcggtgcggtctgtctgtttgtatcccgtgagcgcgatggttacaatcatctctactcctacatgc

SEQ ID NO: 269903 - DNA, 464 bp, Zea mays
gcccggagactacagcggatgggctggcgctgaagcggagtggaaaaccctctgacaccctcccccaggcccgcgacggcctcctccgcaaggacgtcgcgagaagcgtctacgacgggacactgttccacatgctcgcgcccaactggaaatctcccgacgaggaggaggagctaagcgcgatccgggagagctgaaccgagaggtacaagcaaagtccgattgagagataaggactctgggaccctctgaacatgctgtcaagcaacatgtactactagcggtgtgaacgggtggtgtgaacactcttttcatatcacatcataaaaaaaaggtgtgaacagatatgatgtccttgtgcggtggtgtgtttgtataccggccggcggatagtggctggcctagtatttagcgataggatatttcaatgtacattatcataaaataagataaattcataattc

SEQ ID NO: 269904 - DNA, 500 bp, Zea mays
ttgtttacgcgtgggcggacgcgtgggcggacgcgtgggctgcgctgccagtgccagcgctcacacgaacgccgagacccgagaggagcaaacagccaaaaagaacggaaaggggagagcagttaccttgcgcgcgcgcgcgcgacagggtccaatactcgaaggggaatctccggaggatggaggtgggcaggactccgcggcgacgggcgtccccagcggcggctgtgccttcgctgcttctgttcgccttgctattcgtgtgccggtcggcggtagcgttgtgcggctccgctcttgaaatattcaagcttgctgtcgttcttttttttctacgtctatctgcttttattatttatttttttattttaattcttttttttccatttaattttttctctatattttttctctctttcttttttttttttcatttctttttttttgttttatttttcttacctttttttttttccttttctttcatttctttttttttt

SEQ ID NO: 269905 - DNA, 326 bp, Zea mays
caaacagccaaaaagaacggaaaggggagagcagttaccttgcgcgcgacagggtcgaaggggaatctccggaggatggaggtgggcaggactccgcggcgacgggcgtccccagcggcggctgtgccttcgctgcttctgttcgccgtgctattcgtgggtgaagtgggccgggcggcggcagcgttgggctggcccggcgccggcgctgtacaagcacgcgtcgttcttcgaccgcgacggcgacggcgtcgtctccttcgcggagacgtacggcgcgtttcgggccctcgggtttggactcggcctgtccagcgtcacgccgc

SEQ ID NO: 269906 - DNA, 546 bp, Zea mays
gaaaaagttcaaaaaaaccaatctcactctctccctccaccgccactgccccacccacccctaccccaatcccctcttccccattcaccagatcgagcgccgcgtgcctagggtttgcgcccccgccggcagcgatgcccccgtcctccgtgtcggggggcagcggcccccgaggcgtctccccggacgccatcatcgagtggctgcaggacgagatggggtaccccacggccccgcccgcaccggagcagctccgcaagatctgccggggcaacatgatccccgtctggtccttcctgctccgacgcgtccgctccgagcgcaccgttgccactgcgcgccgcaacatcctcgtccacggcgtcgcggcccggcggacgcgggagggcggggcgataggggcgggcgtgggtgacgccgcggccagggaggccgaggcgagggagcgggacctcgccgccgaggaggccgagcggctgcgcggaatcgtgaggaggcagcgcaaggagctccgcgcgcgcatcgcggaggtcgccagggaggagg

SEQ ID NO: 269907 - DNA, 513 bp, Zea mays
cttctcgtcacccccttcactttactcttccctcacttctggccgcagctttgagctcagtagcaaacaagaagcagcaagatagtgatcctccatgggaaacaccctcggctttggcgtaggtgtcggcctcggcctcggcctcgccgtcggcgccgctgctctgatccaggcttttggtccgaaaattgacgaggaagtggtggtttctcagtatcaatgcaacaccgaggacattgacgagttgtctgccgaggagctgcgcgatgcgatgagctatgtgatgcacaatccgatgctgatccaggtgccggtgttaggaacaacgaagacattctggcgattatctgaggaagccactaggatcagcagaaaactttcattgatactgcgcaaccaccactcagcctgcaagtacctcgaagctcctctgcaggtgtccaatgtctggattgggagcactgggagtgtcaagctaaggggggtcagtttcactggcagcggtttctttag

SEQ ID NO: 269908 - DNA, 483 bp, Zea mays
  unsure (1)..(483): unsure at all n locations
cgcaactcgctgagtctggcttattactgagagagaatgctagtaatggtggtcctggctacactaggtccaggcctgttgataatgtcatttattcccaatttatatcaactatgtagctaggtgctaaagatccttacccaagaattgcaactattggtcggagagcactgtccctgataggtgttgaacaagtagtcatgaaaaatactagatttaatagtggaggtgcacatcggggagagacatctggcgtcaaactttggaatggcacgctcttcatcctggcttgatatgaattctggaaacaacttgataaaatttaggacccctcctgttagccctcctcagcatgattttcttccaggattacgccgagtgtgttctatggagtttggacaacatcctataaagtcacctgatggcttagctgttcccctttaagcntcgctgcagctaccagtaatgctgaactaatatact

SEQ ID NO: 269909 - DNA, 1388 bp, Zea mays
gcgtgcgtgcgcatcactcgcggactcgcctcgtgcgcttccatttccactccgacccggccggcgacccgccccccggtccccggagcgaccgaggcctcgctcaccgacatgtgggccctcaacaacgccaaggccggcggaccctgcctcacgccgcggcacccagcgccgccctcccttgcgtcgccgtcgacggcatcggctgggcggaggttctggaggcgcagccccgtgtgggcgcccctggtggcggtgcgcgcgtcggggggcacgaggaaggacggctccgtcggtggcgaggccagcggcgaggaagccgatagcaaggcgtcgtctgccgggcatgatgatgcatctaccccaacaggggatacctctgctgggttgaaccaatcgcatgacgaaccaaaaacaagcaagccgattaatgtttctagcagcaactactggcgagatgtcagggcaaaccttgtgcgtcgggaacaggagctattagtggatccaagtactccatcagagtcgaaggcgtcctcaggagatccattacagctccctcaaaagtgggctcatgctattacgatgccagaggcaggatgcgttctggttgctaccgaagcgctagacgacgacagcatcttcgaaagaaccgtcatcttcctcctcaggctcggtacaaggggcacgttcgatggcccgtttggagtcatcatgaaccgtccgctctacacaaagatcaagcacgtgaacccgatgttccgagaccaggcgacgcccttcggcgactcccccctcttcttcggaggccccgtcgacatgagcatgttcctggtgaggaccgaggacagcgcgcgcctcaaggggttcgaggaggtggtgccaggcatctgctacggcttccggacggacctcgagaaggccgccgccctgatgaacagcggcgcgatcaggacccaggacctgaggttctacgtcggccacgccgcctgggaccacgagcagctgctgggcgagatccgggcggggtactgggccgtcgcgtcctgcagcacggagctgatcggcgatgccttgatgggcgacccttctcgcctctggaccgagatacagcagctgatgggaggataaagtgtagtactctctgagctcagccaggaacagaagcagggccggccgtaggtgtttgctcatttgaaatgtaataatttgttatgggtaaggttgtggtcgagtctgtacataattggaatagggtgactcgcttgttagttgcccctagcctcgtgtagcaactgctgtgcgtcgaatgtactgaaacaggctctatataatgcctgcctgcctatgtatttcagcaattggcgaacgtgaagatggcgcttctgatg

SEQ ID NO: 269910 - DNA, 490 bp, Zea mays
gttatatttgatgaggaagctgtcgagtcaaaactgctaaaagcacggatgaaaaggcggcaaaaatacattgatcagttccatatgttatacgatgacttcaacatcaccaagcttcccttgctttcagaagaggtttgtggtgttcaagctctccaaaacttttcccagcacttccttacaccatacaagtctactcttaaaaggggcaccgtcgaggagctcgaacagagaataactatattaaaatctgcactgcaagaagctgagacagagttagatagggttaggaaagggaagcagtcagtgtgattttttttccacaggtcaagtgtgtaaaaccagagagacgatcaattttttcgtgtcattacactcttgttgatttcactatcatgtttcctcatcgaggagtttagacttgtaatagctatcggcagagaagtgtttgattcacacaagatatatagatccattctttttgccggtt

SEQ ID NO: 269911 - DNA, 1293 bp, Zea mays
aattaactagtgcgtggtctggtctccatctcgatcagagagctccgtccgtcactttcccctcgttccattcatggagaatatgctccacctagccccgtcgtcccaggcccaggcattggccttggaccgctcctccgtcttctcgcgtgagcacgtgccgccggccgtctccgctgtcacctccctgccagttatcgacatgtctcgcagccgcgacgaggtccgccgcgctatcctcgacgccggcatggagttcggcttcttcctggtggtggagcacggcatcccagaggaggtgatgcgcgacatgctggaggtgtgcgaggagttcttccagctgccggcggcgagcaaggcgtacatgtactcggaggacagtcagagacccaaccggatcttctccggcacaacctacgacacgggcggcgacaagtactggcgggactgcctccgcctcgcctgcccctcgtccttcccggtcggcagcggcacaagggacgactggccgcacacgccccagcggctgaggggtgtcgtggagcgtttcaccgctctgacgagagggctgggggtggagctgctgcggctgctgtccgaggccatggggatccggcccgactacttcgagggcgacatcagcgccggcgacgtggtcctcaacgtcaaccactaccctccgtgccccagcccggagaagacgctcggcctgccgccacattgcgaccgcaacctcatcaccctcctcctccaaagctccgtctatggcctcgacgtcgcctacaggggagagtggataaaggtcgagcccatgcccggtgccttggtcgtcaacttcggccagcaactcgaggtggtgaccaacggattgctgaagagcgttgagcaccgcgtggagaccagctcgacgctggcgcggacggcggtggccacattcatcatgcccaccccagactgcctcatcggcccgtcaaaggagttcctcgccggggacaagccaccgtgctaccgcaccatcaggttcggtgacttcatgcgcatgtacaacactgtcaagctggggtcatccatcaaccagactacagatcttaagaatatccagaagaagatatgagcatatttatttaccagagagatcgtccggccagcaggggtcctccaagattttattcctttaataaaacgtacgacgagcatatttatgtcaagcaataaaacgtacgacggacaacttttaaaaatattattattaatcggaggcagcatggacgccattcctttatgagatatgct

SEQ ID NO: 269912 - DNA, 426 bp, Zea mays
atttctcaaaactcttaataaaccccagtccaaaaccctaggctccacaaccggccgccgtccaccccctcctagagcggaaccacattccacggctctaaggccatgtcgccggcgtccctcgcagctcgcctcctacgccgcgccgcttccacctcttcctctcctctctccgctcttgtccgccgcggtctctgttcctcggcgcccgttcccctcctccgccgtctccctgcggccacctcatcgacggcggggaccaccgcccgccgcttcctggcgtcgcagtccccggcgtcctcctccacgtcttcggcggacgataacctgaggcgcatcgtcgagtctgagatcgagtgcgttgtccagtcggaggagagcaacaccgacaagcacattgatctaccagaggacttcccttttgag

SEQ ID NO: 269913 - DNA, 416 bp, Zea mays
cttgttctagatcgcgagtggccgccctggaggtttttttttttttttgggtggtttgaaaaccctcagctccaaagctccattacaaaacggcttggaaattggaattctacgcttcctagcttggagatgccagaacatttcaagaaaattaaatacaaggagacgcgcgcggctggtggatctccactgctttttggctctttgcttccctggtactccctccgtttctttgtatttgtcactggatagtgcaaaattacactgtccaacgacaaataaaaagaaaaggagggagtcctacctagtagaaaatgcgcatctgatcggcagccagcgccagcgacgatacacctcattcaattcatcagcaggtgaaaaagaggcaaaaagaaaagaaaacaggcgaaacgcct

SEQ ID NO: 269914 - DNA, 809 bp, Zea mays
  unsure (1)..(809): unsure at all n locations
ttcctcgcgtccggtcagcagcaagccgcctcgtcgcctcgtcgggactatctctggtgagcgtgctggtgatcaggtaccttggaggcctggcttgcttggacgctccattgcttcgacttcgaagtcgtcgcgggtttggatcctgtgttgagggggtaacaccgtgtagctcaactgtcccctagcgccgccgcgcgaaactccctaccggtccattttgtttgtagccattaagctcttcggaggtggagatctgggctgtcgtttccaggaccctggccgcatcggctgtgatgggtcgaagcgccttggcggttcggttggcttcccttcttgcgtttggtttggtgctcgtctccgtcgaggccagcctcggggatgttgatccgcgctacagaacttgcgtgagggagtgtcaagctacagggattattggggagaacgtcatcagccattgccggcgctatgtgtgcatgatgcagagagaaggggaacggcagtcacttggtctgagccctgttaaatatcgtggaaagtggccgttcttacgtgtttctgtgttccaggaacccctttcaactgcactatctgctgtcaacctactgatgcacttcactggctggctttcatttttccttctagtgaattacaaattgcctcttagaccccagaccaagagaacttactatgaatacactagcctgtggcatatctatgcaatcttatcaatgaacgcatggttctggagctcaattntccatactcgagacattgagttgactgagaaactggactattcttcagct

SEQ ID NO: 269915 - DNA, 608 bp, Zea mays
gacggcggggccccatcgttgtcacagccagtctactccggcggcccagcccacgtacagtcgagcaggcgatctcgcacccctggtcgcctggtcagcagtgagcagtcagcggctgcgcgccgcctcggcgggactcgggggcagagctggggctatctcttgagctggtggtcaggtactcaggtcgtcatccatgatccatcctgattctccctcgtcctgctcccctttccttggccggccggcgcgcggagtggaggtcgaccgacattgaattccctctttccttctttgccgctcaattgcccccttgctccgcgggaacctggccaccggtcctgcctgcgcaatccattttgttcgtactattattgtgtaaccattgtgctccgtggagccgtagaggtggagatctgggttgccatttccagaccctggccgcgtccgctgcgatgggtcgaagcgtctgggcggttccgttggcttcccttcttgcgtttggtttggtgctcggctccgtcgaggccagcctcggggatgttgatccgcgttacagaacatgtgtgagggagtgtcaagctacagggattattggggagaacgtg

SEQ ID NO: 269916 - DNA, 436 bp, Zea mays
atcagccacccaccctctgtttaggagatcaaggagaaactggcggggagcctattcttgatggcgccccgtatggcaacctaatgaaagggtattccctcaacggcatggagaaggaggccatggattgctatgcagaggtgcttggagagggctccacggtgaggttccgcgctgcgagctacaacatggtgcttgatgcactcgccaggaatgggaggttggatgatgcactcaacctgtttgatagaatgtgcatggagcatgacccgcccaggacaatcactgtgaaccttgggagctttaatgtgatggttgatgcatactgccgtgctgaaaggtttcaagatgcgattgaggtgtttggacagatggctgagaagaagtgtgctccagatgcactctcgtacaataatctgattgactggttaaggga

SEQ ID NO: 269917 - DNA, 1088 bp, Zea mays
aagaaacagagaggcgtgttccagcactccagctttctggcaggaggtgcaactatagctgctgggagattcactgcagaaagtggagtgatcaagtccatctgggcgtacagcggccactacaaacctagcgcagagaacctccacaacttcatgaacttcctcgaagagaacggagtggacctcaaagaagtcgaggtacgctcatctaccaaagaagactacaacgaggacccagtgccagtgccggtacttaacgacacacggagttccacttcagctaccatggaagaggcagaccttccacaggtggtggcggttcccgtccccgctctaaacagcacagagggcgacgaaggagacagccctccggaagacgaaggacgaggcaggccgagctaccagaggaccttgtcaggcgggctgcagagccccagagccacccaagtgccccagagggcgatcctcgagaggatgaagtccaagggcgagttgtccaagtcgtaccagctcgggcacaggctgtccctcaaatggagcaccggggctggcccgaggatcgggtgcgtcaaggactacccgatggagctccggatgcaggcgctggagatcgtggacctttcgcccagagggttgtcgtcgactccgtcgccgtcgaggagactgcctcctccgtgcttttcccccactaaagtcgcctcgccgacgtctccgctcgcgccagttcaggcgtccctgccgcagccaagctaggagaactcgagagtagcagcattatgcatggccacgcgcaaatagcacaagaccggttccattcgagagtagcagcacaactcaatgttgtccaagtgaaacagggtgtgggcagaatctgtcacgtttcagacaccggtagctttgaagcagatgtgctagtgtagtgtgtgtttttttttactaccatggttgaggaacctgctttgtactgtatcatctgcaaacggaataatgggcaaagcattacatgtgtgtgtgtgtgagagagagagagagtactcagagcccttgcattcaggttgtgatttgtcaccatgttgtattttttgcct

SEQ ID NO: 269918 - DNA, 538 bp, Zea mays
  unsure (1)..(538): unsure at all n locations
atcaagtttttctcgctactttcctaagtggaaaaagggttctctccggccatttccttgaggcgttccgccgccactcgaccaccaccgccatggcggcgccgacgccgaccacaaccactcgcagagactaccgcctccgcccccgctgcttctcgtctccacgcagctgtccgatggccaagcgactcgccggcatcgacaaagaggtagggggcggcacgccaacagagcagcccacccagaccgggcaggccgcctcgttgcgctcacccatttggtcagcgccaggtgctcgtcgaggtggtgaggttcacgcataagagcggactgaggggctgtgacggtggctggaaggatttcctggcccggaacgatagaaagtttggcgcgtcggtgagcgacccgaggaagcgctccagggacgtgctgttcgccttcctgcaaaccttccccaaggatttccagaagaaacactngatgccactagtccgacgagagccaccggaaggcaacgcaggcattcctcagtccccaa

SEQ ID NO: 269919 - DNA, 1794 bp, Zea mays
cttcgcccaatttttctcccacccctgcccctcctctcgcgattctgccattgtcccccgctcaccaacctaaatcgagagaattcgatatttgccatcatcaccaaacacgatagtaaaaatgtcacagagtggcaaaattccaattattatttcacctaaacccctctgctctcaaacctagctcgctcccggcggaccgacgatgccgaaggcaggcggcggggcggcggacgaagaggagttccgcgccgaggtggaggagcgcctcatcaacgaggagtacaagatctggaagaagaacacacccttcctctacgacctcgtcatcacccacgcgctcgaatggccctcccttaccgtgcagtggctccccgaccgcaccgagccgccggggaaggaccactccgtccagaagatgatcctcggcacgcacacctctgacaacgagcccaactacctcatgctcgcgcaggtccagctgcccctcgacgacgccgaggccgacgcccgccactacgacgatgaccacgccgacatcggtggttttggcgccgcctccggcaaggtgcaaattgttcagcagataaatcatgatggagaggtcaatcgagctcgctatatgccccaaaattcatttataattgctactaagacagttagcgcagaagtatatgtttttgactatagcaagcacccatctaagcctccactagatggtgcatgcaaccctgatttacggctgaagggacataattctgaaggatatggcttatcatggagtatttttaaagagggacatttgttaagtgggtctgacgatgctcaaatttgcttgtgggacattaaagcaaatagtagaaacaaaagtcttgacgccttgcagatttttaagcatcatgatggtgtcgttgaagatgttgcttggcacttgaggcatgagtacttatttgggtcagttggtgacgattatcatcttttgatttgggacctgcggtctcccgcccctactaaacctgttcagtcagtggtggcgcaccagggtgaggtgaactgcctggcttttaacccgttcaacgaatgggttgttgcaactggttctactgacaagactgtcaaattatttgatcttaggaagattgatacttctctgcacacctttgactgtcacaaagaggaagtttttcaagttggatggagtccaaagaatgaaactgtacttgcatcctgttgtctgggcagaaggctcatggtctgggatctaagcaggatcgaccaagaacaaacaccagaggatgctgaagatggtcctccagagctcatgttcatccacggaggccataccagcaagatctctgatttctcctggaacccctgcgaggactgggtggttgctagcgtcgctgaagacaacatcctccagatatggcagatggctgagaacatctaccatgacgaagatgatctgccaattagcgatgagccggcaaaaacttcttgaagcaacacagcacaaaaggaatcttaactcctatcgactgttggtgctcctagatcggaaccctgctcgccggagaatcttcatcgagtgaaagttggctgtaggttgcttccgtggtcgtaactttatgcttgacgggttcgtcgtttcttcgaccgtctgtatgtgtattcggcgaacctttagcaatatacatatcccgattgactagatctgtacgtcccagttgtgttttgtagaattgttttccacccagtaggatcatgttcgtgatgtgatttgtaacggggccc

SEQ ID NO: 269920 - DNA, 322 bp, Zea mays
acccacgcgtccggagacctggcgagacgcgtgggttctctcccaccctcctgctcctcctcccacggtcccgccatttcgtcccccgctcaccaactcaaaccccctccgctctcaaaccctaaccctagccctagcccgctcccggcggaccgacgatgccgaagcaggcggcggggcggcggacgaagaggagttccgcgccgaggtggaggagcgcctcatcaacgaggagtacaagatctggaagaagaacacacccttcctctacgacctcgtcatcacccacgcgctcgaatggccctcccttaccgtgcagtgg

SEQ ID NO: 269921 - DNA, 832 bp, Zea mays
ctttaaattgttccaacgcgtcctttccgcctccccaagcgtccagcccgtacagcgtgctttcaaccgagcggacacgatgcaggcccacggcatcgccatccgcgcccgcgggccggtggcggcgacgcaggcccccgcgcgccgacggcaatgccgcgtgtctgcggcggcggtcggcgcgcccgccgcgcgagcccgcgtgacgcactcgatgccgccggagaaggcggaggtgttccgctcgctggagggctgggcggcgcggtcgctgctgccgctgctcaagcccgtggaggagtgctggcagccggcggacttcctcccggactcctcgtccgagatgttcgggcacgaggtccgcgagctgcgcgcccgcgccgcggggctccccgacgagtacttcgtcgtgctcgtgggcgacatggtcacggaagaagcgctgcccacgtaccagaccatgatcaacacgctcgacggcgtccgcgacgagaccggcgccagcaactgcccctgggcggtctggacgcgcgcctggaccgccgaggagaaccgccacggcgacatcctcggcaagtacatgtacctatccggccgcgtcgacatgcgcatggtcgagaagaccgtccagtacctcatcggctccggcatggatcccggaacggagaacaacccgtacctgggcttcgtgtacacgagcttccaggagcgcgcgacggccgtctcgcacggcaacaccgcgcggctcgccagggcgcacggggacgacgtcctggcgcgcgcctgcggcaccatcgccgccgacgagaagcggcacgagacggcgtacggg

SEQ ID NO: 269922 - DNA, 415 bp, Zea mays
gtcaacccgtcaaatttgccattcctgtctcggttccctcttcccggcgcaccagcctacctcgccgacgccaggccgccacgccgccggagacatgaaccagcccgtgcagaagaacaccctctacgtcggtgggctggcggaggaggtggacgagaaaatcctgcacgccgcgttcgtgcccttcggtgaggtcaaggacgtcaagacgccgctcgaccagtccacgcagaagcaccgctccttcggtttcgtcaccttcctggagcgcgaggacgccgccgctgccatggacaacatggacggcgccgagctcttcggccgcgtgcttaccgtcaactacgccttccccgagcgcatcaagggaggggagcagggatgggctgcccagccaatctgggccgatgcggacact

SEQ ID NO: 269923 - DNA, 532 bp, Zea mays
cggacgcgtggggcctgccagcctgcagataccatagaaaaaccgcagccagtcgatcccgtagcggggcccactcgccgatcaaccagcaggatggccaccgagacaacgaccgccccggcgccaccgggcgaccctcctcatcctcctccggcggaggcgggcgccgccacgccaagccgttcgagaccatcggggttcgagcagctggacgggcgagtcaaggagctgacctcgtcgcaggcggagttgctggagaggatccagaagctgaaacatgaggtgcagaactggcgctccaatgtagagacgcaggtcaagacataccagaatgaactccaggatctcaagaaaggacttgactctgaagtggaacagctgaaatcggaaatgaaggcggttaggtctgcggtacaggaagagaaaggcaatctacctgcacaaaataccgactttagagacgaacaataaaaatgcaggacaagcttggcagacaccaggccaagcacagtattgaagagcaaacagcaac

SEQ ID NO: 269924 - DNA, 884 bp, Zea mays
acccacgcgtccgcccacgcgtccgcggacgcgtgggtctcaatctctcttgtctccaagtttgtaaccctagccgccaagcttgaagctccagccgtgctcgtgtagggctgcaggccatctgggctccggcttccggcatccaccaggcgtcaatacggtgcagcgagcagcgagcagcaagtcaccgagcagccgagcgaccgccgagcacagggcaccaccgagcagccgagccaccgccgagcaccgagtcttctctgttcttctgcggcgaacaaggtcaatccagggccgtggtgcgggtgctggtttttttttccaacaagtttatgttggtcgctcgaccgctgcagcaatgaagatacagaaagcaaatgcaggtgtccttacaaacttcgaagtccttgacttcttgcggtcaagaggtgccaaaattgacccaatgggatgtttgggggctgttgctgtatcagagtgtaaggtgtatgagtatatcttaaaaacccctgcttgcaaccagacaaggcaatccatttatgaatttgtgaagagaagtgagggtttcaggcttgcagaggctgataagttaaatgtcatcacctggagaccatcctcagctgccgatgcctatgcgatgatagaagaatgtgggaaacgattttccagggatgaacgaggagaagcatgtgatgaagatgcacgagtccaggagtttcttgatatggtgaaggaggttttgccagcccctccgaaagcagaggtggagacagcagaggcggtggaggcagaggccgaggtagaggcaatgcaagagtgaatgtggtgtaagttaacatatttgagggccagattgcattagacactagtgctaaatgctgcaa

SEQ ID NO: 269925 - DNA, 450 bp, Zea mays
cgcgtcacagcaactagcaaggcgccaagcggcccaggactcaggccagctccaagcgaacagcctacgtacggctctatacctctcgccctctgagtctcgcgcgggctgcaggccatccgagctccggcttccggcatccaccagacgtccttagaatacggtgcagcgagcagcaagtcgccgagcagccgagccaccgccgagcagccgagccgccgccgagcgccgagtcttctatgtttgcttctccggtgaaaggtgtttgctaggggaccatggaggagcacggagcggaagacctcctgtgcgaggcgatgggatctgcggcgcaggtcgtggtggtagaggattgcgtggaagcaccgggggccttcgtcctccacctcctcctcaagcgcgcgctcgccggctgcggctccgctgccttcctcgccctcgcgcagcctt

SEQ ID NO: 269926 - DNA, 570 bp, Zea mays
gtttgtaaccctagccgccaagcttgaagctccagccgtgctcgtgtagggccgcaggcatccgggctccggcttccagcatccaccaggcgtccttagaatacggtgcagcgagcagcaagtcgccgagcagccgagccaccgccgaacacagggcgccgccgagcagccgagccgccgccgagcgccgagtcttctctgataaagcggagaaattggtagcagaagcagctgggtatggttcacagttggttttgtttccggaagtctttgttggtggctacccacatggatctacctttggactggttgtcggcaatcgcactgccaagggaaaggaagactttcagaagtatcacgcatctgccatagatgtgcctggtccagaagtgtcccgcttgtctgcattagctggaaaatataaggtgtttctggtgataggggtggttgagagggcaggatatacactttacaacacggtgctctccttcgatccactgggaaaatacctagggaagcaccgcaaggtcatgcctactgcactagaacgtgtattttgggggtttggag

SEQ ID NO: 269927 - DNA, 381 bp, Zea mays
ccggtcgccaagcggtcaggacccaggccagctccaagcgaacagcctacgtacgactctatacctctcgccctctgagtctcgcgcgatcaggctgcaggccataccgggctccggcttccggcatccaccaggcgtccttagaataccgtgcagcgagcagcgagcagcaagtcgccgagcagccgagccaccgccgagcacagggcgccgccgagcagccgagccgccgccgagcgccgagtcttctctgagtgacttcggtacagacgacaaactttctccacacataccgcgccactccgccactcactgtgctgacggatggggtggtgctccccgtccacttcccggcagcttctctccacgacctcagtcttc

SEQ ID NO: 269928 - DNA, 1161 bp, Zea mays
ttgacgtgctcctcctccggcgattcgctcccggcctcttcccccggccacgcacttccccgccccccgaccccgcaacctctcaccgccggtccccgccctccgaccctccacgcgcaaatagcccgcctccatccactaggaggatccccgatgagctaggagaagtgttgatttggatattcgtggagtgtgcaatggtggactttgttcgacggctcgcctctgccctgctcaagtgctgcgaccttgacatacccaatcggccaaagggcctcgaggaccccgaacgcctggctagagaaactgtttttaatgtgaatgaaatcgaggctctgtatgagctgttcaagaagattagcagtgctgtggttgatgatggcttgattaacaaggaagaattccaattagccttgtttaagaccaacagaaaggatagcatgtttgctgaccgggtatttgacttgtttgacacgaaacacaatggaattctcgagtttgaggaatttgctcgagccctttctgtgttccatccgagtgcaccaatcgatttcaaaattgattttgctttcaaattgtatgatctcaagcaacaaggtttcattgaaaagcaggaggtcaagcaaatggtggtcgcaacacttgctgaatcaggaatgaatctttcagatgatattattgaaggcattattgataagacatttgagggagcagatacaaagcacgacggcaaaattgataaggaggaatggcgcagccttgtcttgaggcatccatctctgttaaaaaatatgaccctcccatatctccgggatatcaccacaacatttccaagctttgtgttcaactctcaagtagaggatgcgtgaggtcccagcgtctacggcaccattgaagcccctggggcacagcagatcaggttctgtgggggcacttagttgtttttgtttccttgaaaatgtaaattttatgtggtggcatgtcctcctgtatagtgagtattgctattgtgcacagaattggggcatgaagcgtttcttgtctgtgtttataaaatattcttcaaacatattgctcataaaaactactcaaagtaagaatcaaattgagtacaaaactactcaaagtaagaaaaatacgaagatgttaagcaattgaaca

SEQ ID NO: 269929 - DNA, 340 bp, Zea mays
tcctcaggaaccgttgacgtggcgctcctcctccgacgattcgctccctccctcgagtttcaccactccctcctctcgcggccacgcactcccccgcctccgcaacctctcaccgccggtccccgccctccgaccctccacgcgcaaacagcccgcctccatccaccaggatccccgatgagctaggagaagtgttgatttggatattcgtggagtgtgcaatggtggactttgttcgacggctcgcctctgccctgctcaagtgctgcgaccttgacatacccaatcggccaaagggcctcgaggaccccgaacgcctggctagagaaactgtttttaa

SEQ ID NO: 269930 - DNA, 741 bp, Zea mays
agacatcgtctgaaaaatcatgaatgtgctcttgctcgcacactagtttcaggatatcagatccgccgcagactacttttaactggcactccaatccaaaatagcctacaagaactgtggtctttgcttaactttattctgcccaatatttttaattcatctcagaattttgaggaatggtttaatgcaccatttgcatgtgatgttagtcttaatgatgaggaacagctattaatcatacatcgtctgcatcaagttttgcgtccatttttgctgaggaggaagaaagatgaagtggaaaaatatctccctgtcaaaacacaagtaattctcaagtgtgatatgtctgcttggcaaaaagcatactatgaacaagtcacaagcagggaaaaggttgcactaggatttgggctcagatcaaaggctctgcagaatctgtcaatgcaacttaggaagtgttgcaaccacccctacctattcgtagagcactacaacatgtaccagcgggaggaaattgttagagcatcacggaagtttgaattgcttgatcgtctacttccaaaactgcagagagctggtcacagggttctgcttttctctcagatgacgaaactgcttgatgttttagaaatatatttgcagatgtacaatttcaagtacatgaggcttgatggatccacgaagactgtagatcgtgggaggttactggcagattttaataagaaggattcggaatatttc

SEQ ID NO: 269931 - DNA, 450 bp, Zea mays
gtctccctccacggtcagctcctcgtgtgagctcgtcgcgtggttagcagggaaacccagaggtggaaagaagctaacccggtgaagactctgaaggaatctgagccacctgcactccgatctgccatctgaaggacgcggaggaagccccgaatcggcgaatttcgtccttccggcacgcccgccctgacacgattccctgcccgccggaaacatgctcgtgcatgctgtttgctgtgccttgggcgcgacgcggtggtcgctggtcggtggaatcccacttcactatcactagccgccactggcaagtgcgatgcgacggaaccaaagattggattctccttcggcgttgccgcgaatgatggccgatgctttgattgaaccaccgaacgtggggggcattggctggttttttaccaagtgggacattgacaccggctgaccggggtg

SEQ ID NO: 269932 - DNA, 896 bp, Zea mays
cccacgcgttttctgatccaacctatcaaggacaagttttcaggtgttacctatgcagatctgtttcagcttgccagcgccacagccattgaggaagcaggtggccccaaaattcctatgatctatggaagggttgatgttattgcccccgaacaatgcccaccagaggggaggcttcctgctgctggcccaccttcacccgcggaacatttgcgtgaagtattctacagaatgggcctgaacgacaaggaaatcgttgcactgtcaggagctcatacacttggacgtgcaagaccagagcgtagtggctggggtaaatcagaaacaaagtacactaaagatgggcctggtgcacctgggggacaatcttggacatctcattggctcaagtttgacaacagctatttcaaggctatcgaagaaaggcgagatgatcacctcctaattctgcctactgatgctgtgctgtttgaggattcctcattcaagatctatgctacaaaatatgccaaggatcaggacacatttttcgaggactacgctgaagctcatgccaaattgagcaatcttggggcaaagtttgacccgccaaagggtatctcactcgagtagttgtggatggaggtgactgaacaggaagggtcatgtttctttgcgtgaccattttcgaaggttggcaaggaaaagttattggggttgaatgatagctccacaaattggattcaccgattaaaggatttttttcttagcgtgccctgtttttttagtagtatcctacactatgaatagagcaacacctgtcatttcacgatagatatgtgttacactaactaactgaaggcatccgaatcctaagtggtttcggtgattaatgacgacataagatcgttataact

SEQ ID NO: 269933 - DNA, 539 bp, Zea mays
ccctcgcggccggctggctgaccagaacacttgagcagactagcaaggccttcagaccgggagggctccctgtcctgtcccccgcgccgccgcggatggccggagccaccacgccggcatcaggcgccctcgtcaggctctgcctgccttcgctcctcctctttctgtaccggtgctgcagatgtgaggctgttgagatggagagaacccttgcgatgatcaagcccgatggtttgtcaggtaagtacacagaagcaatcaaggaggtcatcttggattctggatttcatatcgtcaaagaaaccgaggtccagcttgatgctgagagggcatctgtcttctatgcggagcattcccagagaagcttctttgacagcctagtcaagtacataacaagtggtccagttcttgctatggttctggaaagacctgacgccggtgcgcaatggcgcactttgattggaccaactgatgcataataggccaaaacctctcatccaaacagcattagagcaatgtgtgggctgacctctgagaaa

SEQ ID NO: 269934 - DNA, 1671 bp, Zea mays
cggacgcgtgggcggacgcgtgggcggacgcgtgggtccggacgcgtgggccaactccgaagcccctaccggcaaccctagcgaggcgatggggaaggcggaggcgaggtcaagggggcgcggcggcggcggcggcggcggaggcgcccagcggcaatccggggaagatcttcgtcggagggctcccgcgggacaccacggatgctacatttgtgaggcattttggacagtatggagaaatagttgattcggtgataatgaaggataggcacacatctcagccacggggttttggcttcattacatactctgaccctgctgttgttgataaagtgatagaggacaatcatgttatcaatggaaagcaagttgaaattaagagaaccataccaaaaggttcggtgcaatctagctctaaggatttcaagactaaaaagatatttgttggtgggcttccgtcaacactaacagaagacgaattcaagagtttctttgcaagatatgggactgtggtggaccaccagattatgtttgatcatgaaaccaaacgttcccgaggctttggatttatagtttttgcttctgagcaagttgtagatgatttgttagcaaatggaaatatggttgaccttgctggttcaaaggtggagatcaagaaagcagaaccaaagaaatcctccaatgcaccgccaccaccagtgcatgttagaaatgctaggtcagcatatgatagcggctctagagaccacccttcagctgacaactatggtggaatggccagtgcttatggaaactacaggggtggtggatttggtccttataggagcgatacaggatttggtgctaggctcagcagctatggtggggtaggtgattttggtggtgcatatggtcgttactatgcaggattaggagggggatatggagccgcgtcttcgtttggttatcctggtcgctttgggttatatggaggaggttttggtggatcttatgctggtgctgacttaagtggctatagacgcggtggaggtgatgagagcttcggcgcccctggtggtaatcctgggtttggtggtgatgctgaagagagctttggtggccctagtagttctggctttagtggcaccgcctatggtggggcatatgatcctacgctaggtggttatggatctgctagcacacctgacatgaataggggaagcttcactggaggatatggacgatatcacccatatggataacaagaagagcccttgaaggcttaacacttgcatgcacgtttgctgcccgtcattggagaacacccaccatttctggacaatatccagctgcctgaagcttcaagaacaacttaatgtcatgtgtacatgttttctcgttcccgtgagctttaacttatatatcctatagcatgtagtgtgatccagagtagacgttgtatcgaaggttattgtgtttggcataatatagaattctggtatactttgtagtagtttttaagcttctatgtaagcatactccctctgggagcagattagctgtgtgaacgctaggagggccagtctctactctctaccacttagcattgtacctgatcaaggtattccctcttttggtttacccattgagagcattgtccgtgaaaaaaaaaaaagaaagaaaatggaagaa

SEQ ID NO: 269935 - DNA, 285 bp, Zea mays
  unsure (1)..(285): unsure at all n locations
gggtaaaccaaaagagtgaataacttgatcaggtacaatgctaagtggtagagactggccctcctagcgttcacacagctaatctgctcccagatggagtatgcttacatagaagcttaaaaactactacaaagtataccagaattctatattatgccaaacacaataaccttcgatacaacgtctactctcgttcccgtgagctttaacttatatatcctatagcatgtagtggtgatccagacgtagacgttgtatcgaaggttattatgccaaacaccggan

SEQ ID NO: 269936 - DNA, 587 bp, Zea mays
cggtactccaccgctaaaaccttcggaaagaatccccaaatctcgcacacctcgaagccttcgaggcccgaaaccctagctcctcggcctccccgccgcttccacccatggctccaggactgcagcgcttcactgacattgccgacgacggcacgccccagctcgacgccgcgtccggcgaggagctggtccgtgtggaccgcaccgtggctgtcgcccttggcccccgctcgccggagtccccggggactctgttcgtcaccaccaggagggtgatttggctcagcgaagcggagaagggcaagggctacgcggtggacttcctcgccatctcgcttcacgctgtgtcgcgcgacctcgaggcgtacccctcgccctgtatctacactcagattgaggcagccgttggtacagaagaggaggctggggaatcaaatcctgaagcaaatgaactagagctatctagagtatctgaaatgaggctcatactagcggaccccggtcaactggatgcacttgttgatgtcctcttctcaacaagcacatctggagcagtggtatccgcagtgtgccgaagcgtgtccgtg

SEQ ID NO: 269937 - DNA, 1499 bp, Zea mays
ggagatgcctagcactgatgataactcaaagtttattggtcatcggtctacaagtcaagaaccgacatattcagctaaaaatattgctgataatggcaaagtaacatccgggactggtgaaaacaaggttgaattcacttcacagactgaaaataatgttgccgggaatctaaagtccaccttgcaaacgattgtacatggaggtgttggctatcatatggtaaactgtggtttgatactgttgaagatgttatccgaatacgttgacatcagtaaatgtttaccatcactatctttggaggtggtccaacgtgttgtggaaatattaaagcttttcaacactaggacttgccaacttgttctcggtgcaggggccatgcaggtgtctggacttaaatcaattacgtccaagcatttagctctggcgagtcaaatcattagttttatgcattctttaattccagatatcagacgagtgcttttcctgaaaatacctgaagcacgcaaacagttgctaatgtctgagctggatagagtggctcaggactacaagatccatcgcgatgagattcacagcaaacttgtccagatcatgagagagaggctgcttgcaaatcttagaaaattaccccaaattgtggaaggctggaatgccccacaggatagtgatgtgcagccgagtcaatttgctaaagctgttacaaaggaagttacctatttgcaccgtatcctttctcaaacactgcttgaggttgaggtgcaaacaatattcaggcaagtggttcaaatatttcattcacatattacagaagcatttacaaaattggaagtcagtactcctcaggcaaaggatagattatgccgagatgttcagcatattcttgcatgcatccggaagttgccagctgacaacttcagttcagaaactattccaaattatggtcttcttgacgaattcttggctgagaactttgggacgaaagttggtgaatgattgactgtacattaggaactgactcatgtctataaatgttcaatggtggaaactggaaactatgttgattgggacgtggtccaagatgttgccgtttttggcgtgaattctgtgcaggtattgctgtgcgggtttgtgaaaaaaaaatcagctgctctgatgttcaacaaactaacatgctgatcctcacacttcccgagatgaatttttgggtccacagctttgccatttcaggcaattttttgtttttattttgattcaatagtaatttgattcccgtttggcaagctgatatcggttagatgctggtatagaggaaacctgagttttggcagcacgacctattctttgcatggtgcttctgcttcatgctgttaggtccactgtatcgaacatgccgttgagatggcaacccatgtattttatccctgtaatgtttgtaattattcttcctggtgcgaaaacaatcaattgttaaatcctagtatagacagaactttccgtt

SEQ ID NO: 269938 - DNA, 501 bp, Zea mays
cccacgcgtccgcccacgcgtccgcccacgcgtccgggtctcgctctcgctgcactcgtcttccccgcccgtcccctgatctcagatccagaccaaacgaattccacactaaaccccccctgccccagacgtcgcgcgcatgaaatgaaaccctagtgagtagtgaccctgtccggatcactgcgtggcgccgccatggcaccctccgctctggcctccctcccggcgccgctccggtcactgcggctcaagacgaagcagcaggagctcctgctccgcgtctccgcgctggcgctcatctacgttctcgccttcgccgtccgcctcttctccgtcctccgctacgagtctatgatccacgagttcgacccctacttcaattaccgcaccacgctcttcctcaccgagaacggcttcagcgagttctggaactggttcgactccgagagctggtacccgctcgggcgcgtcgtcggggggactctcttcccgggtctcatg

SEQ ID NO: 269939 - DNA, 485 bp, Zea mays
cgcctccgcttggtctcgctctcgctgcattcgtcttccccgcccgtccgtccgcccgctgatctcagatccagaccaaacgaactccacactaccctctgcccagctcgcgcacgcatgaaaccctagtgaccccgtccagatctcggcgtccggatcactgcgcggcgccgccatggcgccccccgcgctggactctctcccggcgccgctccggtcgctgcggctcaagacgaagcagcaggagctcctgctccgcgtctcggcgctggcgctcatctacgtgctcgccttcgccgtccgcctcttctccgtcctccgctacgagtccatgatccacgagttcgacccttacttcaactaccgcaccacgctcttcctcaccgagaacggcttcagcgagttctggaactggttcgacttcgagagctggtacccgctcgggcgcgttgtcggggggacgctctacccgggtctgatggtga

SEQ ID NO: 269940 - DNA, 806 bp, Zea mays
  unsure (1)..(806): unsure at all n locations
ccactacaagcaagccagcagcaacaaaagagacgagccttttcgctcgccgctaccaccacctcgttgtctcgcctccgcctcggcctcagcacgcgcgcgggatctcgcgctcgctcgcgcaccgaggagcgcgcacccacccgcagggttcggggcggggtgatccggtggtgatggcgagccggatcaaggaggacgagaggcacgagaagatcatccgcggcctgctgaagctgcccgccaacaagcgctgcatcaactgcaataatttgggaccacaatatgtctgcacaaatttctggacctttgtttgtaccaattgcagtggatcacatcgggagtttacacatcgagtaaaatctgtttccatggccaaatttaccgcacaagaagttgctgcccttcaagaaggggggaatgagcgtgctagagaagtatttttcaaggaatgggatcctcaacgaaatggataccctgacagcagtaacgctgacaaattgagaaatttcattaagcatgtgtatgtggaacggagatacacaggagaaaggagtactgataggccaccaagggcaaaggatgacaaggatgagtatagtgaaaatagaagatctgatggaaattggggtggttcgagcagtccgccaaatggaagttactctgatcgtcagagttatagcggacggagtgatgacagaaattccagatattcctatggngaccgtagtcctggctatgaccaaaatgactataagagaagtcctcgctactttgaggtnggtgatatagatctgggaaaacac

SEQ ID NO: 269941 - DNA, 857 bp, Zea mays
ttgctcgcacgcgtccaccgcgcgagcggccacgcgtgcggttgcagcgaaatggcaagagcggcggctcctccgcctctgcaccggctgcccggtctggccttgctgtgccttgccgtggcagtttgcttctccggcggcgaaaacgccgcggcggcggcctggacgaggaagatagtcggcgttcacgagctcagggtgggggatttctccgtcaaggtcaccaactggggggcgactctcatgtccgtcatcctccccgactccaaagggaacttgggcgacgttgtgctcggctacgacaccgtcgctgaatacgtcaacggcaccgcctacttcggcggtctgatcggccgcgtggccaacagggtcgccggcgcgcggttcacgctggacgggaaagcctaccgcctctaccgcaacgacggcaacaactcgctccacggtggccaccgggggttcagcaaggtcgtatggtcggtgaaggagcacgtcggcggcggtgcactccccgtacatcacgctctactaccatagcttcgacggggagcaagggttccccggcgacctggacgtgtacgtgacgtaccgtctgtcgcgcccgtacgtgctgagcgtgcgcatgaacgccccggcgcggagcagggccaccccggtgaacctcgcgcaccacgcgtactggaacctcggcggccacggcagcgggcccgtcctcggcgaaacggtgcagctcttcgcgtcgcggtacacgccggtggacgccgcgcttgtgcccccccgcgcgctggctttcaaaggccccccccgccctacgacttccgcgcgccggcgcacgagggggcgcgcctgaagaacct

SEQ ID NO: 269942 - DNA, 1059 bp, Zea mays
  unsure (1)..(1059): unsure at all n locations
gaccgaggcgtacggacgaaggagatcttttccgttacctcctccatttttttggagatcgccgccgaggcaagggagcatgtctacctggtgggcggccacaacaaacacctcncctacgacatccccgtaccctcgatcccacccatccccgcgatcccacctatcgccgccactgcctcttctgagcccgacgcggccgagcttgagcgctacggcatcaccgacgacctccgcgagttcgtcaagggcatgaccataaacaccttccgcgacttcccactgcaagatgagcctgaggtgtctgatgtgccaactgtgtcgaatgtgcgtcaggatctgaacgagtggcaggccagacacggcacacttgtcctctcggcagtcaaggaaatatcaaagttcagatatgagctatgcccaagatacatgaaagagcgcaaattctggcgggtatattttttgctagtaaacagctatatagctccgtttgagaagaaatacttcgaggagctgaaagtgaaagcagaggaagagaaaaaggattcccagaaggaggcatcccaagcatctacaactgcagaaccgaaagacacaaaagtgccaagcaagacctcttcgacaaatccagaacatgacctggatgtatttctgctgggggatctgggtagcgatgatgaggcttctgttggtggtgatgatgggctagatgatgactttgataagattgatgcgacctcgggattggaaagtgatgacgatgacaaaaaggcagcaacagggaaggcagaaggtgtgtagtagtagactatggttttgagagatgacgccaatgatagcgaacttcaggattccatgatgatattgtatattagttgatcgcatgccgtatgttcatttgttatctcccaatgaaggaatgctaagcacttgttattacaattttcgattttttttactaaactgagacacctatctatggatggtgttactcttttcttattagaagtgttctgtgaactgtctctacgaaattgaactccgactgctcgagactgt

SEQ ID NO: 269943 - DNA, 454 bp, Zea mays
tcgatctctgggagagggcccgggccttcgccggcgaggcggcgaagcggtcgcaggaactctccgcggaggcggccaagcgctcgtcggcgctggtctcggagacggcgaagaagtccaaggagatcttctccgaaaccgcctccaagtcgcgggagatcgccgctgaggccaccaagcaggccgacctcctcgccggccagatcaagcacctcgcctccgacctccctgtgccttcgatcccgcccatccccgcgatcccgcctatccccgccgctgcctcgtcggtgcccgacgcggccgagcttgagtgctacggcatcaccgacgacctccgcgagttcgtcaagggcatgaccataaacaccttccgcgacttcccactgcaagatgagcctgaggtgtctgatgtgccaactgtgtcgaatgtgcgtcaggatctgaacgagtggca

SEQ ID NO: 269944 - DNA, 391 bp, Zea mays
  unsure (1)..(391): unsure at all n locations
cccacgcgtccgcccacgcgtccgctctgatctccctctcgcgccgccgcccaccatgttttttttgaaggatccgccgcccaccatgtcgccgccgcagccaccacacccggtgccccgagagacggtggccagcgctgtcgcttccctgacaacgtggatgaagaagcgcgctgcggaggcgcgcccgaacctcctcgccgacgagcgcgacgacatcgtggtcctccagctctcgctacgccgcatccccgcctcgcgcagcaccaagccgcgcctcctcccgatgccacatcccgttgttgggcacgacggcgcctccgtctgcgtcatctcggacgaccgcaccaagtcgcggtccccttccgcctccgacctccacgcgtncatg

SEQ ID NO: 269945 - DNA, 262 bp, Zea mays
tccacgcgtccgctctgatctgagcaggaggaggaagaaagccaaaggccttccttgcgcttccagggcaaagaagatctgaggccgcggcggagcgtcgacgacgacgaagtcggtcaggatgagccgcgaggataccctgaaagtgcagaccctcgagctcaaggtgaacatccactgcgacggctgccttaagaaagtcaagaaggtgcttcacaagatcgatggggtgtaccagagcacggttaatgcggcggagggc

SEQ ID NO: 269946 - DNA, 464 bp, Zea mays
cctccgctcctcctctctctctctctctctccctctccgcggagtggagccggagtcgagaggcaggcagacgagacgaggaatgcttccttcttcccatgccgccgccgtccctgttcttctcctccctcccttattcctgtgctctcgtcgtaccagatctgaggccgcggcggagcgtgaccacgacgaagtcggtcaggatgagccgcgaggataccctgaaagtgcaggtgagttcttctgtttgcctgtcattttagtcaatcaggcagggctggccgctgatcccggttcgcgctcaccctgcatgccatgtcttctcctgcggcgtttttctgtctgggcgcacagaccctcgagctcaaggtgaacatccactgcgacggctgccttaagaaagtcaagaaggtgcttcacaagatcgatggggtgtaccagagcacggttaatgcggcggaggg

SEQ ID NO: 269947 - DNA, 447 bp, Zea mays
acttcaattgtaccaattgcttctgagcggctaccacagtacctgtcttctgctgagtggcagaagcaccatgctgcgctcattacacttgcacagattgcggaaggatgtgcaaaggttatgcttaaaaatttggaacaagtcgtttcgatgatattgaatggatttcaacatccccacccacgtgtgagatgggctgctatcaatgccatcggtcagctttctacggatttgggcccagatcttcaagttcattaccaccagcaggtgctgcctgcattggccaatgctatggatgatttccagaatccacgagttcaggcacatgctgcttcagcgattttgaattttagtgagaattgtacaccggaaattttgacgccttacctggatggaattgtgaacaaattacttggtcttcttcagaatggaaagcaaatggtgcag

SEQ ID NO: 269948 - DNA, 1015 bp, Zea mays
agaagaagaagatgaaggatgactcagagatggacgaaccagatgatgaaggtgttcacatggatgaagagaatgatggagcagtcctggaatctgaggatggagtgtctaatgtggttgaactgcccaaagaatcaaaagggaagtatgtacctccgagtctgcgtaatgcttccaattcagaatcagaagaaattgcccagatgcgtcgcagagtaagaggacttctgaacagactttcagagtcaaatgtggagtccattactcaggaaattgccacactttttcgatctgttccacgaagtgatggctcccagataattggggatgaggttttggctagttgttcccgaggacctcgtggcaatgaacagttaagggtctcccatcaaccatgtatgccgctgtctttgcagcctttgttgcaggtatggcatgtttggtcggtgttgacttcagtgccaagatccttgcatctattgctaagtcatttgaggatgagtattcaaaagaagatggtctatctttgagaaaccttaccttacgcttctgctatttgtgcatatttggtgttacctcaagcgatcttgtgtatgatcttctgtcgattctgagcaagcgcttgacagagctagatgtctctacagtgttgaccatcctacagtgctgtggaatgaagctgcggggagatgatccatgtgctatgaaagattttgtccttagtattcagaactctgtgaatgatcttaaattgcactctggtgttggagcagacgggaagactgatatacgtagcagaagaatggaatttatgcttgaaaccatatgtgacattaagaacaataagaaaaggcctaaagaggatccttcacaccatactcgaataaaaaagtggcttcaaaagcttaaggcagaagatgtcctcttgcgtgggttaacctgggggcggttttggcccccctgataagaaggggcagtggtggttgtctggggctgttccatcgacagtagctaa

SEQ ID NO: 269949 - DNA, 386 bp, Zea mays
gcctgtatcccagcaaatagtgccagccatgggcggccaccgtgagccctgaccctggggcggcgctcgccggcgtgaaagagccgagggcgcccaggtcgctgcttgcgcgcgcgcgcgccaacctggcgttccagtcggtgtgggcggagctgaacggcgccatgggcgacctgggcacctacatccccatcgtgctgtcgctggcgctggcgcgccacctggacctgggcaccaccctcgtgttcaccggcatctacaacgccgtcacggagctcatctacggggtgccgatgcccgtgcagccgatgaaggcgatcgccgacacggagctgtccgactcgtcagtcggagtcccccagatcatggccagcaatatcctgacc

SEQ ID NO: 269950 - DNA, 979 bp, Zea mays
cagcccccgtgaccgtgaaccaatcagttgtccagttccgctccggcactcccacccacccggccacccacgcccgcgagcgaccaactcccctctcgaacggttcgggccttggcagtcgacagatcgatcaatcagcaccgaccactcgcgacccgattcgaatcgagccagagtcccaggcagcggcggcggcggcgcccgcctccaagaccacctccacccggaccccagccccaaccccaagttaacagatgggggacgttgcgaaggacttgacggctgggaccgtgggaggggctgccaacctcatcgtcgggcacccgttcgacaccatcaaggtcaagctccagagccagcccacccctgctcccggacagctccccaagtacgccggcgccatcgatgctgtgaagcagacggtcgcggctgaaggcccgaggggcctatacaaggggatgggggcacctctggccaccgtagcggccttcaacgctgtcttgttcagtgtcagggggcagatggaggcgtttctcaggtcagagcctggtgtgccgctgacagtgaagcagcaggttgttgcgggcgccggtgctggaatcgcagtctccttcttggcttgtccaacagaactgatcaagtgcaggttgcaagcccacagttccttacccgaggcagccaccgcttctggtgtggctcttcccaaaggtccgatcgacgtggcgaagcatgtcgtccgggacgccggcgccaaaggtctcttcaagggcctggtcccgacgatgggacgcgaggtccctggcaacgcactgatgttcggcgtgtacgaagccacgaagcagtacctgaccggcggcccggacacgtccggcctcggcacgggctcccaagtcctggcgggcggcctcgccggctccgccttctggctgtccgtgtacccgacggacgtggtgaagagcgtgatccaggtggaccaata

SEQ ID NO: 269951 - DNA, 773 bp, Zea mays
cgtcggtcgaggagtagggttctagcgcctatctggtttctccctgcgccgccgccgccgccgtggacaaccggagcgtagtgggaggggatgatggagggaggtagccgcgcggatgggcggaatccgaaccagctccggccgttcacctgcaccgggaacccgctccaccgcgcccacggctccgcgcggtgggcgcagggcgacaccgtcgtgctggccgctgtgtacgggcccaagccgggaacccggaagggcgagaaccccgagaaggcctccatcgaggtcgtgtggaagcccaagaccggccagatcggaaggcaagaaagggaatatgagatgacactcaagaggacgttgcagagcatctgcttgctcacagttcatcctaacaccaccacctctgtcgtgcttcaagttgtgggtgatgatggttctcttatgccatgtgcaattaatgcttcttgtgctgctcttgcatttgctggaatccctatgaaacatctcgctgtcgcgattagctctgcagtgatggccaatggtgtggttatcttagacacacgcagagcagaagagcagcaagctaggtcgtttgctcacctggtgttcccgaactcgcgcaagtcagtcgaatcgaaggacacgacccagcgagatgaggagtccgagcgaggattgataacttgcatcacgcatggagcaatgtccgaggatgactatttcaactgcatagagaggggtgtcatggcgtcctcgaggatctcggatttcat

SEQ ID NO: 269952 - DNA, 712 bp, Zea mays
acttttccgcctctccgtgctatctgggctttctggatcgacggctgggcgccgccgcccttcgtcagggcttcgccggcggcgattacacaccagggtgagcaaatattcttccaccaatggcgagagaaccgagtcctgaaatagatgatgaactttacaatgaagtttatgggaaagcatacagcggcccagttgcatcagctacaaatagtgtgactcctaaaggaaatgctgagaagaggcccctgactcgtgataagtcagatgatgaagatgaggccccagatcctaatgctgttcccacggacttcactagccgagaggctaaggtctgggaggctaaagctaaggctacagaaaggaactggaagaagaggaaggaggaagaaatgatttgtaaaatatgtggagacccaggccattttactcagggttgcccctccacacttggggcaaataagagaaatgcagacttttttgaaagagttccagcaagagataagcaagtcagagatcttttcaatgagagggtaataagccagattgagaaagatgtggggtgtaaaatcagaatggatgagaagttcctgtttgtcagtggaaaggatagattaatattatccaaaggtgtttctgctgtgcataaaattattcaagagggtaaaggtaaacatagtccaagcagtccgaaacgcgatcgctctaggtc

SEQ ID NO: 269953 - DNA, 472 bp, Zea mays
ggccgtcctgcccttccctgcccggtgggtatatgtaagctcagaccgccaccggaaccttctcgagcccgcggccgcacacctccgcccgaagccgccagtcggactacgagcggcggcggcgcctcggctcccctgatctccctcaccggaatggacggccaggctccgccgcttctcgacgccgtcgtgctcgagccccttgcagttggcgacgagctccatccacggcgtcctgtcgaggtggaggacgctccgggcgccgctccgccctccggtatggacggccaggttccacctctctacaacgtcacgcgggatcctctgaccgtgtccgacgagctgctaaccacgggcgaggtggtggatgacgccctacccgtcgcgcccgacatcgtcaagggcgaggtgatggaggacgacgtcctacccgtcgcaactgacatcatcaacgacgccgcctcggagtgcc

SEQ ID NO: 269954 - DNA, 548 bp, Zea mays
cggacgcgtgggtccgccgtcgaggctgagctcgtccagggcctcatcacctccgccgtgaggtgctccactccttcgtcgtcaagctctcgccccaggggtgcgctagtgccagatgcggcgagccagcagatcaaggaaaccgcccgtggccgccccaggggtttaggtctcctcacggcgacgggagagcgcgagccaatgtggagcgattaattggtcgctgctgccaattgttctgcgtgcggcttgataatttatttcctctagactgtagaagtttcacttcctcttgaattttaggcccaggataaacaaaagctttccttttcactgcaaacaagtactcctaaccattggaattgacaacatgtaagctgtagacaaagcccaacctaacccacgactctgctttttgcttcgtgctgcgttacatcttgcactggctgctgctggtgacaagcaagaacaaccaaaagtatttttagtttatcactgtccatcagttgaaactaaaaatgccctgacctgcctcaaatgcttaactt

SEQ ID NO: 269955 - DNA, 518 bp, Zea mays
cggacgcgtgggctcgctccctgcttctctcccagccgccgccgactctatctctcccttccctctcaccacctcctcgtcatcctcagcgtgcacgctgcgcgtggccgtagtgggggtggccccgcggcacgtcggctgccgaggcgctggtctcgccgagggcccagatgcaggtgctctcctctaccaacctcgccgctgacttctcccgcgcgctgccgcccggggcacccatccccatgctccgccgtgaggtgctccactccttcctccgccgtcgaggccgtgctcgtccagggcctcatcacctccgccgtgaggtgctccactccttcgtcttcaagctctcgccccaggggtgcgctagtgccaggtgcggcgagccagcagatcaaggaaaccgcccgtggccgccccaagcgttacatctgcactggctgctgctggtgacaagcaagaacaaccaaagtaaagaagtctacataattgccaagaatcatcttcatccatgggga

SEQ ID NO: 269956 - DNA, 290 bp, Zea mays
atcggcttcatcatcagcgctaacaattaaggagtcaatgcaatttctttgtgtgctgaaaaaatcataaacaggccatgccgcagctgactgacagaacgaaactccccaacatagttgacccagtgatcagggacacgatggacccaaagcatctgtaccaagtggcagcagtggcggttctctgtgtgcaaccagaaccaagttacaggccgctgattactgatgttctccactcccttgtccctttagtgcccgtggagctcggagggacgttgagggtcgcagag

SEQ ID NO: 269957 - DNA, 516 bp, Zea mays
tgcttctctcccagccgtcgccgactctatctctcccttccctctcaccacctcctcgtcatcctcagcgtgcacgccgcgcgtggccgtagtgggggtggccccgcgggcgcgtcggctgccgaggcgctggccacgccgagggcccggatgcgggtgctctccccttccaacctcgccgctgacttctcccgcgcgctgccgcctggggcacccatccccatgctccgtcgcgaggtgctccactccttcctccgccgtcgaggccgagctcgtccagggcctgatcacctccgccgtgagggaagctgactgaaaagagcgatgtatacgcatttggagtggtgcttcttgagctactaatgggacggaagcctgtcgagaagatgagtcaaactcagtgccaatcaattgtgacatgggccatgccgcagctgactgacagaacgaaacttcccaacatagttgacccagtgatcagggacacgatggacccaaagcatctgtaccaagtgg

SEQ ID NO: 269958 - DNA, 651 bp, Zea mays
gttcgcgcacgcgacctcgacacgcacgcagcagccagcaggtgaccgccgtcacgcgaccgcttcccacactcccttccccaccagccgaaaccgaggctgacgctgcgcgagccaaccggcggtgatgcaggcggcagtcggccaccgcggcgccaaccttggctccccgtcactctcgcgcttccggtatggcttccgcctccccggccggtcccgcctcttctctgagggcgtggcaggcggcgccactccgcgtcggctctctgccccagccacggacccatggcagcggcggtttcgcgcacctcggggccatgggttggggaggcgccgaggctgccgcacgccctcaggagaatgcttatcgatcatcagaaaatggcatgtcccaaccttctgaaagctgctgtactttcaaccatgacattgcttgctgtacctcttgaggcgtcagcggagatgtgccagccacctagttctttcgccaatatgccaatttttattattgtagctctaataggagctgctgttggaggattattagcacgccaaagaaaggcggaattgaagcggctcaataatcaacttcgccagatcaatgcagcacttagaaggcaggcacagattgagtcgtttgcgcctggcctt

SEQ ID NO: 269959 - DNA, 462 bp, Zea mays
gcggcgcgctgcgcgcccccgaacatccttcccgggaacccccccacccaaaggcgaggcagggggagagccgtgcctggtgtggtggctcctgaccaaaacggagtccctcgccgccgccgcttcccggggtccgccaaatccggagccaatgccgccgtcccctcccaccccggcggcacccaaaactatcgccgacttcttcgcgcgccccgccaagcgcctgcgcgcttgccccggccgcctccctctcctccaactcctctccctcctcgctgtcgccggagcagcgccgtcgcgccgacaccaacctggcgctcgcccgcgcgcggcgcaacctccgcctcgccgagtccaaagcgcaagcatcggggggcgcaccgaagctggaggagctcctggtggaagagacgtgggcggaagccctctcgggtgagctgcgcaagtcatacgcgctcgagc

SEQ ID NO: 269960 - DNA, 681 bp, Zea mays
cgtccgaccacacgtccgcccacgcgtccgacaagcaccagtttggctcgtctcggcctcggcgcgtgcccccgacccgttgctgaccccgctccccggtgatctgatgtcggcggcggcacgcgcgccaccgccgccgcgcgcactctacgcgccgtcgagaagagtccctttcggtgccgtgatcctatccgcgccgcgacccggggctagggttcgcgcggcgcggcctcgcgaggggaatgttcataaccattgcctgttgacatcgtctagtctgaattcaagttctttgctatgccctccatgcaattgtgctcaaatggctttggccgacacaagaattgcttaccagcctgaagttgacaagcatgctggagttctggcctatgaactggttcaagggaatcttgttcagtggaattcatttatggacaaatcaatacctgatccaccaacagctgttcttcttcatggcatccttgggagcaggaaaaactggggatcttttgcgaagagattggctcacgaattcccaatgtggcagttcctcttggttgatttgcgctgccatggcgactcaacatcaattgagaagagtggaccacacactggtgcctcaactgctcttgatgttctaaagctgataatgcagcttaagctaaccccttgggttttggt

SEQ ID NO: 269961 - DNA, 1805 bp, Zea mays
taaatggacgtgaacaatttgataagattctcatgggattgctaagaaggatattggatactaacaaaagagtgcaagaggctgcttgttcagcgtttgcaactcttgaagaggaagcttctgaagaattagtaccccacttggaagtaattttgcagcacctcatgtgtgcctatggaaaataccagagacggaatctccggatactctatgatgccctcggtaccctggctgatgctgttggagcagaattaaatcaggcaaaatatctagatatatttatgccgcctttgatcacgaagtggcagcaactttccaattctgacaaagatctatttccactccttgaatgctttacatctattgcacaggcattgggaccaggatttgctcagtttgcggaaccagtgtttcaaaggtgcatcaatcttatccaatcgcaacagttggcaaagattgatcctactgcagctggtgcggtgtatgatagagaattcattgtttgttcgttggacctactgtctggacttgcagaaggtcttggcgctggtattgaaagtcttgttgcacagagcagtttgagagatctgcttttgcaatgctgcatggatgaagcagctgatgttcgacaaagtgcccttgcccttcttggagacctttctagggtttgcccaatacatttgcatccacgtcttcaagaatttcttactgttgcagcaaagcaactgaaccctcagtctgtgaaggatgcggtatcagtagctaacaatgcctgttgggctattggagaattagcaatcaagattggcaaagaaatagcgcctgtggtgatcaccgttgtttcgtgcttggttcccattctaaaatccccagagggttcgaacaagtcacttgttgaaaacagcgcgatcactcttgggaggcttagctgggtgtgtccagacatcgtggcccctcatatggagcatttcatgcaagcatggtgcaaggcgttgtgcatgatcagagatgattttgagaaagaggactcgtttcatggattgtgtgcaatggtggcagcaaaccctacaggaggcgccggttcattagcttacatctgccaggcctgtgcgagttggactgagataaaaagcgaaggtcttcacaatgaggtgtgccagattctgaatggctacaagcagctgcttggaaacaacggtgggtgggaacaatgcatggccgccctgaaaccagatgttgtgcagaaattagctagatacggagtatgatgagaagcaagctcgtgtggtttattcacctcatacaccgaccatcatctttatggcggagacaagagaggagcagaaaggggtgggggtcgtcgacagtgcctctgctgctgctgcatcatctttacatgtgtggcacttgagagtcgattcggttcgttggtacgccattgtccgttcgttcattgttatactggttggtgcacagcatttccagagcgagagtaggatgtcttggtaaaccccccatgtgtattggttggttgggccagtggacttggttttggtttttttggtcattcctactggcaaacacaacaaggcccccaccctcttgctcgccccaccccggcaacattgagaaaacagaaaggttttgtagcgggtaattcccccccctttcttgggttcttattattattaggggtaggaattgttttcgagtcttgtttggcaggaagggtttgtaccagaaatcaattgattgctcccccccccccaaataataaaaaagatcgatcgatggggcttgtttcc

SEQ ID NO: 269962 - DNA, 425 bp, Zea mays
gcgtataaattatcatttatatacattacaaggagtgaggatatgatcggtcttgctctttctgatttccttgctcttgatgaacaaggtcgctgttgatagagttaataatagtgacattttcttgtcttccctgtcagtattagaaggaaaaagaatggcaccacagaatgtcttttggggctagtagaaggaaacagaatggcaccacataatttgtcattttcttgaactgcttccaggcttgcttcaggaaccaagaagactactcggactggcaccttacttgcgattttgttaaaatatatactcctacactgggtttctccgtctctattatgaaaactattgggtaatatgaccatattgtatttcataatttgggccaaactcacaactctggttattaagattcagatggagcc

SEQ ID NO: 269963 - DNA, 1278 bp, Zea mays
ttccccgtcctcccactcccccctcgcggccatttcaaatcgctctctcgacccaactgtactcgccgtcgtcaattcatcatccatccccatccccccatcgactcccagatctctatccccctctccctgtcctcactctctcgagcgcgttgtggcggatgtcctcgtcggcgcgtttcgatctccgggcctcgtcgcatcagttgcagccgccgccgtcgcacgccagcatgagcagcgacgggggcgcgttcgcaaacgcggagaacctggagcactgcgcccggtacctgaaccagacgctcgtcaccttcggattcccggcatctctcgacctcttcgccaccgatccggtctcgattgcaagaacttgtaactgcatctatgcgctgctgcagcagcgacagagggacattgagttcagggagtctacaaatgaccagcggcagcggatgcaatctgatatctcacggctggaagctaagattgccggaatggatgctcaattagcagcgaaagatcgagagctagccactcttactcgaacggaggccaaaaacactgctgctctgaagtctcagattgataagctgcaacaagaacgtgatgaatttcagaaaatggttataggaaatcagcaagtacgcacccagcaaattcatgaaatgaagaagaaagagaaagaatacataaagttgcaggaaaagctaaatcaggtattgatggagaagaaaaaggaatcatcccgttctggaatggagataatgaacttgttgcagaaagaaggacgacaacgcggaacatggaatggaaaaaagaacgacaatgattattacaaaatgattgttgatgcatatgaagtaaagaaacaagagctgatgcaagagaatgcagatttacgggcactgttacgttcaatgcagatggacatgcgtgactttctcaatgccccgaatgggtcatcacaatctactgttactgataatggaagacaggagtcagggtctcctcagtctccgcttggtggcaagacggatgtttttgacttgccctttcatatggccagagatcagatagaagagagtttgcgcacaaaaatgacttcaatcaaggcacgaatgacacaacttcaagatgctcagaaaggtgcagaagtgacttctgaggcaactgaccgggagcttgagcttgaagctcaactggttgaagcatgaagcatcatccaagagcaggcctgcatcatgtccaagcactttatgtcttgataagtcaagt

SEQ ID NO: 269964 - DNA, 498 bp, Zea mays
gtgacatgcgagtcctaatttaggtacctttacctgtataatgtgttgggcattagaatatagtcagcacctctatatcattggttcttctgttgaaaaaacattttgacagtctaatttgtgggccttatctagcttattgaaataaatatcttcgaaaagtatggcaattcgaatgacatcaatcttgtgggtgctcaatactgtttgtactggttagtggtagttgtaattgaactgctttgatgaaacaagaatctctgaatacctttgcacccacacttatcacattatgaccctggaatccagagtatcttaaaaattaattcttaatggtcaagtggaattgctagttctgtttcccccttagccatggaaatatctcattaatatttgatgtacaaatacataggttcatctgactaacaaaatctttttttagatataactaccgcagccgttgctaaacaagctttggagggacactgcatatatgat

SEQ ID NO: 269965 - DNA, 847 bp, Zea mays
  unsure (1)..(847): unsure at all n locations
cccacgcgtccgctcccccactcttctacttcttgctgtcgtcgtcttctctcgactccccgtcccctcccgctgcctctcccacccgccgcttccggattccgccgcccgtgccctcgccaccaggaattccactcggagtaaggagtgttttcccccgctgcttgcttcgcttctccgggtcccgggacaccgcccccgttttcgccgacttagatttcacttctggtcgttcgctcgctcgctcgtttgctcttaccccccttgctttgctcggtcggtcgattggagctagccgctgcgtggattcctcggctcgccgtccggatctggcctcgctgagctgcagctgccgcgaatcccgactcgattcggccgcgctcggatctcgccggactagcggggaccgaggcctctcgattcgcctcggggccgagatggatcatgtggtcggaggcaagttcaagctcggcaagaagatcgggagcgggtcgttcggggagctcttcctagctgtgaacgtgcagaccggagaggaggtcgccgtcaagctgggaaatgtcaagacgaagcacccgcagcttcactacgagtccaagctatacatgcttctccaaggaggaactggcattccgcacctgaagtggttcggcgttgagggggagtataacgtgatggtgatcgatcttctcggccctagccttgaggacttgttcaactattgcagtagaaagttttctctcaagaccgtgctcatgcttgctgnaccaaatgataatcgggtcgagtacatgcatcaaaaggggtttctgcaccgtgatataaagcctgataattttcttatggg

SEQ ID NO: 269966 - DNA, 480 bp, Zea mays
  unsure (1)..(480): unsure at all n locations
gccgccgcctggatctggcctagccgagcctcggctgctctgaatcccgattcggttcggctcccttgctctgccgtcgcttccgaggcgtgctcggatctcgtcggagtagagggcctcgcggctcgcttcgggggcgagatggatcatgtggtcgggggcaagttcaagctcggcaagaagatcgggagtggatcgttcggggagctcttcctcgccgtgaatgtgcanaaccggggaggaggtcgccgtcaagctggaaaatgtcaagacgaagcacccgcagcttcactacgagtccaagctatacatgcttctccaaggaggaagtaggccctagagtcctgtcctgtcctgtctagttttactgctgggacggtactctgtggttagttgctagcatgatgcgcgagttgggctaaccttccgctcccccccttttttttgtttcgtcacagctggcattccgcacctgaagtg

SEQ ID NO: 269967 - DNA, 555 bp, Zea mays
gtttttcctattcagcgtgcaaaaatgaaggagttggctgcagaacgtgcaaaaaagttgaaagcttaagaagaagaacggataaagaaccaaaaagcaaaaacccttgcaaagtttgaagaattgaacaagccattattaagtctttagaagaaattaaatggtattaaagtaaaaacctattaatcaaattgatagcaacatgctggacttgatgtgactgctcaactttgacccttcaactgaaccacatgatgttattgcgcctgataggcttactgatcttctgcctcctaatgatcccaatcatactatggttcatatacaggcccagtctacagcacaatcacatgcttcagatggtggcaaagaccctgatgctcatgcaacctcgtctttggtcaagaacactcacagcaacatggagcctgttgtgcagaagagtatctcgcagttgcatgacatcactgtggtaaaggccaagcaagggtaccgggaaaagacatgtgtcagaagagataatttctgatgagaaagcaagtgcttcaataacca

SEQ ID NO: 269968 - DNA, 1301 bp, Zea mays
cggacgcgtggcgagacggaccgacccaggcaggcaccactccgctcaacgcaccgggcggcacccaaatcccaaaccctagcacacgcaccatggcggcgcacagaagatccggtggggggagctggaggaggacgatggcggggacctcgatttcctcctcccgccccgcgtcgtcgtcggacccgacgagaacggcctcaagaaggtcatcgagtaccgcttcgacgacgacggcaacaaggtccgggtcacgaccaccacccgcgtccgcaaactcgctcgggcgcgcctctcccgcagcgccatcgagcgccgccagtggcctaagtttggggacgccctcaaggaggacgccggctccaggctcaccatggtctccaccgaggagatcctcctcgagcgcccccgcgccccagggagcaaagctgaggagtcagctgcatctggtgatccgctggctatggcgagcaagggaggtgctgttctcatggtttgcagaacctgtgggaagaagggcgatcactggacctcaaagtgtccgtacaaggacctggcaccaccgactgaaactttcacggacaggcctccaacgtcagatggccctcctgcaccaggtggtcctgctaagggagcatatgttcctccaaccatgagaggaggtgctgataggactggagactcgatgcgccgcaggaacgacgagaattccgtccgtgtgaccaacctctcggaggacacccgcgagcctgacctccttgagctcttccgtgcctttggccctgtcagccgtgtctacgtcgcggtggatcagaagactgggtcgagcagggggtttgggtttgtcaactttgttcacagagaggacgccgagaaggccatcaacaagctcaacgggtatggttatgacaaccttatcctccgagtcgagtgggcgacaccaaggcccaattagttttgccgctacctgctagaatcgcatatttctgttgaattatatcagtatgtttgtttgaattactggtacctgagtcatgaatttatcttgttggaaaaacctgttatgtgtggtttggttggacgagaataactatactcgcttcttttatattgagttcgcatgccgtttgttgtcagcaaaataaaaaaaaaaaaaaaaaaaaaaaaaaaaaaaaaaaaaaaaaaaaaaaaaaaaaaaaaaaaaaaaaaaaaaaaaaaaaaaataaataaaaaaaaaaaaataaaaaaaataaaataaaaaaaattaaaattatttatataattaagggggggcccttttt

SEQ ID NO: 269969 - DNA, 453 bp, Zea mays
cccacgcgtccgcgaacgtgcgctgtctctcgatcctgcatctctgcacctgctcgcctccccagggaggcagggacaatcgacttcgccgggcgccggctagccccaccggcgacgacaggcacagtggaccacggaggagaaagtactctgctttgaatgggaagtgccatgaacaaagacaaagttcatgacaaggagactcacggaacaagtagtgatataactgagaaaacacctgtggaaacggtgaagggtcccaatctgcttgagcgagcaaaggaagagatcgaggcccttgccggagctgttcatactaagatggagcaccattccagtccccacgcgaagaaggatgaatcacataaggaaggcaaggaggggagcctgcacaaaataaaagcccacacggatgaaactcacggaacaagtgctgacataaatgagaacaca

SEQ ID NO: 269970 - DNA, 1176 bp, Zea mays
cccacgcgttcgcgcgccgcgggccggtacgctgctggtgctggaccgctcgactctcgcctaccagctgctgctttggctggcgcgccggcgagagagagagagagagagggacgcgacggcgatggaccgggcggcgctcaccgtgggcccggggatggacatgcccataatgcacgacggcgaccgctacgagcttgtccgcgacatcggctccggcaacttcggcgtcgcgcgcctcatgcgcgaccgcgccgacggccagctcgtcgccgtcaagtacatcgaccgaggcgagaagattgacgagatcgtgcagcgggagatcatcaaccaccgctcgctgcgccaccccaacatcatccgcttcaaggaggtcatcctcaccccgacgcacctggccatcgtcatggagtacgcctccggcggcgagctcttcgagcgcatcttgcaccgccggcagattcagcgaggacgaggcgcgtttctttttccagcaactcatatcaggggtcagctactgccattccatgcaagtatgccatcgcgacttgaagctagagaacaccctgttggacggcagcaccgcgcctcgcgtcaagatatgtgatttcggctactcaaagtcatcagttctacactcgcagcccaaatctaccgtgggaactcctgcatacattgctcctgaggttcttctgaagaaggaatacgatgggaaggttgccgacgtgtggtcgtgtggggtaaccctctacgtgatgctggtcggcgcgtatccattcgaggacccagacgagcctaagaatttcaggaagacgatccagagaatactgggcgtgcagtactcggttccagactacgtccacatatctccggaatgccaggacctaatctccaggatcttcgtcgccaacccgtccaccaggatcaccatgcccgagatacggagccacccttggttcctgaagaacctcccggccgacctggtggacgacagcgcgacgacgacgagcaagcagtacgaggagcccgagcagccgatgcagggcatggacgagatcatgcagatcctgggcgaggccaccattccggcggcggggtcccgcgggctcaaccagttcctgaacgacggcctggacctcgacgacgacatggaggacctggactcggacgccg

SEQ ID NO: 269971 - DNA, 620 bp, Zea mays
gcggtcgtcctccaacgccgacgccgtgctgtccgtcctaaccggcccggcgctcggcctctccaatgctgagatcgcgctgctcgtggccaaagacccgcgcgtcctcagctgcagcgtcgacaacaccctgcgggcccgcttggcccgcttccgcagtcatggcttctccgccgcgcagatcagcgaattcgtccgcgtggcccactgcttctttcgcaaattcaacatcgacctccagcttcgggtcctggatgcccttcctcggctcgcccgacaggttcctccgcctcgtcaagcgtaacttctacctcctcagctccgacctcgacaaggtggtgaagcccaacatccagctgctccaggagtgcggtctatctatccaggagattgggagcctgtgcgtggctaacccgaggctgctcaccagcaagccggacagaatcagggccgtcctcgtgcgtgccggtgagatgggcgtgccccgcaagacgcttttgttcaggcacgctgtgaccgcggtggcgggcctctgtccggagacctttgcatctaagctcaagatgatggccaatattctcgggtgctcagaggctgaggttgccagaatggtgcaaaag

SEQ ID NO: 269972 - DNA, 903 bp, Zea mays
tcttagaaatttctactgcaaaggttcccgtgagaggttggtatacaaaatgctgatgaagatgaaacttctagtggtgatgatgatgatttcactgatagtgatagtgaaatgtctgaggaagatgagtccagtgatgaagatgaagtgtcaagcgatacagatactagtgatgattctggttcggaagaacagacacctaccccaaagaagactgaggtagtagttggcaagaagagggcaattgaagctgagacaccttctggtaagaaggctaagtctgaacaatctgctcagaaaacaggcgacaaggtctcaacttctcatcctgcaaagcagtccagcaagactcctgcagacaaatctacaaagacccccacagctgacaagaagtcccccaaatctgggagccatgcctgcaagtcatgcagcaaatctttcggcagtgcgtcagcacttgagtctcatcagaaggcaaagaagcatgaagcctagagcacgtgctataccatctactcgttatcaaaatcagtggtcttatttttgaacttgaaaatgtccaagtttggaacttgcccagtagtcatctgattagtggtgttatttttctttgaacttgggaattgtctagtttgggacatacgcggtatgcctggttaagaacatgggaaatgtcaggttagaacaggtcctgctggcccagttttggtcgtcgtcgaatgttgctaatgttggaactgattattgtgacccgtaaggccgtaagggagaatctttgttatctggtagtgcctagtgcaaatcacctttttctcagttgttaaacatcttgcttttacggtgttcgtttttaaaaaaaaaaacaaaaaaaaaaaaaaaaaaaaaaaaaaaaagggcggccgc

SEQ ID NO: 269973 - DNA, 333 bp, Zea mays
gaaatgtctgaggaagatgactccagtgatgaagatgaaatgtcaggtggtgctgatcctagtgatgattccagtgatgaatctggttcagaacatacttctgccccaaagaagactgatgtagtagttggcaagaagagagcaatcaaagctgaggcaccttatggtaagaaggctaagtctgaacaatcttctcagaaaacaggtgacaaggcttcaacttctcatcctgcaaagcagtccatcaagactcctgcagacaaatctaggaagacccccacagctgacaagaaatcccccaaatctgggagccatggctgcaagtaacgcaac

SEQ ID NO: 269974 - DNA, 921 bp, Zea mays
cgtacaattttaatccgcttttcggttggtggtgcctggcatctaccgtgcggagggggaagagggagaggccaggagaggaaagcctgcagccaccatggattccgacctctggatctcgcgtctcacggccgccaagcggcagtttgcgctgcagcgcgcgcagcgccagcacgccgccccggcatcccatcacgatcgatttgggtatgatgatatcgaacctgaggatgatttgcactcagacttcccatgcccttactgttatgaagatcatgatgttgcttctctctgcgcccatttggaggacgagcaccctttcgagtctaaaattgtgacttgcccagtttgctcagctagggtttcgaaggacttggtggatcatataacccttcagcatggctacctattttaattgcagaaacatcaaagagtacgcagagttactggtaatggcaaccacaatctctcctatgcagggagagatcttcaactgcaagagacctacttaaaggtgcttcttggaaatagcagtcgaagcagcagtaccaatgcatcaagtacagtcaccgattcactgctaccctcactagttttaaatttatcatcaccagaagtagaagacgcatcaaagttttcagctcctgctgtggtggaaaataattggtttaaacgatcactgccttcaaaaacttggaaattaagaactgttgattccacccttagtcatgaagagagggagcgtaggaggaggagagctgctgtgagatcagcttttgtccagcatctccttgtcaccaccatttttgaagactagcagatcaagcacagctcatgcaaaggaatcttgtgggcgggccttttgcccactcatttatctggatggataaggcactaattatcttggataccatcacgctg

SEQ ID NO: 269975 - DNA, 465 bp, Zea mays
ttccggagtcacccacgcgtccgaagacgcgtgagcgctagtctcaaaccacaaccctagagaagaagagagagagagagaaagagagatggtggggctgcagtacgatctcgtcgggaacccattgggcgcggtgcgcgccaccttcgagaggacggccgccgccgctgcggcgcagtctggaggagccgaccctgtggcggcgttccgtggcaaagactggggcgccggcgacctcttccgctccttcctcttcgagcaagacggtcttggcaaggttccggtgttggattcgtcaaatcttggattgatcaaaccgaacaccctggtccggtatcggggaatggttcaggatatgcttgggaatgagtactacattggtgctttcaaggatgggtcaacttggaggacaaacaagtaccctgacttctcaccgtactcaatgccgcatacttgtgattcaca

SEQ ID NO: 269976 - DNA, 1129 bp, Zea mays
cccacgcgtccgcccacgcgtccgcccacgcgcccgagctagatcattggacacatatcgaaacagctctagctagcgcgctcgtcgtctaacctggcttccggcatggcttccaagcagatcggagtcttgacctgcttcattgccatcaccgctctcgccttccgtccctgcgcatccgccgtgcccatggacggtggctggtcgaacggcggcgccacctggtacggcccagccaagggcgctggatccgacggtggtgcgtgtgggtaccagggtgccgtcgaccagcctccgttctcgtcaatgatcaccgccggcagccaatccatcttccaggacggcaagggctgcggcacctgctaccaggtgaagtgcaccggacacgcgtcgtgctccggcagcccggtgacagtggtcatcaccgacctgtgccccggcgctgcgtgccaggtggagcccgtgcactttgacctgagcgggacggcgttcggtgccatggcgaagcccggccaggccgaccagctccggaacgccggccgcctgcaagtccagtacattcgggtggcgtgcaactggaacggcttggacatcgccttcagggtggacgccggctcaaacgccaactacctggccatggccatcgagtacgagtccggggacggggacctgcgcgccgtggaactgaagcagagcggcgcggcggcgtgggcgcccatgcaacgctcctggggcgctgtgtggcagtacaagtccggctccaccaatctgcaggcccccctgtctgtccgcctcacctcgggctccggcagggtcctcgtcgccagcaacgtcatccccgccggatggcagcccggcagaacctaccgctccgtcgtcaacttcggaggaaaccatgcataacgagtgatattaaggatgtcgtgtgcagatgtctccatccaacaataagatgcatgcatatatgatctgtgtggccagctacctgctagatcatctcacttcctgagtgtgctgatgctcagccaataatgaaccattccatcttgatcggaaattcaacatataaaaaaaaaaaaaaaaaaaaaaaaaaaaaaaaagggaggtataaaaataaataatataaaaa

SEQ ID NO: 269977 - DNA, 1028 bp, Zea mays
ttcctcgcgtccgcccacgcgtccgcccacgcgtccgcccacgcgtccggctaagtttagcggtaatagctcaaaagtcaaaggaaatgcccgccagacagtcaataacgacagtaatagtggagttcgatcaatgaggggccggcaaaaggatgtaccagaaaaagatgataataagccgaacaaagatgacattcagaagcgtagggtaatagtggaagctgaagcaagagaagaaggtgaaatttctgaatcggaggcagagaccaggtatcgtcaggacaaagaggagaagtggcttgaatggtgctctgaagttttagatgaggagcaggaaactttgaagcgcctggataggctgcagaatacaagtgtaaacctcccaaaggaaaaggttctttcaaggattcgcaagtatctcctgataattggggacaaaattggagaagttgtccggcaacacagtgaatcttataggcaatcccgcatggtcatgaggttatggaattatgttgccaccttttcaaacatgtctggggagcaactgcatgatctctatttgaaacttagtcaagaccaactggaaggtggagttggcccatctcatggtgccaatttcacatccattcctcccagcaagggaggtaactcaaatcaacttcatcctacaagaaaccataggccaaccaggtctctccagtacaattctgagtctttgcacaataatgagagctctggaagttctgaagcctggaagcgtcgacggagagcagaccctgataatcagtttgacacccagcctttgtatcaacctccaattatgacaaatggaaataggttgcaggaatctagtagttctgcaggtattcttggttggggtccagttgaaattagacggtatggtaatgagaggccaaaacgtgctgttcatcctagtcatttccctactgggcatggacctttgctgtagctgaaggaagtagatgatgcgaacaaccttgtccattttggcataaccgttcccagtg

SEQ ID NO: 269978 - DNA, 1626 bp, Zea mays
ttatcatgtttcgcgcaaagaaaaagatgggtcttgatctcttggtctttcagaagctgaacgctgtgggcaggcttgagaagaaagaatccaaaaaaggtggccccatatttgacaagaacgaactttcagctatcttgaggttcggtgcacaggaattgttcaaagaagacaagactgatgaagagaccaagaggaaccttgaaagtttggacattgatgaaattcttgagagagctgagaaagtctagacaaagggtggcgaaggggaggaaggaaatgagcttcttagcgctttcatggtcgcaaacttttccagtgtcgaagatgatgcaacgttctggagtaggttaatacagccagatcctgcagatatagttcaggaaactttggcacctcgtgctgcacgaaataaaaagagctatattgaagatcctcagcttgacaaaaataataacaggaaaagacgggcagttgaaacacaagaaaagccaaggaggcgttctggcagaactgtggaaacagttaattcagtaccattggttgatggagcagtagctcaagtacgagagtggtcttttggtaatattccaaagaaggatgcttctcgttttgtacgagcggtcaaaaaatttgggaatgcaacccagattggattaattgtggatgatgttggtggtgtacttgcgaaggtaccgcatgaagcgcagatagaactatttgatttgctggttgatggttgtcaggaagcagttaaggagaatacagacattaagggcacagttttggattttttcggcgtagctgtgaaggcctatgaattgctagctcgtgttgaagagcttcagttcttggcaaagcgaattgcacgttacaaagatccaatcaagcagtaccgcatccagctaccttataaaaagcctcagtggtcagcaagctgtggatggactgaaactgatgacgctagattgatggttggaattcattggtatggctacgggaattgggagaaaataaggttggatccaaagcttggcctgacaacaaaaattgcaccagcaacacttggagaaagggagacatttttaccacgtgctcccaacttggataaccgcgctagtgctctcctgcaaaaggagtatgctaagtttagcggtaagagcttaaaagtcaaaggaaacacccgccagacagtcaataacgacagtaatagtggagttcgatcaatgaggggccggcaaaaggatgtaccagaaaaagatgataataagccgaacaaagatgacattcagaagcgtaaggtaatagtggaagctgaagcaagagaagaaggtgaaatttctgaatcagaggcagagacaaagtatcgtctggacaaagaggagaagtggctcgaatggtgctctgaagttttaaatgaggaacaggaaactttgaagcgcctggacaggctgcagaatacaagtgtaaacctcccaaaggaaaaggttctttcaagaatccgcaagtatctcctgataattggggacaaaattggtgaagttgtccggcaacacagtgaatcttataggcaatcccgtaagtgtagtcgcacctcccgcatgaccatgaggttatggaattatg

SEQ ID NO: 269979 - DNA, 515 bp, Zea mays
ggacgccgcgcttcggagtccgtcttcctcacggcctgcgcagaatcgcaggagacgggaaaaatcccgctgatccgctcggtcttcgcccgtcggctcgctctaggcaccggctccgacactgcctggcgatttcccccgtgcgacacccggcgatctgagcgcgtgactcagctgcccgccgccgggctccttctccgcgccagctatcgtcccctccccgagggtcgacggccgtgccctgctcgagagctctgccgccgtcgaaaccacgggctcgtggtaacttgttgtcgtcggagggatccccgatggccgcggaggcagatcagaaagtcgtggtgcacgtgcggtccacgggcgatgcgccgatcctgaagcaatccaaattcaagatttcaggacgagataagcttctgaaggtcatagagtttcttcgtcgacaactgcatcaggatacactggtagcaacataattgttgattctgagaatttaatctgcgacattggaattt

SEQ ID NO: 269980 - DNA, 422 bp, Zea mays
gtataatgtaaatggtaatctgtctcatgctgtagctacaattgactcagactcagatgaagttaacgggagaggcaatggctgcaacggtgtgggaaaagaaatagatgaagttagcgctgctattggacaggactggaccaggaaaagcatggatcagtgcactattgcgtacacatagaaggaactaacgattagtattgagcgtggagtgaaacccaaaatcacatgggtatcaagaggcccgctaggtgaagcagctgtctcaaatggctgtcttgtcacaaagatacagatgaagaagtgctaactcactggagaaataactgcgtttgaggaattctcaatcaccataccgccaaaatctgctttgctatttccgtgccagcgggcaatcagcattgatgcttcaggttgtcagg

SEQ ID NO: 269981 - DNA, 695 bp, Zea mays
  unsure (1)..(695): unsure at all n locations
gccgacaacgccggcgctgagtacctccgaggtctgggcctggccggccgcaccgacccggacagcttccgggcctgcgtaccgctcgccacgcacgcggacatggagccctacattgcgcgcatcgccgacgagggcgacacctnccacgtcctcaccgccacgcccgtcacctccatctccctcagctccggcacgacgcaagggaagcgcaagtacctgctgttcaatgacgacctcttcaagtgcgctatgcagacaggccagactagcttcgctttcaggaacagggctttccccgtggaagacggaaagtcgctgcagttcatttacgccagccggcaattcaagaccaagggcgggctcacggcgacggcggcgaccaccaacgtgtaccgtcacagggacttcaaggcccacatgcggcacacccagtcggagtgctgcagccccagcgaggtgctcttctgcccggacttcgccgagtccctctactgccacctcctctgcggcctggtcctcgccgacgacgtccgcacggtgtccgccaccttcgcccacagcctcgtgctcgccttccggacattcgagcgggtgtgggaggagctgtgcgccgacatccgacacggcgctccgtcgccgacgcgggtcaccaacccggccgtccggcgggccgtgtcggcccttctcgtcgc

SEQ ID NO: 269982 - DNA, 743 bp, Zea mays
gcgtcgggcatggcggcgtccccgtccaaggaggcgtaccggaggctgctcgcggagagagctgctcaacaaccggacacggatcctcgctttcaggagcaagccgccggagcccgagaacgtttctttcgccgacacgacttcctccaacctgcaggccaagccggccaaacagcggcgccacattccccagtctgccgagaggaccctagacgcaccagagctagttgacgactactacctcaacttgcttgactggggaagcaacaacgtgctatccattgctttgggagacacggtgtacctgtgggatgcatcgagcggatccacatccgagcttgtgaccgtcggcgaggacagtggtcctgttacaagcgttagctgggctcctgatggtcggcacatggccgtcgggctcaactcgtctgacgtccagctctgggacaccagctccaaccgactgttgagaacactcagaggtgcgcatgaggcaagggtaggctcgctggcatggaacaacagcgtcttgaccaccggttgcatggacggcaagattgtgaacaatgacgtaaggatcagagaccacgtcgtgcagaggttccaggggcacagccaggaggtctgcgggctcaagtggtccggatcaaggcagcagctgggcaacggaagctaccacaaccttatgcacatttgggatgtgatgatggcattattcatgccatctggaggccgcaccaagggct

SEQ ID NO: 269983 - DNA, 1735 bp, Zea mays
attctgaagacatttgcgtttgaaatcactcttggaagaaagatcgatttgctgcctgagtgtcaaacattggtagatgaattgtcagcttcacattcgacggacttgcagcaacgggcatacgagctacaggctttactaggcttggacaaaactgctgttgaaagtgttatgcccgcagatgcaagctgtgaagacattgaggtcgacagaagcctctcatttctaaacagttatgtgcagcaagccttggaaaatggtgcgtccccttacattccagagagtgaacgctctggtgttataagtgtcggcagctacagaagccaagaacaacaggaaacatctgcccatactcttagatttgaggcctatgagatgcctaaaccttcgttgccactagcaacttcacaaaccagcatgtccacaccacctactgatctggttccagttccagaggcaggctactacaaggaagacaatcaaacatcaatgtctcaaccaccaagtgatgcaatttctggtgagtttggtgtcaaacttcgccttgatggtgttcaaaagaaatggggaaggccaacatattcttcttctacaccctcaagctcgatctctagtcaaccaacacccaatggggcctctcattctgatgggggagggccaagttcacagccacgggagtcctcatacggttcgaagagacagcagggcacggaagtttcagcagaaaagcaacggctggctgcttcgctttttggttcggcagcagctaaagctgacaggaaagcacaagcttctcgaaagacagcgaaggacagtccctcaactgagaaagtagctaccactaatgtggctgcccagtctgttaaggagcaagtaatccctgctgcaccaccgcctgatctgctggatctgggtgatgagcctgtttcatcgagtccaccgtcggctgaccctttctcacagctagaggggctccttggaccagcatcggctgccccggtgctttctggaactccggctaccagcacttccaaagcaccaggccttctgtcaatcttctcagatgatgtaccaaccggagtgactagtgtgtccaccgatcccactctaggtgatgttaattcgatgggctcccgcaaaggagcagctgcagtggcttcaatgaagggcccgagcctccaagatgccttgcaaaaggatgcggctgcacgacaagtaggagtgacaccaacagtgaacaaccccaatcttttcaaggacttgctaggctgaaggggacagtagggcacaccatatgctctgtgtggcctctttgggtacgtggagttcgtctccgacatggttcgatcaccgaaacgacgccgaactcgctgtttgatcagcgtaggctggggttttagggttacaagggctaatatttgtttgagagtcacaagacacgacctatctccttccaattgtggtttgtggagatttgtggatggttgcgggtattttttttcctttacgctcttgtaattttgtcctgagactggtgtacatgtgtctacatgatgtgtaatttgtacatgaagaccatggtccgtccagaagcgtatgccgtcgtctttttgttcattcatgtaggaggggcatgctcatctgtgctttcagagtttcccatatatgttgattaatataacaattgatgtcattctctggaacttgggtgaaataaaaaaaatggtacgtgcgc

SEQ ID NO: 269984 - DNA, 714 bp, Zea mays
ctcagttcagcatcatagttcttgatgatatcgaaaggttactggagtatgtagccattggaccacgtttttcaaacttgatctctcaaactcttctggtcctcctcaagagggttcctcctaagggaaaaaacctgcttgtcgttggaacaacaagcgaggttggcttcctagaatctgttggaatgtgtgacgtgttctctgtgacataccatgtccccaagctgaaaaaggaggatgcgaaaaaggtattgcatcatcttgatgtgttcgatgacggggaccttgatgcagcagcagaagcactggacgatatgccaatcaagaagctgtacacgcttgttgagatggctgctcaggggccaaccggaggaagtgcagaagcaatttatgccggagaagacaagatagatatcaaccatttcttcagcatcttaagtgatattatccgttactgagcccgcatggatcctaggtatccagtgggaggttatttgcacctgtgcttcatcaccccttgtggcatccttacagcgtgttaagagtggtttgatgtgttgtttttgtttggtgcgcctactagagctgttggatttgaccagaggcgaattccacgatatagcgttttttgtattgtatgacgatgtttctacagttgataataggatccagctatagacctccgaaaagaaattaatttcattctccttttac

SEQ ID NO: 269985 - DNA, 509 bp, Zea mays
  unsure (1)..(509): unsure at all n locations
ccatgttcccaaactgaaaaaggaggatgccaaaaaggtattgcatcatcttcatgtgttcgatgacggagatcttgacgcagcagcagaagcactggacgatatgccaatcaagaagttgtacacacttgttgagatggctgctcaggggccaaccggaggaagtgctgaagcgatttatgccggagagaagatagatatcaaccatttctttagcatcttgagtgatattatccgttactaagcccgcatggagccgaaatgaaccctataagtatccagtaggagtttgtttgcacccgtgcttcatcaaccatttctgtagattggtttgatctttgatgtgttgtttttgtttgatgcacctactagagctgttggattagatcagaggcgaattacacgatatatcatttttgtattgtatggcgatgtttatacagtgcttaatgggatccagctttacacctcanaaaaggaaatgcagatggatgcggggttaccatact

SEQ ID NO: 269986 - DNA, 437 bp, Zea mays
cccacgcgtccgcccacgcgtccgcccatctgcgcacccgcaagcctattcgccgcacctcctcaggtgaccgggaagatgatgccgttgagccaaaccgacttctcgccgtcgcagttcacctcctcccagaatgccgccgccgactccaccacgccttccaagatgcgcggcgcgtccagcaccatgccgctcaccgtgaagcaggtcgtcgacgcgcagcagttctggcacgggcgagaagggcgctccgttcatcgtcaatggcgtcgagatggctaacattcgacttgtggggatggtcaatgccaaggtggagcggacgaccgatgtgaccttcacgctcgacgatggcaccggccgcctcgatttcatcagatgggtgaatgatgctttagattctattgaaactgctgctattcacaatggtatgtaca

SEQ ID NO: 269987 - DNA, 641 bp, Zea mays
cctcgcgtccgcccacgcgtccgcgcgtctgccagtgcgcctgtccaccccggtcgcggtcatcgcagacaattggggcgggtgctttgacgacggcgagcagtaccgcactaggccatccgtcgtcgtcgacaactggggcggattcttctatggcgaggacgtcgctccgtcagacaaccccacgagattcgtcctccccgttgcctccaccgacgagcccagcatcgacaccgcgccggcccgcgccaactctggagccccggatgactccgtgtttgtgaccgccgaatcctccggctacgaggaaccctccggctacgacgagatggatgctcgactcgacctgcgcttcgccaggctgcagcagctgcaagctgaggaggtggacgagccgtaccgtgacgcggtgagcccactgcctcctctacccgtcgtttacgagccgtaccgcgaggcaagccatccgcctcccgtccacgacgacgttgcgggggtggtgtccacgggctcggatgatgacctcgacctgcagcagatcgccaaggagccgtccgtgtcgtctccgccgcgtcacagctcgagagacgccgtccgaggtccttgcccttgtccactgtataaccagctaactattccca

SEQ ID NO: 269988 - DNA, 1227 bp, Zea mays
tcgagccgagtggtcacgctatgctaccgtccaccagaattgttacttggtgccactgagtatagtgtaggtgttgatttgtggagtgctggatgcattcttgcagagctcctgtatggaaagcccataatgcctgggcgcactgaggtggaacagttgcacaagattttcaagctatgtggttccccttctgaggagtactggaagaagtctaaattgccacacgcaacaatattcaaacctcaacaaccctataaacgttgcatcagggagacatttaaagattttcctacatcggctctgccattggttgaaactctgcttgcaattgatccagctgagcgacaaactgcctcagctgcattacacagtgattttttttcaaccgagccttatgcttgtaacccttcaagtctgccaacatatccaccaagcaaggagatggatgccaagttaagagacgaggaggctagaagactacgagcggctgcaaaggccaagggagaacagaaaaggactcgaccacgtgatcgatctcggagggctggaccagcaccagaagctaatgcagagattcaagcaaacttagaccagaggcgacgaatgataactcatgcaaatgcaaagagtaaaagtgagaagtttcctcctccgcatcaggatggaggtacgggtaatccgcttggatcctatcatcatatggagcctatgttcgagcaccaggatgcttccttcagtacagtagtccccatagagaaggggacctcacaaacatggtccgggccgttgtttgatccagcagctctcgggcagtcgaggcggaagaagcaaactaccctagatgctaaggctgctgcttactcaaagcagctccaaaaggaaaagggagggatacgagcccgataacaaaatgtcgttttcatggcctacagatgaattttcttgttttgttcctctggtggttggaaacaggcaacaatgcgctgctgtagggtgaagtctcccggattgtgtacatgtcatgtggtagcgtttccaagtactgtttagatgcttctgaacaagctgccgtcacccggacgggactttaggggtttgagactcgtatttgtgctctttatggcaattcagttgcccatgtgtatatatggagcaattctttcttgtgtatgtaaagagacggcgggagctttgacttcttaataatgaatcaagtgtgatggcgag

SEQ ID NO: 269989 - DNA, 561 bp, Zea mays
agttcgagcaccaggatgcttccttcagtacagtagtccccatagagaaggggacctcacaaacatggtccgggccgttgtttgatccagcagctctcgggcagtcgaggcggaagaagcaaactaccctagatgctaaggctgctgcttactcaaagcagctccaaaaggaaaagggagggatacgagcccgataacaaaatgtcgttttcctggtgagcatgtggagggaccgtgggaaaggttcatcgcctacggatgaattttcttgttttgttcctctggtggttggaaacaggcaacaatgcgctgctgtagggtgaagtcttccggattgtgtacatgtcatgtggtagcgtttccaagtactgtttagatgcttctgaacaagctgccgtcacccggacgggactttaggggtttgagactcgtatttgtgctctttatggcaattcagttgcccatgtgtatatatggagcaattctttcttgtgtatgtacagagacggcggtagctttgatttcttaataatgaatcaagtgtgatggcgaccttcctcc

SEQ ID NO: 269990 - DNA, 519 bp, Zea mays
ttgaaagcccataatgcctgggcgcactgaggtggaacagttgcacaagattttcaagctatgtggttccccttctgaggagtactggaagaagtctaaattgccacacgcaacaatattcaaacctcaacaaccctataaacgttgcatcagggagacatttaaagattttcctacatcggctctgccattggttgaaactctgcttgcaattgatccaactgagcgacaaaactgcctcagcttgcattacacagtgatgtatgttcctatcctatctcttctgttttgttagaaagaattttttaggtgcataatcagaaatgttactatgaagcaaagtatggtgctgcaggaaaacgatttaggtgtggaaaaaaagtatttgcttaaaaatgttaataaccagatatggagcagaactccgttggctaggtgaacatgtatggtttgtatggaagttctcaaattttagttatggattgaatatattgcagtctttgcaagtaagcaatatat

SEQ ID NO: 269991 - DNA, 557 bp, Zea mays
gaagatgtcgagggggttggtaaggtgctcgacaaggccaatccacacgagaagcttgtgacttggcatgggcatgcttcggcagcgagcttgttcatgaaatctgggatgcaggtgggggctgtcatggctctcgtggaagccgagaggcggatatctccaaagagcagtagaatcgcatacgctttcttactcaagacatatactgaactggggatgcatgctgaggccggacgcatttggagtgtctacaaatccaaagtgccgtcgtgcaacacgatgtacatgtcgaggctaagcgcgttactcaggacgaacgacactgatggggcggaagcgacactgaaagagtgggaaacggtgcctcttcgctatcatgatttcagattaatcaacgtaatggtcgatgcctactgcagagaaggtctcgtggagaaggcagtagctctcgtggatggcgccatcaagaaagggaggacaccttacgctaatacctggtataagttggctggtgggtttttcaaaactggtcaggtaccagaagcagtggacatgac

SEQ ID NO: 269992 - DNA, 685 bp, Zea mays
cggccgccggctcgagggcgccgtcacgtcaccaccaccaaccttggtagcagccgccgtccggtcatcaccaccaccttggtagccgccgccgaagcgcgccgcgggcgcgggcgctcgcgatggctaaccgcacggaccccctcgcgaagagcatccatgggacgaacccacaaaacctggtggagaagatcgtgcgctccaagatctatcagagcacctactggaaggagcaatgcttcggcctcaccgcagagacgctagtcgacaaggccatggagctcgaccacaccggcggaacctacggcggcaaccgcaagcccacccctttcctctgcctcgcgctcaagatgctgcagatccaaccagacaaggacatcgtagtcgagttcatcaagaacgaggattacaagtatgttcgtgttctcggggccttctacctgcgtctcactggcacaattgctgacgtctaccagtatcttgagccgctctacaacgactaccgcaagatcaggcacaagctcagcgatggacagttcacacttacccatgttgatgagttcattgatgagttgctgaccaaggattactcctgtgatacagccatgcctcgcatccagaaaagatgggttcttgaagcgtctggaactctagaaccgagaagaagtgcacttgatgacgattt

SEQ ID NO: 269993 - DNA, 1583 bp, Zea mays
gggtccgaccacgcgtccgagcaagcgtcccatcacaaggagaaggggaagggcggcgagggaagggctccgcgtcgtgtcccttctcttcctcctcctcctcctcctctctccaacaccccatccatcagcgctgccctccgcattgctcttgatcccatccagtacatcgattctccccccaagatcaaaggccggaggaggaagaaaggttagggagtcggccatgggatgcttttcatgctgctgtgtggcagatgacgacaacgttggcaggaggaagaagcatgacgatccctatgttcctatccctgctcatgtttataattttggacctagccggttcccagccccaacccctgtcatctccactggcagagctcagccaattgcagtaccggccattcatctggaagagctgaaggaaattacaaaaaacttcagcagtgatgccctcattggcgagggctcgtatgccagagtctattttggtgtgctgaaagatgggacgaaatctgcagtgaagaagcttgactccagcaaacagcctgatcaagaattccttgtgcaggtttcagctgtctcaagattgaagcatgagaatgttgtccaactcgtcggatactgcgccgaagggagcacccgcgtccttgcttatgagtatgcaactaggggatcattgcatgatatcctccatggtaaaaagggtgtcaaaggagcccagccagggccagtcctgtcatggatgcagcgagctaggattgccgtatgtgctgctcggggtctcgagttcctccacgagaaggccgatcctcgagtggtccaccgcgacatcaagtcaagcaacatactgctctttgaccatgatgttgcgaagatcggggacttcgacatctcaaaccaggcccctgacatggctgcgcgcctccactctactcgcgttcttggcacctttggctaccatgcaccagaatatgccatgactggacagcttagcacgaagagtgatgtctacagctttggagttgtgctgctggagcttttaaccggtcgcaagccagttgaccacacactgccccgtggccagcagagccttgtgacatgggctacaccgaggcttagtgaagacaaggtgaggcaatgcgtcgatccaaggctcggagacgaataccctccaaaggctgtagccaagatggctgctgtggccgccctctgcgtgcaatacgagggtgaattccgtcccaacatgagcatcgtcgtcaaggctctgaaccccttgctgcacagccggtctggcaaccgccctactgcctcgtcggcctcccacgctgccgcagcagcagagcgatccggactgtgatttctcatcgctgcgacaactttgggttcacgaaaaaggaccgtcttgtggagcgttggtgttgctgtgtcgtgactgccaacgccttggcgcagagaagagctttgccatgcagctgtgtattgtaaattgttttgtaagcgatgcgcctcctgatttgtgtgccctgtcatcatcctattctactctagaaaatggtgtacgatggatcatggatgatacc

SEQ ID NO: 269994 - DNA, 516 bp, Zea mays
agacacccacaaggactccgccgccggcaggacacaacacatctatcgcatagtcagcttaaaacatagtgatgatgcggtgacgcatccatcctccacgcttcttgtcttcgccttaattaatgattaattgttatgatcatgtcggccatccgaatgccgtatgtatgcatgcacatcgcgactaattaatccctgttgatttattactccgtgaaatgtactttctccgtacacacagcacactgctcttcggctaagatgaaactggtataaaccaatgttgcattctgcataaggcccctgacatggatgcgcgcctccactctactcgcgttcttggcacctttggctaccattcaccacaatatgccatgactggacagcttagcacgaagagtgatgtctacagctttggcgttgtgctgctggacccttttggtggtcgcaaatcacttgaccatagattgctccatagacaacagagctcgtgtgacatgggctacaccgaggctt

SEQ ID NO: 269995 - DNA, 604 bp, Zea mays
atctgcctcaacgtggacatcaacagtagtagtacagcatttgttggcagcagctgatagatatggactggtccgtctgcgtatcctgtgtgaatcaaagctctgtgatgaactgactcctgaaactgtcgcaacaactttagcccttgctgaacagcaccattgtgctgagctgaagtctgcatgtctagagttcattgctttgcgaggaaatttgggagctgttatggagacggaaggctttgattacctggaggatacatgcccgtccctactatctgacttgttagctactgtggcagtcgtggacgacgatcttgcatcccttaaccgaaaaaggggagtcagcgggaaccaagtcatggctctagtgggaagcgttgaaaggcgcacccggaggaagctttagtagctggcttccctagagggagactgtagttgacaacgatttgatttggacgctggtagctgtgaataatatcgtatccagatgattttttttttttttttgcagaagccagaagctggaaattttttgaattgaatgcctttttttttgctgtttgggacccaaacgtaccgttctagcgtttagactgttttc

SEQ ID NO: 269996 - DNA, 554 bp, Zea mays
cgggcaagtcacaactcactagtcaccagtaactttaccaatccgcgccggtggtaaccctgccttcggcggcggctagccggtatccagtgtgcgcactccctctatctccctcttggcgacgactgggcggccgtcgctgctgccctacgccgtcttcgggctcttcgttgtcgacgagcgccacaaggttcctaccatttttaagaaaaaagatcaatggaggcagctttgtcattctccaaggacagcccaccaatttcgataatttgtgctgcaaagattgtgggtctacccctaaccatcaatcatagcctcgctgctggctcggcacccaccctacagtttgcttctggagaatcactccatggtgtcaacccaatcatcctctacattgctagaggtgcatcaattgcctccttatctggaaagaatgatattgagtttgggcatgttgttgaatggcttgaatatgcccccaccttcctttcaggctctgaatttgaaaatgcatgcttatttgttgatggattcttggcctcccggacctttct

SEQ ID NO: 269997 - DNA, 1080 bp, Zea mays
cccactccactccggcagaggggcggtgccggtgaggcgatccgtcggtggtgtcggagcggtggaggaggatggccgacgtgcagggagacaacgaagcagctctggaggacgacgctttccccgacgacgggcccttagatacggaggagggaggtggaggagaacccatcagcggaggcgacgaggaagaggaggaggacgtcgacggcctcgccagcttccttgagtcggagatcctctccggatccagcgacgaggatcctattgacgagcagcggcagcagaaggaggaaggtgatgctgcgaagaataagcggaagcagggttcaggatcggacggggatggctgcagcggcagcgagggggagcagacgaagagggcgaggagggaggagaagaggaggcaggcgaaagggaaagccgtggcgcctcagatcgacacgggcttgttcagcaacgtcccccctgagctgttcctgcagatcttcaagttcctctcctcggaggacctcatctcctgcgctctagtctgccgcttcatgaatgctgccgcgtccgacgagaccctctggcgccgcctgtactgcatgaggtggggactggcctccaatgccaaattcagggagtgcgcttggaagaacctctacatacagagagatagagaggatatggttgaatttgtgaggaatactcctacagagttcaaggagtactatattcagatgcaggctgcaaaaaggagtcaagctccccgtccgtcagaagtcaacgacgacaaggttatgcttgataagacagtagctgaccaggtatctagttggaaaaacagccgggggcttactgatgaagctgtcaaggggcactcttgttctggaaatacatgctcgtacacccagattggtgatgcttacatttgtgagaagactggtcgtgtcacggtagtacatatttcctctatctgtttatgtgtaattagatcatgcataaaatgtcttggttacttttgctttcagtttgtgatgacgcttgtcgtgaatttgtcttggaccaatctagtgggctgcttctttgtacgat

SEQ ID NO: 269998 - DNA, 871 bp, Zea mays
aatatttaaaaaatgaagcaaattaaattctcctggctataaacctttcaattcatcagacataggcctcatagcatgaatataagaaagaaagccttgtccaacaagagggagagtggaaaattgatgaggtgttacagaattcacatcaccccatcaaaaatatactgcttggggcctgtggaagaagtttcaaattacgtggttaagtaccattctgagtatgcttctgactttgctcgagttacctttgctgatgaagattggagcaagctttctcccaatgcattgtcagctagaactgaacaaggtttcttttctaaacccttgaaaactggcctgtatcatcgtattctctccattctaaaagaaggattttgcattggccccaaaaaatatgaatttttggccttttcagcaagccagcttcgtggtaattctgtttggatgtttgcttcaaatagttctttgactgctgagaatataaggaggtggatgggccactttgaagatatccgttcagtctccaagtgtgcagctagaatgggccaactgtttagctccgccaggcaaacatttgaagtctcatcatatgatgtcgaagtaattccagatattgaagtcacaactgatggcactaaatacatattttcagatggtatcgggaagatttctactagatttgccagacaggttgccaaattaattggcttagaccctgctcatcctccttctgcttttcaaataaggtatgggggctataaaggagtcatcactattgaccctacttcctttttcaatctttctctgcgacctagtatgaagaagtttgaatcgaagagcactatgctgaacattacaaattggagta

SEQ ID NO: 269999 - DNA, 506 bp, Zea mays
gtgataatcgcgaggtcacgagatatggcggacggcaagcgaggggaggattcggccgtggcgttgaagacctcgccgtcgtcggcggtgatggctgggggtttacgcggcgtgagcaaccctctggaggagtggagcgggcgcgtgaaggcgattgaggccgggttccgcgcgtggatggcgaagcaacccatccaaatcgaggccgcggtgaccacggccgtgggggcggtgcagggcggggctctgggtgggctcatgggctcgctcacagctgacggcgggtcgccgttccccatcccgcagccgccgcccaacgccaacccagaggccatggcgtcgttcaagcaggcccaggctttagctggtggacccttggtgccagcccggaactttgcagtcatgaccggcgcaaacgcaggcatatcttgtgtcatgagaaggatacgagggaaagaggatatccagggcaatatggcagctgttttcggtctggcgcttttttt

SEQ ID NO: 270000 - DNA, 1394 bp, Zea mays
taagaatctgctggaggatagacttcagcatgcaaatggagctgttgttttggcaacgattaaagtttttctccatttgacaatgtctatgactgatgtccatcaacaggtttatgaacgtattaaagcacccttgcttactctggtgggtgctgtcagtcccgaacagtcggactctgtgctatgccatctacatcttctggtgatgcgtgctccaatgttattttcctcggactataaaagcttctactgccaatttagtgatccttcatatgtgaagaagttgaaacttgagatgttgactgctatagcaaatgaaagcaacacatatgagattgtcactgaactatgtgaatatgctggaaatgttgatgtaccaattgcaagagagtctatccgggcagttggaaaaatagcactgcagcagtatgatgttaatgccattgtggacaggcttctacaatttcttgaaatggataaggattatgtgactgctgaaactctagtcttggtgaaagatcttctcagaaaatatcctcaatggagtcatgattgtatagcagttgtgggaaatatcagcagcaaaaacattcaggagccaaaaggaaaagcagctctcatatggatgttgggagaatattcacaggacatgcatgatgctccatacatccttgaaagtcttgttgaaaactgggatgaagagcactctcctgaggttcgcttgcatctcctgacagcagtgatgaaatgtttctttaaaagacccccagagacacagaaggcactaggggatacattagcagctggtctatctgacacccatcaggatgttcatgacagagcacttttttactacaggcttttgcaatacagtcctaatgtagcagaacgtgtagtaaaccctcccaagcaagctgtctctgtatttgcagacacacagagcagtgaaatcaaagatcggatattcgatgagttcaacagtctatcagttgtatatcagaagccatcgtacatgtttacagataaggagcatcgcggaccatttgagtactcagaggatcttacaggcttgactgaggatccagaaaatgtaatttctgcccaaagatatcaagaaaatgataatgatcttttgctaagtacttcagataaagaggacaatggtacaagagccagcaatggttcttccacctctacatacaatgctccttccgatttgattagtccttcattgataagctcgcaagcaccagctgaaacttcactagtaaatactggtgggacatattcctcacaatcaaacttcagtctcgatgaccttcttggccttagcgttactgaagctcctgctttaccacaaccaacactggcccttaactcaaagcctgtgctag

SEQ ID NO: 270001 - DNA, 426 bp, Zea mays
ccacgggggctgtgctgtgctgaagggcgtccgtagcgtggaaaaaaaactactggtgctactggtgtcagatctgctagcgctcgctccgctcctctccaccacgccggcgacggcagccggtgaccagtacctacatgtccagcctgaggtcgctagccagcgcactgatcggggacgccgcgaggcttcactcggccactggctctgccggggaggagcctgacagggtctacggcgccgtgctctgccgggcggactccgctggtgctaactacaggcgccgccggggtgcccttggcgccatcgacggcgacggccactcaccttgcgcgctccacagcgacgtgacccgctactccgagctgtaccatctgcgtttctctgacaggaactttcctcgcaacttcaagaacgcgccgaaat

SEQ ID NO: 270002 - DNA, 443 bp, Zea mays
gctatatgaacagtgccatacagtgtctggtgcacacaccacagtttacgaaagacttctgtgaagattatcatcgcgaaataaatcggcaaaatccactgggtaatgtgggtgaacttgcattagcttttggtgagctattgagaaaactctgggctcctggaggacgtgcccctgtttcacctagaccattcaaaatgaagctttcccggtttgcatctcagttcagtggatacaaccagcatgattcacaggagctgttggcgttcctattggatggactccatgaagaattgaatcgtgtgaagcatagaccttacataaattcaggggatgctgatggaagatcagatgaagaagttgcagatgaatattgggcaaatcatattgccagaaataattcaatcattgttgatgtatgccaggggcagtacaagtccact

SEQ ID NO: 270003 - DNA, 1154 bp, Zea mays
cggacgcgtgggtttacgcgtgggcggacgcgtgggcggacgcgtgggcggacgggcgattgcacgcccgtgacttcgaccccgacgtcccttcccaactcgtccaccgccgccgcccgccgtcgcaaaactcgccagcggccagccatggggtacacgaaggaccagcttctcgcgcacctccagaagcttaagattgatttcacgtgctacgatcacccggttgtgttgacagtggaggaacaggccaaacatgttggccatttaggaggtgctttgagcaaaaatttactcttgaaggacaagaagcatcggttatatgttatttctgcccttgctggcaccaaagttgacatgaaaattctttcccaacgtcttgggttgggaaaaggtggtctacgaatggctcctgaggaaaatcttctagaagtacttcaggtgcccttagggtgtgttactccttttgctttaataaacgagtctgcgagtgctgtttcacttttacttgatcaaggtttcaagtctaaacagagctgctacttccatccactgacaaatgatgtgacaattgctcttagctcaagtaatctggacaagtttctcatctccattgggaagcaaccagcatatgtggacttggaggctgcaccagctgtgggtaaggataaccctcctgatctagcacatttggttccaactggcgtgccaaattcttcagaacaaccagttgagaacacggcacctactaatgttcttaaagagacagaagtgaaggctaaacccaaagttcagagcaagggtgcagaaacatcgagcaaagtagataaacctactatcgataccagtgttgacaaatttgtaaatgacgtgttcgagatcatctccccattgttcttgtctgaggcattgaagaaattggacattaagaaggaagatctttctttgatcttagaaggcctcaggggacgggcagatccagatttgaagagtatagcgatgactctgaagaatgggtggtatactctttagttttcactgctattataattctatgcttatatctttttttatattgttattttatttatttttcttttttttatattttattttttatatttttatattttttatttaattttttttattttttt

SEQ ID NO: 270004 - DNA, 576 bp, Zea mays
cagtgttaacaaatttgtaaatgacgtgttcgagatcatctccccattgttcttgtctgaggcattgaagaaatgggacattaagaaggaagatctttctttgatcttagaaggcctcaggggacgggcagatccagatttgaagagtatagcgatgactctgaagaatgcatcatatacctcagggtttcacgctggttacaaaaccatgcagaatcgtggtctaaacggctgacccacttaggtcccagtctctcaattgcatggtttgatacaagaaacaggaatctgattttacatatttgtatgctgttgaatgaagtcaacatattatgtttgatgctctcgttctatctatgacgtatgctcttttttgtgtatgtgtggatttgcctttttctctctctgagagatcaatgggaaattttcaccataccgtgcagtgttccatagaatatgtatttacaagattctgctactcgctctaccaacatcagagtttcagtgtatcagatacatcacatagaaatgtcttcggcgcgttccagaaattactgttaacatggtatatccccc

SEQ ID NO: 270005 - DNA, 768 bp, Zea mays
tcctgaattattaccgtctgtttgtcctcgtctccctccgctgtccgattgtgcgctgtcgcagcctctgccctctcccagcccgctcctccatctccggtgagacgcgaattgaatcgcatcgaatccatgggcagctcctcgaataccaacacgagcggcggggccagcgacaaggaggagaagaagaaggaggacaagatcaaaggcaaggactcgtcggggccatccttcaaggagaacgaaagggtcctcgcctaccacggccccctcctctacgaggccaaggttcaaaggatcgaaaaccatgaagatgaatggcgctactttgtccattatctcggttggaataagaactgggatgaatgggttgcaaatgaccgcttgttggaattgacggaggaaaacgtgcgcaaacaacaagagcttgataagaatcaggtagttgacaaaacaatgaagtctggacggtcaacacagcataaaccaaaagtctccaatgcggatgcaaaagctgataaagatgacactaagagtctcatttcagtgaaggggaagaaacgtaaaagtcagcttgggactgagattcaggacaaggaaaaaagatcatcacatagtctactagtgttgcagtttcctttgccactgaagaagcaacttgtggatgattgggagtttgttacgcagatggtaagcttgtgaagctaccacgatcacctactgttgatgatattctaaagaagtacttggaacaccgggcaaagaagg

SEQ ID NO: 270006 - DNA, 667 bp, Zea mays
tattgcttcagttaccaatgatgacccagcgtaagttcaatcctacgaaggatccttgttcagtaatatgggatgtattatgggatgatttggtaacagtggagatgacccatgggaaaaaagatcctccagattcctggccttctaagcttattttatacttgaaagctaaccttcaaattcgaaggaaattgttcgtttggtcaagtgtaatcgaggttcagatcaagcatctatcatttactcggcaattgacaaagcttataaagcttacggtccaaactcgttgaaggaattcttgagatggaaggtaccaaggccatatgcccctcgcaatagtagtggccgaagtatccaagacttatcatttggttaaaaggtcaacacaaatgcacactttagtgttaaacacagtagaatcttaggatgaaggtattttaggttgacacttttggttaccaggcaaatgatatattctacatatacactataggtatcagaggataggtactttgccttcatgtaaatagatatattttaggaggcgccggtattcatgtaaatgtgaacatctctgttataaagaaaaaaaataataatgcaaattatgcaagattcattgctgctgtcttgttgcaatgtttaatgtgttctcttgcgattgtct

SEQ ID NO: 270007 - DNA, 434 bp, Zea mays
tctcggacgcgtggggccaagttttcttcgcgtccttcacccgcgacgagcacccaccaggcatagagagagatggcaagtctaaccggcctcaccgcgaaccctaatccgaacaagtcattcgagatactgccgaacccaggtgactctgtctccagcctcagctttagtcccaagagtaatctgcttgtggcaacctcctgggataaccaggtgaggtgctgggagattgttggtggtaacagtcagccaaaggcgtccatttctcatgatcagccggttctctgctcggcttggaaggatgatggaactactgtcttctctggaggctgtgacaagcaggtcaaaatgtggcctcttctgtcaggtgggcagcctcagacggttgctatgcatgatgcccctgtcaaggaggtcgcctggattcctcagat

SEQ ID NO: 270008 - DNA, 1983 bp, Zea mays
tcggctctttggatccttggggaggacttcctttttttatcaaagggtggaagcaccattgctaccattaaacaatgtcttggtgatctgccattctacactgtctctgatgaaggggaggtaactgattccaccaattcagcccaggcggtggtgaacactgtcactgtatcttccaggaggcctgttgttcttgcggatggcacttatgccacacagagcgccgctaccgagaccatttcagccccatcagttgctcatgggtcattagcatctaccctgaacctcagatcactcattttgtcaggtgatttcttcctggctgctgttgttgcatgtaccctgaccaagcttgtgttgaggctggaagaagtgcagccatccaaggttgaatcaaacaaagcttgcactggagcattgctgatcatgacatcgattctgcagctgggccagtcttcttaccttccccacccgattgataatgattcatatgacaggattgtgctgtgtgtgagattgctttgcaatactggtgatgatgtcaggaagatttggttgcagtcatgcagacagagctttgcgaaaatgcttgctgagaagcagttcagggagacagaggagatgaaggcaaaggcacagatctctcatgcccagccagatgatcttattgatttttaccacctgaagagcaggaagggcatgagccagcttgagttggaagatgaggtgcatgatgatttgaaggctgcaactggtgggtttaccaaggatgcagatgatgcaaacaagctcaaccgcattcttcaattgactgggttcagtgatcctgtgtatgctgaagcatttgtaacagttcaccattatgacattgtacttgatgttactgtaattaatcgcacaaaggagacacttcagaacttgtgcttggaattggctacaatgggagacctcaaacttgttgatcgccctcagaactacaccttggctcctgagtctagcaaacagatccgtgctaatatcaaggtttcatcaacagagacgggggttatatttggcaacatagtttacgagacttcaaatgtgatggaacgatcagtggttgtcctaaatgatattcacatcgacatcatggattacatctcacctgctacgtgtgctgatgttactttccggaacatgtgggcagaatttgaatgggaaaataaggtggctgtgaatactgtgattcaggatgagaaggaattcttgaatcacattatcaagtcaacgaacatgaaatgtctgacaccaccgtctgcactggatggggaatgtggtttccttgctgctaacctttatgcaaagagtgtgtttggcgaggacgctttggtgaacatcagcattgagaagcaacatgacggcaagctcagtggctacattcgaataaggagcaagacccagggaattgcactcagcttaggggacaagatcactctcaagcagaaaggtggcagttaactgtgacaagtaatcgcagttgtatcatcatttttcgcatttaggaaatccacgtgccagagagagaccagtgccgtggcattgaactgagtataaatgctttttgtacaaaaggatcgatcaaggagagagataagaggacagttatgaggaagtcacgatgttgtcggtcgaagatatatgttgctgtagtaacgaagctgttccaaacttccttgaaatagttgtgaagtttatgttgatttctcgacaggtagttcaattgtgatcttgtactactattacgaatccctcttgttttaatgttttatttgcctttttattttagttgtctggacttggaaacagaagcttggaggcggtgttgtcacgttatttttgtagagatgaattggagctcattttctgttacgtatagatttgccaattgtgttaggttatttttagcgtggttatttgagaaatgaggtagtccattatcttctc

SEQ ID NO: 270009 - DNA, 707 bp, Zea mays
gttggccgctgggagaaggagcagttccgctctctcgtttgggtggacgacgaggaagaggtggccaacgcccacagcaacaggcgaccagcccgcgaagacgtggcaccaggataggtgctcctgtcctgagcttcaaatccccaccccgcggccaagctgttacttgcgctgcggccttagcatgaggtggccgctggcgatctcgactcgccgccgcccccatcctccgtttcgtccttcttcgtcgtcctctacacgattcctgggacattttcatcgaggcaagtcacactcgatactgttgagatattttctactcatgaatggtttggcaaaccaacagtcgttttcgggtgcaatggagagaataaaacagatttgccagatgtgagggaggtgcacacgctatatacctttaagggtgaagaatcatggcagagcttccagaaaagaaatgcaagcgatgtggtttgtatgaggaggacacaattacacctgatgatgtctttgatgaatgggagatgtgttcgagtgatttcaagggtgggaaatacacccggtttaaggaaggccagttcaatgcaacattcctatgtccaaactgcactgcctcaactggacatggaaaccgtgaacctagcgaagatttggaaactaagaagacatctgttgtggtcatcataatagttagtgttcttgcatca

SEQ ID NO: 270010 - DNA, 675 bp, Zea mays
tcgactccacgcgtccgtctcaaatcaactcaagtcatcgagtccacagctcgcgcgcgcagccgccagccaatcgctctccctccggcctccgcagcccaaaaccacctcggccccacttcttctctccgtcgccccctgtttgcccaacccatggcgacccacgccagcgacaatggcagcgggcacgcggagtggcggttcgctcgggcggcgaaggagggtgcgctggccgtggccggggacaagatgagcatccgggcggcgcggttcaagatcagcgcgagcgtggacgggcgcgacccgcggcccgtgctgccgcttgcgcacggggacccctcggtgttcccggccttccgcaccgccgccgaggccgaggacgccgtggccgccgcgctccggacgggcaagttcaactgctaccccgccggcgtcggcctccccgaagcccgccgtgctctggcggagcacctgtcaagtgatcttccatacaagctgtcaactgatgacatcttcctcaccgctggaggcactcaagccattgaggttgtcgtctcagtccttgcccaaccgggcgccaacatattgctcccaagaccaggctatccaaattatgaggcgcgtgcaggactgcacaacttacaagttcgccatttcgatctgattcctgagaga

SEQ ID NO: 270011 - DNA, 492 bp, Zea mays
gcgtccggccagcggagaaactgtttatttcagcaaatcatatgttagttacactcggcgattatgatgctattcatgtgagacgtggtgatctattgaaaaatcggaaagatagatttggtgttgaacggagccttcatcctcatctagacagagacacccgacctgagtacattagaaaaagaattgcacaatggattccaccaggtcgaacattattcattgcatcaaatgaaagaactccaggcttcttttcccctctgtcagacaggtacaagttagcgtactcgtccaacttcagtagcatattggagccaataattgagaataactatcagttattcatggtagagaggctaatgatgcaaggagcaaagacatttatcaagacaatgcgagaatttgggagtgatttaaccctttgtgatgatcccaaaaagaacaccaaagtctggcaaaagccagtatatacagatgattgacgttagttgg

SEQ ID NO: 270012 - DNA, 646 bp, Zea mays
  unsure (1)..(646): unsure at all n locations
tctctggcctgtgggtgattgggtgtgggcgtgtgggcctaaaatgggagggcgcatccaagcccgacccgtatttgccagattcgagtgaactggatccaactaaacaaacaattttccccatttgccattcccgacgagcaccttcaccgtctcctcccacctcgcgtggcacgccatggctttctccccgcgctcgccgtggtcgcgtgccaagaaaaccgacgtctactcaaccttcgttgtccacggcgatgacgatgaagacgacgcccgcggcggcaggggcccctccacgcgggcggaggaagacgaggaggaagacccctcctcgctgcctccgcttcttcagcggctccccaaggactttggcggcgcctcgttcgacgatgacgaggacccctactcctccgaccctgacgatgcttccatctctgccacggcggccttcaagagcggcgtcccggcctccgctcgatctccgttcctggatctgcggcgctcaagcccccgcgctaccgatgacgacccgtactctaccttcgtcgttcattccaccacacgctcggggagaacctnctncagccctcgcgggtccgcctccggcacattcatccgtcgctcgggtggctcgtctagccctcgc

SEQ ID NO: 270013 - DNA, 1046 bp, Zea mays
gagtccctctagagtcgatcctcacgcgtccccctctctcccccaaagttccgttccgggccggtccgttcagttcctctgccgcacgtcaaaaccctcaacctcccacgcggctcgctcgctcgctcgctgggtgggtcggccatggctccccccgcgctcggatctcatgtggccgccgcagcctcggtgcccgtcggctcggactctctcgccaagggcgcggcgctcaagggtaacagcactctaaactttcggaccaaaccatgcatcgggatggcattagcgtggaaaaacaggacccagcaaccacggcctctgaacaaggtactctgcatgtctgttcaacaagcaagcagaagcaaggttgctgtcatgcccttcgagttggagaaggcaaaggagccaccgctccacctctacaaaccaaaggagccttacacggccacgatcgtctctgtcgagaggcttgtaggacccagagctcctggcgaaacatgccacgttgtcattgatcatggcggcaatgttccgtactgggaaggacagagttacggcgtcattcctcctggagagaatccaaaaaaacctggatctcccaatactgttaggctctattcaatcgcttctactaggtatggtgattcttttgatggaaagacagcaagcttatgtgttcgtcgtgctgtttattatgatcctgaatctggagaggaagacccctcaaagagaggtgtctgcagtaacttcctgtgtggctcaaaaccaggggacaaagttcagatcacaggcccctcgggcaaaataatgcttcttcctgaggatgatccaaatgcgactcatatcatgattgccacggggactggtgttgctccctaccgtggctacctacgtcgcatgttcatgggaagatgtccccacttttaaatttgggggtctggcttggctctttcttgggggtgccaactcttgccgccttctctatgatgaaaagttcacaaactacctttagcagtatccagaccatttcaggtacgacaaaacgc

SEQ ID NO: 270014 - DNA, 427 bp, Zea mays
cggacaaagcccgtccctctcctactcctcccccaaagttccgttcagttccctcccgcaggtcaaaaccctcaacctcccacgcggctcgctgggtgggtcggtcggccatggctccccccgcgctcggatctcaggtggccgccgcagcctcggttcccgtcggctcggactctctcgctaagggcgcggcgctcaagggtaacagcactctaaactttcggaccaaaccatgcatcggaatggcattagcatggaaaaacaggacccagcaaccacggcgtctgaacaaggtactctgcatgtctgttcaacaagcaagcaggagcaaggttgctgtcatgcccgtcgagttggagaaggcaaaggagccactgctccacctgtacaaaccaaaggagccttacacggccacgatcgtcactgt

SEQ ID NO: 270015 - DNA, 1255 bp, Zea mays
acactgtcaaatccttgctgtggcaactgctcaacggcctcaactatcttcacagtaactggattatacatcgagatctaaagccttccaacatactggtcatgggagaaggagatgaacatggaattataaagatagccgattttggacttgctaggatatatcaagctccactgaaaccattatgtgataatggggttgttgtaactatctggtatcgtgctcctgagctgttacttggggggaaacactacaccagtgctgtcgatatgtgggcagttggttgcatttttgctgaactgcttacactgaaacctctattccaaggtgtggaagcaaaaaatcctccgaacccattccagcttgatcaactcgacaagatttttaaggtcttaggccaccctacagttgaaaagtggcctacccttgccaatcttccatggtggcaaaacgaccaccaacacattcaaggacataagtatgagaacccaggtttccataacattgttcatttaccaccaaagagtcctgcatttgatcttctctcaaaaatgcttgagtatgatccccgaaagcgtataacagctgcacaagctttggagcatgaatactttcggatggacccactacctggacgaaacgcgcttttaccatcccagccaggggagaaaattgtacagtatcctattcgtccagtagatactacaacagattttgaaggaacaacaagccttcaaccaactcaaccgccatcagggaacgctcctcctggaggtcaatctgtagcaagacccatgccacgacaaatgccgcagcaacctatggttggggggattccaagagtggcaggtggagtaaccatggctgccttcaacgctgcctcacaggctggcatggctgggctaaatcctggtaacatgcctatgcagagaggcgcaggtggtcagtctcatccgcaccagttgagaaggaaggcggatcaagggatggggatgcagaaccctgggtatcctcagcagaagagacgattctgacgctatcaagatggagccatctgctgtatatcaggtgtttgaaacacgttgcctgtgtaagctgctgtagttttgttatcagcatccgaatgccaatgctggcacctgtaaaacacattaatcagtcgagagtccagataccagttgtccttatgggttatgatctaagctgctcgaatttggctgatttggtatgcaacagaaaggtcttgcttttgctc

SEQ ID NO: 270016 - DNA, 1470 bp, Zea mays
cccacgcgtccttctccagatgcccagttcttcgtcagccccttctccggcaacgagcacctaacaggctgaaaaaaaatcattgatacacgtacgccgtcagaggctgcagtatattctgtgagaatggcatggggtcaaggtgctaagaggtccatactagggcttctctttcgttctcagcaccaaactgctcgggcatactcttcttcagcattccagactcaccaattgagcactcatgttccccaagatggagtgtttattaggagattcggctctgaggtgtcttcttcagagcaaatgaaccttattaagcaactcagacaaagaacgagtgctccaatcaaagatgtcaaggcctctctagttacctgcaactgggatattgaggctgcacagaaggacctaaggaagagaggtgttgctcttgctgccaaaaagtcttcacgcactgctgctgaaggtttgctagctatcgcacaagatgacaaaagggctgctgtagttgagcttaactgtgaaactgatttcgtagcaagaaatgatgttttccagtacctggcttcatcattggcaaagatggctttatctgctcagggtcctggtgaattgttcatgccttttggtcctgagcttttagagaacatgcctatcaatctagatcaccctaagctcagtgtggaaacaactgtccaaagtgccgttacagaagttgctgcaatggttggggagaatgtgaaactcagaagaggcttcatgctttccacaactgcacatggtgttgtttcatcttatatgcatacctgccctcagccaggtatgggtcgtatagctggattggtcacactagaaacagaagacagcagtactcttcttgattctgtcaaaagtgttgggtcatctattgcgatgcatattgttgcggcaaagccattattcttatcaaaagaactggtttctgcttcggctttagaaaatgagcgtgaaatacttcgaactcaggcccaaagttcagggaaatcccaaatggctatggataagatggtggaaggacgattgaggaagtactttgaggaagttgtgctcatggagcaaaaatatgttttaaatgacagcactaacattaagaccgtgctgaatgacttgtcgaaagaggttggttctaaggtaacaatcggtaacttcatcagaatggaggttggcgaagggattgagagaactgaagccgctgatggtttagaggttgctggtggcgctatgtagattccaggcagagatggttcgaacggtgggctaggacggagataatgtttaggcaggcactagcgttctgggacctgcgaggctgcctagttgatttgtcagttcctagcttgtttggttacagttttggttgaaccctctctgattgaattacagttcgtgtggacgtataaaaaatcgaaatagagtgggaattgccccttg

SEQ ID NO: 270017 - DNA, 485 bp, Zea mays
cccacgcgttcgcccacgcgtccgcccacgcgtccgcccacgcgttcgcccaggcgtgggcccacgcgtccgcggacgcgtgggaagaagactgacggatcctcccggtgaacggacgtgtcgccaagagagtggatccacgaccgagactacaccccggtaatcgtggtcatgattttcattgtgctgctcacagtcgcgttcgtgcttttctcccattattgcgtcggggaccgggtcgttcatgcgcactggttatgactttgaaggctatgtgatgcgcaagtatcgccgtttgcgtcgacagtggccttcccaagcgggcacatcatgatataaagaatacaaaccctcatgaggttagggttgaggtcgcgaaagaggtgcatgcttcatagccctctactcctgctcttccttttgctacgcctgctccttctactgctccttaccatgttgctacgtgagcaagagcatattaagtt

SEQ ID NO: 270018 - DNA, 516 bp, Zea mays
tcgactccacgcgtcctcttataaattgcctcactcaggaccggaggacttacatacgcctggaccggtgcataaagaactggagctctatcgccctagcaaaactagcccaagagaaaggatatcttagtcagagcgtattcactatacatctctcagatccttctactaagggaagtgtcaccctgctgacttatcacagcaaacgcttatacactgctgtactatggcatagggcgctggcatttctagaggctttacaagtttttaaggatgatgacatactattgcactcaacttcctggtcccaattatcactgtcgtgagggctcaaaactggccactctcccaccaccaaataatgcacttgaagtgctcctgattaactttcctcgtggagtgctttttggttgtggcgatctgatattttcatctcacatgatcttcaccctagttttcgtgcgcacgtaccataaatatggctcaaacagttaattaagccctttcttggctgat

SEQ ID NO: 270019 - DNA, 1367 bp, Zea mays
caatttcgagcctgggagctcgcctggaagcctgcccaagctgcagctcaacccctacagctggtcaaaggtctcgaacatcatgtacctagactctcctgccggtgtggggatgtcgtactcgctgaacagatcggattatgtaacaggtgacctgaaaaccgcagctgacgcccacaaattcctgtcgaagtggttcgagttgtaccccgagtttcagttgaacccgttctacatctcgggggagtcgtacgcaggggtctacatccccacgatcactgacgaagtgggtaaaggcattgagagaggtgtgaagccaagaatcaatttcaagggctatctgattggcaatccgttaactgacgtggactacgatttcaattccttcgtgccatttgcgcatgggatgggcctcatctcaaccgacatgtatgaggatgtcaaagcgtcctgccgaggcacattcttcggcgccgtggatgatctgtgccaggagaagatcgacagagtgcgctgggaactgaaggacctgaacaagtacaacatccttgcgccttgctaccatcatcccgaaatccaagaggtagagttcagcaacagcagcttgccgcggagtttcagaaggctaggagagacggacaggccgtttccagtgaggaagcggatgtcggggcgttcttggccgctccgtcttgctctcaaggacggccacgtgcccatgtggccaggccttggtggcagatcacttccctgcacgagtgatgaagtcgctacggcgtggctggacgacgaagatgttagagccgcaattcatgccaaaccaaaaagctcaattggatcatgggaactgtacactgcaagaatagacttcacccatgatacagggacgatggtgagctatcacaagaagtttacagctttgggatatcgcgtgctaatctacagcggagaccatgacctgtgtattccttaccctggtaccgaagcgtgggtgaaatcaataggctaccaagttactgatagatggcggccatggtacttcggagaccaagttgccggatatacagaaggatacggtcacaatcttaccttcctcactataaagggagccggacatgctgtgcccgagtacaagcccaaggaggctctcgcgttctacagtcgctggctggcaggagagaagttctaagaagaccaggaccattacagatttcacaagccttcagttattcgtcgctcatcggacaattactgtgtgcatggactcagagtagatgtatgcagatcagatccgttcactcggctgtgtaagcctctgtatacagctgaagagatttttaacgtcggatcttcacctctactcaatt

SEQ ID NO: 270020 - DNA, 535 bp, Zea mays
cccacgcgtccgcccacgcgtccgcggacgcgtgggggcttcatcatcaactgagatgtggttcagatatgaccatctctgacactactacatctgaagtcccggcccgggaggtacctccggctgtactgggggtgcaggaagaagaagagattgtatccgccgctgtgcccgtttctgtgcacgatgtggctcctttgcagcaggcacagataggttaagatgtaccaaaacatgttgaaaaggaggtcgaggttccccaatggctgaagagtcttgctggtgaggaagcacaggactggagagcctttgtccgcactaggatcaatgggcatactgataggacctatactcacaagcaataccgccaccagttccgttccaaagctgaagtcaaactgtttgtggattccaatgggatgacaacgggcatatttaaaggaagaaatcttccaaagaagaagatagccggtatggatgctcaacgggctggaacaagtgaatcttctgggagaagagcgtctgcctaccatgc

SEQ ID NO: 270021 - DNA, 523 bp, Zea mays
gtcaaaacgaaacgaagcatccacgttggtcgctcccacgctggcaatggccgccgccgcatctcccgccaccgccgccgccgtccgcgaagcggcgccggcccacagacaaattggaatccgtccgggtcatggtccggccccattccgtatcggcttcctcgccaaaccgtcctcccggtgggccgcgatccctgtgccgcctgggcctcgccgcgcggctccggcggcgtccgcggccagggagagggtcgcggaggaggaggagaggcccgtgtcggtggagctggaacccatcgccagcgagcagcagctggactgggtccttggggaggcgcggcagctccagctccccatcgtcctgctgtggatggcgagttggaacaggaaatgaatatatctgaagcctaagcttgaaaagtaggcaatagaaatattatccaagaattccgaatatacatgtatagatgtttaattgttttaccacaaaagacttgttaaccgtctctggagtaacaaagta

SEQ ID NO: 270022 - DNA, 460 bp, Zea mays
caccaatggacccgcagccgccaccgatttgccgggaggcgtgggagggctgcagcgtcctcctcgacatcaatgacggcgaccgcctagccttcttccgcctcacccccggcgcgacggtgaagattgggaacaagacttgctcactgaagccgctcgtgggacgcccctttggctccctattccgcctcggcgccggcggactcgttccctgcgccgccgcggacgccacatctcgtgatcataacacgccagatgatgccaatggacaaacgcaggatgaaaccagagacaataggtctctggttgataataatacagctcaaaatttatctagcgatgacatagaggcaatgaagagggatggtgcaactggtgacgagattgtagaagctttaatagcaaacagctcaacatttggaaataaaactgtcttctcacaggagaagtacaagttaaa

SEQ ID NO: 270023 - DNA, 1086 bp, Zea mays
tcttcatcgacgcggatctcctcatcctgaggaacatcgatttcctgttcgcgctgccggagatcacggcgacggggaacaacgcgacgctcttcaactcgggagtgatggtcatcgagccttcgaactgcacgttccggctactgatggagcacatcgacgagataacgtcgtacaacggcggggaccaggggtacctgaacgagatattcacgtggtggcaccggatcccgaagcacatgaacttcctgaagcatttctgggagggcgacgaggacgaagtgaaggcgaagaagactcggctgttcggcgccaacccaccgatcctctacgttctccactacctggggcggaagccgtggctgtgcttccgggactacgactgcaactggaacgtggagatcctgcgggagttcgcgagcgacgtcgcgcacgcccgctggtggaaggtgcacaaccggatgcccaggaagctccagagctactgccttctgaggtcgagcctgaaggccgggctggagtgggagcggcggcaggccgagaaggcgaacttcacggacgggcattggaagcggaacgtaacggacccgaggctgaagacctgcttcgagaagttctgcttctgggagagcatgctgtggcactggggcgagaagagcaagagcaactcgacgacgacgcggaacagcgccgtgccggcaacgacaacgacaacgcctgctgctgcgagcctgtcgagctcgtgagacttgtagatagctctgtctgccgagagtagtataccagtaccagatacagaacttctgaagctctccatacatacatagcgacagctctgtaaaggtagctatgtaggccttttccttccccgaatgactatataccttcgtcttcgttcgccgtcacagctgcaggcagctccctccctcccgctggtttccgatggttaacaattcctttttttttgccaataattcatcagtataggatgtccggctatgttgcctcaattcccagtggctattgctttgctgaagtaaaaaaaaaaaaaaaaaaaaaaaaaaaaaaaaaaaaaagggcggccgc

SEQ ID NO: 270024 - DNA, 421 bp, Zea mays
atctgttcctgctgcattagtatcatcaggattatgctcgatagcaattggaacagatggtggaggttcagttagaattccatctgcactttgtggtattgttggtttcaagacaacatatggtaggacagatatgactggggtactatgtgactctgggactgttgaagttgcttctcctcttacatcatcagttgacgatgctatactagtgtattctgcaatagcaggttcaagacctgtggttatagcttacacttagaccatcgccactatgtgtcccaaatttggtgtctccagaaaacagcaatatcctgggatcagtgtaattaggaaagtatacacagtggtttaatgatgtttctggtcatgagatatcgggtacatgtgacgatgcacttaatactttttgcagtgcttt

SEQ ID NO: 270025 - DNA, 878 bp, Zea mays
cccacgcgtccggttgtctccagtttccatgcagagcagaaaagatcagctagcgagagaagcaatggcgtcggctcctgcgttctgcgtcgcgctgctgctgctgctggcttccgccgctgccgtccaagcggtgccgccccaggccggcacgtcgtccacctgcagcactgacctcctccgcctcctcccctgcctgcccttcatcgagggcaccgccaccgtgccggcggacacctgttgcgccaacctgggcagcatggtgcacgacgagccgcagtgcctctgccaggctctcagcaaccccagcacggcccccgtcgccgtcaacatgacgcgcgtgatggccatgcctcggctctgccgcctcgacctcccgcccgccaccggcgcctgcgcagttgccggtcttcttccccatggaccatcaccgccgctgccaccgccgccgccgccaccggcggtcactccacacgcaagcgccaactccagtgctccagcgaccctcaccacgccagcgacgccaacgccgacgacaccacgtatgataccgtcaccgtcggtgagcagccagacgccgccgcgatacagccgggggtccaagatgatagctgacggcttctctgtcactcttggtttcgtggcatttgtgtcagtcctagctttctgaagaattgggcggcattcgtcaggcagttagaattatggcttagagaaacttagttgcttttccgatgggcgcttgtttcctagagagacaacccgcccaggaaaaaatactgtatgtccatcccgggtggtcttgttcggctacaacatttgggttttcaggtgcaaaaaacaaaaacaccaacctttttcaccgggcggagcccaac

SEQ ID NO: 270026 - DNA, 2345 bp, Zea mays
tcgccccccccctcgcgctctcttctgctctctctctctcacacaaggtctcaccctccctgtatccctctgaccctctcggcggcgactgggcgacagccgctgtctcactacgcctggtgcccaggtatctctgccggcgacgagcacctgccagctgcaggggtatgggaatggaggtcgttggtgctgaagcagcaccagcagagatcaaagtatctgatgatgtgaatctattccaagagaaggaaagcaaagcaactgctaaagaacgtgaggaggcagctgtttttggttcagagacaactaccaatgtcactgatctggcacctccaacggatgtgaaggatgagtggcctgaacctaagcaaacttatgccttctacttcatcaaggtccgctcatttgaggatcctaaactgagggcaaaactcgagcaagctgacaaagaattccagaagaagatccaagctcgttctaaacttattgaggcagtaagagccaagaaggcagagcgttccagtattatcgcagagttgaagccattgagcgctgagaacaagcaatataatggagttgtgaatgagaagataaaggagatggagcctcttcggaacagcttgggcaagtttcgtgaggaaaacaatgccatgagagcacagagtgcaggtttatgctcttctatcgaagaccttgacctaacgatcaagatgctgaatgatcgcatcgtacatgagagcatacctttatctgaggagaagcgtctggtgaaagaaattaaagaccttgaaaaaaccagatcgaaagtcatctctaatgctgctaacagggctaaactgcaaggtacagtggttgaaaaagaggctatacaggaccaggtcaaaatcatcggggagggcattgatggaataaagaaggaaagacaggcagtaagatctaagattaaggtcctggaggatgagctaaaacttgttgatgctgagattggattgcttcaagaagatttagatgcagcaactgccagaaaggataaggcatatgaatcgttgcaagaattgagagcagtgcgtgatgcaaaaaacgcatccttcatgcataaccgtacagttttagccaaagctagggattattctttgaggaatatgctgacagaattgcaagagctccacaaaactgaggtcgacaagttcatgacccaatggtgtgaaagtaaggccttcagagaggactacgagaagagaatcctcacatccctaaatagccgacagctgactcgagatggtcggatgaggaatcctgatgagaagcccatatttatcgagtcacaggcgccagctccagagccagagccgttccctgtaaaattgcctgcaaaacaagtcaaggaagtgcctgctcctcaggcagataatgcttccaagattgaagctccttcaaaaggacctgtccagttgcacaaggcaaaagctgctcttgatgctgatgatgattatgaggccgagcccccgaaggagaaggcaaagcctacggaggctgatgtggctaagttgaaagagatgaagaggcaggaggagattgagaagaacaagcttgccttggagaggaagaagaggcaggctgagaagcaggcagcaaaagctgtggcccgagcacagaaggaagctgagaagaagctgaagaaagaggagaagaaagccaagaagaaatctggtgcagctgacactgatgagccctcagaatcggatgccaagtctgacgaagccatggaagccccagcggaacaagaagtggccccagcttccaccacggtaaagaaagaacagaaggagagtgcccggtacaggaatgtggtcagcaaggccccgccacccaaggcgatcctgaagaggaagaaggcgcagtcctactggtcatgggctggcccagctgccatggtggctgccgtgctggttgccctcctcgcggtgctgggatactaccagtactacctcccagcgaatgccagcaactgagtgggcgaggtcggtgcactcgcggccaggccattcatttatgacgtggagaccaattttgcaggtgagaagaaagagtgcaaggtctgcttgagacgtgaaggaccagaggagagtcttgttcgctttcgatgttgttagttggagccgaagatacagttgtttttggttgcgactttgctagatctctctctatatactgcgactgatatatcccgtgtacttttgaagtgatgcgtatattgacatctggaataacaatgcctttcaatttcattatctcaataaaaaaaaaaaaaaaaaaaaaaaaaaaaaaaaaaaaaagggcggccg

SEQ ID NO: 270027 - DNA, 455 bp, Zea mays
aggctcagtcctactggtcatgggctggcccagctgccatggtggctgctgtgctagttgccctcctcgcggtgctgggatactaccagtactactacctcccagcgaataccagcaactgagtggatgaggcccgtgtactcccccccgccaggccatttgatgatgtggagaccaattttgcaggtgagaagaaagagtgcatggtctgcttttgagacgtgaaggatcggagaaaagtcctgttcattttcgatgttagtttatatatatttcgtggagcctaagatacagttggttttggttgcgactttgctagatctcgctctctctatatatactgcgactgatatatcccatgtaattttgacgtgaagcatatattgacatctggaataatgcctttcgctttaggtatctcaaaaataaaaaaaaaaaaaaaaacaaaaaagaaa

SEQ ID NO: 270028 - DNA, 480 bp, Zea mays
ctcatctagaactttagatgatgtgttctgtatagaaaacctgaaactactttagcatcataaggccattaggtattgacaactagggcatctatatccttctcccccttttttgctctataaacttcacctagttgtattgggcgcgtacgtgttggtgttgtcataaacacaatttcctcctatatgtcagttcaatgctcaggtgatcagtgactgagtgtaagccttgaatcaatagggggaaggcatgttcattactacatttaacggtcaggcttgcgagtctttagattatctacttggatcaaatgattcttgtaccatttgccatttgtaaccaactgtgttctggaatccttttatcatattacgtagaatatttagacaattctatcttctcattggtcaaaaaaaaaaaaaaaattaaatataattaattaaaatataaaatttttaaattaaaaaaggggcggccgc

SEQ ID NO: 270029 - DNA, 1338 bp, Zea mays
cttttgtccatctgttctatgttgtttgtgccattcaggttttggtaacatgctacggagaggaaacttttgatcgatcaaacttcaatgactgccttcttaatgatgtttgcaagacaatgtcaggatatgatattgccagagactattttgtatccaaatatatcgatccctcttgtcatccaaaagacatggtccgcagattaacatatccatatcttcggagatgtgcattgctttgggagctgctaagatcttctgccacatcacccttgtatgacggttccaatatttgggaaggatcacatctttacttgagtaatagcacacaagacggcagttcttcactggcaatggaactggccgggttacgagaattggaagacctgtttcagattcagtcgctggatctgattctccaagatgaatctgtacatatgcttgccttaaaatggtctcaacatttctgtgaagagtacaatccccgtaaatatagaggcactctcttttctacccctgcagttccatttaggctgatgcaactaccagatgtgtaccaggttctcctagaaagatatatcaagatgcaatgccctgattgtggctcagtgcctgatgaaccggcactatgtttgctatgtggcaaactatgttcgcctagttggaaaccatgctgcaggactgggaaatgccagaatcatgcattgcaatgtggtgctggtattggcatatttcttctagtgaggaaaacaacaatcctgttgcagcgatctgctcgtctaacattttggccgtctctataccttgatgcttttggagaggaggataatgaaatgcacagaggaaaacctttatatctaagtcaagaaagatacacatccctgacgtatctggtggcatctcatagccttgaccgaacttctgaagttcttcggcaaacaacgattggcttttatggatctgattgagcccatttttcaaggaacaatgtgttcaaaggatcttgcggatgtgcatattttgggaactgtactgcaacttggtgtttgatcttctccggtggtaacgagagcgttacctcaaccaaggtggtgtagattctgcaggctcgccacccgtcgttgctctatggcgcactggccctctgctgccctcttgtgcctaatgtacagtctacattcttttctttctttattatggacggtgctcacaaaatggatgaccttggaagttgtaacgctgtacgatcgactgcatgatctgtatgcacagacatagcgtcggactggtgtagtttgtcagtatgaaatgcaggcatcaggtgccatttcgtcgtcc

SEQ ID NO: 270030 - DNA, 736 bp, Zea mays
tgctgatgttgagcgcttaagtgcattgtacaactcacttaaagagaagtatgcttggtcatctgctgtgaagcgtatccctcttgattttctggaaggtgagaagttccaggaggcagcagacaactatgtcagacctctattaacaaagggtgtgccctcactattttccgatttaagcccactgtatgaacatcctggcaaggcaaacatactggagcagttatttcttaaactagaagattcaattagggattctggatgctttcctggatgtccacagaaggagcctccttccacactgttgtggaccctgtttttgatttctcagcactacgacagaagagggcaatatgacattgctttgaataaaatcgatgaggctatctcacatacaccgactgtcatcgatctatattcagtaaagggaaagatattgcaacatgctggaaatttcacagcagcagccgcattagcagatgaagctaggtccatggatcttgctgatcgttatttaaacagcgagtgtgttatgcagatgcttcaggctgaccaggttggccttgccgagaagactgctgtcttgtttacaaaagatggtgatcaacacaataatcttcatgacatgcagtgcatgtggtatgagcttgcttctggggagagctattaccgtcaaggtgatcttggccgggccctaaaaaatttcttggcagttgaaaagcattacgctgatatg

SEQ ID NO: 270031 - DNA, 474 bp, Zea mays
gccccatcaacgaatcctatttctctgtgaagatgatggaggggatcattgcaacatcgtacaatgaaggcgacaagttctatatcgacccaatgaaattgctgccgctctcacgcttcctgccacaaccaaagggacgatctcaaggagcacctataggtggtgggcgtggtggaggaaggggttttgggcgaggccgtggtggtggctctttccgcggtggaagaggaccaccaagggggggtggtcgaggtccaaggggtggaggccgtggcggttttagagggcgaggaaggttctaggtgcagtttgagtttgatgatgttttccccttgaagcatcatagctgcacaattggaaacttccatgttattgtaaccagatatgtttaaggtagcagagcactttatctgtggaacttggattctcaactgacacaaacggcttgtacctgtttcgtttccaatggcacat

SEQ ID NO: 270032 - DNA, 1083 bp, Zea mays
gtttgggatacacgcgaaaatcctcagagatagatgggatcgtatgcctattataactccctgcgtacccatgcatgaattcaagctataatgctgccacaagcacactgaggggtatgttggaacaattccagtttggtaatagaatttgccaggaaattgaaatgaataagaccagctggcctgctctgtttgagccttttcaattttttgaagcatacaagaattatctacaggttgacatcattgctgaggatgatgaagaccttaggctttggaaaggatgggttgaatctcgattgcggcaactaactttgaagattgaacgtgatacatatggaatgctacagtgtcatccttacccacatgaatatgcagacccttctaggcagtgtgctcattgtgctttcttcatgggcttgtcaaggaaagaaggtgtgaaaatacaggaaggacaacagttcgatattcgaggaacggtggatgagttcaggcatgaaatcaacatgtatatgttctggaagcctgggatggagttagctgtttctcatgttcgtaggaagcaggtcccagcttatgtgtttccagagggttataaaagacctcgcccttcaagacatgtgaaccatcagtctgataaaaatgacactgaagatggcacagcgaccaggtctccagacagtcaactgaagagaaagcatgattctgttggaactgatgatatacttataaatcatgttttcaaatagagtctattttattctttttttatttgtaatcttattacctttttattttattttattttatatatgttctatttttattttttttcttttattatttttttattaattttcttatattctttatcttatcatttttttattatttattctatatatattttattggtttttttgttcacattgtttttttaaatataatattttatattatatttctttatttatatatatatttcatttatttatttattttttttttctatttcatctattattcatttttatttcttttatatttatcttatttatattatctatatattatatttaatat

SEQ ID NO: 270033 - DNA, 393 bp, Zea mays
  unsure (1)..(393): unsure at all n locations
gncctagcttatgtgtttccagagggttatttaagatttcgcccttcaagacatgtgaaccgtcaggctgataaaaatgacactgaagatggcacaacgaccaggtctccagacagtcaactgaagagtaagcatgattctggtggaactgatgatatcaggtatgcaaagaggtcatcgaccagcccagttcatccggaaaattcacctcaatctggaagcactggcgatgagactagatgtaacaaccaaataaaaagggctcctagcgatgcaagtggtggcagtccggcttcaccttaggcatcagagagaagcccagatactattctgtctgcccctaagtgcacgacaacaggagcagtgggttctggtgatgcaattagtaagcat

SEQ ID NO: 270034 - DNA, 444 bp, Zea mays
ctaaaacaatcatcggagttccccgacgccgattggcgacagcgaagccgacacccctctccgacgccgccacagcctggggcaagtcacggacggagatctctgcggagctacccgtttggctgctttccttcgtattggttactagtctgttgctatggggaaatccaaagacaagaagggttcgcgggaagcgaaggaggacaagaaattggcgcttggggtgaagaggaagcagctgaagaggaagaaggacagagtgttggaatgtgccgtcgatagcgaacccgctgccgggcatggcgttaaagaagaaaaagaattgacaaggagaaagaaaatttcattggtgaagcagaagaagaaaaattagcatgccaatgttaagagtaaccatgatacggcagatgctgggtggaatcactgtcagacagtaaatatgat

SEQ ID NO: 270035 - DNA, 389 bp, Zea mays
cggacctgtctttccatgatctaggagccgtcgccgtcgagagctgaggcgaagcaacatagaagacgaggggggagtgcgactcctcgtgacttgtgagggagagaagccatggcggagatggagccgagcatcgggaaccatatggccgaagaccaaccgactccggccgcctccactgccgaggaggccgctatggatgcagataccagcggcgagcggcgtaacgctgccgcgttggtgggcctgctccgcgggttcctcgccgtgcaacagcgccgggccgaggcctactccacgctacgaaggggtttttctgagtatatggcttatggaggtgaattggcctatcaacaactgtgtggcaatattacagcggagttcaatga

SEQ ID NO: 270036 - DNA, 402 bp, Zea mays
gtactacacagaacagtagcaccgggctccgggcaccagggcaggcgaattcctaggttcgctggagcctggtccgagggatggccgccgcctcgctcgcgttggcgagtcctctccggcttctcctccgcgtccgtcacccgcgcggagccatcgccgtcccgtgctacttcatctcgcgaggacggtatagcaccgccattgccgttgcagcagcgagggatttggcggtgaaaggaagcgtggacaggaattcagcggaggaagtcaggaacattctgaatatggcagaaagggcttcccaacgaagaaatgtttttcacaccaattttcttactccacctatagtgaaagaggctatgctggcacttgaaaagtttgcagataccaaagcagtagctc

SEQ ID NO: 270037 - DNA, 2046 bp, Zea mays
gttcagtccacaggcattgaggcatctggtgaccaatcgctatctgtggcatcactggaccaatctatgttggttgccgatgcttcttactcacaagaaatttctcatgcagaagagaacaactccactgcagttgaagcaacactgtcttccgaaagacacttggaaattgtggaggatgacaatcatttcaacgacgggttattgcagaactcaagcgcttaccaggctcaagtgcattcctatgttgataatgaagttgggatttccaatgttgatgcagaatcagcttcgatgaacttccagcatttaagcctgcagaatgaagatatagctgcaaccaagtctgctgaggataaccctgcggttatactccctgatcatctacaagctgcaaatgcagattgtgctcatttgagctttggtagttttgaatctggtgccttctttggcttgctttcatcaaaggtcccaaaaggcagtttggaggacgaccaggaatcaagattactatgatgacgatgctctaaattcttcagaaaatgtggatgttgagacaagaattggtaatatggataacattgatggaccttcagtttcagaatctgatgcactgaggcagggtgccatagatgtgcctggtcttcaatatgacctgccatcagtttcaagtcatgcatattcaaacacaacacagccaagtacaatggaagaaccacaaggaaacacacaagcacaacccctttcccatttttctggcttactgcaagcaaatactctacccaattacttgttggggtcaaatcttacccctattcgggagtttgacttctcgcagttacttcagacacagtcagctacaaagtataacccatctgcggcacctaataatctgccagcaatctccatgcaagagactttaaaaccaggaggctttcccaacactcagtctacgcaacatgttcccaatacgagcattccgtcgggtcttcctctcccacaacaattgcctgtatactctcagccaactctgcctcttgggccttttaccagcctggttggctatccatatttgcctcagaactactacctaccatctgcggccttccagcaagcgtactcaagtaatgggcctttccatcaatctggtgctcctgctgtgcctggagctggtatgaagtattcgatgccacaatacaagagcagccctcctgcttcgaccctaccacaaccatcatcactctctggttacggagggttcggaagtgcaaataatatccctggaaatttcagcctaaatcagggtgctccctctgcgcctacaactttgggatttgatgaagctttaggcacacaattcaaacaccccaatcactatgcagctctacagcagagtgataattcggcaatgtggcttcatggaggcgctggttcaagaacagtttctgcagttccgcctggtaacttctatggtttccagggccagagtcagcatggtggcttccgccaggcacatcagccatctcagtacggtggtcttgggtatccaagcttctaccagtcgcagaccagtctgccacaggagcacccccagaaccccactgagggaagcttgaacaatccccagggggtaccatcccagccttcacaccagctctggcagcacatctactaaaccttctgtgctctccttggagatgcctctctacgctgccagcttacctgcaagcgagcagactagctgagcccaacagcaatgaagtgtgttgtttttctttctttcttttttttctccagctgtgtgttctggaactaaattaggctgtcgtggtttttacttgatagtgagtggtgttgcagaggtgctatcttgtaacggtaaagtcctaactcatctaacagatctgcttttcataccctgtaatgtgccgttttgttcttgatgcctagaagcttgaagcttctacgtgttgctgctactttcatacgcatgtatgtctatgaagctgaaatcctggtttgcggactgggtgtttggttcctacc

SEQ ID NO: 270038 - DNA, 783 bp, Zea mays
tggttcaactcaactgcagttaaagcaacagtgtcttccgaaagacacttggaaattgtggaggaggacaatcattacaacgatgggttattgcagaactgtgcttaccaggctcaagtgcactcctatgttgataatgaagttggggtttctaatgttgatgcagaatcagccgtggcaaactttcagcatttaagcctacagaatgaagatatagttgtaaccaaatctgaagataaccatgcggttatactccctgatcatctacaagctacaaatgcagactgtgctcatctgagctttggtagttttgaatctggtgccttctctggcttgttttcatcaaaggtcacaaaagacagtttggaggacaacgaggtgcatattccagatgaatccccatcagttaatctcgatgccaggaatcaagattactacgacacccgatgctctaaatttgtcagcaaatgaggatgttgagacaagaattggtactaacatggataacattgatggaccttcagtttcacagtctgatgtaccgaggcagggggccatagatgtgcctggtcttcaatatgacatgccatcagttccaagtcatgcatattcaagcacaacgcagccaagtaaaatggaagacccacaaggaaacacacaagcacaacccctttcccatttttctggcttactgcaagcaaatactctacccaattacttgttggggtcaaatcttacccctattcgggagtttgacttctcgcagttactttagacacagtc

SEQ ID NO: 270039 - DNA, 505 bp, Zea mays
tgggtacccaagcttctaccagtcgcagtcgcaggccagtctgccacaggagcacccccagaacctcaccgagggaagcttgaacaattcccagggcgtaccatcccagccatcgcaccatctctggcagcacagctactaaaccttctgtgctctcttgggagatgcctctctacgctgccaggttatctgcaagccttggcacgctgcgccgtgaagcgaacagactagctgaactgccgtcttgagcggtgctgagcagaggacggtccatccaacagcgatggagtgcttgtttttttccctttctttcccagttgtgttctgaaactaatttaagctgtcgcggtttttatttgatagtgagtggtgttgcaaaggtgctatcttgtaacggtgaagtcctaactcatctaacagatctgcttcccatacccctgtaatatgccattttgttcttgatgcctaaaaaaaaaaaaaaaaaaaaaaaaaaaaaaatataaaa

SEQ ID NO: 270040 - DNA, 1412 bp, Zea mays
atggtaaaccgcttcatcacaaggaaaatctgacgagtaggaccgaaaacccatcaagagtagtttatcagaatcacagtagttcttatgcacagcccggtgcaccaaagcgttaccagcctcagccttcagcccgagatggcttaaccgacaatggtatggaggctggcgaatttgcgagagaaccatccgccggttcttgtgtaactgccggttttaatggtgctggagggatgacgaggcaaacacatggtggctatgaaccagaaaggtcatacagaaattcagcagagaggtcttcgtcagagaaaaggattccccagagagagcatatcccctctgtggctgccggcagttcggatctgcgccataggctactgaagcaaagaaagtcctataataattcaaggtcggctgaagccctgggcaggcatgatacacatcttgaggatgagcgcaatgaccaacatcgtccgcgaggtgaacagcaggatggcctctcacggtctcgactgcatgatagaataagactacctggggagacagcgtttgacagtcttgggtcacggtcagaggagtgggatagagggtctagagccagattgtcgccaccaaaatcctcagatcttcgagggaggcttcatgaaaggctaaagggtagattgcgtgaggagataccgggtagcagtgcaaaaggtttggcagtgaaggcaagtagcagtgaggatactgaatcactgaactttgctggtccaaagagccttgcagagttgaaggcaaagaaaggtgtcggcaggtcaggagaagatgccgtcgtcaagggcttaggttcttctcgtatgacttcagaaatagtttggagcagggaggctgcttcgtttgaaggtccaaagcccctaagtgccatactgaagagaaaaagagagccagcttctgaaatccccgctgcccagcctggcatcacacaggaagcagataactacgccgcaggagctgaagaagaaatccaaaccctagcaaatgacacggttggggagaacatggaggggattggagaagaagaggaggaagaggaagctttccatcctgaagatgatgtggcgtacgacgataacgccaatgaagctgcagtggcccaagagctggatgagtatgaagacgcagatgcggcagcacaagactatgacgatgaagctgcagctgcccaagaggtggaggagcatcaagacggagaggcagcagcagaagactacgactatgaggaggcagacgtcaacgccgaggaagagaatgagtaccaggactaccaagacgaggacgacgacgatttggaggatggggacgaccattttgcaccaaaagtgagcgtgatgaatctctgatagccacagaaagcgggttattccccacaa

SEQ ID NO: 270041 - DNA, 1063 bp, Zea mays
cccacgcgtccgcccacgcgtcggcgaaatcccattccccttccccctcttcgtctccgtcggcggcgtcggaccgaacccgagcccggagccctaactaaccctaggaggcaggcggcggcggggatggtgtactacgcgctgttggtgggcgcggagctggatggcctcaccaacctgcagccccgccacggctgcgacgaccccaacttcccctactacctcaagctcaagtgcgagaactgcggggaggtcaccgccaagtccacctacgtcaccctcagcgagcaagtcgacctgcccaaaggacacggcgccgctcacctcgtccagaagtgcaagctttgtgggagagatggaacaattgtgatgattcctggtcaggggacaccacttactattgagcagagccagaaagaggagaagacttgtttgatggtgtttgactgcagaggctatgaacctgttgagttttcctttggcactggctggaaggctgaatctgtgcatgggactccttttgaaattgactgctctgaaggtgaattttctgagtatgatgagaagggagaatgccccgttgagctaggcaagctgcagtcaacattcaaagtggtgaagaagcatgagaggggtgggaagactagatttgtctagatcgagtgacttggaatctgacagatattggagttggcggtgtataaatggtagatttgggctgaaggtcatgcgtgatccgacctcctttttcttctatctgttgattctgtggatgccgtgaaccatgcgaagctttcggtgatagtgtccacaggagcattaccctgtaccgaaactgatctttataacttaccaccaatgctcgaacatgttgctggttgctggtatttttagcactgttctctctggctaatgggtctgaagacatctcaaggggatatgtggtgcaatctgagttctttaaagggcatttgcacttgtggatgttgattgtggtgcaaccttggcttgctataatttttagataccgtttagttgactagcattagcacgctcaaatgca

SEQ ID NO: 270042 - DNA, 860 bp, Zea mays
atagccgcacgcatggcgaaccgaagcgaaccaaaacgcccattccccttcgccctcttcgaccctagcaagaagacggcggcggagatggtgtactacgcgcttttggtgggcgcagagctggacggcctcaccaacctgcagcccagcggcggctgcgacgaccccagcttcccctactacctcaagctcaagtgcgagaactgcggggaggtcaccgccaagtccacctacgtcactctcagcgagcaagtcgacctgcccaagggacatggcaccgctcacctcgtccagaagtgcaagctttgtgggagagatggaacaattgtgatgattcctggtcaggggacgccacttactattgagcagagccaggaagaagagaagacttgcttgatggtgtttgactgcagaggctatgaaccttgtgaggtttcttttggagctggctggaaggctgagtctgtgcatgggactccttttgaaattgactgctctgaagatgaattttctgagtatgatgagaagggagaatgcccggttgagctaagcaagctgcagtcaacattcaaagtggtgaagaagcatgagaagggtggtaagacaagatttgtctagatccagtgacttggagtctgtcgggtattggaatcggaggtgtataaatggtacatttgggctaaaaggttgtgcgtaagacgtaccttctctgtctattgattttgtggatgccgtgaaccatgtgaagctttcagtgacagtgtccacagaggcattgccctggaccgattactattgccctgtggtctgaggtcatcggaaccgatctttttatcttctgctaatgcttgaacatgctg

SEQ ID NO: 270043 - DNA, 562 bp, Zea mays
gcggacaccgtcgttctcctcgcgtgcgagcgccgccactgcatcttcccatcgatctccgccgaccccgcatcttcccatacgagctgtgtttctccaagttcgctgctggccatatcgacgtcgtcatcctcgatccagacgagtgcgtgtgccatctccacgggtcttcgacagatttagcaagaatgtttggaagaggatctcctaggatgaacttgatccaagctgcaactatgaaaaaaatatcccccagatctactactaacaagcgcaagaagagaacatcaccaaaagttggtcgtcttagagcaaactggaatagtggactagaaaagggtttagttgaaattcttcaagatcacaacaatgattgctataagggtcaaaatgggtggtcatcggaagcatggaatagaattgtcaagttattccatgagaaattctcttatgtcacatttacaaaatgccaaatccaagatacagagaaagagttaaagcgagactacaaggctcttaaagaggccaggcaacaaagcggggtatcatgggatgagaggtt

SEQ ID NO: 270044 - DNA, 659 bp, Zea mays
  unsure (1)..(659): unsure at all n locations
ctccgctgaccccgcatcttcccatacgagctgtgtttctccaagttcgctgctggccatatcgacgtcgtcatcctcgatccagacgagtgtgtgtgctatctccacgggtcttcgacagatttagattgcattgtaccaaggataagaaaaatggataagcgaactaggaatagaagagaagaggaggacgaggagttaatgctctttcttttccctgctctttatctaattactaatggagggagagagaaaagagcaaggcatgcttctattctacctggcaaggagagacttaaagagattcttgaagggcacgagaagaactgtcttgtcgcattccgtatggagcctcgtatattcaaagatatagcaacatttcttagagaagaacacatcctatgtgacacaaggggtgttaccgtggaagaaaaactaggttgtgtgcgtgtgcgtttttctttctttcctcctgaacttgcaaagggcgctatgccacctgtgttcaaatgatacacaacatccaaagagaaagcatgaggaggaaacatgatgcactcctgcctggcaacagatcctncacatgtctgcactctctacatcattggacacactntattnctggcagatagtagttaagtttaatttatgttttcttt

SEQ ID NO: 270045 - DNA, 816 bp, Zea mays
gcttgttaatatgtgtaaatacatggggatccaaccttttgccccagaccactactggcgattcaggcttcggaggaaactacaggacattaagaatgatgataagatgattcaagctgagggtgtggagtctctttctgaatatgagcttcgacaagcatgtcgtgaggcgtgggcaccttggtttgttgtcaacagaggagatgcgtcaacagctcagagactggctggatctatcactcaatcattctgtgccatcgtctcttctaatactctcaagagcttttactgtatctggtaaaatgaaacctgaggaggccgttgtagcaaccttatcttccctgccagatgaagttgtcgatacagttgggactgtactgccttctgaagattctgtttcagagaggaagagaaaattggaatttctggagatgcacgaagagcttatcaaggaagaggagaaaaggcaagagaaagaagacaaggcaaaactggaggagccaaaggctactgaagaagatttggctttgaaggaaatgactgagcctactgttagggagaaagaggaactaaagaaagcaaaaacccacgataagaaagagcagctttgtaatatcagtcaagcattggctgtgcttgcatctgtttcttctgttaccaaggagcgacaagagtttttaagccttgtcaacaaggagatagaactatataataacatgctcgcaaaggagggtacagatggtgaagaagaagccaggagagcgtacaaggctgctagggatgaatcagaccatgctgcagatgcagctgtgggag

SEQ ID NO: 270046 - DNA, 607 bp, Zea mays
ctcgtgaaagatgaagaaggtactgaccctaacattgtgactggttcagattcagagaaaagcattggtgatctcaaagggaaagacttgctgaagcgtcttcatgaagttgggacgcttgctcagattacaagcattcaaagggatcaggtagttctacttggtcacagacgtttacagataactgagatggtcgaagaggatccactcacagttaaagttgatcatctaaaggaaaagccctacaacaaggatgatgatgttataaaagctacctcattcgaagttatatcaactttaagggaagttctaaggacaagttccctttggaaggatcatgtgcaaacctacacacagcacattggtgactttaactaccaacggttagcagactttggtgctgctatctctggtgccaacaagttgctttgccaggaagttcttgaggaattggatgtatacaagcgtttgaagttgacccttgagttagtaaaaaaggagatggagattagtaagctacagcaatccatagcaaaagcaattgaagaaaagattagtggagatcagcgacgttatttattgaacgagcaacttaaggcaatcaaga

SEQ ID NO: 270047 - DNA, 450 bp, Zea mays
  unsure (1)..(450): unsure at all n locations
aatgcatctacgtaatntgtataccaccaagtatggacaggagtttgttgctggtgctatggaattgcgccccgacagcagtgtcaaccgcacaataattgaaaagctctcggtgaaggctccatcaggtgattcaaagctaaaagtcttgaaagctattgcccaagagtacaatattgaatgggattcatctaatactgaagcagaattcaacaagaaatatgaagatctactggacggctcgggatcttcggtccaccagatccagacacctatcattgagggctcagtgagctcaccagttgtttctgctccaagagataagacgccagcattgaattcacctgtcattgatgccgaagaacaccaagttcgcgaatctccgacttcaccagctggaggtgcaagagctggtgttgtcactaanggcaatgtggtaaccatgggcca

SEQ ID NO: 270048 - DNA, 720 bp, Zea mays
  unsure (1)..(720): unsure at all n locations
tttgttccacgcgtagcgcccagcgcgtaccggcggcaaccgcgctggctattgtacaacaaatggctgtccagctctatgtagtgattgatactcnctgcggtcggctcgctcccgcacacgtgcgacgaaggtctcgttgtcatgacgtctctgtcgcgccagtggggccaacacccggtggcaccctgccactgtccgcacatggtatcataccgcggctgcgtgcgtgtctgtggatttgagcctaccttgtccacgcctactcggagcaggcggggacatagacgccgtcgtggccgcgatgcgcgacggcttcccgaaggcgcgggtgccgtactacccggtggccggccgcatcgtggacgccagccccggggagcccgtggtggagtgcaccgggcagggcgtctggttcgtggaggccgctgcgagctgcgcgctcgccgacgttaactacctcgagcgccctctgctcatccccaaggaggagctcctcctgcgccctccgcccgaggagaagctcgaggacctcgtcctcatggcacaagtgaccaagttcgcctgcggcgggttcgcggtcgggatctgcttcagccacctggtgttcgacgggcatggtgcggcgcagttcctcaaggcggccggcgagatggcccggaggctgacggcgccgtcggtcgcgccggtctgggaccgcgacgcgatcccggacccgtc

SEQ ID NO: 270049 - DNA, 462 bp, Zea mays
agagctatgtcggcgcatgcacgcctaccgtaccctccgctccacttacctgctgctggtgagcaccgcaagcaccaactcgcgcccaccgctccgctacaccagccgacgccatcatgtctaccgtcgccgccgcccccaccgtcgtgaaatcggctccggagctcgtcgcgccagtggggccaacacccggcggcaccctcccactgtcctccatcgacaagaccgcggcggtgcgtgtgtcggtggatttcatccacgtttttcccccggccgtaagagcaagcggggacaaagacgccgccgtggccgcgatgcgcgacggcttcgcgaaggcactggtgccgtactacccggtggccggccgcatcgcggacgccagccccggggagcccgtggtggagtgcaccgggcagggcgtctggttcgtggaggccgctgcgagctgcgcgctcggcgacg

SEQ ID NO: 270050 - DNA, 496 bp, Zea mays
  unsure (1)..(496): unsure at all n locations
ggggagggatcattgaaagccgcagcgccacatgtcccaggcccgtctgttcgccaccatttgtccattccccctccatcattcctccccgctttctccaccatcagggcgaaaattttatgcgagctttggaaagcgcgagccagtttatccggccgggcgtggtcaccgaggcagtagcggcgagagaggggaggatctgatcgatgtcgtcgggcgaggacgggtactgcagctcggattcgccgcgggcggaatcccccgaccagccgcaggcagctgcggacgcggagtcgcctcgcgccggagccgggccgaacaagcgcgaccttcacgcctcgtcgccggcagctaagcgcagccggagatcggtggagaagcgggttgtgtcggtgccgctggccgagtgcggtgaggggccgncgncgtctgactcgtgggcgtggcgcatgtatgggcagaagcccatcaagggctccccctacccacgtgggta

SEQ ID NO: 270051 - DNA, 461 bp, Zea mays
ggggagggatcattgaaagccgcagcgcccatgtcccaggcccgtctgttcgccaccaggtgtccattccccctccatcattcctccccgctttctccaccatcagggcgaaaattttatgcgagctttggaaagcgcgagctagtttatccggccgggcgtggtcaccgaggcagtagcggcgagagaggggaggatctgatcgatgtcgtcgggcgaggacgggtactgcagctcggattcgccgcgggcggaatcccccgaccagccgcaggcagctgcggcggcggacgcggacgcggacgcggagtcgcctcgcgccggagccgggccgaacaagcgcgacctccacgcctcgtcgccggcagctaagcgcagccggagatcggtggagaagcgggttgtgtcggtgccgctggccgagtgcggggaggggccgccgccgtctgactcgtgggcgt

SEQ ID NO: 270052 - DNA, 526 bp, Zea mays
ttatagtcgacccaagccttccgaaaattggttgggctcctccgtccactctccgccgccgccaccttactcctcgcccccgccacgccactcactggttcctcagtctccgctagttccgtcggcggcaggcggtggagaagcgtgagggcggacgccggcgggggctggctatccgggctgctgggcggcaagggcggcggcgcgtccacggcgatgatggtgacgccgggaaccgtgaaggccggcgaccccgtcctgcacgagcccgcgcaggaggtggcgccgggggacgtgctgtccgagaaggtgcagggcgtcatcgaccggatggtcgacgtcatgcgcagggccccaggcgtcggcctcgccgccccgcagatcggcgtcccgctcaggattattgttctcgaggatacgcaggagtacatcagctatgcacccaagaaggacatcgaagcacaagaccgccgcccctttgatcttctcgtcattatcaatccaaagataagagcacgagtaaaag

SEQ ID NO: 270053 - DNA, 490 bp, Zea mays
cacaacttcgttgttccttccgcagctccgagctccggaatcgagcaaagcacccgagcctgcgccgcgtcaagccgtcaaagctcccccgcttcataccattccctcccccgatccctcgcctcagccctcagctccgcccctcggtttccgaagcgccaccgccgacgtggcctccctcggctccaatggcgttgccctacctggaggccgtgctttgctttatgattttcatgtacatatttgagacatatcttgacatccgtcagcatagagccctcaagctgccaactttgccaaaacccctgctgggagtaattagtgacgaaaagtttgaacgctctagagcttatagcctcgacaaaagctatttccattttgttcatgaggctgtgactattttaatggatactacattactatactatagagttcttccttggttttggaagaaatctggaaagttagttcccagtgttgggctgagtgc

SEQ ID NO: 270054 - DNA, 688 bp, Zea mays
acggttctagatcgcgagcggccgctcggatctagaactagtgactttcttctcccgtccaccttgcgtgctcgcgcgcgagctctcgtggcgcagccacaactaggcgaccgccgccgcccctacgccacgtgctcgagtctagcctcgtcgattgcttccccagtttaattgatctacaagcttcagaacatgttcaagaatacatttcagtctgggttcctgtccattctttatagcctcgggaccaagccattgcagatatgggataaggaagttgtgaatgggcacattaaacgaccccaagatgaagatatccaatctaatgtacttgaaattgttggaacaaatgtacagtcaacttacatcacatgcccagctgatccttctgctactcttgggattaagcttccatttctggctattattgtgaaaaatcttaagaaatacttcacgtttgagatccaagttctggatgacaagaatgtccgacgtcgatttcgagcatcaaattttcaatctgtcacaagggtgaagccatatatctgcacgatgccgttgaaactcgacgatggctggaacaacatccagttgaaccttgctgatctgacaaaaagggcgtacggcacaaattacgtcgagacgctgcgggtgcaagttcatgcgaactgccggctccgcagaatct

SEQ ID NO: 270055 - DNA, 504 bp, Zea mays
ctttaaagtcgacccacccgtccgttataatttcacctccccaccaacccttctgtaggcatttgatgaaaataattgactaattgtaataatgatggttgacctattctttagtaaggtggacttgggttgactgacactttcttttgcatggttggacttgagttgaatggctggtgtattttatcccttcggttttttccgccacttattttaaaaaaaaatacgaggcacttaaattgtgtgtgcacactgtgcctgtgatgccaatcacactgacttctaaacccttttgcagtctgtcacaagggtgaagccatatatctgacacgatgccgttgaaactcgacgatggctggaacaacatccagttgaaccttgctgatctgacaaaaagggcgtacggcacaaatttcgtcgagacgctgcgggtgcaagttcatgcgaactgccggctcgctatcatctacttctctgaccgcctctactcggaggaggagctgc

SEQ ID NO: 270056 - DNA, 1237 bp, Zea mays
caccaccatatcgacatcgacgccagcgagccaaggacagaacagccggcgcccggccctaaaactgccgtgcagcgtgagagaagcgagggaaagatggaccggtaccagagagtggagaagcagagggaggaggcacccatcaaggaaaacgagatccgcattaccacgcaggggaggatgcgcaactacatcacctacgccaccggcttgcttcaggacaaaggttctgatgaggttgtattcaaggccatggggagggctatcaataagactgtcatggttgtggaattgatcaagaggaggattgttggcctccatcagaataccaccactggatctactgatattactgatatgtgggagccattggaggaaggcctacttccgcttgagacaacaagacatgtctctatgatcactataactctttcaaagaaggagctggacacatcatctatcggatatcaatctcctttgcctgctgatgaagtgaagcctttggttaaatatgataatgatgaagatgcacactcacctggtggccgtggaaggggtcgtggtggtcgaggccgtgggcggggcatgggcagaggtggacgtggaaatgggttcaatgactatgctgatgccggttgggaagacgatcacgcccctgcatatatgggcaatggatatgcccgtggaagaggtcgtagtttcaggggccgtggcaagagaggcggttacaataaccagcctgaataccaacaggacggaggttattacgaggaggcacctgtccatgctccagccttaggtcgaggtcgtggtcgtgggagaggtccattcagaggcagaggacgtggtggcaacgcaaacggcgtgatgcacgctgctgcggacagtgcataagctgttcgttaccagtccaggctggttgtttgttggatgcctgctccaagtatgaagatgtatcatctgttgttatcagttaacgtcattacttggcataagattgacattctgtgtcggagtgcagccaggttttgatacttgactagatctgtagggtagcgtctttacagtgctttctcctttcacagtagatgtcttaaactaattgtagtttcgtaaaggtttagagcagggcattctctctttttttaaatataaaaacgaagtcttggtgtatgttcaaatgtgcacgtttttatatgtgctgtttttgaaatgcgagttagattaagttcgtggt

SEQ ID NO: 270057 - DNA, 802 bp, Zea mays
gaggattccgaggaggagaggcggagggaggaggagaggacgcggcggcgggctgagcggattgcggccatggccgcacgcgctattgctgagcgcgaagatgctgctgcgaggctcgagggggagaaggcggggcttgagaagctgctcgccgagcgtgagaaggagcaggctcatgaggcttcagagttgcagactagtatgattgaaacattggaagcagtggacatagagaaacagagacatcacagcactagaatggaagcccttgcacgtttggctagacttgaggttacaaacggtgagcttgcaaagtcacttgccagggaacaatggaatctggaagttcaagtagatcaagtggcgcagcttcgagaggaagttgaattgaagaaacatactaatacagaagaaagctaacaaagatacaaaagacaagtgcccctccggttgatgaaatagaatctttgagaaggttcaagctggaggaagaaattattgatgcagaatacactctgacatgtgacagaattgtgagcttgaaggacaaggcaaggaagattgaagaaagcattgagctgactagaagagacatggttcatcctacagaggtggaaattgagctcaagaagaggcttgatcaactaactgatcggttgattcagaaacaaatgcaggttcattccttatgtggactctttcatcatgtttgttttctgttttgcagcatctcttgcgattttgttgccagtttttttttttgatcagtatgggttttacagtaaaaaacattgtattgaga

SEQ ID NO: 270058 - DNA, 749 bp, Zea mays
gaaaaccctttgcagtcggggaactctcgcattccactattccagtcatcgagagcgcggctgcggcggcgagggaacacatcctttctcgcatcatggccacctctacggagccggagggcgcgccgcccgcggctaaggggcctaaaggagaggccaacacgaaggggagcaacgaacatggagaggtcggcgcaggcagcggcggcggctcgcagaagcggaagaggaaggaggtcttcatctacggcaactacaggaactactatggctaccggattgatcgcaatgttggtgaagatcctcgccttgaggcgttcaagaaacagtggtttgaaaagaaggattgtctcgatattggatgcaaccagggtttggtaacgattggcttagccatgaaatttaaatgtcaaagcattcttggcgttgatattgattcaggtttaattgagactgctaagtggaatctgcgaaggataatgcggcaggataaggtggctacaaacaacgtcaaagctcagaaatcatcggattctcctcagagctctccagaagaattggcatctgagttatcgaatgggaacaagcaccaagatctttttaaaattgtctcttttcgacgtgaaaattttgtagcgagtatggatggatgttcagaacaagatgacaccatactatgtttgagtgtgacaaaaaggatccacctgaactggggcgacgatgggctagttacgttatatgtgaagatc

SEQ ID NO: 270059 - DNA, 402 bp, Zea mays
cggccgcccttttttttttttttttgcttaaacggttgtccattatttttctcatgtactgtaaaatgagttattactggccaaatcacctcgcatctaccagtgtgctctcaagggaaacaaacattcggtccacacccagaaatataaaatgttcatcaaagacaaaagatagattctgcagaagaacaaaaaagagaaacatgtgctagcagagggacccctgcgccactctacttttcagttctcctgcttcatttatcttcattgctgtctgttattattggacttgttgggcctgcgccaatgacccatacaagtttgttctttctcggcaagccttcatcagaatcgcttcaggcgtgccaaatcattgatcacttcgctggggccgctggtggc

SEQ ID NO: 270060 - DNA, 846 bp, Zea mays
gttcctccggtggaagctcccggcgctctcatccggtgaaaataaagaggggaaacggacaggagccgcctcaaatggacagcggaagcgattccgacggcgctcccgaggagctcacggctgtgcagggtgttgcgaagcacgaagagatcagtaaagtcgagaaagacagtgttctcagagtaacacgggaaggaaaggaacggaggaaacgttgggcccaacgaagaacatcctctaaaccagataagaaggcgccaaaggaagtagaagatgaagatactaaaaaaagtgaggagcatgaggagacaaatactatgcctggcatgctccccactagtgtaattgaaattctagcagctcgtgagaagcaaaccttcgcatcagattccgaggaagaaaatgtaaagcagaaggtccagaggagaaagaagagaatgaaaactgccgggcccgaaactattctgctgaaagatgtccgttcaacgcagcacgtgaagaatgcccttgatttcttggagcataggaaaaatcgtgtcccaaggtcaaatgcagttttgaagaatgccagtaaggctttgcgtctcctgtcttcgaaaggtaattttctaagttaagcgtgtggtagaatagcacattttctgaatctgtgcttagaccatcctctcgacatcagacatggtcaagagacttaggaccaatgtgttggaatggaatctacctggcatgtgaaatgtaatgcagcatatccttttgtgtgaatgtgatgattagcacacatgttccttgtaagaaatccaaggtttgtaatcattgaatatatttgagtttgagttatctatttcc

SEQ ID NO: 270061 - DNA, 365 bp, Zea mays
cggacgcgtgggcggacgcgtgggataccccgctcaaaggcctcggagttcggtctcctctcttccgttgtgtcgacgcttaaaaagtaaaaaccctccggcggcggcggggttcctgttcggctgttcctccggtggaagctcccggcgctcaaatccggcgaaagaaaagaggggaaagaggctggagccggctcaaatggactgcggaagcgattccgacggcgctcccgaggagctcaccgccgtccagggtgttgagaagcacgaagagatcagtcaagttgagaaggatagtgccatcaggtgtgtttcttatgcatactttacagctgagctgactggatggacctgggcgctctgct

SEQ ID NO: 270062 - DNA, 843 bp, Zea mays
gcaccatcgtcccttcgtctccttcctcgtctgggtgtggccgtctcgcttcgccccttcctctctccttcggttctcctccagatctctaagaccaggagcccggtgaatccaccgcgcccgcagcgatgtcggcgagcagcacccccgtagacgcctcgggggagccgatcccgacttcgtcggtgctgatggcggcgtcgaagcacatcgcggtccggtgccgcccggagaacgttgccttcctcaactgcaagaagaaggaccctaaccccgagaagtgcctcgagaagggccgccaggtcacacgctgcgtcctcagcctgttgaaagaacttcaccaaaagtgtcccaaggaaatggatgaatatgctggttgcatgtattactacaccaacgaattcgacttctgccgtaaggagcagcaagcttttgaggaagcctgccccatttccgagtagatcttgagagttttacttgcagtggtcttcgcaaataagggaaaaaaaggcagaaaaacagcgttcatgatctcccatgtttgttgtcctcatggaatttgtactggtgaatgaatagcacagcctggagctattcaccccatttgccgcccctcaggattttagagcaggcgaatgctctaaaatggtgatgatggtgttttctctttatggttcacaaattacatttggcggactcactgttatttctgtctgtcccgagtgtgttaacccgctaatctgatcttctgctctggacttccacaaggctatggcacaactacaatgtactcctacatcatatcgtctcaaatctgaatagtctgtactctgtacagactac

SEQ ID NO: 270063 - DNA, 275 bp, Zea mays
ccttcccgtcaggtgtggccgtctcgcttcggcttctcccacttccttccccagatctccaagaccaggagccccggcgaagcaccacgcacgcagcgatgtcggcgagcagcacgcccgtagacgctttcggggagccgatcccgacgtcgtcggtgctgatggcagcgtcgaagcacatcgcagtccggtgccgcccggagaacgtcgccttcctcaactgcaagaagaaggtccctaatcctgagaagtgcctcgagaagggtcgccaggtc

SEQ ID NO: 270064 - DNA, 685 bp, Zea mays
ctgatctacaacgatgggcagtcctctccacagatcctgatgtttgttggcacacttgtcaagaaatacgcggatggactgtgcttgtctggaggctcaccctgtaagtggtacattaatcctgatgttcctgaagcaggtgccctcatggctagtgcgacgaaagcacatagtcccattaagtggaacgaagttctatcttccaatcagcctatgtctgatgttcctgaggaccagaaaatcgcttatatcagagatctgcacccatttgagaataaggatagggaattcttggtgacagtcactgtgaaaaagattggtgataggtggtggtacaatgcatgcaaaaaatgcacccgcacagctgtggctcatggggattcctacaagtgcagcgatcaagtttgcgctaacattggcacgcccagccagaggtacaaactgcttctcgctgcaggggatgagacgggtgacacagacttcatcctctttggtcggatggcgcaacgcatcatcaagaagccgtgcgatatgctcattgccaacaatccgatcggctttattcctgatccaatcacagatctgctcgagaagacgtatctatggaatgtgagtttctctgaccacacaatcaatactggaaatatttgtttccaggtcaacgcaatcgtggcagagataggta

SEQ ID NO: 270065 - DNA, 948 bp, Zea mays
tggacgccttttgtctggatcaacactagggagccaatgtggtggcattgggggcgcatttgctgctcgaccgatgcacgagaaaggtggtcagatcattgcaattggggatgtgacaggttcaattagaaacacggctgggatagacatacctgctttggtgaagcataggaatgaaggtcatgcgatgaaagactacgatggtgcggaagttttgggttcgaccgagttgccagtgcatgactgtgatgttcttgtcccctgcgccttaggtggagtccttaacaaggataatgcaccagacgtgaaggccaaatttataatcgaagctgctaaccatccaactgatccagaggcagatgagattctcgccaagaaaggagtagtagtattacctgatatctatgccaattcaggtggcgtggtcgttagctactttgaatgggtgcagaacattcaaggtttcatgtgggatgaggagaaagttaatgatgaactagaaaagtacatgagcagtgcttttcaacacttgaaggccatgtgcaagtctctggattgcgaccttaggatgggggccttcaccttaggagttaacagagttgctcgtgccaccctcttgagaggctgggaggcatgagaccattgaccgcgcattacagattcgacaggcgcattcaataattcgtgtccaacaacgttggaggatcagtgtatacggtaaaattcatcagaaacggccggcttggaatgagcccgttgaagggtgttgtgcttgttgatcctgagttaccaatggttggttcaccagttcttggtgatgaaaattttatttaaaccattttattgtattttagaaagctaatttggcctcgacagagttactgtaccttttcatttttaatgaaattctggtctggggtttgaagttcccagatgtaaatgatttgc

SEQ ID NO: 270066 - DNA, 898 bp, Zea mays
ccacaacacgtcctcgtgatcctagtaccttcttcttggacaagcgttcccgccgcgatgaacgcgctcgccgccaccacccgcaacttccggcgggcatcgaagctgctcggcctcgactccaagctcgagcagagcctgctcatcccgttccgggagatcaaggtggaatgcaccatccccaaagacgacggcagcttggcgacgttcgtggggttccgcgtgcagcatgataacgcccgcgggccgatgaaaggcggcatccgctatcacaatgaggttgatccagatgaagtaaatgcccttgctcaactcatgacatggaagacagctgttgcagcagtgccatatggtggagcaaagggagggatcgggtgctctcctggtgaactaagtagaagtgagttggagcggttgacacgagtatttacccagaaaattcatgatcttatcggaacgcatacagatgtccctgctcctgacatggggaccaatgcacaaaccatggcatggatgctggatgagtactcgaaatttcatggtcactccccagcagtcgtcactgggaagccaatagatcttggtggatcactgggcagggatgcagcaacagggcgaggcgtaatgtatgctaccgaggccctactcgctgaatatggaaaatgcatttctggatcaacttttgtgatccaaggttttggcaatgttggttcatgggctgctcgacttattcacgagaaaggtggtaagaattattgcaattggggatgtgacaggttcaattagaaacacagctggtatagacatacctgctttggtgaagcataggaatgaaggtcatgcgatgaaagacttcgatggtgcggaagttttggattcaaccgagttgttagtgcat

SEQ ID NO: 270067 - DNA, 478 bp, Zea mays
gtttagtctactcaagccatggtgttgaaacttgaccatacttgtctcaatgagactttggagtgaaccaaatgagcttatgttcctatatgactactagctagaagttagagcctagatgatggctgcttctgttggcgtgaaagctcgagtgctcctaaatggtcgtcgtattagctgatacgacatcgacccgatgcaatagataatattgtttacacgcgcgagtccaaaattgttggctttgggtcggagcagttaacgcgagaagtgtattttatcacttctgagtgcaaccttttttttattatttttccgagcttctgcctcttgcatatgttgtagattctcgccgagaagggagtagtagtattacctgatatctatgctaattcaggtggtgtggtcgatagctactttaattgagtgggttcagagcattcgaggtttcatgtgggcctaggagaaagtggacgat

SEQ ID NO: 270068 - DNA, 430 bp, Zea mays
  unsure (1)..(430): unsure at all n locations
cccacgcgtccgcggacgcgtgggcggagctcaggggccggtgccggcgcgcgacaggcggcacacacgcccctcggctcctcgcgtatggcgaccacgttgacgcccacgcagcgctatgcggcggggacgctcctggcgctggcgctccgccaggcgcagatccaccagtccgagcccctcggctccggccccgacgacgaggagcgcgccagcagcgccagcgggagctcctactccaccatatccagcaccggctgcgacactacctcgggcgccggcctctggacgcacgattcccgcggcctcctccgacccgtcttcaggttcctggagatcgagccctaggcatgggcggggatggaggagacggccgtgtntccggacgccggcaggcatacatcagtgcggttatcagcatactctttga

SEQ ID NO: 270069 - DNA, 1196 bp, Zea mays
cgaatacatgtcttgtactcttgcaatgtatacctacaacaggctttaatggagaacataaaaaaaatgtcaaatttaactgcaaatcatcctccgcagaaaagaaaaacagatgagctacaattcctgtacatcagcaattcacagcggccttcgcatcctacgtagctctaaaacaggatgaaaatggatcaggccttccatatcaagcgattttgtccgggctcagcacaataaaccttgtgggaggcgcgagacacctctgaagacgtcaaacaatagtcgacaacgtcaccgtggtgatacatcagttgtgctaaactgagagctgttcatgttggtctgtgtgctgtatgattcagctgggttgcctttagtgctttggcttgaggacgtgtctgctatcaaacccccaaagccaccggtacgctgccgaggttctttcagcacacctggtggagctacattttgcagatcaatttctgtttggttagatagcatattaacgacctgcttcatggacggcctctgctgggacgtggcttgcgtacacagcagtgccactttaatgaaacgaagcatttgctcctctgggtacttttccagttctggatcaacaatttccaagagccttccttcttcccgcagcttccatgtccattccacgagaacatgcatattaggtccccaagtcgacttgctgctgctttcaccacttatcatttcaagaagaagcaccccaaaactatatatgtctgctttcttggtcaattgtcccaacaaggcatactctggtgccaaataacccattgttcctgcaacacgcgtgctaatgtgagtgacagtatcaggaaagagtttcgccaatccaaaatctccaattttcggcagcagcttcttatcaagtaaaatgttgctagccttgatatcacggtggacaatccgtggttgtgcttcctcatgaagaaaagcaaggccagaagcagttccaatacatatagcaactcttctctgccagtccaatgggatacatttgttctttgtccaagcaaagcattcgccaaactattattctctgcatattcgtacaccaatagtctgttactcccttcaacacagcaaccaatcagcttgataaggtttgggtgcctaacatttgatatgacattaatctctgtcaagaattcactaattcc

SEQ ID NO: 270070 - DNA, 1261 bp, Zea mays
actcgcggatcgatacacgcccctacgaaaaccctaaaccctcgctacccggcggcggctacaagctcttcgtcggttcagcaccatgaggccaccggctagaggaggacgtggtgggaggggtggcaggttcgatggcggcggccgtgggggcggcggcggcggccgtgggtttggcggtggtagaggcgggagaggggacaggggagggagaggtggcaggacccccagaggcggccgtggcggcggtggcaggggtggccgcggcggtggcatgaagggcgggagcaaggccgtcgtggtggcgcacaagcacgccggtgtcttcatctccaagtccaaggaggatgcgctctgcaccaagaacatggtcccgggagagtccgtgtacggagagaagcgtgtctccgttcagaatgaggatggaacaaaagtcgaatacagggtgtggaaccccttccgttccaagctggctgctgctgtgcttggtggtgttgacaacatctggattgctcctggtacccgtgtgctgtatcttggtgctgcttctggcacaactgtatctcatgtgtctgatattgtagggccggatggtctggtctacgctgttgagttctctcacaggagtggaagagaccttgtcaacatggcaaagaagaggaccaatgtgatccccattattgaggatgccaggcatccggcaaggtaccggatgttggttggcatggttgatgttatcttctctgatgttgcacagccagaccaggctaggatcttagcacttaatgcttcatacttcttgaagaacggtggccactttgtcatttcaatcaaggctaactgcatcgactccaccctgcctgctgaggccgtgtttgcagcggaagtggagaagctcaaggcggatcagttcaagcccgcggagcaggtgacgttggagccctacgagcgtgaccatgcatgtgttgtgggtgggtacagggtgcccaagaagcagaaggccacctcttaggatcggaatccgtgctcgtcttgcctaccaaagatgcttcgttgtattgtggtttattaagaaactttgaaggattagtcaaagtatgtgaaccttctgcagtgaaggctggtttagcagcgacagctgttagggtctgatgcagtgtttgctggtttaacagcattattattattattgttgatgaaacatgggtttggtttcgttgatctcacaaaaaaaaaaaaaaaaaaaaaaaaaaaaaagaaa

SEQ ID NO: 270071 - DNA, 580 bp, Zea mays
caagcaaatgataacgttctattgaccctcacgtaataaatcaagcaattccaaagctgaagatctgagtgatgtacaataaagatcaattttagtgaattttcatcaacattaaataagctggcatcacatagtaatgagtcttgactggtctaaaaagttccctttgcatcagtcaccactttggaattttcaaaataggcagggcagtaattgcagttacatatataagaccaactacctcgacttgcttggccttctccaaaggatcggatcaactttggattacataggtatcactgaagttattaaatacttaggcatcacttggcgttctttcgattgggtggtttactctggctgttcttccctcgtagaattgccatcgtcgggccaagggcgctgctcctgagggctctgtaagaccaagctgacgtactagcattttgtttccatgttgcccagccattttgcagaagatcaaccttatcactgggctcaccatttttttcccagaccgtactttctgactttcctagtgtgcgttcttcgcctttagtgttgtttgacaccaagagtg

SEQ ID NO: 270072 - DNA, 254 bp, Zea mays
accttctgcagtgaaggctggtttagcagcgacactgttagggtctgatgcagtgtttgctggtttattaagaaactttgaaggattagtcaaagtatgtgaaccttctgcagtgaaggctggtttagcagcgacagctgttagggtctgatgcagtgtttgctgggttaacaacattattattattgtagctgatgaaacatggggttcggttcgctgatctaaaaaaaaaaaaacaaaagggggggccccca

SEQ ID NO: 270073 - DNA, 357 bp, Zea mays
cggaccgtggcgaaaaccctaaaccctcgctacccggcggcggctacaagctcttcgtcggctcagcgccatgaggccaccggctagaggtaaaaaaccacgacactatccttgttttccatccatttccgcagtctgatgaagacttgctgcttcgttaaatcctgtagggggtacgtggtgggaggggtggcaggttccatggcggcggccgtgggggcggcggcggcggccgtgggtttggcggtggtagacgcggcagaggggacatgggagggagaggtggcacgacccccagaggcggccgtggcggtcgtggcaggggtggccgcggccgtggcatgaacggcgggagca

SEQ ID NO: 270074 - DNA, 431 bp, Zea mays
aatcaacgcaccctgtgcccggtgccgccgacccaaatggcatccacctcgccggaacccgccgccgccgacgaaactatcgacaccatccacatccgtcgcctagagtgttccgaccacgagaggggcttcgtcgcccttctctcccagctctccccctgcccggacctcaccacatccgtgttcgccacgcgcttcgccgagctcgcggcgcagggcgacgaccacatcatcctcgtggccgaggacccctccgcctcggaccggcggatcctcgcgacagggtgcctcttcgtggagcgtaagttcctgcgaggctgcggcaaggtggggcacgtggaaggacgtggtggtcgatgccgccgcgccgcggcaggggtctcgggctccgcatcgtgcgccgcctcgtggagatctccagggacgccggc

SEQ ID NO: 270075 - DNA, 1741 bp, Zea mays
aaagaatgttggtgcgagccttgtgaaacacgttgctaatgcaactaatgacactgctggcgatggtaccacatgtgccactgttttgacaaaagcaatatttactgaggggtgcaaatctgttgcggctggaatgaatgcaatggatttaaggcgtggaatctcaatggctgttgatgctgttgtgaccaatctgaagggcatggccagaatgattagcacttcagaagaaattgcacaggtgggtacaatatcagcaaatggagaaagggaaattggtgagcttattgccaaggctatggagaaggttggcaaagagggtgtgatcactattgcggatggcaacaccctttataatgagcttgaagttgtggagggtatgaaacttgacagaggttacatctctccgtacttcattaccaactcaaaagcccagaaatgtgaactggaagacccattgatcttaattcatgacaagaaagtgacaaatatgcatgctgtggttaaggttttagaaatggctctaaagaaacaaaggcctctactgattgttgcagaagatgtggaaagtgaagcattaggtactctgattattaacaagcttcgtgcaggcatcaaggtctgtgctgtcaaagctcctggttttggggaaaacaggaaggcaaacttacaggacctcgctatccttaccggaggagaggtaataactgaagagctaggaatgaaccttgagaatgttgagcctcacatgctgggttcatgcaaaaaggtgactgtctctaaggatgacactgttattcttgatggcgctggagacaaaaagtctattgaagagagggcagaccagattagatcagcaattgagaatagcacttcagattatgacaaggaaaagctccaggagcggttggcaaagctctctggaggtgttgctgttctgaagattggaggagccagcgaagcagaagttggtgagaagaaggatagagtgacagatgcactgaatgctactaaagctgccgttgaagagggtattgtaccaggtggtggtgttgctcttctctatgcatcgaaggagctcgataagttgcagacagcaaattttgatcagaagattggtgtgcaaatcattcagaatgctttgaagacacctgtacacaccattgcctccaatgctggggtggagggagcagtagttgtgggcaagcttttggagcaaggaaacactgaccttggttatgatgctgctaaagacgaatacgttgacatggtgaaggctggtatcattgatccgctaaaggtcatcagaactgcattggtggatgctgctagtgtgtcgtccctgatgaccaccacggaatccataattgtagagatccccaaggaagaggcaccggctccagcaatgggtggcatgggtggaatggattactaagtgtcaagcacacccacgatacaacaacatcaaagcagagatgacgaggtggttgtcaggaggatacaattttgaggctgcggacgtaggacctcaatatctccaagcaatagtggggggataataaacatgagcagtagttgtttgagatctgaagctgtagatcaagattggattctgacaccttgtgctgaaccaagtgtagtctgattattacacattttttggctgagtaaaatcggattgccgttctgttttgccaaaaaacccacccaaaaaaaagggcggccgctcgcgatctagaac

SEQ ID NO: 270076 - DNA, 533 bp, Zea mays
tcctcctttcctccccaaaagacacaagagggggaagagagagagagcagaggcagagagaagagggggaggcagtccagtgtccacgcaggtacgctccacagaagagagatggcgatgcggatggcggcggcggcggcagtggcgctggtggcggtgatgggcgtgctggcgccccgagcggcggcgcagacgccgaactgcgcggagaagctgatcccgtgctcgccgtacatgaacacgacggggacgccgccggatacctgctgcggcccgctcaaggacgccgtccagaacgacctcaagtgcctctgcgacctctacgcctcgccggagatcttcaaggccttcaacatcagcctcgaccaggccctcggcctctccaagcgttgcggcctcagcgacaccaccgccgcctgcaagggcctttctcctacgcagtctcctccaggttcgccgccatcaggtggtggcagtggcagcaactccggtcatcacactctgtcggtcggtttcccaagattcatgagctt

SEQ ID NO: 270077 - DNA, 303 bp, Zea mays
cggaccgtggctccacaaaggcagggaagcagcaacactgtagctgggaggagagcgtaggcagtctgtccactgtccacgctgcagaagagagagatgggggtgcgggcggcggcggcagcagtggcgctggtggcggtgatgggcatgctggcgccccgagcggcggcgcagacgccgaactgcgcggcgaactggtcccgtgctcgtcgtacatgaacacgacggggacgccgccggacacctgctgcggcccgctcaaggacgccgtcaagaacgacctcaagtgcctctgcgatctct

SEQ ID NO: 270078 - DNA, 654 bp, Zea mays
cttaaaagcgaaccaagccgtccgttctcccttaacctttctcctcccttccctggccttgctcctctctgtcccgaccgagcagcagccgcgagcggatgtcaagaatcactggcatgtcgtcatggcacgtcgcagccgcgagcgctccatgctccaggggaagcggcggcctgttcaggtcgccggtgcttgcccctcctacttcactgttcaagaactttggcacagccactatgagtaagggcttgatggggccgagttttgaggcatcaggacggtacagctacagcggcaagcagccgacgacacctctctccatcatcttctcctctccaagagaagcgctaggcatggatatcggccaccatggccgccatgagcaccacccaaaaggagtatcacgccagcgacatcgccgatgagccactgaagaagaaggacgtgtcgttctttgatttcctcggcgtcgggcgaactgcatgcggctgacaagtattcagggttagagttcatcgtcattgatggttacagtgttctgatcatcatgtgctgattcatcagtcaaataaggctccagacacatggctatttaatatttatttaaaagttttttttacaaaaaaaaaaaaaaaaaaaaaaaagggcggccgc

SEQ ID NO: 270079 - DNA, 669 bp, Zea mays
ggcagcgtggaaaggctacgaagagcggagaggcgctccattgaagcggacggcgacgagctctgcatgctgcgctgcgcccttctcaccgccgccagcccgccagaacgtctcctccccgtctctagagtggctctttctctctccgtcaaatggctctcgcgtgcgcctctcacgcgtgccgctttctcctcgccggccaggcgagatctttccacgcccagccctaccatgccaaggtcggcgtggtggagttcttgaacggcgtcgggaagggggtggaagcgcacgccgcgaagctggaggaggctgtgggcggcgacatgcagaggctcctcgaggcccgcacgctgcggctcaagaagcttggcatcccctgcaagcataggaagttgattttgagttttgctcacaagtaccgtcttggtctctggaagcctcaagcagaacccaggaaagttgaataaaattggtttgttcttgaaagctagtctactgttggactgaggcttgtttgggacattttgaatatttccttttgtaatttaggagccacaaatctttgttctctgtctctggccatacttatttgcatccattgtgcaattttttctagaaaatttccaacttcgcgtggaataacaaaccgcaacaggtgcagccccctgt

SEQ ID NO: 270080 - DNA, 382 bp, Zea mays
gcctgctgctgtctgttgggccgaacgggaggcacgaggcggagagcggagaggcgttccgttccatccaagctgatggcaacgagttctccagggcggcggcgcacgggcacctcctgcctaccagaaggcctccgcaccgagctcttctcatcgccaccatcaccagaaggcttccgcccctctctccagtgtctctttctctctccatcgcatggctctcgcgtgcgccactcacgcgcgccgcttcctcctcgctggcccggcgagatctttccacgcccagccctaccaggccaaggtcggcgtggtggagttcttgaacggcgtcgggaagggggtggaagcgcacgccgcgaagctggaggaggctgtgggcggc

SEQ ID NO: 270081 - DNA, 658 bp, Zea mays
  unsure (1)..(658): unsure at all n locations
gcagctcttgagctttctctcgctcctgagtgcagtctctctctctgcgccctgcgctctgcgccgccgccatggaggacgacgatgactgccctcctctcgccgttgagctccctccgcgggtgccgtcccctccagagcaatctccctcagacgcctcgccagttggcgtcaccgtcatcaccggctacctcggggctggcaagtcgacgctagtcaactacattctgaatgagcaacatgggaagagaattgccgtgatactaaatgagtttggagaggaaattggggtcgaaagggcgatgatcaatgaggggcaaggtggtgcacttatcgaggaatgggtggagctggccaatggatgtgtctgttgctctgtaaaacacagtctggttcaagcacttgagcagcttgtgcagagaaaggatagaatggatcatatattacttgagacaacagggttggccgatcctgctccacttgtttctgttctnnggcnagacgatcaattggagtcgtcaattgtgctggattctattattacggttattgatgcaaaaaacttcagggttcagattgacgagcacaaaaactcttcctcattccctgaagcatttcatcaaattgcaattgcggatggtgtgatattgaacaaaat

SEQ ID NO: 270082 - DNA, 604 bp, Zea mays
ccgctcacgctcatggccagccgacctcttcgagtacttcgccgtcatggaggccgccggcggggccgacatctccctcggcgtcaagctcggcgtccagtacagcctctggggtggttctgtcataaatctaggaaccaaaaagcacagagataagtactttgatggaattgacaatttggattatccaggctgtttcgcaatgacagaactacatcatggatcgaatgtccaagccctacagactaccgctacatttgatcctgtcactgatgagttcattattaacaccccaaatgatggagctattaagtggtggatcggcaatgctgcgcttcatggaaaatttgctactgtctttgcaaggttaattttaccccttcaaggaaaaggaggggaggctgctgatatgggcatccacgcgtttatcgtccccatacgggaccttgaaactcacgctgttcttcctggaatcgagatcaatgactgtgggcacaagatcggcctaaatggtgtagacaatggtgcgctgaggttccgctcagttaggatacccagagacaatcttcttaatcggttcggtgatgtgtcacgggatgggaaa

SEQ ID NO: 270083 - DNA, 1446 bp, Zea mays
tttctccgccgagctcgccgccgccaagaaggccgtcaccctcgccgccaaactctgccagacagttcaacaggatattatgcattctggcgttcaggctaaggcagacaaaagtcctgtcacagtggctgattatggatctcaaatattggtcggtttttccttaaagatggatgtatcatctggaccattttcattggtggctgaagaggactcagatgaattgagaaaagatggcgctgaagaaattttggaagatattactgaccttgtcaatgaaaccatctttgatgatggttcatataacatttcatttacaaaggaaggtatactctctgcaattgatgatgggaagtctgagggaggtccatctggacgacattgggtgcttgatccgattgacggtactaaaggtttcttgaggggcgaccaatatgccattgcattggctctgcttgatgaaggtaaagttgttttgggtgtattggcttgtccaaatcttccattgtcatcaataaacaacatcaatggtaactcttcgggagataaagttggtgccctgttttctgctacaattggttgtggggctgaagtagagtccttagatggcgctccaccacaaaagattagtgtttgctccatcgacaatcctgtcaatgcatcattttttgaatcctatgaaagtgcacactccatgcatgatttgactggctctattgcagagaaacttggtgtccaagctcctccagttagaatcgacagccaagcaaaatatggtgctctggcccgaggtgatggcgccatttacttgcgctttccacacaaaggttatagagagaaaatatgggaccatgcagcaggctcaattgtcgtgacagaagctggaggcatagtgacagatgctgcgggaaacgacttggatttctccaaagggagatttctcgatctcgacacaggcatcatcgcaaccaacaaggagttgatgccgtcgctcctgaaagctgtccaagaggctattaaagagacgaaccaggctgcctccctcttatagctgttgtagtggtcgacaaaaaagtagttgcaaaattttcgtactggcaaacaggtgtgcatcatttctccgtggtattacagagtctagcaaatttatagcatcaacctgattggtgatcagacgtccattcgttttactgaatcaccttcttggtgcagcattgctagaagtggacaacatgaataatttgagtgagtccatagttgcctgaactcagctttggcatttgaactggttatagaaattgtgaaataattaatggatatttggaagacaaacttgaacttcagttggaatccaaatgtagcatacaaagtctgtaaaaacaagaatcccgaaacatgaaatgcatcgtgtctgaaaaaaaaaaaaaaaaaaaaaagggcggccgc

SEQ ID NO: 270084 - DNA, 451 bp, Zea mays
ctcgcaaaccctatccccgaccccgattcccctctcgcctctcgatctctggcggcggcgccgtcgttttcccccatcggctcagcgactctcgagtcccgacctcgacgctaccggctcagcggctctggtgctccgtcctccactcctcctcctccttcatccattcctccggtgcaaggtccgtctctggtgtaccgcgccgtcctgttcggcggcctcagcaacggcgtcatcccggccggggccctggggatcacgtccgctcagtctggtgcgcatcaacgacctccacagccggacggtgcaccaggagaacgccctgtcggaccggctcgccaccctgcaggaggacatcgccgaccgcccgctcctgcccatcgtgcggcagcgcgagctcgctgccgcggcacggttgggagctgcagctgctgtcgcggctgctggtgga

SEQ ID NO: 270085 - DNA, 554 bp, Zea mays
ccttcgctttcgcccacgcgtccgcccacgcgtgcgagatgaggtatctttctctggtgcaggccatcctgccaatatgtacacacaagaagaccttcccaaacaagtttctcgtacccttaatcagggttctaatgttatgagcctggatttccaccccgttcaacaaaccattcttttagttggaacaaatgttggtgacattgcggtgtgggaagttggttcacgggaaaggatagctcacaagactttcaaagtttgggatattggttcctgtaccttgcctttgcaggcttcgctgatgaaagatgctgcagtatctgtcaatagatgtctgtggagccctgatggaactattctaggtgttgctttctcgaagcatattgttcagacatatacttttgtacctaatggagatttacggcagcaagcagagattgacgcacacatcggtggggctaatgatatagccttctctcaccctaataaaactctatctatcatcacatgtggtgatgataaactcaatcaagtgtgggatgctcaaacaagac

SEQ ID NO: 270086 - DNA, 1020 bp, Zea mays
aggacaggccggaatttttggttgcccacgcgtataaacccaaactctaaaaagttaaatttttttttatagaagaagagttagagcccaagactactatgatccaaaattggagataggagagagagaaaggcaacgagttcttcaaggagcaaaaatacccagaagcaataaaacactacacggaggctctcaagagaaacccgaaggatcctagggtttatagcaatagggccgcctgctacaccaagttaggagccatgcctgaaggtcttaaagatgcagagaagtgtcttgaactagaccccaccttcactaaagggtacacaaggaaaggtgcaattcaattcttcatgaaagaatatgacaaggccatggaaacctatcaggctggcctgaagcatgacccgaaaaaccaggaactgcttgatggtgttaggaggtgcattgaacaaattaacaaggctaacagaggtgaaataagtcaggacgaattgcaagaaagacagaacaaagctatgcaagacccagagatccagaacattcttaccgaccctatcatgagacaggtgctaaatgatttccaggagaacccaagggcggcccaggagcacctgaagaaccctggagttatgcaaaagattcagaagcttgtaagtgctgggatagtccaaatgagatgatcaggcacacgatgcgattgtacctgcttgttcgtcccttgtgcttggctttgttagttaacgtgccctttaacaagcagcgacggcaaggctatccttttctcccaattggattgtaagtgcagttaacattggattattcatgtttgtggcactgagtctgagtataggcgccgtcttgctttattgatgctggactttgcgtgcttgtgggtgggggttggttccctagctaaagtttagttcatgtcccattaaatatttgaatataatatatgtttaattaaaaaaaaaaaaaaaaaaaaaaaaaaaaggggcgccccccgactattgaccc

SEQ ID NO: 270087 - DNA, 1469 bp, Zea mays
gcgtcctttcgtccgtccacgcgtccgatgaaaccccaagcgcgcacccatcttctggcctttccagccgccaagccttctagaagcttcaagagctcgattcgatcggaaccctcgccatggccgacgaggcgaaggcgaagggtaacgcggcgttctcggccggccgcttcgaggaggcggcgcggcacttcacggacgccatcgcgcttgccccagacaaccacgtcctctactccaaccggtcggcggcgctcgcctcgctccaccgctactccgatgctctcgccgacgcgcagaagaccgtcgagctcaagcccgactgggccaagggctactcccgcctcggcgcggcgcacctcggcctcggcgacgcggccagcgccgtcgccgcctacgagaagggcctcgagctcgaccccagcaacgagggcctcaaagcggggctccaggacgccaagaaagccgccgccgcccctccgcgccgcgcgtcgtccggccccgacgccatcggccagatgttccagggccccgagctgtggagcaagatcgcgtccgacccctccacgcgcgcctcccttaacgagcccgattttatgcatatgatgcgcgaagtgcagaggaaccccagcagcatcagtatgtatctctccgatccccgcatgatgcaggtgctcagcctcatgcttaatgtcaagatccagagacccgaggcctccgagccgtcgcagtctaccccgccgccgccgccgcagcagcagcagcagcagacgccgccttctgagacgaaggctagggatgtggagcccgagcccgaggcagagccgatggatttgactgatgaggaaaaggaccgcaagcagacgaaagctgctgctcagaaagagaaggagttaggtaacgcagcttacaagaagaaggacttcgaggtggcaatccagcattacaccaaagccttggaacttgacgacgaggatatttcctatctgactaaccgagcagcagtctacattgagatgggaaagtacgatgaatgcatcaaggactgtgataaggctgtggagaggggaagagaacttcgtgctgatttcaagatgatctcaagggcactgacaagaaaaggaacagctctagtcaagcttgctaagacctctaaggattttgatattgccatcgagacctaccagaaggctctaactgagcatcggaacccagacactcttaaaaagttgaatgaggctgagagagcgaaaaaagagttggagcaacaagagtactatgatccaaaattagcagatgaggagagagagaaaggcaacgagttcttcaaggagcaaaaatacccagaagcaataaaacactacacggaggctctcaagagaaacccaaaggatcctagggtttacagcaatagggctgcctgctacaccaagttaggagccatgcctgaaggtcttaaagatgcagag

SEQ ID NO: 270088 - DNA, 498 bp, Zea mays
agcatgacccgaacaaccaggaactgcttgatggtgttaaaaggtgtgttgaacagatcaacaaggccaacagaggtgaaataagccaggacgaattgcaagaaagacagatcaaagctatgcaagacccagagatccagaacattcttaccgaccctatcatgcgacaggttctaatagatttccaggagaacccaagtgcggcccaggagcacctgaagaaccccggggttatgcagaagattcagaagcttgtaagtgctgggatagttcagatgagatgatcgagcgatgcgatgattggctttgtttgttcacgtgcaccctggtcatacatatgttttaacaagcagcagcggcataagaatgaacctgttcgggggctaatcttatcccatttggattgtaagtgcattgacattggataattcatgtttgtggcactgagtttccagttacgctactttctaatcaaaaaaaaaaaaaaagggcggccgc

SEQ ID NO: 270089 - DNA, 496 bp, Zea mays
ctcatcgctcctcttcctcctcccccgcgagcgtgtctcgtgccctattaatgcggtggcggtgacagggagtcgagtcgagtcgagtcgagtcgggcgcggcgcggcccgggcgctgggacggcgacgagacgagacaccgcccgtgaggaggagtgcaggaccaggcagcgccagcggctccgggctcggctcttgcgtgcgccgctcgtcgtgaaggattcgtcggtggaggtagcaggagtccgcagcaacaagatgattgatggcaggcggcattcggtggacatccccgtctcgagggccctgttggccatcatgcggtccagatccctgagggacccggacaccaactcactggccaagttctccgccaagaaaaccatctgggagggcagctccctcgacgaggacgaactggagggggcgaacaacaagaatgcctacggcaggcacagcttcagctacaacgcgtacgatcacctccagcggagga

SEQ ID NO: 270090 - DNA, 1143 bp, Zea mays
aaagaaacagaaatccggctcgcacctcgcacgcaccgacgcacgagaccgaccaccttccggaccccaccactcccccgcgcgcgccgtgcgatcaccgccggcccccgccctcaccctggccgccttgaggaaaagcaaggccaacgccttctcctcctcctcctctccaccgaggtcgcgccgcgcgcttgccgtcacgatggccgcgtcgctgctcgtgctcgccgtggcgttcctggttggcgctggccacggcggcatcgatgggggtgcagcagctcacgtggaggtagagggctctgaggtgacctacgggagtgtgattaagctgttgcacgagaagacaaagcaccgtctgcactcacatgatgtgccgtacggctcaggcagcggtcagcagtctgtcaccggctttcctgaaggcgatgactcaaatagctactggatcataaagcctactccagattcatcgtctaagcaaggtgatgccatcgaaactggtggcatcatcaggttgcaacacatgaggacacggaggtggttgcacagtcacctgcacgcttcaccgttgtctggtaaccttgaggttagctgtttcggcggggatgaattgtcagatagtggtgaccattggaggctagaaattgaaggaagtggaaaagtatggaaaagagatcaaaaggtgcgacttagacatgttgacaccggaggttatctgcatagtcacagcaagaagtacaatcgccttggcggtgggcagcaagaggtctgcggtgtccgagagaagcgagctgagaacatttggttgacagcagagggtgtttatctcccagttaacgggagcaagtgaaaaagcactttctagcatttactatttttaatgttaatcagtataggatcagatattttgccagctttcattcgtccttgtcttaagaaaaacgaacatgggacctgaccccctagtgatatgtttaagttggaatgttggatatcgatgatgtcgacaagaccaggacagcgcatgcttgtaattgatatttataatccatatatgaccgtgtagatacccagaggaaaaagatgcatgtaaaaaaaaaaaaaggggggcccccccaataagggccccccccaaccggg

SEQ ID NO: 270091 - DNA, 492 bp, Zea mays
cggacgcgtgggcggacgcgtgggccgcacgaaccgacgcactagaccgacccgcgaatcccccgcgcgcgcgccgtgcggtcaccgtccgaggccacggcaccgccggcccccgcccccgccccggccgccaagagcaaaggcaaggccgacgcttcctcctcgtcgtcctcctcctccactccaccgaggttgcgccgcgcgcttgccgtcgtgatggccgcgtcgctgctcgtgctcgccgtggcgttcttggttggctctggctccggggggatcgatgggggcgcagcggctcccgtcgaggtggagggcaccgaggtggcctacggtagtgtgatcaagctgatgcacgagaagacgaagcaccgtctgcactcgcacgatgtgccctacggctcaggcagcggtcagcagtctgtcaccgggtttcctgaaggcgatgactcaaatagctactggatcataaggcccactccagattcatcgtct

SEQ ID NO: 270092 - DNA, 618 bp, Zea mays
  unsure (1)..(618): unsure at all n locations
ttcgggggtgctcaaactttcgccgtccggcgggttcaaaaaccttttaaccatggcgcgccgaacaaccgcgggggccgaagccgcaacgccgaagccgccacggcagtacaagctagctccgcaaagcgagctgcgtgtggaggtgctccccgacgcgcccttccgagtgcgcctcgtcactggcaccgcaaagatcttcggcaccgagctgcctccggagggctgggtccccgtccttccccgatccaagatcgccattttcacctgccacggcgcgacggtggaattggacggngtgagcgagagcgagtacacgtctgacgagactccaatggtaatttatgtcaacacgcacgccattctggatgcccgcacgcaagggcgagaaccgccgcagctcaggggggcgataaggaggcctcacagggacctagagtgattgttgtggggccaacagattctggaaaaagtactctctgcaaaatgcttcttagctgggctgccaaactgggctggaacctacgtatgtcgatttagatattggccagggatctataacgatccctggatgtatttctgctacaccaattgagaaacctatagatataattgatg

SEQ ID NO: 270093 - DNA, 460 bp, Zea mays
gtccgtagcctgggatcctttaaagtcgacccacccgtccgcttttggattatgttttccggtatacaactgggccaaaagtaatcggtttcagttcagtttactggattggagttcactggtacttgcagcacatggtcctcacctggaagtgttcaaactggccaatgtcatttgtggtcacatactcacatgcttgattattcagttctgagttctgatctttggctgtcccgctgtagtaatctttaatgttctttaccagtggatggtcaaagcagttttttgatttgcatgcaatatttgagctgtggcataagaattgactgttaactcttgtagaggtgggacaatttcactggttttgcagaatgttcataagctgtttgatttcatatatcaccctactgcatgtgaacttcctattgatagaatttttggttgctcactattatatagt

SEQ ID NO: 270094 - DNA, 416 bp, Zea mays
  unsure (1)..(416): unsure at all n locations
ctagtggccaaggtgatcaacaagataaagatcgaagctggtgggtctcatcactttatcagatatatagcagacgatacttgctacgccgaagtgctttggaattattcatggtagataggtcgaatttcttttttgactttgcggatattgatgcccgtaaaaacgcttatcgggccattgttcataccaaacctcctaacttgaatgacatctttttagctacccagagagctgagcagattcttaaaagaactcagttgatggagcgctgggctaattgngagatcaacaantttgagtacttaatggaacttaacacactggctgggcgcagttacaatgacattactcagtaccctgtttttccctgggtagtagcagattacaaatcnccgagtgttgaatctggatga

SEQ ID NO: 270095 - DNA, 658 bp, Zea mays
gcgcgcctggggtttccctagggtttggttgttaccaaccccagccgggggagcgcggaggtggcggcggcggcggagatggacggggaggagattggcctggtcctcgcccgcgcctcggacctccgcaccaggatatcggcctgcgccgctgccgcggcgggggcgccgggtccgcggcgggacgatgaggaggcagcgaagcggttggacgcggcggagggcgatgaggagggagccgaggaagaggaggatgaggaggaggagggtggggagccttgtcggcatcagcgacgcgctcgagtcgctcgagcggcagctcgccgcccttcaggatctccagcaccaacaaagatacgaacgggaaaccatcttgagccagatcgaccgaagccggaggtccctgcttgccaagctcagagagtacaaagggcaggactgcgaggtgatccacgaggctgccgccttcgctggcgagagaatagagcgcgacgacggcctcgtcctgcctccttactcggaccatgtcaccaactcgttcgcgctcgacgacctgtaccctctgagctacatgtccaagcccaagcgcctgcacactcaaccagaactccgaggacgacgggactgcgcaggacgacgcgagaacgaagggcgtgag

SEQ ID NO: 270096 - DNA, 516 bp, Zea mays
ctagactagaccgaccgccaccattgcccccgtgtcttaacacggggcgaaaattcctttcgagatctcgcttctctaagcttccgcggcggcacggtgatgactatgacccccgctccggtggcgaacggcgcagcggccggcgctggcgggggcatgaagcggcggggcggtaggttgtggtacgcggtcgccggtgctctcctcgtggccctcctcgccgtggccgtgagctaccgcagcttcccgggcgtcccttcctccccctcgtcacctggaagctgcggctgccctgctgcgaggaagtacacggggatggtggaggactgctgctgcgactatgagacggtggacgccatcaacgaggaggtcctgcatccaatcctacaggaactcgttaagttgcccttcttcaggtacttcaaggttaaattgtggtgtgactgccctttttggcccgatgatggaatgtgcaagcttagagattgtagtgtttgtgagtgtccggagaatgag

SEQ ID NO: 270097 - DNA, 412 bp, Zea mays
agcgcattgtcgcagcacagcatcacgagcaaagtccccgtgccagcgaggaaacaccgatccgattcgagcgggagcgcgcgtaccagtggggaacatctggttgatgtattcgagagcgctggacttgtccatttctccggcgagatctctgccccgcgcgcccgcgctcggaggatctggcgaggtctagaaggatctggaaggggagggtggtgcggaggagctgatctggcggcgaacgggcgccgggcttcccctcgcgcacgcgaggggaggtggtggcgagagaggtggaatcgccggcggatactactccccgtcgttggcagctcggccgttcaacgggtgggcgcggagtccaatagcccgcttcctattatgagagttgtaaaagttgaagtgttcactt

SEQ ID NO: 270098 - DNA, 379 bp, Zea mays
agccagcccccccaaaccctaggctgccgccaacccgactggctcccccctcactcttctcccgccatgaactaccgcttccagaacctcctcggcgcgccgtaccgcggcggcgacgccgtgttcgcgggagactcacccgttctcctctccgctgttgggaatcgcgtggcctccactgacctcactgcctcctcgtctctcacgcttccgttcgagtcctcatccaacgtcacccgcctcgccacttccccctcgggcgacttcctcctcgcagccgatgacaatggccgcgcgctctaagccaaccttcgacggcgggccgtacttcaacgggttttctttaaaggcgcgccattaagcggtcggtttaaccccg

SEQ ID NO: 270099 - DNA, 546 bp, Zea mays
  unsure (1)..(546): unsure at all n locations
caaacaaggaagagcgggagaggcgtgttttggttagaaaattcaagttcgaagaaccacgtcgtgaacagatagatgaactaaagattgatttgtttaagcatttccgagaagatgtaagcctgcgattatggaactcagactttaagaggcaaatcgatggtattgaattgctacaaaaggcacttccttcaagttggaaagaagtgattgaacttcttgacatattattaaggtggtttgtcttacgcttttgtgaatctaacacaacatgtttgttgaaggttcttgactttcttcctgagctttttgatattttaaaagaccagtcatacatgttgacagaagctgaagctgcaatttttcttccttgcctcatagagaagtctggtcataacattgaaaaagtcagggaaaaaatgggggagctgataaagcaaatgatcaacatttactctcttcccaaactaattccctatatactngaggggctccgctccaagaataaccgacaagatagaaatgtgtgatattatggatatttca

SEQ ID NO: 270100 - DNA, 894 bp, Zea mays
attctttccgccgcacaggcgctcagctccgcaacgccgccggaaatggtcgccgccacagccaccgccatggccaccgctgcatcgccgctactcaacgggacccgaatacctgcgcggctccgccatcgaggactcagcgtgcgctgcgctgctgtggcgggcggcgcggccgaggcaccggcatccaccggcgcgcggctgtccgcggactgcgttgtggtgggcggaggcatcagtggcctctgcaccgcgcaggcgctggccacgcggcacggcgtcggggacgtgcttgtcacggaggcccgcgcccgccccggcggcaacattaccaccgtcgagcgccccgaggaagggtacctctgggaggagggtcccaacagcttccagccctccgaccccgttctcaccatggccgtggacagcggactgaaggatgacttggtttttggggacccaaacgcgccgcgtttcgtgctgtgggaggcgaagctgaggcccgtgccatccaagcccgccgacctcccgttcttcgatctcatgagcatcccagggaagctcagggccggtctaggcgcgcttggcatccgcccgcctcctccaggccgcgaagagtcagtggaggagttcgtgcgccgcaacctcggtgctgaggtcttcgagcgcctcattgagcctttctgctcaggtgtctatgctggtgatccttctaagctcagcatgaaggctgcatttgggaaggtttggcggttggaagaaactggaggtagtattattggtggaaccatcaagacaattcaggagaggagcaagaatccaaaaccactgagggatgcctaagagattgatgcattttctttttgttccgttaattggctgttctgccatattgat

SEQ ID NO: 270101 - DNA, 1268 bp, Zea mays
  unsure (1)..(1268): unsure at all n locations
ctggtgatccttctaagctcagcatgaaggctgcatttgggaaggtttggcggttggaagaaactggaggtagtattattggtggaaccatcaagacaattcaggagaggagcaagaatccaaaaccaccgagggatgcccgccttccgaagccaaaagggcagacagttgcatctttcaggaagggtcttgccatgcttccaaatgccattacatccagcttgggtagtaaagtcaaactatcatggaaactcacgagcattacaaaatcagatgacaagggatatgttttggagtatgaaacgccagaaggggttgtttccgtgcaggctaaaagtgttatcatgactattccatcatatgttgctagcaacattttgcgtccactttcaagccactcccgggaaaggagacgttccattccaactggctccgaaaccaaatgagcgatgctgcagatgctctatcaagattctattatccaccggttgctgctgtaactgtttcgtatccaaaggaagcaattagaaaagaatgcttaattgatggggagctccagggctttggccagttgcatccacgtagtcaaggagttgagacattaggaacaatatacagttcctcactctttccaaatcgtgctcctgacggtagggtgttacttctaaactacataggaggtgctacaaacacaggaattgtttccaagactgaaagtgagctggtcgaagcagttgaccgtgacctccgaaaaatgcttataaattctacagcagtggaccctttagtccttggtgtccgagtttggccacaagccatacctcagttcctggtaggacatcttgatcttctggaagccgcaaaagctgccctggaccgaggtggctacgatgggctgttcctaggagggaactatgttgcaggagttgccctgggcagatgcgttgagggcgcgtatgaaagtgcctcgcaaatatctgacttcttgaccaagtatgcctacaagtgatgaaagaagtggagcgctacttgttaattgtttatgttgcatagatgaggtgcctacgggaaaaaaaagctttaatagtattttttattcttattttgtaaattgcatttctgttcttttttctgtcattaattacttatattttagttctgtaggagattgttctgttcagtgcccttcaaaagaaattttatttttcactcttttatgagagctgtgccccctagattgccttggatgattaaaaaaaaaanaaaaa

SEQ ID NO: 270102 - DNA, 455 bp, Zea mays
cccacgcgtccgcacacgcgtccgcggacgcgtggtcagatctttgcagccaccgttctatcttccttatcttcttctccagaacggcaatccttctgcccggtccttcctccagttcggctagcggggcagcgctccctgctgcttctccctccctggtactcctccagtcgcggcctcccactccccagccgatttctctgcgcgcgatactccctccagtcctccctgctcgcgtcgtgaattccctgccatggacgcgcgccgagctcctcgcgcgggtctctggtgcccagccgactagctcatctcccttttctctgatggcgcgcccaagcactgctcctgcaccgtgccgcgttccagctcagactaccctgctcctacacccggttccagctcgctggagcttctgcgcacgtgggatcccaactcgcggagctttctactgctct

SEQ ID NO: 270103 - DNA, 1975 bp, Zea mays
ccggactctccccccgtcgagcacacaacacaccctcctcgtcctccaatccaatcaacctggtagactcgcttcgcttctcccccagccgtcggacggagctcctcgcagtcgcagcagccgccgatcagcctgcgctcgggctcagcgctggaaggtgttggaagagaataacctgaaggttcacagtaaccttcatctgtcggaagatgtatcgggctaagagggctgcattgtcaccgaagtgaagcgccgcgtcggcaagtacgagctcgggcgcaccattggggaagggaccttcgccaaggtccggtttgctaagaacactgaaaacggggaacctgttgctatcaaaatccttgacaaggagaaggttaagaggcacagattggttgagcagattaagcgtgaaatttgtatcatgaaattagtaaggcaccctaatgttgttcgactgtttgaggtgatgggaagtaaagcaagaattttcatcgttctggaatatgttaccggcggagagcttttcgaaatcattgctactaatggaaggttgaaggaagacgaagcacgtaaatacttccagcaactgattaatgctgttgattactgccacagtaggggagtgtatcacagagacttgaagctcgagaatttgctgcttgatgctgcaggaaatctcaaagtttctgactttggtttaagtgctttaaccgagcaagtgaaggctgatggtctgcttcatacaacatgtggaacccccaattatgttgcccctgaggtgatcgaggatggaggctatgatggtgcaactgcagatatctggtcttgcggagtaatcctctttgttcttcttgctggatatttacctttcgaggatgacaacatcatcgccctatacaagaagatttcagaagctcagtttagctgcccctcttggttttcagctggggccaagaacatgattaccagaattcttgatcccaatcctacaactagaatcacgatttctcagatactggagcatccttggttcaaaaaggggtacaagcctcctgtttttgacgagaaataccaaactagcttggatgacgtggatgctgcttttggagattcagaagaccggcatgtgaaagaggaaactgaagatcagccaacctcaatgaatgcattcgaactgatttctctaaaccaggcactgaatctggagaatttgtttgaagcaaaggaggagtataaaagagagacaagattcacctcacagtgccccccaaaagagataatcacaaagatcgaagaagctgcaaagccgcttggctttgatgttcagaagaaaaaatacaagatgcggatggagaacccgaaagcaggtagaaagggcaatctgaatgttgcaactgaggtcttccaaatagccccatccctgcatgtagtcgagctaaagaaggcgaagggggacactctggagttccaaaagttctacagaagcctgtcgacccagctgaaggatgttgtgtggaagtgcgacggcgaggtggacggcaacagcgcggcagcatgaaagcgccctttgaactttccactggacggcgccggttttcctttgtacatagcttctctttcggatgatcccgtgtccattgcagagtcggttttgcaagcaagttctttggtttatttgtagtaagcccggtgaaacaaccgccctggaggctgttgtggatgagcttactggcgtgtttagttcgtttcatggtcgggaggttggatggaatggaaaccacaatcaaggctgtagtagtgtgtgtagtaacgaagtagatacatgcatcagatggtgtaagggagtaccagctgttagttcatggtttcaagcttagccccccttcaatttgttcgatgatgtattacttcacaataaacattattacttagatgtatgaggtgagcacacttggtcttttgtcctctttgtgct

SEQ ID NO: 270104 - DNA, 1473 bp, Zea mays
gcccaacttctctcttcacatcgccgcgaaccagctccccgatgcgatctggccgagggaagatggcgactccgccgccgccaatccgccccgccgccgcgctcctcctcctcgtcctcgctggcgtcctcgcctccgccgcgagcgccgatctcgtcatctccaaggcagatcggagggttgatctgacctcgcatatcgttcgcgtcctcgcttccctcaaggctgaaaatgttggaccagaccctgtctctcaagttttactgccttttcccaatattcaagccaagaacttggcagctattagagcattcggcagtgaagggaaagtgaagggtcaaagtactgttctgccaattgaagttgttcaaccttctggagctcccccggagctgacattcttttcagcattgttgcccaaacctttggaaaaaggaaagactctgtacttggatgttctgactgtgttcacacactctcttcaaccattcccagaagaatccgctcacgccgaagcacagcttgttgtctatcaggatagtgctcactatctgtcaccttaccctgttaaggctcagacacttgctatcagattgcctggtgggtagggttgaatcatacacaaggcatccaaacgcaaaacttgtggattcagaactgaaatatggaccatttcatgaccttcccccggtctcctacttacctgtgattgtgcattttgagaacaacaatccttttgcagttgcaaaggaagttataagggagattgagatatctcactggggaaatgtacagattacggaacactacaacattgctcatggtggtgccagactcaagggtgaattttccaggattgattatcaatctagaccttacgtaaggggtgtttcatcttttagacatcttattgcaaaactgcctccaagggcacactctatttattaccgagatgagattggtaatatttccacatcacatttgtggagtgattctatgaagacccaactggaaatagaaccaaggtttccattgtttggtgggtggcaaacaaccttcactgttggttatggtttaccacttgaagactttgttttctattctgatggaaagagatttctcaatatcacatttggttctccattggaggaaattctcattgaaaagcttatcgtaaaggttgttctacctgaagggtcaaaggatatcgaagtttcagctccctttccaacacagcagcagcaagaggttaagtattcacaccttgacattgtcggaagaccagttgttgtcttggagaaacctgatgttattccagagcataatttgtatttccaggtttactacagattcaacaacatatccttgctcagagagccgttgatgctgattactggtttcttcctcctgtttgtgcattgcagcttggccaagtaggaaggagagctcttggatattgacatatcagtacgc

SEQ ID NO: 270105 - DNA, 774 bp, Zea mays
tgtactttaaaaacatgacaaccaggctactaatggaatgttgaaggaagacgaatcacgtaaatacttccagcaactgattaatgttgttgattactgccaaagtaggggagtgtatcacagagacttgaaggactctatactgcataatgttgatggacagactgtttgtattctaaatgggtgtctgagttactcatcaaattctaagattggttccaaacattctggtttgtattcttactatacctattttgaagtaaatgttcacagtgtttttattgctggagtaatacagtttgtccttttttatgaacgagggcatatgattggcttttaataatggtccgacaaccaactacacttgtatttcctacgcttgagcccttgcgatctgcacggtgtgatgctgcctatcacgatagtgctcattatctgtcactttaccctgttaaggcataaacacttgctatcaggttacttggtcggagggttgaatcaaacacaaggcatctaaagcagaacttgtaaattcagaactgaaatatggaccatttcatgatcttccacagttctcctacgtacctgtgattgtgcactttgagaacaacaaccctttttcagttgcaaaggaagtgtattacagaacactacaacattgctcatggtggtgccagattcaaggatggattttcaagttttggtttaaaatttataagtaaccaaacttctaactggatccttttcattattgggtctctgatttccttttta

SEQ ID NO: 270106 - DNA, 1011 bp, Zea mays
ggttgttctacctgaagggtcaaaggatatcgaagtttcagctccctttccaacacagcagcagcaagaggttaagtattcacaccttgacattgtcggaagaccagttgttgtcttggagaaacctgatgttattccagagcataatttgtatttccaggtttactacagattcaacaacatatccttgctcagagagccgttgatgctgattactggtttcttcctcctgtttgtggcctgtattgtttacatgcgtactgatatgtcaatatccaagagctctccttcctacttggccaagctgcaatgggatgaggtgcaagcaactgttcagaaaatccagggtatctttgagcaatgcttagcagttcatgataaactggaggcctcattgcgggatttgtctaggacaggagacattcagtcttgcaaggcagctcgtaaagctgctgacacgcagtttaaggagctatcgaaagatctgaagccactgttggcgactctacagtcatctccccagtcttatcagatattgccaaaggtagaggacttgatcgtaaaggagagagagatgcaggagaagctcatgacaaggcattccaccgttgtcgacagctttgagaagaagctgcgcgggcaagatgtagagaacaggattgctttgcagcagcagaaaattgctgccctgaggcaggaggttgaatctcttttagagtacattagtgagatttgagcaaatgagtgctgctgtggcgtgatacatctttagcgattagactgcctttgtttggtttagggtttaccccaatattgaaatctactactctgagattgtgtcggtaaccatctagtttcccagttgagagacctggaagttgcaatgaccttgtaacatgataatcagtgtaattctggagctgactaaatttttgcatttaatatcaatatcacaggaaccgtcatcttttggactgaagaaaaaaaagtaagggcggccgtgcgatctag

SEQ ID NO: 270107 - DNA, 2191 bp, Zea mays
cccacgcgtccgcccacgcgtccgggattagccgaccacccgccgaaggccagagagaaatatctcatcttctctccaccggatcggttcaatcgagagcgagggagaaagggaggtggtgcgtcgaggggggccgagattttgccggtttggagccagataggggtatgagctgcttcgcgcaccgccgccgctccgacgtcgcccgccgccaggacggcctcctcgtcttcgtcttcttcctctcgattcccatacgtaccagtagttttaatttaagtagtagtaattgtagtagcaatctcttgtaaactgcgctcgcctttgcgtgttcgtggtccttttgcgctttctcgtccctctttctctcaatctctccttattcttctccttccacggcgaagccggcggctggtatggatcccaatggcctcaaaactggaggccttttgctcccgaccatcgagaggcggtgcacgtcgcctccatccgtcattgtcatcggcggtggcatctcgggcgttgcagctgcccgtgccctctccaattcttcatttaaggtgactgttttggaatcgagagatcgtattggcgggcgcattcatactgataactcgtttggatgcccaattgatatgggagcctcatggctacacggcgtgtgcaatgagaatccactggcaccattgataagctatcttgggctgaggttataccgcacaagcgatgataactcagttctgtatgatcatgatttagaaagctatgctctctttgataaggatggtaatcaggtcccaaaggagacagtcgataaagttggagaaacattcgagagaattcttgaagagacggtgaaagtgcgcgatgagcaggaacacgacatgccactgctacaggcaatttctattgtgtttgagaggcacccccatctaaagcttgaagggctagatgatcaggtcttacaatggtgtgtctgccggcttgaggcatggtttgctgcagatgcagatgaaatatctctgaagaactgggatcaggagcgtgttcttactggtggacatggactgatggtaaatgggtactatcctgttattgaagctcttgctcaaggtcttgacatcaggcttaaccaaagggtcaccgaaattacccgccagcacaatggagtcaaggtcactactgaagatggcacaagctacttggccgacgcctgcataatctcagtgccactcggcgtgctcaaggcgaacgtaataaagttcgagcctgagctgccccagtggaagagctccgccatcgccgacctcggcgtgggcaccgagaacaagatcgccatgcacttcgacagggtcttttggcccaacgtcgaggtgctgggaatggtcgggccgacgcccaaagcctgtgggtacttcctgaacctgcacaaagccaccggcaatccggtcctcgtgtacatggccgccggaaggttcgcccaggaggtggagaagctgtcggacaaggaagccgtcggcctggtcgtttctcacctgaagaagatgctcccggatgccactgaaccgacgcagtacctggtgtcgcgatggggctccgaccccaactccctggggtcctactcgtgcgacctggtcgcgaagccggccgacgtgtgcgcgaggttcgccgcccccgtcgagaacctgcacttcgccggcgaggcggccagtgccgagcactcggggtccgtgcacggcgcctactcgtcgggcatcgccgctgccgaggaatgcaggaagcggctcctggcgctgaagggcatcccggacctggtccaggtcgcggcgtgggaggagatggccggagctgtggctcctctgcagatttgcaggacctgagtgagattggatcactggctgcctttggacattggagtggatcgtggatcgcttcgctgctccctgatggttgccgagtcttttttttatatttaccttgaaggccgttgtgtcttgtctggaataaatcaagattgactggcactgaaagtgtcatcgcgtcactctttcatacttattaaatatcacaagtctgtcctgagatctcagcctggtgcctgcgtgctgcctttgccttgtatatgacgttttactttcttttagtctcaattattcaaattttttttttactaaacaaaccaagacaacag

SEQ ID NO: 270108 - DNA, 489 bp, Zea mays
tgagaaagatggctggaaatggatggtgcctccgccagtcagcaagaggcctgttctctctggtgatcctgagaccgacaagctaatccggaaagcaacaaagcgtgctcatttatctgttgctgaaaggctgcttaaagagtttggttgttctatctgccgggcggtgattaaagagccacttacaacaccatgtgctcacaacttctgcaagacttgtttgcttggtgcatatgatagccagtcctctatgagggaaagaagccgtggtggtcggactctaagggcacagaagattgtgaagacgtgcccttcctgccctactgacatctgcgacttcttagaaaatccccagatcaaccgagaaatgatggagttgattgagtccttgcaacgcaaggctgttgaagaaggcaagatggctgcaggtgatgccgaggaatctggtgatggtgactcggaggaaaaatggggtgctttggtgaaagg

SEQ ID NO: 270109 - DNA, 976 bp, Zea mays
ctggtttgcatccccatatacccaaccaggaccagccaaagccctccactcctccccgcctccgcctccgacgtcgaacattcttctccaatggcgacggcccccgcatccctctcgctctccgcctctaccctgcccacccggctccgtgccgcagcggtgctggcgggcatgcgctggaggcagccgcagcgcgggcggatggtggtgcgcgccaagatccgggagatcttcatgccggcgctgagctccaccatgacggagggcaagatcgtctcctggtccgctggagagggtgatcgcgtctccaagggtgacgccgtcgtggtcgtcgagtctgacaaggccgacatggacgttgagaccttccacgacggcatcgtggcggtggtcctcgtccaggctggcgagtcggcgccggtcggcgcgcccatcgcgctgctcgcggagtcagaggaggaggtgccgctcgctctcgccaaggctcaggagctctccaacgggcagccgcagcaggcgcctcctgctccgacggaggatgccgcagcgacgccgccccctccttctgctccggccactgctcccacgccggtggccgtgggtacgaagggcattgccagcccgcacgctaagaagctggctaagcagcacagggtggaccttgccaaggttactggcaccgggccgtacggtcgaattacgccggcagatattgaggcggctgccggaatcaagccgaagtcagagcccactcctgctgttgctgctgctgcgccaccacctgtggccgcgccttcagttggtgcggtgcctcaggcagcagtgctgccgccggttcctggcgcgactgccgttccattcactaccatgcaggctccagtgaccaagatcaactttgggatctaagcagcagggacacgtggtgtaattttcacacttttattctttaattttcatcagctttattaatatgttt

SEQ ID NO: 270110 - DNA, 800 bp, Zea mays
cacattcttaaaaacttgttaaattcataggtaaggacctttacataactgctctaagtgcccgccctcccgtgcgtcgattttcggaggaatttattcgaggaatctagtgtttgaccggctccgctcgattctgcttcgttaccacgcgggtgctatcgaatcttggcggagatggggctcacgttcacgaagctgttcaggcggctattcgccaagaaggagatgaggattctcatggtcggtctcgatgcagctggtaagaccaccatcctctacaagctcaagctcggcgagatcgtcaccaccatccccaccattggatttaacgttgaaactgtcgagtacaagaacattagtttcactgtttgggatgtcggtggtcaggacaagatccggcccctgtggaggcactacttccagaacacccagggcctcatttttgttgtagacagcaacgacagagagcgtgttgttgaggccagagatgagctccaccggatgctgaatgaggacgagctccgtgatgctgtgcttttggtgtttgcaaacaagcaagatctgcctaatgccatgaacgctgctgaaatcaccgataagcttggcctgcactccctgcgccagcggcactggtacatccagagcacatgtgctacctctggtgagggtttgtatgacgggcttgactggctttcgaacaacatcgctaacaaggctcgaagcatctaggcatggcttcaatcagtggaagcaaactgcctctaccattacagctatgaagtatatagtcgtgactgtgt

SEQ ID NO: 270111 - DNA, 426 bp, Zea mays
tttcgttaccacgcgggtgctatcgaatcttgggtaggttttcttcgcttgcgggctctcgaatctgacccatttccacggttcgcgtgcgccgttgccgcggatctgcgtgcttgtggcatcgggttccgtggatctagttgcgcggagatggggctcacgttcacgaagctgttcaggcggctattcgccaagaaggagatgaggattctcatggtcggtctcgatgcagctggtaagaccactatcctctacaagctcaagctcggcgagatcgtcaccaccatccccaccattggatttaacgttgagactgtcgagtacaagaacattagtttcactggttgggatgtcggtgtcagtctaggtccgcccctgtggagcatacgccagacaccagggctcttttgttcgtgcacacgcagg

SEQ ID NO: 270112 - DNA, 291 bp, Zea mays
cgcaccattggatttaacgttgaaactaatgttcttgtactcggcggtttcaacgttaaatccaatggtggggatggtggtgacgatctcgccgagcttgagcttgtagaggatagtggtcttaccagctgcatcgagaccgaccatgagaatcctcatctccttcttggatttaacgttgaaactgtcgagtacaagaacattagtttcactgtttgggatgtcggtggtcaggacaagatccggcccctgtggaggcactacttccagaaccaccaggggctcattttt

SEQ ID NO: 270113 - DNA, 362 bp, Zea mays
agcgatgaggagaaagaagctacacggaaccacgcgctcacggagtcacggctcatcttcggaccttccccagggccccgcgatatcgctaggggttccgcgatggcgacacttcgctccccgagcccccgcggagacgttctcctcgactcggcgccgctcctcggtggtgtcgggcggcgccgcgcgggcgcgctgcgccggccgtctctccggggcgcggcgcggctgctgcggcgtggcgggcgccgagcgatgcgggagccgtcactgctggtgcgggaggccgcggcggagcagctggaggaacggcaggcggattgggcctactccccgcccgtggtggcgctcgacttactttg

SEQ ID NO: 270114 - DNA, 592 bp, Zea mays
ctcctcccgctccgagaaagcaaacaagggggggctccgccggcggcctcgcgctctctcccccgccgctccttctctacgccaggcctgccaagatgaagctcgtcagattccttatgaagctaaacaatgagacggtcaccatcgagctcaagaacggcacggttgtccacggcaccatcaccggtgttgacataagcatgaacactcatctgaagacagtgaagcttacactgaaagggaagaaccctgtaacgctcgaccacctcagcgtgcgaggaaacaacatccgctattacattcttcctgacagcttaaacttggagactttgctggtagaggaaacccctagggtgaagcctaagaagccaactacaggaaagcctttggggcgtgggcgcggccgtggtcgtggacgtggtcggggacgggggccgccacgctgacaggtttcccctgctgtgggctctcttgcctgacaagttccctgtacgatgtaacctctttcccccgcacgctgtgtgaaagaaccgttgcattgttacccttctgatgaacgtggactgaaatatctcaatctcaagtggttctt

SEQ ID NO: 270115 - DNA, 306 bp, Zea mays
tcctgccgctccgagaaagcaaacaagcgtcagtaccgccggcttcctccgcgctttctccccgccgccgccgccgccgctccttccctacgccaggcacgccaagatgaagctcgtcaggttccttatgaagctgaacaatgagacggtcaccatcgagctcaagaacggcacggttgtacacggcaccatcaccggtgttgacataagcatgaacactcatctgaagacagtgaagcttacactgaaagggaagaaccctgtaacacttgaccactcagcgtgcgaggaaacacatcgctacta

SEQ ID NO: 270116 - DNA, 475 bp, Zea mays
gcgctcctcatcgaccctctcgagagattggtgtgcacgatgaggtcgcttcagggcgcgctcatcatcgccggcgtcttccaggccgtcgtcggcttcttcggcatatggagagtcttcattaggttcctgagccccctcgcggcggtccccttcgtcacgctcacgggcctgggactcttcttcttcgcgttccccggggtcaccaagtgcatcgaagtgggtctccccgcccttgtcctcctggtgatcttcgcagagtacgcctcccacgtgttcgctaaggggagcttcgtgttcagccggtgcgccgtgctggtgaccgtcgtgatcatctggatctacgccgagatcctgacggcggccggcgcctacaacgagaggggccctgtgacgcagttcagctgccgcgccgaccgctccgggatcatccagggctcaccttgggtgaggtttccttatccgttccagtggg

SEQ ID NO: 270117 - DNA, 583 bp, Zea mays
atcccccgacgtcctcctgttcatctcctcttctccctctcctcctcctcctcctcctcgtcccccttcctcgggttggaaattggaatggaggcggcgacgatggcgtggacggcggcggtggtcggggcggggctggtgtactggttcgtgtgggtgatgggcgcggcggaggtgaagggcaagcgggcggtggatctcaagatgggatccatcacgcgggacaaggtgcaggacaagtacacccagtactggtccttcttccgccgccccaaggagacggccaccacggcggcgtcggcggagaaggtgccggccttcgtggacaccttctacaacctggtgaccgacatctacgagtggggctggggccagtcgttccacttctcgccgtccctgcccggccgtttccaccgcgacgccacgcgcgttcacgaggagcgcgtcgccgacctcctcggcgcccggccgggccaccgccttctcgacgtgggctgcggcgtctgcgggcccatgcgcgccatcggcgcgcactcgggatccaacgtcgtcggcatcaccatcaacgagtaccaggtgaacc

SEQ ID NO: 270118 - DNA, 441 bp, Zea mays
ccacgcgaccgcaaccccctcctcgccgctcgccgttgaagaggtacgcccacgggccggcgagaatggaggcggcgacgatggcgtggacggcggcggtggtcggggcggggctggtgtactggttcgtctgggtgatgggcgcggcggaggtgaagggcaagcgggcggtggatctcaagatgggatccatcacgcgggacaaggtgcaggacaagtacacgcagtactggtccttcttccgccgccccaacgagacggccaccacggcggcgtcggcggagaatgtgccggccttcgtcgacaccttctacaacctcgtgaccgacatctacgactgggggtggggccagtccttccacttctcaccgtctctcgccggccgctctcaccgcgacgccacgcgcgtccacgatgagcgcgtcgccgacctcctcggcg

SEQ ID NO: 270119 - DNA, 446 bp, Zea mays
  unsure (1)..(446): unsure at all n locations
gcgagcccccccgccgcaacccgcggccgcgtcgggagacccgcagccgccgatggcgaagaagcacagggacccagcctctgaggccgcgagcggcgactccccggccgcgtccatccgctccctcttctccgcggacaacccgttccgccggaaggcctctacggaggagccccccgcgactcctgcacccgccacgacgcccctccccatgcaacccagccgtgacgccagggatgccgagccgtcctcgaagaagaataagaagagcaaggaggagggcccgcggcgcaagcggaagcgggacgagttggaggccggccgggagcggcggcgaggcgcggagaatcccgcgagagttggggagaagaggaaggctcccgacgacgcggcacanggggcccgggaggacgaggaggaggctttcgactaccagagcaagctgc

SEQ ID NO: 270120 - DNA, 447 bp, Zea mays
tggtgaaacagaagaggcacagcttatacccggccactgaccgcgaagtgcacagaggggggaaggaaggagagaccacgtaccgtctgcgaggaggacgacgaagaaggagaagaggctgattcgatcgagcagcatggcgcggcggccacggccgtgtgcccacctgacggccacgctccttctgctcgccgtcgccgcggcggtcgccagagccgccgacggcgacgagaagtgcggcagcccgtgcgggaacccctgcggcgagccgtgcgtgtacgcgagcccgccgccgccgccggtctactacccgccgccgccgccgcccgtgtactcgccaccgtcggcgtcggagtactacccgccgacgaccccgaccccgaccacgccctactgcccgccgtcgtcgtcgggcggcggctacgagccgtcgcccggatacacgcc

SEQ ID NO: 270121 - DNA, 900 bp, Zea mays
ggaggatcatatactggaatcagtctgcggagaatctgtttggctatcctgcatcagaagcccttggtcaggatgccctcatgcttctggttgattcccatgaccacaatgcggtaaataacatcttccaacgtatttctatgggtgaaagttggactgggaagtttccagttaagaacaagcaaggacatagattttcagttgttgccaccaatacacctttctatgatgaagatggcagtttgatgggtttcatttgtgtttcaagtgattcccgccaattggagcagatattttgtaagcctccgacctctgcaaggtcccagtcagaatcatctaggacatcttgtgatgggagtcgcagcaacactagtcgcagaatcaattcgttgaacagaagtccttttgatcctcagatacccctgcaaagcacttttgcatccaggataacgaatttggctaccaaggtcacaaataaagttcgttctcgggtcagcacagacgagtatggcctagaacgggatggtggcagtggtgagagtcattgttcggatcgtggtgcaaaggaagaaccaacatctagcggaacaaatacacctagaggggatgcaccacatggtccctttgctacagatgagaactcccctgggaaatcaacgaacccaagcagcgacgaatcagaaggaaaagtaggtctgcacaagtttttgggttctaaggcagaggcactactgaacaagaaagggatatcatggccttggaaagggcgcgagaatgagggacctgatgaaagaaaccatgtgatattgccgtggttgcatggtggccaagagaatggtgtgaatcatcagaaggtttctgattctagtatatctccagacgcccaaggcgctgaacaca

SEQ ID NO: 270122 - DNA, 736 bp, Zea mays
gtttttgttaggttggagaccagtgaggatacatggccttctaggaaacatgtggttgcttgtgcagctgtctgcagaacatggagagagatgtgtcgagagattgtcaagagcccagagtcttctggaaaaatcacttttcctgtttccttgaagcagcctgggcctcgagatggaactattcagtgttttattaagagggataaatctacccaaatctacagtctgtaccttagttttagctctgccgtgcctgtcgaaaatggcaaattccttctatccgcaaaaaggaactgccgtgcaacatatacagaatatataatatcaataaattctggtgatacatctaggtgtacaagtaacaacacatacattgggaaattaaggtcaaatttccttggcacaaaatttgtaatatacgatactcatccgccatacaatggaactagtcaaacagtggcagggaaaacaagtcagagattctactccaagaagggatcaaccaaggtttcttgcaggtggtacagtattgcacaaatctcatacgagctgaatgtcttgggaactcgaggcccaaggcggatgaactgtgtaatgcactccatcccagcttcatgccttgaggctggtggcagtgtcccttgccagccggacagcattgcagcccactctgttggcggatcattcagcagtgtgtccttgtcaaagtcatcgactatggaccactctatgcatt

SEQ ID NO: 270123 - DNA, 283 bp, Zea mays
aagcagcctgggcctcgagatggaactattcagtgttttattaagagggctgaatctacccaaatctacagtctgtaccttaagttttagccctgttgtcacagacgcacagtatcaggctcaatattccatagaaaaagggagacgaaaatacatgtttttctgccgtgcctgtcgaaaatggcaaattccttctatccgcaaaaagaactgccggtgcacctttgctgaatatataatatcaataaattcgggtgatacctctaggggtacaagtaacaac

SEQ ID NO: 270124 - DNA, 477 bp, Zea mays
accccgccgccgccgccccccgtcgccccggctcccgcgcgcatcggtctggccctccccgtctcgtctcccccgctccgctgccgcaggtctattgtcccttccagaaacctggctgccagaagggagccgaggggaggaccatctactgcaaagcccacggtggcggcaggcggtgccagtacctgggctgcacgaagagcgccgaaggccgcaccgaccactgcatagcccacggcggcgggcggcgctgcagccaggacggctgctcgcgcgccgcgcgcgggaggtccggcctgtgcatcaagcacggcggcggcaagcggtgccagagggagagctgcaggaggagcgcggaggggcactcgggcctctgcatctcgcacggcggcgggaggcggtgccagttcccggagtgcgccaagggcgcccaggggagcacggggctgtgcaaggcgcacggcggcgggaagcgct

SEQ ID NO: 270125 - DNA, 461 bp, Zea mays
cgcacagccctaggcaccaaactgcccacacgcacagccgcggagccgccagagcctgacgctgccgccgtcggccgtcctccgccctccagttcttaaggaaagatcagtttgatgtcccagtacgcgggccagaagcgctgcctcagaaaaagtgaagctgataattgcaatgatgaggacattggctctccgacctctatagatgcagaagttgggaaggaagcaaaattgaagaatcacaataaggaaaggaagaagaaaaagactaagttgttggaatcccagcagaacaaagaggaagaggagatgcggcagctggagagctcattgtttggttccctttatgctccactggagtttggcactgaggtaagggctgcaataactcctgaccgggatgcgccttttgttttcacagataggtctgctggtggtggcatggattatcttcctacata

SEQ ID NO: 270126 - DNA, 650 bp, Zea mays
  unsure (1)..(650): unsure at all n locations
ccgacacttgagccaacatgtcacgcagtcgctttgaccttccctgcgctgcgccgacccccaaactccccccccccccaaaacccaagcccctgcgaccccgagataccaaagccagcagaagaagggatgcagcagccgatgcacatgcagccgcaggcgccggcgatagccccagctgccggaatcaccacggagcagatccaaaagtatctggatgagaataagcagcttattttggctattttggaaaatcagaacctaggaaaattggcagaatgtgctcagtatcaatcacaacttcagaagaacctcttgtatctcgctgcaatcgcagatgcccaaccgcagactgctgtaagccgcactcagatggcgccgcctggtggatctcctggagtagggcagtacatgtcacaggtgcctatgttcccaccgaggacacctctaacaccccagcagatgcaggagcagcagcttcagcagcagcaggctcagttgctaaacttcagtggccaaatggttgctagaccaggcatggtcaacggcatggctcagtccatgcaagctcagctaccaccgggtgtgaacaaacaggatgctggcggngtcgcctctgagccctcgggcactgagagccacaggagcac

SEQ ID NO: 270127 - DNA, 387 bp, Zea mays
tcagaagccgatgcccatgcagccgcaggcgccatcgatgaccccggccgccggaatcaccacggagcagatccaaaagtatctggatgagaataagcagcttattttggccattttggaaaatcagaacctaggaaaattggcagaatgtgctcagtatcagtcacaacttcagaagaacctcttgtatctcgctgcaatcgcagatgcccaaccagagactgctgtaagccggcctcaggaaatcaactgggaggcctgcacaacctttatggccctagtatgtactaccaggcttataggaaactatgttgattcaaatcttttgcaaggtctgatagtcaccatttcttcggtgtcctaatacaatggagcagaactggtgga

SEQ ID NO: 270128 - DNA, 517 bp, Zea mays
tcgcttacgcgtggggctgtgcagagtttgctctaactactctgactattgactgcacatcaccttccggctcacttgtttgagacacatcttataatattcttcaatctaaccagagctcacctaatactgttgctcatatcagccatttttttggatccagatgtctgataagttgatggatgtttggttggatctctgcagttggagctaaggtgtggattgctagttagacattctgagttctagacatttccatctatggagtcttccttccagtgataaatcattctatgcactaactttatttttaggctgcctttaacctatatgccatcatacgatggtgcaggttcactattattcttgatttaagatttttaaaacaattggttcctagtaggatgttttacctgagcgtatgaccgtatgttcatattttatagtccaaaattctcgatttctctgttagggcccatactaatgttagtctagttcttggattgcttcttgcaca

SEQ ID NO: 270129 - DNA, 526 bp, Zea mays
cctacgcgtccgcccacgcgtccgaaaaaatccacgaaccaatttctcagcaaccagcagcacgacctgtgagggttcgaaggaagtagcagtgttttttgttcctagaggaagagatggcaaagggggaggggccggcgatcgggatcgacctgggaacaacgtactcgtgtgtcggcgtgtggcagcacgaccgcgtcgagatcatcgccaacgaccaggggaaccgcaccacgccgtcctacgttgccttcaccgacaccgagcggctcatcggcgatgccgccaagaaccaggtcgccatgaaccccaccaacaccgtatttgacgcaaagcggttgattggtaggaggttctcggacccgtccgttcagagtgatatgaagctatggccattcaaggtcgtggcgggccctggcgacaagccgatgatcgtggttagctacaagggtgaggataagcagttctctgtcgaggagatcttctctatggtgctgaccaagatgaaggagatcgccgaggccta

SEQ ID NO: 270130 - DNA, 724 bp, Zea mays
caggagggaagctaccggccctatttcaccttccgtacgtctcaccccacggtgaggaggaggaagcaaacgtcggagcacgagcacgcgttcttcgcctctcaccccacgggagggacgggaggcgagggcgcggcgagccggcgggcgcaatcggatttggggaggcaaaaggaaaattccggagagcagttcctttccgcctccccatttcctccggatagatttgggtttgtcctgcgtcgattagtccggcgcccgaacccgcaccaatccattcgccgagggatcgagcaagcgaggcgtggatcgcaggcggtattccctgcctgcctcttcttctcctccgcctgttcttgccgcggtctccccctccggccgatctggactcgacagatcattaattttttgttggcatacattcccaaccttgatgtaaagacctccttcattcagaaccctgtgttttggaagggtatttcacaatgaagcccaatcagttgattacatcccatgttgatatacatagggtatacccatacgagttccaaccagagttttcaatgtctcatgatcttggattgaatttgttttcacaagccggtacagtgctgggtacttctttaagacatcataggaagatctcttcttctggaaatgcaatggtccatggagctttcaatcgcctcaacaagctttcccgagctctctatttctggctctc

SEQ ID NO: 270131 - DNA, 1505 bp, Zea mays
caacttggggcaaatttgagagaactggggtatgcttatttttacaggaatgaaagatgggagaggttcatggagtctgagagagaaaagagcaatggagaatgccatggtggcagacatgcatctgacgttatgaacacacgaatgacaaaccaccgtggtggttggcggggtgctggatcccgtggccatctgaggaacttccgaggtccaagaatgcgcaatgagtttgctgatgaatctattggtggcaacaggcactcatttgaagatgaacctgggcacacccgaggtccacataggaggcggcattcaccaccacatggctgcctcatgagagatacggacattgacgaattctacggaagagagattccagagtataggctgccggcccgtggacaaatagaagatctcccagatagcatgatggacgacaggttttttatgccgtattcccatagacaccgtggccaaggtgatcatgggttcatccacagagacagagacaggagtcattcgcctgctgcacagagaagggttggccatgtgcatttccatcgtggacgatcacctgaagcgatgcgcagatcaccaccgccggtaatgcgaactgacagaacatacatgcctcaccgccatcacaacggaagccatgacgagaggggtgccatgcaaagaaatgagaggaggtgcgccatggaaggtgatgcctcaggcttcgagccaccgctacatccctcccacctagctgagttccatacagtagaggaacttgtgggcagaaggaagtatagggagcggagaccatatcttcattcaacggtgagtgacgaagacgagatgctcccctaccgcacggaggatgacatggagtttgctgaaggaggtgctggtccacgagagcacaacggcggcttcaggaacaggatggggcacaacagggcacgaggggaacaagaggacgggtacaggcaccgccgtggaggtcatcaagggtggcgagacagtgacacaaatgacagaccaaagaggaggaggtactgacctactgcactcacagcttgaccggctaatgaagacgacgtcgttggcctttgggtggactggactggctgatgcatctgccacagatctcggtctcagacgaacccaacacctttttgccagcgtctcccattccaatatattgctttgtttttgctgcattattttctcaggacattgtgctgcagcgtctaaagcatactgctccctccctctctctatagtaaccctgggtcctgctccgtttacaagccgagctgctagtacatgtggatgatgaagggtgggtggagacactgaacattttgaggccaagctcaaagtgaaataagaacccccccggcatgtgctatttttgccctgggtgctagtgcggcccttgtattaaagaccgacttgtctctataatttggtttcgagttgatgtgagtcataaaaaaaaaaaaaaaaaataaaaa

SEQ ID NO: 270132 - DNA, 620 bp, Zea mays
cgttccctacaccctactccctccgtcagccagcgaagttccttcagtcactcaacaccttacgtccctagccatcctccgccgcctccgtctctgcttccctagagccgtcgcgatggcagcagcccctgccggtgcccctgcaatcaccgcatcctcctcctttgtttcttcgtctccgttctgtctcaaggcatcgatgaccagccagcgccgacccgcggggagagtctccatcgtcatccgctgcgtcagtagcccgccggccgtcgacacatctttcaagactaatgtcccgcgcaatgctaatatggccaaactccaagcaggatatttgtttcctgagattgccaggagaagagccgctcatttgctgaagtttccagatgccaaaattataagccttggaataggcgacactaccgagcccattccaaatgtcataacaaatgccatggcagagagagcacatgccttgtcaacaattgatggctacagcggttatggagctgagcaaggtgaaaagaaactcagagcagcaattgctgcaacctactatgcggaccttggtattgaagattcagacatatttgtctctgatggtgccagatgtgacatat

SEQ ID NO: 270133 - DNA, 1199 bp, Zea mays
cgcatcctccgcgccgagaagaccggtcacagcggcgcgctcgaccccaaggtcacaggcaatctcatcgtctgcatcgaccgcgccacgcgcctcgtcaagtcgcagcagggcgccggcaaggagtacgtctgcgtcgcccgcttccacgccgccgtgccggacaccgcgcgagtggcccgagcgctagaggcgctcactggcgccgtgttccagcgcccaccgcttatctctgcagtcaagcgccagctcagggtgcggacaatctacgagagcaagctcctggagcacgatcccgagcgccaccttgccgtgttctggatctcatgcgaggcaggtacctatgtccggactctgtgtgtgcaccttgggctgctccttggtgttggtgcgcatatgcagggactgcgccgtgtcaggtcggggatcctaggggagcaggacaacatggtcaccatgcacgatgtgatggacgcgatgtggtctctcgacaactacaaggatgagtcatacttgaggcgtgtcgtgatgccactagaggtactgcttactagctacaagaggcttgttgtgaaggactccgctgtgaatgctatctgctatggtgctaagcttatgattcctgggttgctccgatttgagaatgatattgagaccggggaggaagtggttctcatgacgacgaaaggggaggctatcgcgattggtatagctgaaatgactactgctgtgatggcgacctgtgaccatggtgcagtttcaaagatcaagagggtagtgatggacagagatacatacccaaggaaatggggacttggcccggtggcactcaagaagaaaaaactggttgctgagggtctacttgacaagcatgggaagccaaatgagaagacaccaactgagtggcttcggaatgtggtgcttcccactggtggtgatgtttcaattgccagcattgcagctgctcctgagccagagaaggtgaaggtggagccggacacagctgtgactgaagaggtcaaggagaagaaaaaaaagaggcagaaggatgatgctgaggatactgatgcttctgttcctgcgaagaagatcacagttgaggaagccactgaagcagtggaaggggagaagagtgagaagaagaagaagaaaaagaaagacaagggcgagtcagagccagctgaggtcgttgagggcaa

SEQ ID NO: 270134 - DNA, 1027 bp, Zea mays
ttgttgctcctattacagtccacgatgtgatgcccacaggacctgatgcccctgatgagcatattatcctggatgagaatgttaaggctgagggccacgactactacagcatcggagctttcaaggtcagtcccaacaaacaagctagttgcttacgctgaagacactaaaggtgatgaaatctacacggtctatgtcattgacacggagagtggagaatatgttgggcaaccacttaaaggaattacttctgacattgagtgggctagtgacgaccacctcgtttacattacaatggatagtatacttcggccagataaggtatggctacataagttagggtctgaccaatcaagtgatgcttgtttgtatcatgagaaagatgatacattttctctaggccttcaagcttctgaaagcaagagatatttatttgttgaatctggaagcaaaaacacaagctttatattctacctggacatacccaaacagaacaaggaacttgctgttttgacacctcgtgtgtatggcattgatacaacagctagtcatcgtggaaatcatttctttattaagaggcgaagtgatgaattctacaattctgaattggttgcttgtccactggataatgtagctgagaccactatactgctaccacatagagaaagtgtgaaaatacaagacttccagctctttgacaaccatattgctgtatatgagcgtgagaatggccttcccaaagtgatcgtatatcggctacctgctattggagagtcaattggacaactccagggaggtcgagcgattgattttattgatccaacatatgctgtggaccctgaggagtctcagtttcattcatctgttctacgatttcattatagctcaatgcggactccaccctctgtttatgactatgatatggattcaggggtgtctgtgctgaagaagatccatactattttaggcggattcaatgcatcaaattatgtaacagaaagaaaatgggctgctgctgctgatggca

SEQ ID NO: 270135 - DNA, 362 bp, Zea mays
cgaaacaagagatatttatttgttatatctggaagcaaaaatacaaggttccgattctacctggacatattaaaacaaaacaaggaacttgctgttttgacaccttgtgtgtatggcgttgatacaacacctagtcattgtggaaatcatgtctttatgaagagacggagtgatgaattgtataattctgaattggttgcttgtccactggataatgttgctgagatcacttctcctgaccactgctctagccctgagttgcaggacctgttgcatacccgacaacagatgttacaacaggtacagatgcatttgcagagagctcaagttcggatgaaacgccaggctggcaaaggaaggat

SEQ ID NO: 270136 - DNA, 231 bp, Zea mays
acgacccacgcgttctctaagattttggttgcctgttgcaattgcagtgtagctgggcattaggtggtgtttgatttgatttgcaaaggatgtgcggtaagcacgatatcggagttccgtttgcaagggacgattgactgtcctgtctgtagcattttgtagttactacgcaaatttataaataaagttatgattagagaaaaaaaaaaaaaaaaaaaaaagggcggccgc

SEQ ID NO: 270137 - DNA, 1181 bp, Zea mays
ggcagaggcagcaccgtcccgtccacctgaccacctccaccattttttcctcttcctcctcgcctccaccccttcccttccatctcctcccacccggcgactcctctccctctctgccgcgccgatcgattggcccacccatcgatcgagcacggggaagaagattccagtccggagtggtttcaattcggtcgggttcgttgcccgtgtgggtgggcgctatggcggcgatggatgcctcggcagataagaacgccgtcttccgcaagcttcgcgccaaatcggacaacaagatgtgcttcgattgcaacgccaagaacccgacgtgggcgtccgtcacctacggcgtcttcctctgcatcgactgctcggcggcgcaccgcagcctcggcgtccacgtctccttcgtcaggtcaacaaatttggattcatggactccagaacaactgaaaatgatggtctatggcggaaataaccgtgcgcaagctttctttaagcagcatggttggacagatggtggaaaaattgaagcaaagtatacttcaagagctgctgacttgtaccgacagttgcttgctaaagacgttgctaaaagctctacagaagatggaaacaatagttggccatcttccccagttgcagcatcccaggctccaaatcaagctgctgcatttccagatctcaagctgacagaggtgtcaaaagaaaatgtaagtgaaaagaaagattctgagattgttcgttcgcctagagctccaacccattctttcaagaagccgattggtgctaaaaagcctggaaataagactggtggacttggtgcacggaagcttacatcaaagccaaatgaaagcctctatgagcagaagcccgaggaaccagctcccgtcctgccatcatcggtgattgagagtactacaactaggagcaaatcacatacttcccgatttgattacgttgaaaatgcacctgctcttaagaatgggaatagctcagaaggcaaccacatgagtggacatgttgcacccccaatgtcgtcaaacttctttgctgaatttgggatggacagtggatatcagaaaaaatctacgtccaggtcattcaaagtgcagatcgaggaaagcacggaagccagacagaaattcttaaaagcgaaatcaatttcttcctctcagattttt

SEQ ID NO: 270138 - DNA, 620 bp, Zea mays
ccacgcaaccgcagatccgacgctccatcgagtgtgtgcggtggcggcgggaggagacgaaagagaaatatgcaggcggtggcacgggcggcgcgtgggctcgcggctgcgggcggtggcacgggcggcgcgtgggctcgcggctgcggctgcggctgcgcggccgtcggtgatggaggcagggcacagcgggcaggtgcagcaagctcggggcatcgtggtgcaggtgagggacgggaatctggagccggcgctgtcgatcatggagcgcaagatgcggtccagcggcacggagcgcctcatccgggcgcacacccttctcgacatcaaggactcggagaaccgcttgctcgcgcttaaggagcttatgcagcgtgtccgttcccaggagctcatgctccgcaagatcgtcatcaagcagatcagaaccatggaggaggataatgcagactggtgcgatgagaatgttaagatagcttgtgaaatatctgctgaggaagtaagagctaagatcagatcaggttctcacttaaacaagcttgggtacaacaatgtaatggtcaagttcatagagaggacagggataacttacagcgagctacagttcattaataaatggg

SEQ ID NO: 270139 - DNA, 591 bp, Zea mays
  unsure (1)..(591): unsure at all n locations
ctagacgagcgtgtgcggaggcggcgggaggagacgaaagagaaatatgcaggcggtggcacgggcggcgcgtgggctcgcggctgcggctgcggctgcgcggccgtcggcgacggaggcagggcaccgcgggcaggtgcagcaagctcggggcatcgtggtgcaggtgagggacgggaatctggagcgggcgctgtcgatcatggagcgcaggatgcggtccagcggcatggagcgcctcatccgggcgcgcacccattaccacgtcaaggactcggagaagcgcgtgctcgcgcgtaaggggcttatgcaacgcgtccgttcccaggagctcggcaagaagctccgcgagatcctcatcaagaagatcaggggccagtgagggcatcagcgcattggccgtttaccggtagcatttgtgtgtgggtgcttcgttttgagcgcgtaacgatgctgggtacttncatcgatggttctgtggcgcagcctgagaataactcaacctaccttgagcaaaaaggcttttgctatattgcatggaggacagattgatggtaaaactattggttttttattgtacaacttcagtat

SEQ ID NO: 270140 - DNA, 452 bp, Zea mays
cggacaaagaaaaatcaggcggtgcactttcttttctgggctccggctgcacggtgcacggtcgttcgtgggctggcggctcaactgcggctcccggccgtcggtgatggaggcagggcacagcgggcaggtgcagcaagctcggggcatcgtggtgcaggtgagggacgggaatctggagccggcgctgtcgatcatggagcgcaggatgcggtccagcggcacggagcgcctcatccgggcgcacacccttctcgacatcaaggactcggagaaccgtttgctcgcgcttaaggagcttatgcagcgtgtccgttcccaggagctcatgctccgcaagatcgtcatcaagcagatcagaaccatggaggaggataatgcacactggtgcgatgaaagtgtttactgtgcttgtgaaaaatttgctgaggaagtatgagcaaagaacagat

SEQ ID NO: 270141 - DNA, 374 bp, Zea mays
ctggctcccccgaggcaatcgagtaatcgacgaaggccaccaccacctccacaccactttgcctcgagaaggttccaccaagcctctcggctagggtttggggactttgggggcgatcgcaatggagggccgcggcgcggaacaagcacccgaggcggcggcggaggtgaaaaatccgaggtgcttcatggacgtcaccatcggcggcgagatggaggggaggatcgttgtagagctctacgcttccgtggtaccgcggacggcggagaacttccgcgcgctctgcacaggggagaaaggcatcggcgccgccagcggcaagccgcttcactttaagggctcatgcttccaccgtgttattaaagggtttatga

SEQ ID NO: 270142 - DNA, 482 bp, Zea mays
gagggagaattgggggaatacatcacacaactcgcaatatggaaagtcgttttctataggtgtatcggacaccgctcgtgcgtgtggcacggcgaaacgaactccgttacataattcgtacgtgtccccgaaaaaaaatctcgggacacaccgggaggcgcgagtaaagccatcgcccatagccgtaggtagtagtagttctccgtactcctgtcctgctcctcgtatcgtatcagcagttcagcacaccaagggggcgagaaggcacacccgctctccctcggtccgcagcctaccagaccagaccgcgtcatcacccaccgtccggaggcgaggcgtcctcggcctgcaggtcctccgcgctcagcagatgatcaaaaagccgctcgcgtcctacggccagcaccgcaacgcgccggcggcgtcagaccctggggctcagccaccggacgcgtgggcggacgcgtgggcggacgcgtggg

SEQ ID NO: 270143 - DNA, 570 bp, Zea mays
cgagtaaagccatcgcccatagccgtaggtagtagtagttctccgtactcctgtcctgctcctcgtatcgtatcagcagttcagcacaccaagggggcgagaaggcacacccgctctccctcggtccgcagcctaccagaccagaccgcgtcatcacccaccatccggaggcgaggcgtccttggcctgcagatggtcgaaaagccgctcgcgtcctacggccagcaccgcaacgcgccggcggcgtcagaccctggggctcagccacgcgacgatgtcgtccatcaccctgtccttctcgggctcgatcaggaggtcgtgcagcagcccgtcgtaaagcttgagggacttgtccgcggacgaggcccgctcgtacagcgcccgcgagcccctggggtcggtcaccaggtcgtcggcgccgtgcagcaccagcagcggcaccgcgatccggtgcaggtgctgctgcaggtacgacgtctggcggaggatctcgtagcccgtcctcacgcggatggcgcccgtgaacacgagcgggtccgtgtatttgcccgcagggcctcggggtcgcgc

SEQ ID NO: 270144 - DNA, 325 bp, Zea mays
atatcgggcacacatgcatgcatggaggtatatgcttcacagttgatacatttttttttgggaagcgcttcaactgttcagcaacgtgcgcggccggccaggcctcatgcatctataattctatatagagaggagaggatgcatatattcaacaacaacaataataatactgatgaagcttattgctggttatttcatccaattattgcatgcaatgatacacatgcatgggaaccaaacatccattccaaaagctaccccaaggcaaccctgccaaggcggacggcgttgacgtattccttggggctgtgcaacccgatgccgg

SEQ ID NO: 270145 - DNA, 349 bp, Zea mays
  unsure (1)..(349): unsure at all n locations
ccgtccggattcccgggcgccgccttttttttttttttttttttaattttgccaaatggtanatttatacgtcattcatgacaggaaaacatcatggactgtggcagggctattgtcctctggatctttatttgctcaaaatttcaggctaccaggatcgaaaaaacaaaggcccagccagcagtgtacaaaggctgcagaatatacttaggaagacaatcaaaattttactatggagcgaagggtcaacgcacgctgatcctaaaccgaatccctcttcggctcttcctactgcgggggaatggctgccaacttcttaggcgggggatttcctcccgcaagtcgaacc

SEQ ID NO: 270146 - DNA, 620 bp, Zea mays
ggggagcggcacagcggaggggctgtccacttaaaaagaacgggcctcttatcttcaagcaaatgggagacaacacagatcatctttcccaaatcctcctgtttacaacaacaaccctaggaatacttcctttcgtggtatgatggacaacgaccagattgtaataacacaccctacaaattttttttttggccatgggagctgatcagacacttcagttaccctacgtggcattctatcaccaggaaaaaaaccctaccttgtaatcttcagagatcaggttaccagagaccacaagtacctaacacacaaggatacatgtcatctacatttcaagattgtcgcccgtcgtggacacacaagttgcgatccattagcatctcaagccgccttgcaatatgtagccatgttaaggtttcagtttcttctagctaccgggccagaagcctgtatgatggcatgtcctcaatcctctgaatatcttcaattaacagctccctttctagctgacgccgtgtagacttcatgaccgtgttgaagtccatgtaagtagcatgcatgtcaagccattgctgatccatcagcttgaaggttatgcagtagagaatgtcaaaagcttg

SEQ ID NO: 270147 - DNA, 449 bp, Zea mays
gttagcatgtttgttacggctttaaccaccgacttctattttttctatattatattgtctctggattacagctgcagtagttcgaataattggtttaaacttgcaaatacagcgaatagacagtacatctctagtacgaccaatttctcgtcacctttgaaacgatcagctcttgctgcagaagctggaacgaaataaatgtcggcagtacatcaagatgcattacactatgctggatatctttttagttctgtcggcagctttgacaagaccaattgtactaaccttgaactgttgctgaatccactactggaactgttgctgaatcgaccacaatactgatagcatttctttaaaaagcctaaattccatgctttttcctcttgccactccagttcccaaactgaaactgccgcatgattgcagaacccagatcccttagtgccatt

SEQ ID NO: 270148 - DNA, 930 bp, Zea mays
aacaaaaccaatccacattaaagaaaaaacattaacaactagtccagcttgcttattattcatcacatccggggctcgctgcctattattttcaaacaaatacaagtacaacagcataactgcaacagctagctaggtttgtcttcacataatagcaatataatgttacaaaggtggaacaggctcaacatgatccctcacattgttcaccgagaaaagaacactttgaatacaatggcagatgactcagtgtggcgtatatcaagccttctaatcggcgcgagattggcctgcacgggatgagagaatgataccgacgatgagaccgtacagagcaagagcttctgcgaagataaggatcagaatcatgcccacaaacaactttggctgctgtgcattcgccctaactccggcgtctccgacgatgccgatggccatgccggcagcgaggccagcgaggccgcaggcgagtccggaggagaggtgcgcgtagccgtcgaagaggaagtagggcttggccttggggttgatcccggtggagatgatgacggcgatgatgaggccgtagatgccgagtactcccgccatgacgacggggacgatggacttcatgacgagctcggggcgcatgacgcccatggaggcgacgccgacgccgctcttggccgtcccgtaggcggcgcccatgcaggagaagacgagcgcggcggcggcgccgaggaagccgaagaagggcgccgtctcgtcgccgctgaaggtggaggccgccatgggtggaggtggatgaggtggagaagaggacggcgcgggatctcttcttgctctcgccgaccggagaggacggacagggtcaggccacgacgcagcttctccgcttggatctgcgaggcgccccgtttcttctttcgtctttctgtgcccacgcgtccg

SEQ ID NO: 270149 - DNA, 489 bp, Zea mays
tttcaactttttttacaagcagataactcacaacatacttttaatagcatacatttcacaatagttttttcacggttcacaaccgaaccaatcatattctaaatatcccaccaaccgactcatattagtgctcttgccaatttgatagccaaagcaacctatttggagtgtaagaaaaaaccttttgcaatgctttcattaacaatactgtagtattttaggcataacctcgtacgtccaccatcattgttcgctctgccggcgcacgccctccatcaccagcatatagtagttgccctccgtgggtgtcactgtcaggaggacatgacgacgctctccaccttgggcacctcaacggggaagttgtggatctcgtccacccacgggttcccaccggcgggcttctccttggcagggtcgatggtgcgcagcgcccgccacacggcgctgttgcacttgaaccctgagccgaaggcgatctgaaaagcg

SEQ ID NO: 270150 - DNA, 611 bp, Zea mays
gaactaaacgactttcaactttttttacagcagataactcacaacatacttttaatagcatacatttcacaatagttttttcacggttcacaaccgaaccaatcatattctaaatatcccaccaaccgactcatattagtgctcttgccaatttaatagccaaagcaacctatttggagtgtaagaaaaaaccttttgcaatgctttcattagcaggactgtaggattttaggcagaacctcgtacgtccaccatcattgttcgctcgaccctcccactccacgcactccctccatcaccagcatatatatagtagttgccaccagagaagagagaacgaagcagagtggtcctccgtgggtgtcactgtcaggacatgacggcgctatccaccttgggcacctcatcggggaagttgtggatctcgtccacccaccggttcccaccgacgggattctccttggcagggtcgatggtgctcagcgcccgccacacggcgctgttgcacttgtaccctgagccgaaggcgatctgccacgcacggtggccgcggcgcacgcggccatgcgcctccgtgtagacgagctcgtaccagagcgagctgctggagg

SEQ ID NO: 270151 - DNA, 456 bp, Zea mays
gagcctcgctccatgcaccgctcctgcgtgcatcacggtcacggaccattggctggctgccacctccggacggccatggccggagcaccgctcacggagcctgcttgcctgcctgccgaccggtaccactgttgctgctgtgctgtcctacaacatgcaatgcctccttcggagtccagtgcacatcggtggctcaagctcagctcaaccgtatcgcgcagctgcatgcccaaaaatagaccagacatgggggagaagaagaggatgcattacaagtagtagataatcacgcttggatgtgatgtctctcatcttggaaagccagtggcaatgcctgcttcagcttttaaaatggtcgtgctctgctgtctcctcagccacgcacagcatcaaatgccgatcacaggtcgtgctcgggcttgtccacgccgtcgccgccgcccatggacgcgtaag

SEQ ID NO: 270152 - DNA, 492 bp, Zea mays
tcttttttttttttttttttctgttcgctgctttaatttaagatttagagagttatttacagaactattggagttgctcttacaagtagtagataatcacgcttggatgtgatgtctctcatcttggaaagccagtggcaatgcctgcttcagcttttaaaatggtcgtgctctgctgtctgctcagccacgcacagcatcaaatgccgatcacaggtcgtgctcgggcttgtccacgccgtcgccgccgcccatctgaggttgtgcgaccgccgccggacgagctgcggggacgaggcggcggcggccttgtcgtcgtcatcggcgtcggggctcgcccgggccaccagcagcctcgagatgctgccgcggcagaacgggcaggccggcgacggcggcgtcagcgtcgccgggttcggcttgctgtggcagcacagcgccagtgtgcacgccgcgcacatctggtgcccgcagtcctgccggacgcgtggg

SEQ ID NO: 270153 - DNA, 382 bp, Zea mays
ggggggcctttaacatgcaatggggccttcagagtccagatcacaagtccagtgcacatcgccggttccactctgcgtgttctctcgaccgacagttttacacacatgtcggtggctcaagctcagctcaaccatatcgcgcgccggccaggtccatcctagcacgcccaaaaatagaccagacatgggggagaagaagaggatgcattacaagtactccagtagataatcacgcttggatgtgatgtctctcatcttggaaagccagtggcaatgcctgcttcagcttttaaaatggttcgtgctctgctgtctgctcagccacgcacagcatcaaatgccgatcacaaggtcgtgctcgggcttgtccacgccgtcgccg

SEQ ID NO: 270154 - DNA, 522 bp, Zea mays
aaacaaaactcgcaggcatttatgaatagcctcgcagcattgcaagttgtataaataaacttctacaacagagtctgatagtcacttgctatccatttaaattgttctacaggaatcctctcttggtggactcagctttcttggatatggcaatgccaacctagttggaggtgcggtacagcttcccgaatacatggagcacagcaacgacggctacgaacccaatactcatgatcagaacagtgtttggtgacattttgcggccggcagcctcatcagtgtagaattggagcattgagctggcaccgcctccaccagcagcagcaccgcttgtggtcctacgcctacgcaggcttgcggctgccgccgcgctccctctagcaggtgcatcaccattggccaccatcttgtcctaacactctgacggtttatgaatccgctgtatccccctctcgtgcttgcacagtcagatggtccgatgatgaccgatcgagcgaatccaaagtgcaccctccgcgtctg

SEQ ID NO: 270155 - DNA, 585 bp, Zea mays
aagaacacgaactgaaattactatggtggtaccatgctttatttggagccttaaacaaacaacaatatgttacaagccttgaccctctttgtggggtcccaaaaccaaagaaggtaaacaaaatgtccgacaccagcgagcacaagacttaaaagataatttaacacggtatacaatcgggagaccatttaacctgacgatgtgctagcacatgaacttgactacgataactgaaatgtcgtctttgctcttccgattcacggcctgctccgtcaggtgcttggcagctgcctgcgcgtccttgcaatccttgatctcgtcgacagcctcctggttggacatcaccttccacaagccatcacttgctagaattaaaaactcagtattttcatcgatagtttgctcgaccacatatggatcagagctgaggtgcttcttcaagctccggtctccaaatgcccttgcaactgccagctgcccatcaacacgtggcacatcacccggtaggtttgatacaaagccacccttctgctcgatcgtttgtcgctccatgtttggttccggacgcgtgggcggacgcgtggg

SEQ ID NO: 270156 - DNA, 588 bp, Zea mays
ctaataaattgttaacatttaataacctctattggatcgagctgtacatatgcatgcaaacgttttctctctgcagttacgtcagacggctgacacgtagggctaaccgctgccatcaatttgcaactagcttgaggattaaatttacatgtcgagtttaattcagctcacaaataatccgtttcaggaccattatttacacacagcaaaccagatcagccagtacagcttcgcctgagatagggtgaatgggggcggcagggcgcttcattcggtgcctccgccgtcatctgccgcagaagctttgcagactgggcaagcgttcttcacctgcagccatttcttgatgcagtctgcgtgatacttgtgattgcattttagcttcccgacagagtcctcgaatttgtaatcctccaggcaaattacacatcttgcgctctcattatcatcatgagtacgggcagagctgcagcagggtatctccgtcacacagcttgaaagtttttcatcagctaggcccgtgttgacattgcctattcgttctcccaaagccagcagctcctcataactcatatcatcaatgtccaa

SEQ ID NO: 270157 - DNA, 636 bp, Zea mays
gataaatcagcatagattttggttatgtcatatgcagtcgacaataaaatgctctcagatatgcttgcacacatccaacatgcccccctttattatttaatcaccagaagacgtaaatatatataatacaacacccccttctgctgcccggttgcctgacacacgactaacacatatacgtacataagcatccatggatggatggatgccttgaaacacgtatcactcgaacaaaagctcacgaggtagcgtatatatatacgtacgtacgtacgtcgtcggccggcgcatgctgtgtgagagtagtagtggcttcattcacgtacagaatggcctcaagcagcagcaggagtaaatatgatgtagcagcgacgatcatcatagttacaggagcaagcaggagtgaggcaggtaatgtatttgcatgtctcccccgtgtagcacagcgtggctgacagcatcgtcaccttgggcgtcgtggcgagggagccatccggcacggctccgcgcggcgagcgggcggccatggccgtcggtggagctgccatgagctgcagaaccagcagtatggccaccaccacctccttcttgctaccacccttcatcatgatcggtggatatatacggacgcgagga

SEQ ID NO: 270158 - DNA, 575 bp, Zea mays
atgcattgcacacatccaacatgtatttcccctttatttgatcaccagaagacgtaaataaaacagcacccccttctgcccggttccctgacacacggctaattaatacgcataaacataaagcatccatggatggatgccttgaaacatgcatcacttgaacagaagctcacgagaggcagcgtcgtcgtcggccggcgcatgcatgtaagagttgtggcttcgcggaatggcctcaagcaacaggagtaaatatgatgtagcagcgacgatcatcatagttacaggagcaagcaggagtgaggcaggtaatgtatttgcatgtctcccccgtgtagcacagcgtggctgacagcatcgtcaccttgggcgtcgtggcgagggagccatccggcacggctccgcgcggcgagcgggcggccatggccgtcggtggagctgccatcagctgcagaaccagcagtatggccaccaccgccgccgcaccggccacttccttcttgctgccacccttcatcatgatcggtggatatatatgctctctctcctctgcccggacgggttgggtcgacccg

SEQ ID NO: 270159 - DNA, 677 bp, Zea mays
gttctagatcgcgagcggccgcccttttttttttttttttttttttttttttttttttttttttttttttttttgcacacatccaacatgcccccctttattatttaatcaccagaagacgtaaatatatataatacaacacccccttctgctgcccggttgcctgacacacgactaacacatatacgtacataagcatccatgcatggatggatgccttgaaacacgtatcactcgaacaaaagctcacggggtagagcgtatataatacacgtacgtacgtcgtcggccggcgcatgctgtgtgagaggagtagtggcttcattcacgtacacagtaatcgcctcaagcagcagcaggagtaaatatgatgtagcagcgacgatcatcatagttacaggagcaagcaggagtgaggcaggtaatgtatttgcatgtctcccccgtgtagcacagcgtggctgacagcatcgtcaccttgggcgtcgtggcgagggagccatccggcacggctccgcgcggcgagcgggcggccatggccgtcggtggagctgccatcagctgcagaaccagcagtatggccaccaccgccgccgcaccggccacttccttcttgctgccacccttcatcatgatcggttatgcgctctgtgtctgtctctgatcggacgcgtggg

SEQ ID NO: 270160 - DNA, 309 bp, Zea mays
ggcctcaagcaacaggagtaaatatgatgtagcatagacgatcactatagttgcaggagcaagcaggagtgaggcagccaatgtatttgcatgtctcccccgtgtagcacagcgtggccgacagcatcgtcaccttgggcgtcgtggcgagggagccatccggcacggctccgcgcggcgagcgggcggccatggccgtcggtggagctgccatgagctgcagaaccagcagtatggccaccaccgcaccggccacttccttcttgccacccttcatgatcgactatgcgctctctctctctctctgat

SEQ ID NO: 270161 - DNA, 276 bp, Zea mays
gccgcccctttttttttttttttcgtttgaataaaatccaggcataagctcttttgtgtattctgccattatggcagtgcgagcaataaaattgctctacagatatgccttgcacacatccaacatacccctttattatgtaatcaccagaagacgtaaatataatacgccacccccttctgctgcccggttccctgagacgactaacacatatacatacataagcatccatgcatggatggatcacgtacgtacgtgtattatatacgctctacc

SEQ ID NO: 270162 - DNA, 893 bp, Zea mays
aatctgattgttaaatttgacaacttcacacgaattttttaatgataagatgatttcaaataaaacagttgacaattacaaaggttcattatatttcaagacctacaacttttattttggtggtttttccatccgaggcagtttcaaaaattcaaatttcaaaattcaaacatagttttgcatggcaaggtgatttcaaaccaaaacattgtcaactacaaagtttcataactcttcaatacctacaactttcatgttggtggttttttctttcgaggccgttttcaaaattcaatttttaaattttttaaattcaggcgtagttttcgttgacaatatgacttcaaatgaaaaagttgtcaactacaaacttctataacttctcaagatctataaagtttattttggttgtttggtcatttgttcatctcacatgatagttctaacaatatgcacaaattctatacatatctctcgtagttccataaactatgagagagatataggttttatgaacaaatttatttttagtttatcatacgaagaaatgttcaaaatataaaatgtacatcatgatgagttatacaaatttatagttgaaaacttttttatttgaattaatttactgctttaaaatttgatttttaaaatatgtatgcagttggctcgatgtgagacaataagttaaacccacgggttttccatggatttccacccaattacgggttggtttgggatcaataatgttattgggtgggttgggtttaacttccctctagtatttttggttgggtgtgggatggatatcaaagtaattagatttgggtaccggtgcgagtggattggattttttgccattagcaggcctagatggaacggtccttcatcttcac

SEQ ID NO: 270163 - DNA, 537 bp, Zea mays
aaaaaaatatatctttgcaatggaaggggaagtaaattttggtcctttaaaaaggccgccccttaaatttatttataaatttaaaaaaaaatataatatatattatattatatatttttttttaaatataattaataaatttttttttttttttttttttattttttaatcaggcacttccaattcattcattcatttcctttcccccacccccctcccaaagcttctttcaacaccaaaccccgaagcttgtcccccgccaatcatggccggaagatcctacctattctacttgggatagatattttgctcctcctagatctagctgccaaaacaatccaagcagagtgtgtatcaacagacagcataacgaagtcacctgatctgcgttctaactgaatctttcttcctccagttaggtaaagcttagaaccacccaaaagaaagggaagaaaaaaaacggaaacagcaaagctacaagaaagagaggggggagaaaccagcttttgggccatccatccatgcataaaataaaat

SEQ ID NO: 270164 - DNA, 1352 bp, Zea mays
aagctgaaaccgtaaaactagtttctcattagtaatcacacaggaacggtaagaaaaagagagctccgacttcgagctagtaccagaaacaactgaacaaggtctacaattcaactcagaatttccattcagcagaagaacataacaaaattcactaatatgcagaagaacaaaaggcaaaagcatcagcaacagttaagattatacagtcaaaacatcgatcgtctaatgatcacccgccgaaccaaactatccatgtctccattcccctctactgttaggctttccgaatgcacactgcagggacgatgcactgcatgccacgagattcccgctcgtcctgggttgataatgctagtcatggcagaagtgggtcgacctcccgctcttagcatttcaaagatgcctcctgtcctgtgatctttgtgctggctgggcagctggctcacctaagatgacctgacacagggataacgggatactgcacaattccaaggggcatttttatgttgttattaggattctctcctgctccaccgccatcataactcggttccagcaagcgcattagggaaaggaagatttccattctagtcacatccctgttggcctcaacagtgaaccgtgcccagattttatttttgcgtgcttccataacgccccttaagatggttaatcctagtcctttaatgaagtcagctatctccaagaagatacctctatcctcacaaagcatctccacaagcatctgacgaggccgctcgagatcctcgacaatgattgggcacgtcatagatcgactaccaacatccaaggcccaagttgcaccaccttcgaagtagtctttgagtggaccattctcaccaccaagaatctcagattcgtttgagtccttgaggttatctgcatgctttgtcacactttgcaagaaaaccatgtgcttaatggtcttctccagtaatgcatcaatgctacactttgccccattaggtacgagttcccggagctcctttatacgatcctgaataagctggcggtcctttggtcgtggcttaggattctctcctggtcgagacctctttcgacttgccttgcttgacgtatcaacgcccttactgtttgaggctgaggcactttcacatttcatgttctgtctgctctctatccagaggcgtatctgagacttctgtattgcattattttgagaaagacagccatcctctgccttttcttggaaagatgactgtttgacaaaatttgaaacggctaactcatttttgattagcaaaggtgaagatgattcggactgctttggctcttttaagcgacccacgcgtccgcggacgcgtggg

SEQ ID NO: 270165 - DNA, 300 bp, Zea mays
acaattcaactcagaatttccattcagcagcagaacataacaaaattcactcactaatatgcagactaacaaaaggctaaagcatcagcaacaaacataaactaagattacagtcaaaacgtcgatcatccggcgaaccaactatccatgtcgatgttcccgtctactgttaggctttccgaatgcacactgcagggacgatgcaccgcatgtcacgagattccagctcgtcctgggttggcaatgctagtcatggcagaagtgggtggacctccccccacgcgtccgcccacgcgtccg

SEQ ID NO: 270166 - DNA, 691 bp, Zea mays
ggcggccaaagcagcggcccccttatctccagggaccaggggaggtcgcacaccaacgcaccgtccttccctttcctcctcctcctccctctcctcggaaggtcaagtgacggtatttgtgaccatggcagggaccttactccagtcagttgccctgggaacaccatttgggggtcgcatgagaacccattgttggaggtcccatggcaccaggaggcctgcctctatgttggcagtgtcacttagccgccctgtcaagatgtcagcatttgtgggtctaagatcagtgcatagcttctcggtcacaccgacggtgtccaattccaggtcggcagttgcatcttacaggtcatcgcgacagacaagacgatctcgttttgtcactcgggcaatgtttgagaggttcacggagaaagctattaaggtcatcatgcttgcgcaagaggaagcaaggcgcctgggccacaactttgttggaactgagcagatcctcttgggtctgattggagagggcactggtattgcagctaaggtgctcaagtccatgggaataaatcttaaggatgcacgtgtggaggtggagaagattattggccgcggcaatggttttgttgctgttgaaataccattcacaccacgtgcgaaacgtgttttggagctctccttggaggaagctcgccaattaggacat

SEQ ID NO: 270167 - DNA, 1085 bp, Zea mays
cccacgcgtccgtccaggacttgcttgcgctcgtctacttcggctccctctttgacgtcaagcagcaaagcgacttcgtctctttggtttacacgcgcgaactcgagcggagcagctgcctcacttatgactacgtcggggatgatccggaagacagtctcgtggagaccgatctgaacgccgtttctgcccttgccaccctcgcggcgtcgcgccctcctgctgcagctggagtctctcaccgtgatgccctccaggcttgtgcccatcacgcccgcctctggctcagccgtgcggatgaacccatccaccctgactccaccatcacatatgctggggtgagggcaaagctggatagaatcatggcatcgggctactacacagctcagctagaaatgaggacaccaatggatctggctgctgcagtggcaaactttggagccggaggtgtgcaggtgcaagagagcatggttgtgtcgcctcaggcactggaagcagtcgaggagagccaggatgttgaagaacacaaggacgagaaggaagattctcaggctacagaaatctacagtgagcatcaggctcctgttgttgacgctgaacatgtggatgatgaaggcctggtgaacccagctgatgaagttccttcagctgaggcagagcaggagacatttgacgattatgtggacgatcaggaacaaaaagaccaacaattcatccagcggcggtcttaccagaaccagcgtggtggtggtcgtggtggcagcaggagaggctatcctaatggtcgtggaggacgtggtggccgaggtggcgggtaccagaatggccgtggtggataccagaatggtcgtggcggtgctggcgggtactacgaatctggatactaccagccgaggaactacaacagaggccggggtggtcgcaactcttattacaacaaccatggtggaggtgcacaggcaggcggccatggccatcctgggagggttgagctgggtgcaaacgcctagctcgagctgactgttttgtttgaggagcagaggtcggggggagccattttgttattatgaactaactgagcctgt

SEQ ID NO: 270168 - DNA, 445 bp, Zea mays
aatggccgtggtggataccagaatggtcgtggcggtgctggcgggtactactacgaatctggatactaccagccgaggaactccaacagaggccggggtggtcgctccggcggtggcaactcttactacaacagccatggtggaggtgcacaggggcatcatcctgggagtgttgagctgggcgcaaacgcctagcttcgctgactgttctgtttgataatgaggagcgagtgagtcgtgccattttgttattatagaactaacttagcctgttattacgtcaccgttggtcccatccgtgagtctttttgctgctcgagtgactgcatatggtcggtcggtattgaggaaatactctgggaaagtagtttcaggtcaccttcgttttctaagttacgtttttttttgtgttaatatgcccttatttcttaattattatatactc

SEQ ID NO: 270169 - DNA, 1334 bp, Zea mays
  unsure (1)..(1334): unsure at all n locations
caagaccgcacgctccccctctagtcatctcctcaaacaaaaaccctagccgccgcgccgccccgctccctagtggtcctccctcccccaccactgcagctccgtcccggcggccccaagagttgcggcgaggatgaacgtgaagggcggcagccggattccggtaccccctccgggggccagcgcgctggtcaaggtggccgtgttcggcggcgccgccgtgtacgctgccatgaacagcctctacaacgtcgagggtgggcaccgcgccatcgtcttcaaccgcatccaggggatcaaggacaaggtataccccgaagggactcactttatgattccatggtttgaacgaccaatcatttatgatgtccgtgctcgaccgaatcttggtgagagtacttctgggagtcgggatcttcagatggtgaaaattggtctccgtgtccttacaaggcctatgccagagaggctaccacatatctacagaactctgggagagaacttcaatgagagagttttgccttcaatcatccatgaaacactgaaagctgttgttgctcaatataatgctagtcagctgatcacacagagagagactgtgagtagggagattaggaagatactgactgagagggctagattcttcaacattgctcttgatgacgtctccatcacaagcctgagctttgggaaggagtttactcatgccattgaagcgaagcaggttgctgcacaggaagctgagcgtgctaagttcattgtcgagaaagctgaacaagataagagaagtgcaattatcagggctcagggagaggctaagagtgcggagctgattggtcaagccatagcgaacaaccctgccttccttgccctgaggcagattgaagctgcaagggagatctcccacaccatttcggcctcagccaacaaggtgttcctggactccaacgacctgctgctcaacctccagcagctgaatgtatcgagcaagcagaagaaatgatgtcacaacgttatcccctttcttctgagtttgcagtcagtagtggatgcctttgtaccagacattgtgaggaacgctcggttttggatgtagtttcgccaatcttcctgttatgtggaacttgcgagtatttgctcaaaggcaagcaagctgacaggttttgtttaaacgtaactacaggatgagaaagttttcaataaggaacaaattctgttatgccaccaggaattacccctattgagagaaaattctcaacatgccactataattttaaaaaaaaaaaaaaaaaaaaaaaaaaaaaaagggcggccgcccgggaatncggacggta

SEQ ID NO: 270170 - DNA, 615 bp, Zea mays
gtcgtcttgccgccccgctccctagtggtcggggggggtccacctctgcaggtgggtgccgtcagccccaagagttgcggcgaggatgaacgtgaagggcggcagtcggattccgggaccctctccgggggccagcgcgctggtcaaggtggccctgttcggcggcgccgtcgatgtaccctggcgtgaacagcctatacaacggggagggtgggcacccggccatcgcgttcaaccgcattcaggggatcaaggacaaggtataccccggagggactcactttatgattccatgggttgaacgaccactcatttatgatgtccgggctcgaccgaatcttgttgagagtacttctgggagtcgggatcttcagatggtgcatagtggcctacgtgtccttacaaggcctatgccagagaggctaccacatatctacagaactctgggagagaacttcaatgagagagttttggcttcaatcattcatgaaacactgaaagctgctgttgctcaatataatgctagtcagctgatcacacagagagagactgtgagtagggagattaggaagatactgactgagagggctagattcttcaacattgctcttgatg

SEQ ID NO: 270171 - DNA, 496 bp, Zea mays
cctcctccacctccttgggttgttccatttatacgccagctgggtccggctcctccacctgctctttggggacctccggggcgggggctgactccaccaccactggctgcagaagagaccgcgccaccgagacggaggccggtgacgctgcaccgcggcggcgcttctcggcggcggcggccatgagctcgcgctgcttccggcgcgcctctgcctccggcgactccgcagcggggggcgggggcttgctgcgcttgggctcaggctgcgccggcggggagccctggaggctcatgcggagcgccatctggagctcctcgtcctcctcccgatcccccattggagcagctcccgccaagacctagccggatcgatcagccccaaaccctagggcgggccgggaggttggcgcctgcgcctcgggcctcgtcagaggccccgagctgggaacagagtagcgatgcaacaagggagtggaatctggaagcgagacatc

SEQ ID NO: 270172 - DNA, 1252 bp, Zea mays
cggcttcctcgccgccgtcctcgtgcccgctggcgactcagcgcccgtcggctccgccatcgcgctgcttgccgagtcagaggaggacatcccagtggcccagtcacaggctgcctccttctcctccacgtcccccttaccgtcgcctccgcaagaaactgctgctcaagaagcatccccttccccgccgccacctcctcccccagggccggtgtcagtctctgctcccacgccgcctttgccagcaacacaaggcgagcgtgtggttgcttcaccctacgccaagaagctcgccaaggacctcggcgttgatcttttctcagtcacggggtcaggcccctgtgggcgaattgtggccaaggatgtcgaggctgcgcttgctgcgcccaagaaggccgcaccagtgactgctccacggccggatgtgccattggggtcgacggtaccattcacgacaatgcagggtgctgtcagcaagaacatggtggagagccttgccatcccgacattcagggtcggatacaccatcacaactgatgctcttgatcagctctacaaaaaaattaagtcgaagggggttacaatgacagcactgttggctaaggcgacagcaatggcgctggttcagcatcctgtggtgaactccagctgcagggatgggaagagcttcacctacagcagtagtatcaacattgccgtggcagtggccatagatggtgggttgattacaccagttcttcaagatgctgataagcttgacatttattcattgtcaaggaaatggaaagagttagttgataaggcgcgagcaaagcagttgcagccccatgagtacaactctggcacgtttactctctcgaatcttggtatgtttggagttgataggtttgatgcaatactgccacctggaactggcgcaatcatggccgtcggtgcatcagaaccgacagttgttggtacaaaagacggtagaatcgggatcaagagccaaatgcaggtaaatgttaccgctgatcatcgggttatttatggagctgaccttgctgcttttctgcaaacacttgctaagataattgaggatcccaaggatcttacattttaaaagtccctgagtgattgtttttaaaagttcctgagtgattgtttttccttgagccaatcacaattgggtgcttctcacccatagtagatttgtagtatgtcttattgtgaattagttgatttaagctatcatcaatgtcagcatcaggta

SEQ ID NO: 270173 - DNA, 572 bp, Zea mays
cacatgaaacatgtataatatggtgaccatgttatttgtgtatgctaagaacagctcatgttcattttgcaggcacctttactctttcgaatcttggtatgtttggagttgataggtttgatgcaatactgccacctggaactggcgcaatcatggccgtcggggcatcagatccctcaccattgttggtacaaaagatggtagaattgggatcaagaatcaaatgcaggtaaatgttaccgccgatcatcgggttatttatggagctgaccttgctgcttttctgcaaacacttgccaagataattgaggatcccaaggatcttacattctgaatgtcccaactgattgtttttccctgaggcaatcaaaaccgggtgcttcttacctatcagtagatgtgtagtttgtcttctgtttatgtgattaggtgttttaagctgtcaccaatgtcagcatcaggtaaattttccctgttggttaccttattatcatcggtttgtgttccactaaaattctttttttgtcttgcttaaaaaaaaaaaaaaaaaaaagggcggcgcgatagtagct

SEQ ID NO: 270174 - DNA, 507 bp, Zea mays
  unsure (1)..(507): unsure at all n locations
cgcccccccacagtttcgtcttcctcttctccgaccccgaccatggagccggacgccgatgaggactacatgggagacctctcacgcttcctcccgccgagtccgtcctcctccccaccgaagaacctcgggcgccggaagcagccatccacgcaggcgcaggcgcagccgagggcgaagcgcgggaagggtgtgccgtggcaggagcggcggaggcaggagcgcgagcggaagcagcgggaggaggacgcacgcacgatggccgggctcgcggaagctatccctgagagcaacgtagggttcaggatgttgaggcagatggggtacgatcccgacttcccgcccccgcgccggcgccgaaccggtcggcatcgagatccgccgctcgcgggcggngctcagggcggaggagcctgtgttggctccggcgccggcgccggcgccggtggagaagcctccggaggtgtcggagcgggagcgtaagcagcaggaggagatggcggtaga

SEQ ID NO: 270175 - DNA, 426 bp, Zea mays
  unsure (1)..(426): unsure at all n locations
cccacgcgtccgcccacgcgtccgctgcgccgcagcccaacccgcatcgagctcacctcctccgaccgcgacgagctcgaagaccacctccgcgccgccgcggcgagctccgcggcagccaccaccaccaaggatccttccggttacaccactccgtctccagtccttggcccgcagacctccaatcccctgctccaattcctccacccgaagcccggcgccgcgccatccaagtcccaacgcatcggcatcggcctctccaccccgccggctccggccccgaacccgcgaccaccccatccaccccatggagggttgagatcaagctccgcctccccgacgccgccgcgcaccgncgcctgtncgcgttcctcgcgccccgncttcgccgnacccacgcccagnggaacctcttcttcgacgacg

SEQ ID NO: 270176 - DNA, 852 bp, Zea mays
gctactcaccctctcggatccctttccaccccacctcccagatgcggctggcgacgacagcgccggcgcctccgcctccggatccgttgatctagttgctgctgcttgattggggttaggaggaggtggaagaggagggaataggagatgttgttctggaaggacggcggcggtactggtggcggcaacggacgggaccttagcggcgggccgccctgcgccaggttcgtgtactcgtcgttggcgactcaggtgttggcaaatcttcattggtgcatctcttactgaaagattctgcagtggctcgaccagcccaaacaattgggtgtgcagttggtgttaaacatattacttacagtagcccagggagttcatctaatagcgtcaagggtgatgctgaaaggaacttctttgttgagctttgggatgtttctggacatgagcgctacaaagagtgccgttcacttttttattcacaaattaatggtgtcatatttgtttatgacctctcccagaggaaaacaaagacaaatttgaacaagtgggcagtggaggtttctgaatctgggaccttttcagctcctcttgggtctggtggtcccggtggccttccagttccttacctagttattgccaacaaagtggatattgctccaagagatggtagaagagtgagcagtggtaatcttgttgatgttgctcgtcaatgggttgaaaaacaaggtctgcttccatccagtgaagtgcttccacttgcagataactttcctggcaattctggtttgctcacggctgccaaagaggcaagattatgtaccaatatttgctggctgatgtcttgcttaactgact

SEQ ID NO: 270177 - DNA, 483 bp, Zea mays
gtgcagcaccgtgttctccctcccttcccaatcccctatcccgttactttccccggctccaccccaaaccctaatacgtcatggcgctcactacacggggcggcgccggcggcggggatcccgcgaaggcgccgtccgcctccgaccccagcctcggcttcctcaccaagcgcgataccgaggtcaagctaccccgcgcaacgcgggtcaagaacaagacccccgcgccgatccagattacggccgagcagatcctccgggaggccagggagaggcaggagcctgagatccgcccgcccaaacagaagatcacagacccccacgagctctccgattaccgcctccgtaagcggaaggagttcgaggacgtcatccgccgcgtgcgctggagcgtctcggcatgggtcaagtacgcgcggtgggaggagcagcagcgagacttcgcgcgcgcgcgctccgtctacgagcgcgcgctcgacgtcg

SEQ ID NO: 270178 - DNA, 826 bp, Zea mays
tctcactgctgccgcctgggccagggcgtcgggttgcttgccaatccgtcgctccacctgaacacaccggcgaagaggaggcgaagaagcgatgggcgtgaccaaggaggacgtcgaggcggccatcacctccgctctcagcccttccaatctcgtggtgacggacacgtccggagggtgtggcgcgagctacgagatcgaggtggtgtcggagaagttcgaggggaagcggctgctggagaggcaccggatggtgaacaccgcgctggcgtctcacatggcggagatccacgccgtctccatcaagaaggcgctcaccccggctcaggcccagccccaggcccagccggagccggccgccgataagccccaggcttaagtgcttaacaccccccaaaacggtttgatcccatatgccgatgcacgattacattggctatctgcttgaataatgcggcggatgcacttgctaaattgcaggatgttatccttgactgattagaaacttctgcaccgtgcatttaacttctgtgtcactgtgtgtgtgttctggatgcttctgccctggtcgtttgctcgagactgtgtgttgcagttcatgctggttaatgttctgccagggtggggttttcagtcctggaatttttatatttgactggtgctatgtctttccttgcttgtaggggtaaggggtttattctttaaccttgtggattagattactgaaaccatcatggtctgcagtgggaagtggggagtaataaaaatggagacatcttgtttacacaacattttaatttcccgcctgatgattccacaatccccc

SEQ ID NO: 270179 - DNA, 946 bp, Zea mays
gagtgaacgaaacgggagacgataacgagacagcaagagccaagaggtgagagaaggagtgaaggaccgaggagggaaacagagaagatggcgacgaagcgcgacaccgagtcggacggcgaaggctccaaccccgtcggtggtggcgcgactccgccgcccctagccgccgcccctgtcgtatgcctcctccgctccgccggggacttcggtggcggcgccttcgttggatccatcttcggatatggacaaggcttgatcaccaagaagggttttaagggctcattcagcaatgcagggtcctctgccaagacttttgcaattctctctggcgttcagagtttggttttgtgcttgttgcgaaggctacgtggcaaggatgacattgtcaatgctggtatagctggttgttgtactggcctcgctttgggctttccaggggcgccacaggcattgctccaaagctgtgccaccttcgcagcattctcatgcatcatggaggggctcaataagcagcaggctgcaatggctcgcacgcttggagggactgccgcgatggccgtgcatgagaaatgtggtgttctgcccccgttcacgcttccacctattcttgatgcatctgatgctttagcttcatgctgcttagcgttagtaaagcctaagcactagactacacaatagagggcgtgagcgatggcgaagaagggtaacttcaatcttcggctctttattgtgttgaccccaggttatatgaattatgtttttggacaagatgtgtaacgtgcctaaattccagggttttttttggcttcatcggaccaggtttcccttgatgggttaacgttgcagcatgcccttgcggattccgctgggtctagcatatttgtatgggataaaagatcataaatatttgcctgaaaaaaaaaaaaaaaaagggcggccgctc

SEQ ID NO: 270180 - DNA, 311 bp, Zea mays
ggcgcatgcgtcggcacttgcggtggctcacccgcacgatccggcgggcggggacgcgccgccgaagcaggtggctcaggcgatggagcggctgggccgtgcgggccggctcatcgcagacatccggctcggcgcggaccgcctcctcgaggccctcttcgtctccggcgacgcgcccccgtacagcgtgcgccagcacgtcgtacaggatggagcacattatcgtcaaggaggatgccgccatgcgcctccacttccaggacctacgcgccctcggcaggcaattagaggagtctggagttcttaaatgg

SEQ ID NO: 270181 - DNA, 621 bp, Zea mays
gctatgcgggggcggctgaggcggacgagatggtgatgtggccgccggccccgatcttggacctggcgcggctggccgtcgactccggaggcgatcccggtgccatccaccgcgcgctcgacccaacaatgctgccggtgccagatgttgagggttcccagaagaataaatgccatctcacaagaacaccgtatgggaggcgctttgccaatgaggagatcaattcatattttgcattcttgttcgaattgattgtggcacgggcaccttcggttggattaaatgtatcactgaatcgctatgatttgttccatgggcatcttttccttgcatcggagacaggacggcttggaattctctctcctgcgtattccagaaaaagatacaagactagctgagggcacgactactcctaagaaggagctcctgcagcaaaggaatgctctgagcaaagagaaatggcgatgatcagtctgaaggaatgctctgagcaaagggaagcttctgtagttctgtgtgataaatgaaagactggtgtcttgctgtggcaaggtgctgttttgggtcagggtgctgcggggtttcaatgcgcgtgttcaagaagaccttggtgtaaggctt

SEQ ID NO: 270182 - DNA, 536 bp, Zea mays
ggcacgggcaccttcggttggattaaatgtatcactgaatcgctatgatttgttccatgggcatcttttacttgcatcggagacaggacggcttggaattctgttccatgctaaagaatacccagcatttaacaaggaattgtttccttataatttgggatattgccaggcaggatctaatgtaccatatgatgattcgatgaatttgcgcaatgtactttggttagcacctttgccatcaaatgagacaaaagcttggttagcaccaggattactagttgtcttggacgcacatcctgatggaattatctatcaagagatgatacgtgactatgttcagattgttagaacagtattccaagatgatcttggggagaacgcagttgatgtcaattatctgaatgtggcaaatgcagctccggtagatagaatttacatttgctgaagtcatatgtaccgctattcgccttcccatggtgtgattctccccttgatttttgagaaccggaggtaaatgaataatcttaatgcccacc

SEQ ID NO: 270183 - DNA, 664 bp, Zea mays
tcgaagcgccggaggccgcagcagaaggctcgcgacatcagctcgagccagctgcgatcgatttccagaccgagacaagcgctcgagcccgcagcagaaggctcgcgacatcagctcgagccagctgacgggatccacacggtgccatgtcttcccggcggccgtcgcatccgtcccaccggaatccacggcgattcccgtccgcctgctatcttctagtactcacccttgccctcctcgtcgtctccgccgccgccaagtcctcccgccgccccatctccgacaacgagatccggcagaagaaggaggcctgctacaccgacgtcgagaacgggctgtggggatgggtgtgcaggtactcgccgacggagaaggagaactgcgtgctgcgctgcctctcgccggagtgctacgacctcatatacggcggggatccgcttgaggaaggggagttggactatgttcgaggccaggagtacaagtattgtatgcacaaatcatcccttggagaaagcttggatggtgtgaagggatccttcagctactcatgaaggaatgagaagaaaaaggttctgttagtctgctgtaaattttatttacaatcttgaacagacatgcatctttttagataatggacccgcaattccagactttgctttttctc

SEQ ID NO: 270184 - DNA, 628 bp, Zea mays
cacctttgtgcccctgaagatcaaagttcagtttttattgataataatggtctcgacttgcttcttgatcttcttatttccatgagttcaaaacatcaacaagatggctcagcagcattatacaaattggccaacaaagctgcagcactttctcccatggatgctgcccctccatctccaacacctcaggtttatcttggtgagcaatacgtgaatagttcaacactttcagatgttactttcttggtagaaggaaagcgcttttatgcacacagaattgctttgcttgcttcttcggatgcatttcgtgcaatgtttgatggcgggtatagggaaaaggatgcaagagacattgaaattccaaatatcagatgggaggtctttgaactcatgatgagatttatctatacagggtcagtgcagattaacagtgaaatttcacaggatcttcttagagctgctgatcagtatctcttagaaggactcaaacgcttatgtgaatatactattgcgaaggatgtgaatctagataatgtatctgacatgcatgacttgtccgaagcctttcatgccgtgtcactgagacatacatgcatcttgtacattctggaacattttaacaggatct

SEQ ID NO: 270185 - DNA, 1189 bp, Zea mays
  unsure (1)..(1189): unsure at all n locations
ggaccggccggannccttgttgcccacgcgccgcttcttgcgcccactaaaaacagtccccttgcgaaaaaattggtccgtccctgcctcagtctgcactctacgatggcggcgcctccggccacggctcccgcgaccgcccgatgtctgtccgtcgccaagtcgtgctgggctgccgagcggagtccagctcgtttgtcctctcggctcctgcgactggcctccggcaaagtgggagccgcgtcctcagcatccgtgccaaggttgccactggcctgcagagggcctgcattgcggatgatggagcggaaaggccgtggaagctcagtgatgctcgtcttgtcctggaagatggatcagtgtggacggccaagtcttttggtgcttcaggaacacaagttggtgaagttgttttcaacacatcactgacaggctatcaggagattttgaccgatccaagttatgctggtcagtttgtcctaatgaccaatcctcatattggtaacactggcgttaatcctgacgatgaagaatcaaaccaatgttttcttggtggccttatcataagaaatctaagcatatgtacttccaactggcgatgcaaagaaacacttgagaagtatctgattaagaggaacatcatgggaatatatgatgtggatacacgtgctataacacgaagattaagagaagatggtagtcttattggtgtcttgagtactgatcagtctctgacagacaatgagttgttagaaatggcccaaaagtggaaaattgttggagttgatttgattagtggtgtcacatgtgatgctccatatgaatggtcggacaagactgattcagaatgggagtttaagagggatccgtcaagtgaaacttttcatgtggttgcctacgactttggtatcaagcataatattttgagacgattgacatcatatggatgcaaaataacagttgttccagcaaattggcctgcttcagaggtactcaatttgaagcctaatggtgttctttttagcaatggtcctggggatccagctgcagttccctatgctgtgaagacggtacaggaaataattgggaaggttcctgtttttggcatctgtatgggccaccaattgattgggcaggctcttggtgggaagacattaaaatgaatttggacatcatggcgggaatcacc

SEQ ID NO: 270186 - DNA, 523 bp, Zea mays
aagtaaacagagtaatctctctgtgcctgcgacgacgactaggtgggttaccgccgtcgcgccgccgccgccgccgccgtcatactacaggtgcgaggccttcatcggtatcttaacaggcgacgaacaccaaccaggtaacttcgtcggtatcttcacttcaccgacggcgacgagcacgaactcgaaccttttttccccccaaaaattagccccctccctgccccagtctgcactctacgatggcggcgcctccggccacggctcccgcggcctcccggtgtctctccggtgccaagtcgtgccgggctgctgagcggagctccagctcgtttgccgtctcggcgccttctactggcctccggcaaagtaggagccgcgtcctcagcgtccgtgccaaggttgccactggcgtgcagagagccagcactgtggatgatggagcgaaaaggccgtggaagctcagtgatgctcgtcttgtactggaagatggatcagtgtggagggccaagtcttttggcgc

SEQ ID NO: 270187 - DNA, 439 bp, Zea mays
cagtaatcagagtaatctctctgtgcctgcgacgacgactaggtgggttaccgccgccgcgccgccgccgccgcccccgtcctactgcaggtgcgaggccttcatcggtatcttaacaggcgacgagcaaccagtctgcactctacgatggcggcgcctccggccacggctcccgcggcctcccggtgtctctccggtgccaagtcgtgctgggctgctgagcggagctccagctcgtttgccgtctcggcgccttctactggcctccggcaaagtaggagccgcgtcctcagcgtccgtgccaaggttgccactggcgtgcagagagccagcactgtggatgatggagcgaaaaggccgtggaagctcagtgatgctcgtcttgtcctggaagatggttcaatgtggagggccaagtctcttggcgcttcaggaacac

SEQ ID NO: 270188 - DNA, 453 bp, Zea mays
tcgtcttggcggtgccgccgcagatggaagtctgcgaccaactgcggtcggttggagccacaagcgtttaccggcttgatggcacctgcagcggcgccggagccacttaccttgacccggtccggcttcttaacgcgttctaccagcgtttccgcatcgtcccttctgcgtactactcccgaagcttcggcccccagcatcaggaaggcgagccagagatcgagcggcccgagaaaaggaggaaacgcaagcgtaatcagaagccgaagcccagggagctcaatccaatggagcggatcgctgaagcccggcaccaggaagcgaagcctttactattggacgcacatgaatcactcgttaaggctaaacatctactggagtacatttccaagacaatcaaaggcaatgaacacacacttgatgcgggtagtggtctgagaataaattcgttga

SEQ ID NO: 270189 - DNA, 508 bp, Zea mays
agcccacgcgtccgctttaaaagcatcctctccgccgcggcgcaacggccacaccttccgtcccccggcctccgctcgcctgtcccctctctctctctctcccctcgctgagtcgccgccagccatgaacaacctcctcacggattcctttgagctcccccggcgggactcctcaagagatgcagacattgaaatgggaatgcatcaagctgatgcttcagacaacttaaaagatttcttgaagaaggtcgatgcaattgagagtttaattgcaaagctgacaaatctattgaataagctacagactgcaaatgaggaatccaaagcagttacaaaagcaagttccatgaaagcaattaagcagcggatggagaaagatattgatgaagtggggaaaattgctcgtcaggcgaagacaaaaagttgatgaactggaaagaagaccaacctatcgaataggcaaaaacctggatgtggaaagggtctgccgtggaccgatcaagagagc

SEQ ID NO: 270190 - DNA, 462 bp, Zea mays
cggacgctggcggacgcgtgggtgcggcgcaacggccacaccttccccggtcccgcctccgtctctgtccagcgggcctccgctctcctcgccgcccgcccgcctgtccctccctcctcgccgccatgaacaacctcctcacggattcctttgagctccctcggcgggactcctcaagagacgcagatattgaaatgggaatgcatcaggctgatgcttcagacaacttgaaagatttcttgaagaaggtcgatgcaattgagagtataattgcaaagctgacaaatctattgaataagctccagactgcaaatgacgaatccaaagcagttacaaaagcaagttccatgaaagcaattaagcagcggatggagaaagatattgatgaagtggggaaaattgctcgtcaggcaaagacaaaagttgatgaactggaaagagataacctatcgaataagcaaa

SEQ ID NO: 270191 - DNA, 524 bp, Zea mays
gcttgatatccgctacccaacactgccagtggtagagctacaccgtcaccatgcccctgtcaaggcgcattgcgtgggcacctcactcttcttgccacatctgcacagctggggatgacatgcaggcactgatatgggatttgtcgtctatgggaactggtagcaatggcagtggcaatgggaatggtaacacagccgctggagcagcagcagagggcggtcttgatcccattttggcatatacagcaggggcagagattgagcagttgcagtggtcggcgacccagcctgactgggttgcaatcgcattcgccaataagcttcagattctcagggtctgatttcctagttccacccttgttcagtgaggagtaaaaaatgctaaacttggataatgagctgatgcccggaggataatcttgcaattgctttactggtgcttatttatgttgtggacaactgatattcatggcaggttagttctcgacatcggacagcagcctgtctagttagaagctgaattg

SEQ ID NO: 270192 - DNA, 842 bp, Zea mays
gagatcggctgcctcgatttctgttggagtgccaagcagtactgctagttctacttctgtacttcagcagtagtaggccgctgttgctacaattttgactgactgagatgggaatcctctgcctcggtgcttcctccacactgctctgcggggaggacaggaacaacgtactcggcctcggctgcggcaacgagctggtggaggtggggagcggccatgacggcttggactccgtcgtcggcgccgtgttcctcgtggacacagatgaggccgtgcgggcgttgttggagaaggcgtccgtccacaagcctcaagacggctatgcgcagaggctggagcgcggcggattggagtactcctggaggagagacgccatggattggatttgcaaggtccattcgtactacaggtttggaccactcagtctttaccttgctgtgaattacctggatagattcctctcctcatatgatctcccacacgataagccttggatgcgacagttgttgtcagttgcttgcctagctctcgctgtcaagatggaggagaccgtgctccctcttcctgtggaccttcaggtctgcgatgtgaaatttgagttctaagcaaggactattgggaggatggagcttcttgtgctggccaccctgaaatggagaatgcaggctgtgacccccttcactttcatcagctacttcctcgacaagttcaatggtgggaagccgccgagtttggcactagcgtcacggtgcaccgagatcataattggcacactcaaaggctctacattcttgtcattcagaccatctgagattgccgcggcctcagctctagcagcagtt

SEQ ID NO: 270193 - DNA, 417 bp, Zea mays
aaatgcctctcaagagaaggacagttagctgattccatcatgcttaagtggcatttatttagtatttttattatacgatacacaaagcaactactggtcctggaatttgttattggaatttccgataggttatcgttgtcgggtgactaagggcacatagaaccgggatcttttgctggccatggatgttctgaatgcacttgtaacggccctggtatctgacactctcctagaatacaattcaatacaagggctgcagctctagcttgaagaaaaaaaaaaaaaaaacagaaaaaaataaaaaacaagataataaaaaaaaaaaaagaccaggaccaatcaaaaattcacaatgaccatcaaatttcatgatgaagctttagatcaccctatttggaaaaaaaaagggggggcctt

SEQ ID NO: 270194 - DNA, 1278 bp, Zea mays
aaaacccgccactctcaggcccgcgcagcgacgccgccagccagacccgatcccctccctcgctagggttttcgtccccgcgccgccgcgctcccggatcccaccgaaacaaccatggccggcggtcccgcggcggtgtcgttcctgaccaacatcgcgaaggtggctgcggggctcggagccgcggcctcgctcgcctccgcgtcgctctacaccgtcgacggcggcgagcgcgccgtcatcttcgaccgtttccgcggggtgctcccggagaccgtcggcgagggcacccatttcctcgtgccctggctgcagaagcccttcatcttcgacatccgcacgcgcccgcacaacttctcctccaactcggggaccaaggacctgcagatggtcaacctcacgctccgtctcctctcccgccccgacgtccagcacctccccaccatcttcacctccctcggactcgagtacgacgacaaagtgctcccctccatcggcaacgaggtgctcaaggccgtcgtcgcccagttcaatgccgaccagctcctcaccgaccgcccccacgtctccgccctcgtccgcgacgctctcatccgccgcgcccgcgagttcaacatcatcctcgacgacgtcgccatcacccacctctcctacggtatcgagttctcgctggccgttgagaagaagcaggtcgcgcagcaggaggccgagcgctccaagttcctcgtcgccaaggcggagcaggagaggcgggcggccatcgtgcgcgctgagggagagagcgagtccgctcgcctcatctctgaggccacggcgatggctgggacagggctgatcgagctcaggaggatcgaggcggccaaggagattgccgcagagctggctcgctcaccgaatgtggcatacattccttctggggaaaacggaaagatgctgcttggtctcaatgctactggatttggccggtgattcactgtttttttagtctgcttgtgctatgtgctgatgcatgactaaaacggaggttcgaactttgaaggacagtgatatctgctatccttgcttatgttaagttttccttgtcttggaactaaatgtgtctgttgtgctccaaataagttttggtttttgactgcatatttgcaattggtagggttaatgcgacattgtgttaagcctgcatagtgcataaacatgtttattgctaaaaaaaaaaaatctggtggtatgatccaaatatttttcatgcactagtatattcgggggcggccgtttaaa

SEQ ID NO: 270195 - DNA, 771 bp, Zea mays
gacgccttccaggagacgcccatcggggaggtcacccgctccatcaccaagcacaactacctggtcctcgacgtcgacgacatcccccgcgtcgcgcaggaggctttcttcctcgcctcctctggtcgaccggggccggtgcttgtcgacatccccaaggacatccagcagcagatggcggtgcctgtctgggacaagcccatgagtctgcctgggtacattgcgcgccttcccaagccccctgcgactgagttgcttgagcaggtgctgcgtcttgttggtgaatcccggcgccctgttctttatgtgggcggtggctgcgcagcatctggtgaggagttgcgacgctttgtggagctgactggaatcccggtcacaactactcttatgggcctcggcaacttccccagcgacgacccactgtctctgcgcatgctaggtatgcatgggacggtgtatgcaaattatgcagtggataaggccgatctgttgcttgcacttggtgtgcggtttgatgatcgtgtgacagggaagattgaggcttttgcaagcagggctaagattgtgcacgttgatattgatccggctgagattggcaagaacaagcagccacatgtgtccatctgtgcagatgttaagcttgctttgcagggcatgaatgctcttcttgaaggaagcacatcaaagaagagctttgactttggctcatggaacgatgagttggatcagcagaagagggaattcccccttgggtataaaacatctaatgag

SEQ ID NO: 270196 - DNA, 465 bp, Zea mays
gaccgcccatagaattttcatttcgccgcattattttttttcccttctcactccctccgtcggtccttcgccttcctcatgtccccgactctccgatactagtcgagtagtccggtacatcacaccgcctcgcaccgcggccatgttgacaccgcgcgtcctcaaggcttcgctgctccgctgcttgcgcgctaccgccgagctgcctccgttgcggcgaccccggatcctacctgtgcgggtttaccattccagaggctattctagtgggggaagctccaagtatgataggccaatgagacagttttccgaacagaatgagtcaacctctcagccattaatatattacattgctccatctgctctgcttgcttttgctgggatagccacatttgttcattacaatgatgagaggcgtgcaattccctttcgctaaagtaccaggacagaccaatgttcccaaaa

SEQ ID NO: 270197 - DNA, 729 bp, Zea mays
gttttatcagcttctgataaggtcatctttcctggtgcatctgatgaagctttgcgaaggataagtaacatgatcccagataattattttcccttcagtcatattcctcctatatcagggaagggggttgatcctgttgaatatattggagcttcgaatgcatcatttcaagggaaactgggtcttccaaacttcagtctggaagacaacgctccacttaagcatattaagcctatacctgatatatttccttgcctgtcactgggtgctcataaggattatattcgtagttctgtcccagagttgccagatggttcattgctgccaaacttcatggcagatattgctggtacttcgaagcaaaagtcattcatgtctggtccacttcctgggctgggtcttagcccagggcaaccaatccattcggctatgcctgataatcacaagaaagtcttggacaacataatgatgcgtgctcagtatgcctcaaacaaattcttgaagaagagatcaaaactagattattggtcagaggatgaacttgatgctctgtggataggagttcgtaggcatggaaggggaaattgggatgctatgcttagagatccaaagctgaagtttttgaacaaccgaactagtgaggagctggcctcgagatggattttggaggagcaaaagattattgatgaacctatgtttgcagccacaagacgttctaactcaacagca

SEQ ID NO: 270198 - DNA, 455 bp, Zea mays
ggccactttccccaaactgcccttcccaccatcccctctaggctccaaaaccaccacctagctgctcgtcgctccttgtctcgtctccttcactcacctccccccgcggcccgcgccaatggccgattcgccaaaccctagctccggcgaccttcccgccggcgctgggtgctcgccggagaagccggtcctggcggatcgacgtgtgtctgcgctcgccggcgccggcgcgaggtacaaggccatgtcccccgcgcggctgccgatatcgcgggagccgtgcctcaccatccccaccgggtttagccccggagctctcctcgagtcccccgtcctcctcaacaacttcaaggttggaccggctcccacaaccggtactctgagcatggctgcaaacatgaacaagagcactcattcggacatactgccttgcctagggataaatcagctgatag

SEQ ID NO: 270199 - DNA, 1116 bp, Zea mays
ggatttttctcttccataaagaaagcatcaagctgctggggaatagaaaagagtgaattttgcaagcttcgactatggatggccatttcgttgctgttcttttgttgagattggcttaagtgctgtctctggttttcgttcttctttctgactactctcaacccgaaatcaatttcaccggtggttctaataaacctttaagggcttaaataatactaattgtcatagcagaaacactttgaacaagttgtgttgaaccgtctcccacaaccggtactctgagcatggctgcaatcatgaacaagagcactcatctggacatactgccttcgcctagggataattcagctgatagtggccaagaagatggaggctctcgggagtttggattcaagcctcatctcaattctcaatcgtcggctactgcagtcaacaatcaaaatcatcatgacattcctatgcaaaatcatggctcaaatcatgcctcaccatctagcaatttgatgactgaaaataaacctctatgctcacgggaatcgagtcacacagcaaatgtttcaagtgctccaaaccaacctgtttcaatagtttgtccatctgacaacatgcctgctgaagttggtacatcagagatgcacctgatcaatagctctgaaaatgctgcccaggagacacaaactgaaaatgtagctgaaaaatcagcagaggatggctataattggcgcaaatatggacagaagcatgtcaagggaagtgaaaatcctagaagttattacaagtgcactcatcctaattgtgaagttaaaaagctattagagcgttcgcttgatggtcagattactgaagttgtttataaagggcatcataatcatcccaagccccaaccaaatagaaggttagctgctggtgccgttccttcaagccaggctgaagaaagatacgatggtgtggcacctattgaagacaaaccttcaaatatttattccaacctctgtaaccaagcacattcagctggcatggttgataatgttccgggtccagcaagtgatgatgatgttgatgctggaggtggaagaccctaccctggggatgactctaatgatgatgatgacttgg

SEQ ID NO: 270200 - DNA, 723 bp, Zea mays
aaaattgaattgcaaggggattcctcccccatggatcccctagggatcccgcgtcgccgaacctccccgtagactgaccaaattccccgcgggcttgcggccaaacctttcaccatcggtcggcgaggccgcaccctcccgtgcatgtcactcctgccggcgccgggcgtcctatggtagagactcgccgctcagcgcggaggagcggcagcggttcgctcccggccgacggagcgccgtccgagccggcatccagctcccctgcaacctccctccccccgcgggagaataatggcctggttatctctaatgacaacacattgaagcagaccgtggaggtagaaaaacaggggaggcaaggtaaggaggtcttagtggttcatgaattggatgagtcgaatgaggattctgggtcattggatgagccgccgggttggcttcctgacggctggactatggaggtttgtcaagaagacaatggctccatctacaagtactacacttccccaatgtccggatacatgttcacatcaaagatggagacattgcattatcttttctcaggggtggaagaacgtatgttggagttgcaggcaagcgccgaggacaacgagcttcatgagtcacatacatggcttccacgtgggtgggtgattgaagtcagagccggtgggaagaaaatggacaaaatgtacaagttttatgttcaactacctactgggc

SEQ ID NO: 270201 - DNA, 1288 bp, Zea mays
actccctgggccgaacaattccggactgggctaccgccgtccaccgcagccactttcgacccgagtgcgttctttctctctctctcttccggcgactgggcagtgagctaccgccgccgccgccctacgccaggtgctgaggtcttcgtcgatctcgagctcccacaagggaagctgtccaggatgggatacaaccgccacaggcgtggccggggatcatcctcatcgtcttcgcgccgcaccaagcaagaagcctcgtgtgatgatgagccttgggacatcacttccaaggcaagaagaaggcacagaagacgaactcaaaggttcaagaattcagcttgcaatgtgggactttggtcagtgtgatgttaaaagatgcactggtcgtaaactttcaagatttgggcttttgaaggagttgagagtgaccaatggttttggtggtgttgttctcagccctgttggaacacagtgtgtatccaaggaagatcatcctattgtgcaaagaaaaggattggctgtggttgattgttcctgggcacgtttaagtgatgtcccttttgtgaaactacgttgcggtgctcctcgtctcttaccatggttggtagcagcaaatcctgtgaactatggccgcccatgtgaactgtcatgtgtggaagctttatcagcagccctcataatatgtggggaggaagatacagcacatttgctgcttgggaaatttaaatggggtcacgcattcttgtctctaaacagagatctcctgaaagcatactcccaatgtgaaaatggagctgagattatcaatgtgcagaagtcatggttatcaagtaactcgagtgttccaaagccacctgtaaacggggcagaggaatcacggcaaaacaaggaggagggatctgaaggtgattcagacgatgacttgccccctctcgagaagaatatgaaccacctgaacctcgaagaagacgaagaaagcgaggaagagagtgaaagcgagtaaaattgtggtctgaaagtgctgccatggtaactttacgactgttttacaagtgaatttcagttgccttgcctgctacgaagcaaccgttgtaggtgcttcagtgtctaatagccagaataagcttcagtggccttttcgcccagatgttgaatgcatggttcgaaaagaaatccttgtacgcctttaatagtgtgtacctatagcactagctttgaagataaatgatgagttgaacacattgagatcattttaaaaaaaaaagggcggccgcccgggaatccggtc

SEQ ID NO: 270202 - DNA, 1492 bp, Zea mays
  unsure (1)..(1492): unsure at all n locations
cgcgtgcaccttactccggccggccggacgccggccgccacgttcctctcgggctccaaccccagacccgcccacctcaccttcttcccgaagcttacccctacctccctctccgccgccgcagctgcgaatgcgccgccgccccacatcgtcgtcgtgggctccgccaacgccgacatctacgtcgaggtcgaccgtctcccgctcatcggcgagaccgtggcggcccgcgcgggacgcagcctcgcgggcggcaagggcgccaaccaggccgcctgcggtggccgcctcgcgctgggccctacctacctcgtggcgcgcgtgggggatgacgccaacggccgactcctcgagggcgccctagccgacgccggtggtgtccgcaccgaccgcgtcgcccgtgcggccgatgcgccatcgggacacgccgtcgtcatgctcatgcccgacgggcagaactccattatcatcgtgggcggggcgaacatggagggctgggcggcggggatcggttcggaggacctggaattgatccgaaaggcaggcgtgctgctgctgcagagggagatacccgattgggtcaacgcgcaggctgcccaggctgcaaaaagtgcaggagtgcctgttatcatggatgctggtggaatggatactcctttacctcgagaactactcagtctagtggatattttcagtccaaatgaaacagagctagcgcgtctgactgggatgcctactgagacgtttgaacagatcagcatggctgcaggaaaatgccataaaatgggtgtgcaagaagtactagttaaacttggatcacaaggatctgctttgttcgtcgagggagaggagccaatcaggcagccgatagttcccgccacagaagtcattgacaccacgggggctggtgacacattcacctcagcgttcgctgtagccctggtcgaggggaagcctaagagggagtgcatgagatttgctgctgctgccgcctctctgtgtgttcgagtaaagggggctatacccagcatgcctgacagaaaatcggtgatgaagcttctggaatctgtgggagtcgaatagccgcaaaaatggcgttggtcgtgcgaatttacagagcctcgttttggcggcgatagaggtgtctccggtacgcggaattcgtgggatccatcgactgccgcgacgccttcacgtgctccccgaataatgcgacggtctccatcctcgccgatcccggatgaaacaaacgcattttccggtgccgcccggatggaacccccggcccccacacaaaataagaaacggcatcttgtgcgtttattatggccacacgtcgcccgttgtagacgcactccctcccccggttccgtgaacgcaataaacagtttcacactgggccggagctatcgcacggtaactcaggccttgcccttgtgcaagccaatgtgtttaaaatanaaatttttatttaaatattttttttttaata

SEQ ID NO: 270203 - DNA, 1497 bp, Zea mays
gcaaaagggagggacagcccacgcggatcggtgtgcgtggctccgcgctcccttccgccgccagtccgccggctcaactccagccgccgcgtgcccctcctctccccacccgatgcgggccctcgcgcgcgccgcgtcgctgctccgccgcgccgcggggtccgcgcctactacggcgtcgctgtaccatccgccgcggaacgtaggcccttgcctcgtgaagaatctgccaggtttctttttcaatgggtattctactcttttggctccaccaaatgaagtgttgattccaccagaactcctttctagcaggactgtgtggacaccagatcgggagcttgggcagtatgaagacctggtagctagggtcacaaacttccataatgaggacaagggcttcatggttttggatggcgatgtttttgatgttccaattaggaaggacattgttcaccgagtagtaaggtggcagcttgctaaaagacagcaggggacacactcaactaaaactatcagtgaagttagtggcactggaagaaagccttacccgcaaaaaggaaccggaaaagcacgacatggaacactgcgcggtgcccagtttcgtggtggtgcaaccatgcatgggcctaaacctcgaagccatgcaatcaagctgcagaagaaagtacggcggctggggcttaagattgccctgtctgctcgaactgctgaagggaagcttctgatctttgaggacttggaagttcctagccacaagacgaaaaacattgtgcaatacattagacagatggatgactcaaagaaggttctgttggtggatggaggcgacattgataagaagctaaagttggccactcaaaaccttcactacgttaacgtacttccttccattggcctcaacgtctacagtatcctccagcatgacacccttgtaatgactcgggccgctatcaacagaatcgtcgagcggatgcatacccccatcaaccgctagcaaggagggtttctgagtcgcaccactgtttcttacagccagcaacctgtgctttttcgttccctgttaaagctcgaaggtttcctgttatcttggtgctaacatggagctgcaacgtgagctgtttattttctgtcagactggaggtaccgaccgaggtaggagggaaatgttgtggccttttgtaagcaggtcattggatgtttattttagattattttttggcgttttacccacactacccttgaaacttagtgagttcttatccagcaaataagattatgtaatcctggattatataggtccaaagcttgggacagcaatttgtttagagtcctgtataatctagctgtcacgtcgcaggactcacgtggagaaagatgaagggatttgcatcgtttatggtttagtaagtggcttattattatatttttatttagtttggccgttttttagtatccaatctttatttacgcttgcattctactttatatctattttta

SEQ ID NO: 270204 - DNA, 444 bp, Zea mays
ccgtccttattaccggtgcgccgccctttttttttttttttttttttattaatgcatctgaatccgataacatgattaaagcaaacatgttcatagctcagaatgacagaaatcacaggacgcgccgatcgaacgctcgatttctgtctcctggaatctataacatttaacaaaccttatgcagtttaatataagtaaataaatactagagaagatactgctggcactgctgggatgattactcctgatgcagtgcggctgcggcctcgccttcatgagcatcctccagtactgggaaaacaggaggcttgacgagcatgaacggacgaacactgatgaagtggtcgtcgtctggctgcctctggtacacctgcttcacctctctggtcttgacgtgcatgtacgcaacgacgccagtcacaccgagctccaagaacacgaact

SEQ ID NO: 270205 - DNA, 1726 bp, Zea mays
gtcatggacactctgctcatctcggatgagcgcaaccaccacctccacgggttcttgtgtcgccggaagaaggcgttagcagcgtcacctcaatccacgcgcaactaccatgcgggcaactgccgggcgttccactccggcatcaccgtcggcatcctgccgtacccgcccgcgcaaagggttgcactgacccactcctctcctgagcccaagacaccgaaacatcagcttcaccatgggaaaaagcgcagccgagcaatctctataaacctttcgacgtcccctccctctcgccctgagctctgggctggcccggggttctgcaattcgccgcctcccagctccctcccgatccccaagttctcactccaccagaagcgcagtgtctcacttgaatttccacctgctgaccggtcagacgacgaagaggtgcccgtgcatgccaagtcggcaccttcatcgccgactgcaggctcaggtgttaccttcttcagtggtactgatgctaccattgccaccgagaatctgaggaggatccttaacctcaaaattgaggataactgaatggcggttgggtagttctgtgtacatagtttaactacaactgacctttgtagtatgtatagggtaaccggggataaccactgtgtacctggcggtggttccttctgcagcagtactgtaggcggttagcaagcacagcgaggagtttaggaagtttggaaatgcagtgaggaaggatgttgtggtaatggagatttggtggatttgcatatcactgcagtttcagagtcacctttgttccttgtaccttgtagttgcctattagtagtccaatactccatttagatgttatagtatttgcatcttccctgcccatcattaaccagtagccacagccttcatatcataatccttgtcatgtagttcatctcaggcaggacattgtaggctagctagtactgttcaagttctgtcatatatgtagtcttctgtaggattgctgcatcccttgaatcttgcattctgtatcacattgcatcctgctgactcacctcccttcataacatctccctgtgttatgcaaagcgcacaaggatctcccctctggcacttctgttttttggaatgaagatgctcagaggcgttgttatgaagtcccgatccaatgttctttgtcctccatgtctgtactgactttagctatgcatctcctttgtcaccccagtccattgcatgtgccatccaatccgtttcgaaccattcatctcaaaattgcatttagtggtggttttcccttcgtcttattatcttttgtgcctcatgatcctggagcatgcccaggattctagtctcctccatgtattctcataaaggacttcatgtatcagagatctgcgaatgctcaaccctgaatatggtttgcttgtccgatgccacttcgcctcatccatacctggagttcagaattggcgaagcacctatcacttagctatctgtttcttagtcagtattgtgtcagactgttgtttttgtgcaatatttgattggctactagtctgtttgtgttactgttcaagtttatggtactgatcatatatggcggccggagtgttccacgccgatgctgtggcattctgttgctttcaagtaaaactagtcaatgttatgtaccttcatgttattttttggtcctgtttctgtcacatgtttgaagttccatgtt

SEQ ID NO: 270206 - DNA, 438 bp, Zea mays
cacgcgtccgcggacgcgtgggcggacgcgtgggcggacgcgtggggcaacgggtgccgcgtgcttcgcaaggggtgcagcgacgcgtgcgtgctgcggccgtgcctgcagtggatcgacggcgccgaggcgcagggccacgccaccgtcttcgtcgccaagttcttcggccgcgccggcctcatgtccttcctcaccgccgtccccgagccgcagcgcccagcggtgttccagtcgttgatgtacgaggcggccgggcggacgatcaaccctgtgagcggcgccgtggggctgctcggcgcgggcagctggcagctgtgccaggcggcggtggagacggtgcttcggggcggcgccatcgggccgccgcccgagttcgacgggggccgcgacaacacgtttgctctggcggccacggcgaagcgggccgtggggtgc

SEQ ID NO: 270207 - DNA, 391 bp, Zea mays
cgacccacgcgtacgcccaggcgtgcgcccacgcgtccgcccacttgttttctgacgcgtgggtgagccttccggtggagcgtgggtggtgctgggtgccggggatgagctgcaacgggtgccgcgtgcttcgcaaggggtgcagcgacgcgtgcgtgctgcggccgtgcctgcagtggatcgacggcgccgaggcgcagggccacgccaccgtcttcgtcgccaagttcttcggccgcgccggcctcatgtccttcctcaccgccgtccccgagccgcagcgcccagcggtgttccagtcgttgatgtacgaggcggccgggcggacgatcaaccctgtgagcggcgccgtggggctgctcggggcgggcagctggcagctgtgccaggc

SEQ ID NO: 270208 - DNA, 558 bp, Zea mays
ccagcgtccactcgcccaccgtttccgctccatccccggcccccacttccccgttcgagagacgaaaaccgaccattcattccttcttccatggcgaggagggcgacggtgatggtgctcgcggcggcgctcgcggtcctcctgctggcggcggcgtcgtcgaagacggcccccgtggccagcgccgcccgggacgacccctcggcagcggcggcggcggccgtcacttcttctcgtgacctgcagaaggatggatcggcggcggcggcggaagggaaggggaaggagaaggagtgcgagggcgccaacgacgaggacgagtgcatgatgaggcgcacgctggccgcgcacaccgactacatctacacccagcagcaccacggctgatccaatagaatccgtcctacgttacatgcgttgctctcgtacgtgtgttcgtgtccgtccgtgctcgtgtcgcgtactcgtgtgtgtgtgtgtgtgtgtgaaacgccagcgcgtgctgcttctgctgcgtcgttattacctgcgtgtcaaataaattcttttttttgtccc

SEQ ID NO: 270209 - DNA, 577 bp, Zea mays
tcagagatgaacttcagccagtgaagcatcttgtaaggccctatttaggccctttgtgatctccagttctgatctggagcactttgggtggctttggtatccttacttatgttaggtcttatgcctgttcgtgctggagttatctgatgggtcactcccccagcaaaggaggggtggcatttgttacttgaattgtagtattgctccgctgtgttgcgtcaggaaatgccaaatttgttggttgttgctgcgtctgaagatgtgcacggttgttgaggagagcttgaaaatattggtctggttgggctgataaagttaagagtattttttaagtacaccttgttagtgaatccggttggtgtcggtctactctgctgaagaccaagcggcttcattgccgcagcttgtatcttttggaatccgttgaaatgtgcgtgcggtttgactactttcagcttaaatgagcgtgcccaacatggatttttcggttacctgcaagaaaagccaacagaataatccgcccgtcgtttccccccgggtgatagaaaatttatttcatggttaaatagttcaaaaa

SEQ ID NO: 270210 - DNA, 1452 bp, Zea mays
ttataaaccgtcccccaaaggtagtgagagggaggggacctcgacgttatgaagctgttgcaaggaacagcagagaggttgttggatcccaacgaaagcaagcagctagatttcgagagcctgttccaaatgctgcagcagccagaaattctggtcaagtttcacatgcacaacaagaggctgctcctcccaaaaagaatgtcatcagctcaagcctgaattctgcatcccctccattttatccctctggtgcagctagtcaagattttccggtagcaactcagaggagagacatacaaacaggaggttctaataagattcctccatcttccatgaagatggatgataactcaatattacaatctggttcaatggttagagggagaacagccatggattatggtgggcgtgataggtttcatgctgatggtcctgttaggtcatcccctggaagggtgccaacggcgtcactgaattcaggatttacatcatcatcggtaaatcctagccaatccactattgtccgggcttcagggggcaattcaaacattggaatatcttcaaataatcagcctacttcatcgcttcaccaaacgtcaaggatttctacacatccacaaagtcatggaccagtgatgcaccagaagtcaatgcaagtgcagaatcagtctgcagcaagaattccaactcagcaattgagccatcggactaacaattcattaccagcagctcagcatctatctgttaaatcaacagaaagtggcgagaatggttcataccctagtctgaacaattcaaagacagcttctgcagtggtaaaagccaatagccaggaaactggaatggattcattgatgtatggtggtgcccaagttattggggctgctggtctttcccagggagatcaaaattttcctggcactccagctttgctgccagtgatgcaatttgggggtcagcatcctggtggtcttggagttcctactgttggtatggccctccctggctatgtatctcaacagcagatgggaatgggaaacaatgaaatggcatggttgccattattggctggtgcagcaggtgcttttggaggatcatatccaccctatatagcccttgatccgagtttttactctagatcttcaggacagacatcatcatcagttccatccagggaacctagtactaatagagggtctaaatctcctcctcgaaatgatattggaaatgaggagcttgatcagcgccagaacaaacctaggagatactcagagatgaacttcagccagtgaagcatcttgtaaggtgaactgcatctgaataagctgcttatggccctatttaggccctttgtgatctccagttctgatctggagcactttgggtggctttggtatcctatttatgttaggtcttatgcctgttcgtgctggagttatctgatgggtcact

SEQ ID NO: 270211 - DNA, 773 bp, Zea mays
cttgctgccacgtttggtagttgctacttgctacaccggaggaagaagaacaagtagtgcttttcttctcttgtcacgttcacggggcggccgatcgaccgttcacctcgcccgacggcccaagcagcccatgtcttcgtcgggcccctccccggcgacgggaatccacgcgtcgccgccgttgggccttttgccggcgacgggaacccatcacaccaggtcatggggcaaaacaacctccacaagttttactggttctaccaccaaacatgagcagagcttgcatggaaatgttaagccgttgcaattggcggcaaatgaatcctctcgtttggcttacagaagtccagcacttaaaaaccagtggaatcttcctgctagttcttcctccactaatgtggttaccacctttgatgataacgaacacgtgtcttccagtgttattgaagaaaaagttggagtactgttattaaaccttggtggtccagagacacttgacgatgttcaaccatttttattcaacctatttgctgatccagatatcattcgactccctaggctcttcaggtttcttcaaagaccactggccaaacttatttctacttttagagctcctaagagtaaagaagggtatgcttcaattggtggtgggtcgccgttaaggaaaattactgatgaacaggcgaatgctttgaagattgccctggaaaagaaaaaattgaacgcaaacatatatgttgggatgcggtattggtaccctttcacagaagagg

SEQ ID NO: 270212 - DNA, 733 bp, Zea mays
cccaagcgtccgcaacgatgcaagctgaacaaagcgaagggaaatctaatccttcaactgcgtgcgtcgttgagatggacattcaatgaggggcataaacactctagcagtcacttcctggtatatctcaacgatgcgagctgaacaaagcgaaaggaaatctaatccttcaactgcgtgcgtcaaagtttttgaaatttcaggaggtaaagcttcaagagttagcagagcacgtaccaaagggccacattcctcgtgctctgactgttcatctaagaggagagctgactagaaaggttgcacctggagatgtggttgagatgtcgggtatttttctccctatgccttactacgggtttagagcgatgcgcgcaggattagttgctgatacttacttggaagcaatgtctgtcacccacttcaagaaaaaatatgaggagtatgatctaaaaggtgatgaacaagaacaaattgacagattggctgaggacggtgatatctacagtaagttggcaaggtccttggcacctgaaatatttggccatgaagacgtcaaaaaagcactgctgttactacttgttggtgcaccccataggaagctcgcagatggcatgaagatcagaggcgacctgcatatatgcatgatgggagatcctggtgttgcaaagagtcaacttctgaagcatattatcaatgttgcaccaagaggagtgtacaccactggacgtgggag

SEQ ID NO: 270213 - DNA, 394 bp, Zea mays
ctacgatacgctgtttcttttctttcttccttctctccacctcttcccccctccccaaattcgcgtcgaacgaattcgttaaataatctcagaaaacacacgattgactggatcgaagggattaaaacgagaacgttcagatcctgtgatcaggtctcggggctaatcgtgtgatacttcggcgtgctttggcttgtgattcagtgatatagggtttcggatctggagaattagttctcccgacttccgagtcagaccatgaatgagcagatgatgcgacctacggcgccgctgccgttccaccagatgtgggcggcggtgccggcgatggagcctccggtgggcgcgttcaagccggcgcggcaggcctggaagcgggcggcgcggacgccct

SEQ ID NO: 270214 - DNA, 795 bp, Zea mays
ttcatgtaggcctctgatatctggtctcagccaagcagtacaaatttcagacaatgcattgtttcaaactctcataaaaagcaagattctcatacgaatggttacattctcataaatgcaaatggaggtttgaatcaaatgagatttgggatatgtgacatggttgctgttgctaagatcctgaaggcaactctggttcatccttcactcgatcatacatcctactgggcagatgacagtgaatttaaggaccttttcaactggaggcacttcattgagtcactgaaagaagacattgatattgttgaaacacttccccctgaatacagtgacattgaacctttggctaaagctccggtatcttggtcgaaggtgcattattacagagatgaaatcctcccccttctgaagaaacacaaagtcatttactttacacatacagattctcgccttgctaacaatggccttcctagttacattcagaaattaagatgccgagttaactacagatctttgaagtattctcatacaattgaagatcttggtaataccctagtttcaagaatgcgtcaggaccgaagcccatatcttgctctccatctaaggtacgagaaggacatgctagcttttactggttgcagccataacttgacatcagaagaagaggaggaactgcgtaaaatgcggtatgaagtcagtcactggaaagagaaagaaatcaatgctactgagagaagaagccttggtggctgtcctttgacgccaagggaaacttcaattttactcaaaggactg

SEQ ID NO: 270215 - DNA, 474 bp, Zea mays
caagattctcatacgaatggttacattctcataaatgcaaatggaggtttgaatcaaatgagatttgggatatgtgacatggttgctgttgctaagatcctgaaggcaactctggttcttccttcactcgatcatacatcctactgggcagatgacagtgaatttaaggacctgttcaactggaggcacttcattgagtcactgaaagatgacattgatgttgttgaaacacttgcccctgaatacagtgacattgaacctttggctaaagctccggtatcttggtcgaaggttgaagcctgaaactcgatgtctctaagtattgagatatgatgaaagcactcactcagtattttattctgggcaggtgcattattacagagatgaaatcccgccccttctgaagaaacacaaagtcatttactgtacacatacagattctcgccttgctaacaatggccttcctagttacat

SEQ ID NO: 270216 - DNA, 642 bp, Zea mays
tttgtccgttccgcctccgagtgggtgcattttgggcattgacaggcattatggatgactatcttgatggttacttctctgaagaaatgatcgaatctcaggtggatcagcttgttttagaggagttagtccgagggagattcccaaagttagtaaatcatcttgattaccttggtgtacaagttgcatgggtcactggtccatggttcctatctatttttatgaacatgcttccctgggaaagtgtgcttcgtgtgtgggatgttcttctctttgagggtaaccgtgtgatgctgttccggacagctcttgcactgatggagttgtatggtcctgcacttgtgacaacaaaagatgctggggatgcagtaacccttttgcagtctttagctggttccacttttgacagtagccagcttgttttaacagcttgcatgggatatcaagctgtaggtgaagcaagactgcaagaattgagaaataaacaccgaccatctgttatctcctcaatggaacagagagcaaaaggtcttcgtgtctggagggatacgaacaggcttgcatctaggctatataattttaagcgtgacactgaaccattggtgtcgttatcagaagaacagtcaaatgacttgacagatg

SEQ ID NO: 270217 - DNA, 329 bp, Zea mays
tcgcgatccccacgccaatcggagaagcgagccgtcgccgatcgattcaccaccgccggacccaagcacaagtaaacctgcgccgggaaaccaaatccttctcaattccttcgcgacgcggaccgcaagccgaaggcgcgacgatgtccggagcggcggactaccaggagatggtggcgtcggtgccgccctcgctgaaggccatcacgctgacgcacgttcgctacagccggggcgacccgctgggtctcttcctcgcgtgggtctccctcgtcccggttttcatcagcctcggcggtttcgtctcccacttcctcttccgtcgggag

SEQ ID NO: 270218 - DNA, 468 bp, Zea mays
  unsure (1)..(468): unsure at all n locations
acgtaccttctgtcctcctgggtatataagcggcggcagttnttcgcgattcagatgggcaacaacaaccacacattgtccctcccgccaccagccacaatcgtcgccagcgaccttttccccgattgtacctgcactggttagagttggagaagaccaacccccaccgtcttgggacccggttccatccccgagagttaacatgtttggaaggggttctccaagaatcagcatgctcttatcaaaaagtgcaacaaagaagccttctcctaaagctggtgatccaaaaaagcatggaggttctccaaaagagaaattaagagccgcttggaactcaactctagagaagactcttgtggacctcttgcatgagcacaagacagctgattataggggtcaaaatggatggacaacagaagcatggaacaaaattgtcaaggaatttcatcagagggaacaatatgtcta

SEQ ID NO: 270219 - DNA, 1013 bp, Zea mays
ttattcgtccgattttttattatttcccatttccaccctcgcaccgcatccacctccacctccaccgcgccgccgcgagagaggggagtactgaggaggagggtttccgatggagaacggcgaggatacgttcgcctcccccaccgccgccgccgcggacttctccaccaacggcggggacggcacgcccaagctccacgatttggcggacgagatggaggccctccgcgcggcgaagcgcgacctggaggagaagctcgatgccgtgggacacgagaaccggttcctgtcctctgagtcccggcgcctcgaggtcctcgtgtcccaggcccgcgaggaggtcgccgctgccgagcaagtcgccgccaccaacgagagcgaggccgccacgctccgcgccgaggtcgagcgtctccagggccttctagccgcagagaaggccagccatgaggaggagatgcgcatgggcgcacggctcggggaccagctgcagaccgcgtaccaggagaaggccgcccttgaggaggagatcgagaccctgaagggttccgccactgccgagggcaagggcgggaagcagcaacaggagggacgtgattccgtttctgccagggccgggacgcctaaggatgagggcgtggtgtctcccgctcttgtggttgccgcggctgctggagcagctgccacggctgccatcgcggtggtcttgctcaacctcaagagatgatgtggtggtccgatgctcgggaagttttgatctgctgctatggccttgtcgtggtactagtgttgctggactcagtgtggtatctttactatcagctggataatatattagaggttagaacaacctatattgcaagtactttttagtttctgcagttttccatgctaataagagttgtgaacacaaacgtgagagcctgagaggtaattgaggtcaggtgtgttgttttgaagttgcacctaattcgtgattttgagttatcatgacttggatggtttgtactgtt

SEQ ID NO: 270220 - DNA, 524 bp, Zea mays
ttctagcggccgtcctttttttttttttttttaatgttcaaactgactgcctagcaacatactacaggttcacaataaaaacatggctatcatttaaggtacaataaagtgcagatattagttctcctccctcgagtgtcagcaaagcacacggatataaacttctcctagacgatacacggatagatatggagctttcatcaggattcaatcctgccagtaacaagggggtggggcatcacttcacttgccttcctcgatgatcctgatggctttgttcacagcagcggttttctcatcggggatggctccaccctctgggagatcaaatttcctgcggctcagtgatcgctgcttccctgggggctgagggtccacaacctccagcattgcttcgagctcctctagcatagatttcttcgcggtcctcaccatgtagtcaggtccctcgagcgcatctacggtgatgagcagcacgatgatctttttagagaacctttggcgctcttcaggtcatgcgcaat

SEQ ID NO: 270221 - DNA, 620 bp, Zea mays
aagaaagtcatacacatacacacacgcatccgcagcactccctcctcggtccctcctctgcttcacacagaccagtgcgcgctcaattcccccctctagcgcctccaccgcaccaaaccggtccaacgggacctatgctctagcctcagagcaaaccaccgcctgaattgtgcggcaattgggggaggattcgcggcaggcagggcgcggatccgttggcgggatgattgcggctgtcaacagagtgccggcgggctggggcgaggatgagatgtccgtgctgccacggcacaccaaggtggtggtcaccggcaacaaccgcaccaagtcggtgctcgtgggcttgcacggggtcgtgaagaaggccgtcggcctcgggggatggcattggctggtccttactaatggaatagaggtaaagctgcagcggaatgctttaagtgtgatagaacctccgactggcaacgaggatgatgataaatttgattgtgaaaacatgcagtggaatagttcagatatggcctccgatgatgcactatcaccaaagccacagcggtcacggagcaagccgataggggtttcacagaaatccatcaaccgttaatgtctgtgactccact

SEQ ID NO: 270222 - DNA, 439 bp, Zea mays
ttctctcgtccgagacagaccagtgcgcgctcaattaccccccgacccctaccgcgtccaccacaccaaaccgtttcacccggacctgcccccaacaccctgctctatcctcatagcaaaccaccgcctgaattgggcggcaattgggagaggattcgcggcaggtagggcgctgatccgttggcgagatgattgcggctgtcaaccgagtgccggcaggctggggcgaggatgagatgtccgtgctgccgcggcacaccaaggtggtggtcaccggcaacaaccgcaccaagtcggtgctcgtgggcttgcacggagtcgtgaagaaggccgtcggtctcggaggatggcattggctggtacttactaatggaatagaggtaaagctgcagcggaatgctctaagtgtgattgaacctccgacaggcaacgaggatga

SEQ ID NO: 270223 - DNA, 514 bp, Zea mays
gcgagcttggttggtcctgtggcggcttctctgcttgcttaaatctggttttttttaccccgcgccctctctctcgctctctcccgagttccattgcaaaacctcgggcgatttgttagtgttggcataaggagaaggtctagctctttccggcctcgtccgccccccccccaatccgatggggtatgaagagagcaaaaaacatctcctcagtctcagctaccctgagctgcaatgtttgtgcaaaaggtataaccttcctgctaagaagacccactctcagttagcaagttcgctcgcctcgctgcttgaggcatctccatctcctgctcctcctcctgtccaattagcaaatatgaaagaagcatccacatgcaatcatgctaacaacaaaagaggcccatacaatggcagggatgatggtaaaccacttgtgcatgcgaaacatcaaaaaggagatcagacacctgttgatgaaacatctaaaaaggggattgacactggtacgagtata

SEQ ID NO: 270224 - DNA, 713 bp, Zea mays
ttaacctgcgtgctacaacatatcggaaggatacgtcacggctagttgataaatgtatgtggctgctggtatcgacctttttgactccacatacatttaccaacttactatgggtggtttcgcactgatcttccctgttgacatggttgaaagagaaatgcagaatggtgtactcaacactactgatggcgattcaacaaagattaacctgcgtgctacaacatatcggaaggatacgtcacggctagttgatagctgtaattgcttcacatgccaaaatcacacccgtgcgtacctcaatcatttgctcaatgtccatgagatgttggctcaaattcttctggagatacacaaatacccatcattatcttcgtttcttccattccatacgggaggcgatcaaggttggagagtttgatcttttccgacaggagttcgttaagaagagacgcacccatttcgctgctgttgtggtctagacgtgcccaagagttcatctggctgtcctcacaagattaacttatcaattaatcagacttgtgtacacctgaatccttactagtcaactttcacgtctatgattgacaagtctgaaaagattcatacattaagtgatagaagttgtgtgctaaacaactgatgcactttcttcattggaaaattaattaccattccttgttacctgatttattcaaacaagttttctgatgctt

SEQ ID NO: 270225 - DNA, 1096 bp, Zea mays
acccacgcgtccgggcaaggccacacgctgatgccttggacaggttttttccatgcacatgttctctgctggccgcaacctcctgggaggcgttgccttcatcggagagggcattcctgttgccactggtgcagcctttgctgctaagtaccgtcatgaggtgctcaaggagtctggccctgatgggcttgatgtcacattggcgttctttggcgatggtacctgtaataatggccagttctttgagtgtctgaacatggcacagctttggaagcttcctattgtgtttgttgtggagaataacctgtgggcaattggaatgtcacacattagggctacatcggacccagagatttggaagaaggggccagcatttggaatgcctggggtgcatgttgatggtatggatgtcctgaaggtcagggaggttgctaaggaggcaattgagagggcaaggagaggtgaagggccaaccctagtcgagtgtgaaacatacaggttccggggtcactcccttgcagacccagatgagctcaggaagcctgatgagaaaacacactacgccgcaagggattctatcacggccttgaagaagtacatcatagagcagaacctcgcaaccgaatccgagctgaagagcatcgagaagaagatcgacgatgtcgttgaggaggctgtcgagtttgctgacgcgagcccgcatccgccgcgcagccagctgttggagaacgtgtttgccgaccccaaaggctttggtatcggccccgatggtaagtacaggtgcgaggatcccaagttcacccaaggcaccgcccaagtttaaggaggttaatctgcgctctgtaccactgtacttgggttctctagttttgtcgatccagtgtcatgttaaggatactgtatgcataaggtggtccatttctttggctcttaggattgtgtctgatactgttgtgtaatttattcgaatgctcaactgatgcccaggttttatgatacgttccggagcttaatttgttcaggaacagctcagtttctactctatagaagtatgtggaatggtttaaaacacaaaaaaaaaagggcggccgctcgc

SEQ ID NO: 270226 - DNA, 458 bp, Zea mays
gcactcgcacctctttgccgttttccttctcccgttcgcctcgcgccgccgccgacctacgccagttgcacaggtcttcgtcggccgctttccggcgaagagcattcgcgcgagggaggggatggggaagaagcagaagaagcctgggaaggggaaggagaagacggagcggaagacagccaagggcgaggagaagcgtgcccgccgggattcccgcaaggtcggcgaggaggacgacatcgaagccatccttaggagcatacagaaggaagaagcgaacaagaaggaggttcatgtggaggagaatgttcccgcaccatctcctcggtccaattgctcgcttactgttaacccagtgaaagagacagaattgatcctgtatgggggagagttctacaatggtagcaagacctttgattatggtgatctttatcggtatgatgtagagaaaaatgaat

SEQ ID NO: 270227 - DNA, 517 bp, Zea mays
gctttcccacgccccgggtctttcccctctactactacttcggaaccgccgccgctcccggcgcctcggattatcaactaccgcaggaggtcgcggcggcaggatcggtggtccagcgtgcgatggcggcggcgcctaccgtgcggggctacgggccagcgtcgccgtcgtcgtcgtcggtggcgctgcctcggccgcgatcgcgggtgcccgcaccgctcgtgcccgtgacgacgcggcggggggcgccgtcggtgcgcctgcgcgcggcgggcgcggacacgcctccccgcggcggcctgcagctccagcggcgggaggaggacgaggggctgccggggaccgtgttgggccgaggggaggacgatgaggtgtcggagaaggtcggggaggagaaggtggagaggtggatgcgggactcgatcgcggagatcgtgcggcacgtcggggaggcgccgttcctggtgcacctgttcagcagcggtgacggcgagcgcgtgaccgtgcggcgggagcc

SEQ ID NO: 270228 - DNA, 1365 bp, Zea mays
gcgatgttgatgcagtcatgctagacattgatggaactcagaataaatcgaagttgggtgccaatgctattctcggagtctccttgagtgtatgtagggcaggcgctggtgcaaagggagttcctctgtataaacatattcaggagctagcaggaattaaggagcttgtcatgcctgttcctgcttttaatgtaataaatggaggtagccatgctggcaacaatctggccatgcaggagttcatgattttacctgttggagcaactacatttgctgaagctcttcgtatgggcagcgaagtttaccatgtcctgaagagcatcattaagtcaaaatatggtcaagatgcatgcaatgtcggagatgaaggaggttttgctcctaatgttcaagacaacagagagggtcttgtcttgcttatggatgccattgagaaggcaggctacactggaatgatcaaaattggtatggatgttgcggcatctgagttccttacaaaggatgggaactatgatctaaactttaagaatcagcctaatgatggagcccatattctctcagcccagcatctgggtgatctgtacagagattttgtcaaggatttccctattgtatcaattgaggacccttttgatcaggatgactggagttcatgggcatcattgcagtcctcagttgatatccaaattgtgggtgatgatttactcgtcacaaacccaaaacgtatagcagatgctattgataagaaggcttgcaatgctctgttgctaaaggtcaaccagattggtactgtcactgaatcaattgaagctgctctcgattcaaaagctgctggttggggtgtgatggtcagccacagaagtggtgaaaccgaagacaacttcatcgcagatttggctattggcttagcaagtgggcagattaaaaccggggctccatgccgcagcgagaggctggccaaatacaatcagcttctgcggattgaagaggagcttggtaacgtgcgctatgcaggggaggcattcaggtctccatgagaaatacagacttcagagtctcagtaaagcctaaagtatgtgtactgcccagtagaagaaataaaagaactagatcatgaccagtcatgctttcatccttgttaccacgagttatcccaattttttgcggtttttttttcttgatacatcttattatctgcgagcatttgacgacatagtcatcatccggaaagatgcttcctgtgcacccgcgcgagtctgagaaagtgacagctttatatggacatgaccattaacatttaacaatcatgcttgtaatggtgcgttatggtcatacaataaattaagggacatttacattccaccc

SEQ ID NO: 270229 - DNA, 659 bp, Zea mays
agcacatcctcctccatcaccaaattgacgattatatcgaaaatctggacggcggcggactcgattgtagcagcagccgccgggaacaagatggcggcggcgttgtcgcagctggacgacgagatcgtccgcggcatggccatcggcgctgtcttcaccgactatgccgggaagataaactgcctcgacttccaccgcaaggaagatctcctcgtcacttccagcgaggacgactccatccgcatgtacaacatcaccagcgcgacgttgttaaagactacatatcacaggaaacatggtgctgaccgtgtctgttttagtcatcatccaagttctatcttatgctcttcacgatacaacctagagtctgcagaatcacttcgttatctgtcattgcatgacaaccgttgcttaagatacttcaaaggacacaaagacagggtcgtttcattatgtatgtcgccttgtcaatgattgctttatgtcaggatcccttgatcacagtgtcagaatatgggatcttcgcgtaaatgcttgtcagggcatactaaggctgcgcggtagaccttctgtcgcatatgatcagcagggacttgtttttgctgtagcaatggaaggaggtgctattaagttatttgattcccggtcatatgacaagg

SEQ ID NO: 270230 - DNA, 490 bp, Zea mays
gcacagacagacaccgttacgcgagcacgcaacgcacgaggagaggagacgcttaccgagcgaagagcactaggctccgccatcgacgcacgcacgcaagcgtgaagcgtcctcgactcgcctttcggttcggttcggttcctcgccgtcgcgggcggcctcgtcgggcgaccgctctctcggcatttctttctatctggttgctgtgtgtggattggaggccttgtgagctcgcggaggcggcgcggttcatggccgtggcggacggttcggaactcggtggccgccgtctcgcttcttcgttgctgtgctcctcgtcctgctcacagatggcggagcggcgtggaagagagcagaaggcctgtcgttgggcatcaactacgggcagatcgcggacaacctgccgtcgccggcgagggtgtcgtacctggtccggtcgatgcaggtgagcaaggtgaagctgtacgacgcggacccgtacgtgctgagc

SEQ ID NO: 270231 - DNA, 1027 bp, Zea mays
gaaatgccgggggcggccggcctttttttttttttttgaaactgaaatgagctaggagtcatacctctagccaatttagctctgagtctctgatagattctacaatacaaactgccccacaattcaggctcttgaattttcaaattgtacaaaatttcgacctcgtgacaagtgtttacaatacgctggcttaagataaaccgcctgctccctgaaaaggggtatagttattgcactagaaaccttccccagtttgtatcaagcagcaagcctcccattatttgcccagggacatccaatgattgccaggctcagagttcagcagcagcagctgataccttttcctttgtatgcgtgacttcacccgcttggtcatcaccagcactacttgcttctagctgcctttgctttgccaaagctcgttttgcttccctacgaaagtctttcttggcagcacgaacctcgtcaaagccctctttaaccttagcctcttcctcaggagggaagaagcctacttccatctcacccaaatctgaatacatcttttcgatttttgctttccacactatccccatctcagtatccattttattgtaaggtgtcttcaggaggtattcatctatcccaccagctttgtcaatgcaccgaagcgcatgtgtggtaaccttgactctaatgtgccggtcatgaatatagctgaaaagacgcttctcctgaacatttggcttccatgatcgccttgatttgttgccgccgtcctcggagaccttgttcccgaaccggatgtgtcgcccggcgaagatgccgcgcttggcccgccccatgacgacgttgctgtccggcagcatgtccttcaccgacttcatcagctccgccggcagcttcccctcgccgcccacgcgccgcaccaccttcttgtacatctcccgcgcccggaacgacatcttccccctcctctggtcctcagctcaccctcccgctacgtcggcggcgccggcgggcggttgcctcgcgaggttttggtgcc

SEQ ID NO: 270232 - DNA, 778 bp, Zea mays
  unsure (1)..(778): unsure at all n locations
ttttaactanatttttttttttttttttttttttggggcaattaaacatcataattcattgattctcagccaacatccagctttcattgtttctgaacggctgaacattcctccctatataattttgagaaaccatatactgtatccactatccagcttccattgtttctcacaaaggtgcccacagatggagctgcaggtttcccactagatcaggaatctaacatgctctttgctgttgacatcaatagatcttgatcagagcactcatagcaccaaattagatgctgaggtttgtctgataagcagcaggcagtgccacctaaactacagttttttgccaccagctgaagtcaagtccaaaaatccattcgcctcaaactctattctgaatcactctccatgctcaaagccttcaagcctctagccctctttttagaactcttcttctctctaacttcatatctctcatgagatagatctgataaccaagctcctgggctcaccataagcaagcacttctgcatcagcttgggcctcttctttggcctctgtggcagcttggagcccttcatcgccatgaagtcctcctccttctccttgtttgacaatgcaatgaagaatctcggcaacgatgtggttcccttatcctctgttatggtaccaaagtcaaacccatttccttcaaagggaaatggtgaacccctcgttgtgtaatacttgtccttctctggcgatagcgccatcgtgtgcttgtactcattcaccaacaaaacgg

SEQ ID NO: 270233 - DNA, 716 bp, Zea mays
gcggccgccctttttttttttttttttttgaatgaactcgtctcttttttcaccatcgatctctgaccaacaggcgctgggtttgatgctagctaccgcggcaccattcaccaccatatattgttcaacacgcatcatagattctattacaccacaagtgtatcagagaggagaaaatccgacattaggctaatgagaagaaaaaaaagaatcccatagttacatcatcactcatgcctcatgcccgagatggcgagcctcatcatcttagaattcatcacttgccccagaaaaccaatggccaccacagcttaatcttatgccgcttccgaaccgaagcccttagtagaaaggaggaggatcgtcgtcatcctggcggtggcccgttttcggaccggctacattgcgttgtggaggccggcggtgtgcatcagcacggccttaatttcttcaggcaccattccaggaccatccgcgcactgctcagctcggaacacgtccatcgcaaagccattgaagcagctgatgaccgcctgctcgatgtcgaggcctaggctgtcgagggccgtcattgtcgacagcaggatgcctggcctacgcgcacagaacatgtggatattgactgcatgcccttccctcatcctgacttcgactgtggcttgttgcccagtagggcttgggaatgagcccgggcaaagttcttccttgaccaggaa

SEQ ID NO: 270234 - DNA, 1317 bp, Zea mays
gactccaaacaagtcatacacgaggattttgatcagtgaaaacttgggtcagaagagtgaaccaagataatgatagcaaccggcagccggcaggtatcaagagaacaatatagtagaaaggtgtaactaagcttcatcagaatgagaacatatggtggatgtcaacaacaacaacaacaacaaaaagatccaagtacacttcagatctgcctcatttctatgtagctacaagtcaaaatggtcgacacagacatatgcaaagcctcttttcatttacccctgctactatctaaagtcgatatagggtacattcatgctagcgtactgtatttaatacacacacacacaaaaaatatgaaacagtgagcaagataaattaaacatcattcttgggatacatgaaccaaaagagtcgagcttacagcagcaaaaaggaaaccaaggttacttacttgctcattctccccgaactgtgattacatccatcttgcggattgcatccatatcgacattttgtgcattgcatcatgcatatcatgttgtgggagcgcagttgctacggcccttgccatgacatgttccaactctgctcaagctccacatttggtaccaagttttgccacccccctaacatctccggctgctcacctattaacacttctatttcacaggaagtaaaggaattgtccagcaaaaatattacattattccactcagccatacggatgggcgagtttcgaggaagcatgaaacaatctccatacccttcaaggctccaaaatagctccataacaactgcttgttaacttaataataccacaaggctcaggtgtgtccccacaattatattgtaccgtaatccagcctctcccacttgaaggattttccagaattgatccgcagcaaagctcgcatgaatacacagacgcatacgcagactgctgctatagcaagcattgaatgaatataaggccgagcaagcagtccccttgaccgcataggctgccttaacacaccagactccaaaatggcacactgggagcaagatcttatttgcaatgcctgaaccccagattttttacggtcatcaacattccctaactgatccatatgaatttcatcgccattgaccgttatagtaacctggctgttcttcatgtccaccagcttttgtgctacaagctcattatatgaattatgattcctcaacttggcatatgtttcaggagattggccatcttcgtctaaagctgactgccaacaggtcaaaccaacctgttgaggatcgtctgtcaaggcgtcaaaaggacgcgtggg

SEQ ID NO: 270235 - DNA, 2008 bp, Zea mays
cccctctcttatttttttttttttttttttttgatccaggtacacttcagatccgcttcatttctttgtagctacaagtcaaaatggtcgatacagacccatacgcaagcctccttttcatttaccccattctactactatatatatatctaaagtagatacaagatacggtcatgctagagcactgtatttaattcacaaaaaataaaagaaatacggaatagtgagcaaggtaaattaaaagactcgacgagcttgcaccagcgaaaaaaaaaaggaaatcaaggtttacttactcctcttatccccccgggctgtgattacgtctaaaacatctccatcagatgtgccgactctgctcaagctcatccaccttcagtaccaggattggccatttttctgacatctccggctcctcacatgttaacacttccatttcacatgaggtaaaaggaactgtccaacgacgatactaccttatgccaccgaaccctgcatagaacaatctccataccgtccaaggccaccaactgcttgctaactcaataattaccacgaggctcaggtcttcccccgcgggcgggcggtttatatcgtaccataatccagcctctcccacttgaaggatttaccagaattgatccgcagcaacgctcgcatgaatacacagacgcagacgcatactgccgctatagcaagcatcgaatggatatagggccgagcaaggaacccccttgaccgcacgggctgcattagcacaccagactccagaatggcacactgggagcaggatcttatttgcagcgcctgtaccccagatcttttgcggtcaccaacatcatcatttcctaaccgatccgcacgaatcccatcgccgttaacccttactgtgacctggttgttcttcatgtccaccagcttttgcgctacaagctcattataggaattatggttcctcaacttggcatatgtttcgggagattggccgtcgtcgtctagaactgtctgccaacaggttacaccagtctgttgaggatcgtctgtcaaggcgtcaactatatcctctgcattctcgatggacgcagcaagatgcagcggagttaaaccaccagggccaggcaagttcggaaggaaggggtaaaccttggaattgtcggggcatagtacaacgaactgcacaagcaggtgcaccatgctcctactctttctttttactgctctgttcaggaggtgaatctcagccagcatctccatagtctcctttgatagttcctcgctggccaggcttctcttggcaagaatgtccagaagtgttttagtaagagagcaccagtcacgctcgctagagaacagtaaaagatatttgaaccgtgtgattgaaaactgagtcaaatccaaatcagacacatcaggtctggtggacaatgtacaggcagaagccctctgaaagagccagccgagttcattaaggaagtgcagaacttgaaccctcgtttttgactgcctacagtcatgaatctgaccatccgaagaaacatcaagaacctgtgaatcctcaagctccacttctagacttctcaactcctggcaaacacttgaacttgcaacaataacagggaagctgttacccctgaacctgttttccacctcaataaagcagcgcccaagaataaaatctggttgtcctggcaagtcaaaagtctccacacctgaatcatcatatatggtacctggatatgctgagcacagaacttctttggatatgtactttcctgtacttgtacaatggatctgtgtgccaggaatagatagattgcggcctttaagaatgagggagatcttctgtccaccaacaacagcaattggtgacacaaaggtcaattcaggggtattccatgttctccacgatttcgataaacgggtcattcccgctttataagataccaacttggagccggttcgaactaaaaaccttccttttctccagaaatccaaacccacgcgtccg

SEQ ID NO: 270236 - DNA, 531 bp, Zea mays
accggcccaaccccgtctcggattgcacggcaccggtacccctcgcctaggtttaggctcccgaccgccgcagcgtccccgccacgaccacgagcgaaaggaggtcgccggaagagggggcgcggagatgagcgggagcgcgttcaacgcgttcaagtcgcgggtgccggtggcgtggagtccccggctgtacatcacgctggtgcggggcctccccgggacgcggcgcctccaccgccgcacgctcgaggccatgcgcctccgccgctgccaccgcaccgtcgagcaccgcaccacgccgtcgctcctcgggatgctcacccaggtgaagcgcctcgtcgccgtcgagaccgaggagatgtacaacgcgcgcaagcaggccgaggcggagaggcgcgcgcccagacccccgctcgtcgtctcccaccaccagccaccgccgccggctctgaagccggcagcccccgccgcggagggtgctgctgccactgcgccatagcctctgggcatcagaagactttcattacagtt

SEQ ID NO: 270237 - DNA, 1116 bp, Zea mays
tgcggcgcctattggtctttctagtgcatacacaagtttaagtgaagaagaggctgcagcgagagactccaagaggccacagatgcgaaagtggtacttcccacacctaaagcttgacaaactcatatgtacctatccttggaacaattccgaactgacagagacagaaaaaatggatcgtttgggattagttgatttcttgaagggactccttgaatttgatccaaataagcgatggtcaccattgcaggctctacaccatccattcataacaggagaatcgtttactggtccatatgagccaatacccgagactgcaagaattcctgttgctcgtgcagcagcaattgatcacaatcctggaggggggcactggctacattcaggtctttccccgcaggttggaagtgtaaacagatacctacctttgaataatgtctaccctccaaaggttcctttttcttatgggagtagttatggaagctttggagccatggtagctataccgccaatgctggttttggtaacagctacggaagcattggtgatgttaatgctatcaatatgtattattcacccttaagttcttctggattaacgcaaattggctctagtccagatgttagactaaggatgcttctcccacatgatagaggaattcgattgagccctggtagtcttgggcctatgtctcttggagccagtccatcacagtttaccccaccaaactaccagatgcaaatcccagctaattcggttgggaagcatggttctggttctcctgcaagtggaggcattcatggttctccgttaggaaaatctgcaggagtgggcccatacaacatgaggaggaacttgccaatgccgccacatgattatgtatctcagcatggacacgggcgttgtggagatggtgtcagtttcagtcattttgatgcctgtgctcgaggacatacaggtcactctcatagtgcagcgggacctagttcttatcattctggttggagaccacaaataggttcaaggagtggtatttccttggaggcctcgtctagtcatgtgctttcacaggctccatcacaatcgtttgacttttcaccttcatcagcacttgat

SEQ ID NO: 270238 - DNA, 769 bp, Zea mays
  unsure (1)..(769): unsure at all n locations
agcagacgcgtgggctcggaatcagactgacaataccgtcctcaggacaaggcacctcagaagcccttctcgtccgcgccgcctccttgaccccgctggccggcgagctgctcagcgcggcttttttttgcatccacaatgccgcagcttggcacatgttcattgcctggagctgcaatctatggcacttcaactaggagatttggaggtttggagtttcagcaacataaagttaatcacatctcatttggtcggaaagcgtctgttaaagcaacattgaaaactgtgagatgcaatgccactcaaacacaaagcgtccaaaagaaatcttcaagtgcaactattcagcgtgataagaaaggaaatgtacaagggccaaaactggatgacggaagcggtgggttccctccattccgctttggcaaaggtgggggtggtggtggaagccggggaggtggcagcaactactttggcggattccttctcttctcatgtgtgttgctcttggactacctgaaggaattcgagaagtacctgcttgctcagaggcaccgagctggagatgatggcggcaacgggctgttgcaggcatgattgctttccgctggtctcactggcactagcagctactagtttctgatctgaagtgcttccttttgaacataacatgtgtctctgggttaaaatccaactgcaattgattgttctgggaacccgctccgccaaaaaaatatgtaagggaaaaaaaaactaaannnnnaaagggcaa

SEQ ID NO: 270239 - DNA, 1519 bp, Zea mays
cttgccagctgacgccaccaatcaacgcttccctttatggccggagcaatagttggcagactcggccgccatcccacctccttgctcctcctaacactgccccgtcacgccgccgcacaccaccggctgcactctccttcctcctcccaagttgcaagagccggattgccaggtcagtattcaaaaatgggtgatccaagtgagaggaatggacacggcgctcttacccgggtgctattctgtggtccatattggcctgcttctactaactacaccagggagtatttgcaggactatccattcattcaggttgatgaagtaggtcttgagcaggtacctgatgttattcacagctatcatatatgtgtagtaaaaaataagcgtatagattcagatattattgccaaggcaactcagatgaagattataatgcagtatggtgttgggttagaaggtgttgatgtaaatgctgctacagaacacaaaatcaaagttgcacgaatacctggaagtacgacaggaaatgctgtctcttgcgcagaaatggcaatctatcttactctaggcattctgcgtaagcaaaaggagatggatactgctgtgaaccggaaagaccttggtgttccagttggagatacattatttggcaaaacaatccttatccttggatttggggccattggcatcgaggttgccaagaggctaagaccctttggggtaaaaattcttgctaccaaaagaaattggtcatcggacacattgccatcttatgttgatgagctagttgacaagaaaggtgggccggaagatatgtatgagtttgctggtgaagctaacattgttatagcatgcatgaccttaaccagcgagacaattggaattgtggatcataagtttgtttcatcaatgaaaaaggggtcatatctggtcaacattgctcggggacgcctgctggactacaaggctgtgtttgatcacctggaatcgggccatctagctggtctggggattgatgttgcttggatggagccatttgatcctgaggaccctgttctgaaattcccaaacgtcattctaacgccccatgtggccggcgtcaccgagtattcctacagaactatggcaaagtctgttggtgacaccgcccttcagcttcatttaggcgaggcgttcacggaggtagagttcgtcaactaaaaaaccgtccaggcggcagccgtagacgcatgccattcgtcggctatcggaaccgctgatgcgatcatttgtagagaataatggatccgcgacttgtaagaataaacatgtagccagatgtttgatggtgatctccatgagaaccctgccactggctgccttagctggtagtggtagcaagtcattttctcaaacattgccttctctttcgccttctctttctctgtatcactgttgtcgtcatgatcacaactttctttgtgtaacacctaaattatagtaaataatggtgttggagtatttggtgtttgggaccaacaat

SEQ ID NO: 270240 - DNA, 540 bp, Zea mays
cgcttccctttatggccggagcagtagttggcagactcggccgccatcccacctccttgctcctcctaacactgccccgtcacgccgccgcacaccaccggctgcactctccttcctcctcccaaggtcagtattcaaaaatgggtgatccaagtgagaggaatggacacggcgctcttacccgggtgctattctgtggtccatattggcctgcttctactaactacaccagggagtatttgcagggctatccattcattcaggttgatgaagtaggtcttgagcaggtacctgatgttattcacagctatcatatatgtgtagtaaaaaataagcgtatagattcagatattattgccaaggcaactcagatgaagattataatgcagcatggtgttggttagaaggtgtttgatgtaaatgctgctacagaacacaaaatcaaagttgcacgaatacctggaagtacgacaggaaatgctgtctcttgcgcagaaatggcaatctatcttactctaggcattctgcgtaagcaaaagg

SEQ ID NO: 270241 - DNA, 390 bp, Zea mays
tcgttctttcttagaccctggctcgtgccatccttttgccctgccgctgctgtcctgcacgggcgtcccctgatttacaaccctttggctgcagttgcaagagccggattgccaggtcagtattcaaaaatgggtgatccaagtgagaggaatggacacggcgctcttacccgggtgctattctgtggtccatattggcctgcttctacttacctacaccagggagtatttgcaggactatccattcattcagggtgatgaagtaggtctggagcaggtacctgatgttattcacagctatcatatatgtgtagtaaaaaataagcgtatagattcagatattattgccaaggcaactcagatgaagattataatgcagtatggtgttgg

SEQ ID NO: 270242 - DNA, 422 bp, Zea mays
tttctaaacatccacaaaaacaaaagaagggaaaaaccacaagctagccatggttagcagcaagattagtattgtcggagccatcacatctccaattgtggttgtggtggcactgacactattgatcacacttttggcatcgacagtagatgcacaaccatactcaacaatgccacctagcatgattggagatttattgccacggacgagagtacctccgtccgggcctagccatcctccacccatggcggcgatgccaccatcatggagaatgccagccgctggacctacgaagcctccttccatggcggcaatgtcacctgatgttgttggggatttgctaccacgaggaagagtaccaccctccgggcctagccatccaccacccttggtggcgatgtcacctgatgttgttggcgatt

SEQ ID NO: 270243 - DNA, 473 bp, Zea mays
cggggcgggcggcctttttttttttttttttttcaagggaaacaaaccatcttcattggtttaaacatagcctcgtcaataatgcaacatgcaaacagagcgtcggagaagactgagccccaacaaacacaacaagagtttacacctgttatctacagactttaatgcctagtttgagaacccattttacaagggatttccattttcctaagaaaaaatagtttatttttacttgagaaaataaaaatcactttggaaaatgaagttcccaaactagccctaacagggaaaaaaatcttctgcatgaccatgtacttccctgcaattgaaccatatcatttgaacaggcattacaacttccttgctcccagacaggcagtaaccgaccatcataaaaaaatacagcaacagaagatcaccattgttttgctatgcactgattcctcagcttccttctccctgatcgtcggccc

SEQ ID NO: 270244 - DNA, 434 bp, Zea mays
gcgggcgccctttttttttttttttttttttactcaaaaaagtataggcttcaagcacaattgttccaatattacaggagattgtggcagcattggaatgagcccatatttttttatacatgaaaagaactaggcacgctaagaaaacaaacccaagtttcctcaagacgctatctagtagttcctgtaactcatcgagtgtcctccctacagttattaacacctgaaagggaccctgagtctctcaccctaaactcccagaaacagttgtacagctaagcagagattatgacaggattaccgaggtcaccagccttgctacttcaaggagacgatccaggttatgctagtaaggtgttgaaggtacatgatgtgattgaaaatggatgcttccatagtaccttcgtagaccacagctgccccttagagaatct

SEQ ID NO: 270245 - DNA, 413 bp, Zea mays
  unsure (1)..(413): unsure at all n locations
gttattttgccatcagtgtaattttttaaancagggctaacactgcagcaaccaacaattataccaccccccgtcctttacacttgcatattatttcctccgactgaaaagaaagtaaaaagggcccggaagcaaatcaattcctcgccactgatattcaaaaaataaagatgaaaaagagacacttattattcccccccagatgatattaataccggcgtgatctacattaccacacaccacatggcaaacctacaggaggcataacagcagtcttgccaaggcccacagtcaagggtaatcatctctggctgggctcgacagtgcgcacgttagctcctgtcattccttcaagcctgtccttcattatatctacacagtgaccaaccattttatggaattgcttcaaaccc

SEQ ID NO: 270246 - DNA, 587 bp, Zea mays
cccacgcgttcgcccacgcgtccgtagatcgcgagcggccgccctatattcatactccacagttgcgcgactaggtctattaatgctttattaaaagtaataacagattagaaagtccttggagaaaggatgggtacagttacaacacgcgccatgatacgacgggaatttgcttcttagaaacagaaataaaaacatgatttcatctatcacagattttcaacggtcaacgcacaacagaaagggcgcaccacgcacgggcctgcactacaacattagaaacagaaacaaaaacatgatttcatctatcacagattttcaatctgcgtcctgcgctgcgctgcgctgcctgcatcagtgccaaaccaaaatgcatgctgttcctcgagactccaagtctgttccggttgtatggcgagccgcgcgccttcttttgctacgccacttggagctgtggggtggaaagcttgtccagttccacagggatgtcgaggccggactttgcaggcagtccaccatcgaggggatgtccttcatcaaagcttcctccaactccttcctcttatctttcttctgcctctttacca

SEQ ID NO: 270247 - DNA, 766 bp, Zea mays
gcgggcgcgccttttttttttttttttggctttaaactccattctctatgatatgtccatttaacaagagaggaaaaaaaatatctatgtacaactcccacattgacattggtgccaggaaggtaatgagaaaaggagggaaaatttctgggcagccacaacacacggcactggcaggggatatagcaaaatctgcacatgtctacccgaatcattacttcttcgcaaagaaaaagaaaacgctacttcctctttttgctggggcgaccaccgaaaattttcatgcgggactcagacctgcttagtctcagccttgctatgacttgcggccaccaccacactgctgctactgatgccagttcctttctccgtcgtcgctcgggctttctcctttgccttgaagtcctctagggtctggaactcctccctcagaagcctctccagctctggaagtttatctacaggaccgctatctggatttcggtaatggtgaaatgcccagtatttttcgagtccataaagatcaccattacggtagaattcgaaagtaagcttctcgaaatcttcatatacattgggttggaattttttctccaaaccataactataaaatctgaatagacactcgagaccatatctgtagctcgctgcagcatcctccagtgcgagtttcttaaaatccttgtatatatcttcattaaaattatctccagccgcaaaggtacaataagttcaaacatcactgccttatggagcgtaagaaatt

SEQ ID NO: 270248 - DNA, 1322 bp, Zea mays
tttcgagtccataaagatcaccattacggtagaattcgaagttaagtttctcgaaatcttcatatacattgggttggaattttttctccaaacccataactataaaatctgaatagacactcgagaccatatctgtagctcgctgcagcatcctccagtgcgagtttcttaaaatccttgtatatatcttcattaaaattatctctcagatagtatgaccagaagcgatacagtgagttcatttgctcactctggccagtgcctaatttcttacgctccataaggcagtgatgtttgaacttattgtacctttgcggctggagtttatttttttctaaaagatgaaaagtaagatgctgagattgtggagaagatttgggcacagacccaacaggcgagctcccagtaggaattccatgaggagatgaactcagctttgaacttttataactgtgattttctggagtagatccatagaaatatccaactgaattgcctggagggctttctgacacaccaccatactgatcaggattattcacaaaattaccagcaaagaatctctgtttacgtgagctgtgcgcttttctgttgcctttattttggcgcctacgtggaatgggctgtcctgcttcttcagtaactttagtcccagtgcgaatatggcttccctttgaaccactggttggtttagaatcagcatctgcaggatcagcctgggaacttctttgattatcagtgcatcgaccatgcagtttctcatagcagtataaggcatcacttattcttgaagcttcctcagttgaaaatgcctgtggtatacttgtgcgatttttgtcatccttttctaacctagtatcctgtgtaacaatcattagcctactaacgtcttgatcatcaacaaagaagtcctcatcttcatcatcaccccttttatgtgaatggaggtcatcacgtgaatggtcgacatgttccagttccaactcctcatcaagcaagaaagtgctctggtcaccaccaccaccaaagctagagaaggcacttgggaaaccaatagagaaacctctttcactctgagcattaggtactatcttcgaccttgttttctgaacttcaccaaatctaaaagaagatccatatttgcgtgaaggatgtgcagaaaggttcttagtcttttcatcaatactgatgacagaaaagtcgttattcaatgaacaaccatgtgaatcttgcacttgttcatcgataactttttcccccataccaatatctgtattacatctaatatctgtggattgacaatgcgtcttttgatcttcaga

SEQ ID NO: 270249 - DNA, 679 bp, Zea mays
  unsure (1)..(679): unsure at all n locations
cggaatnggggagcggtcgcccttggtttttttttttttttttttttttttttttttttttttttttttggactactggtctgaaacagcaggttgcaagtaccaactcccagtcaaccatgcaggatgagtacctgaagcacatggactgttcgactctgaccaactcggcacaaaaatcacgcctatctgctagtagtgtcaacaggccctgcacatttctgatgtacacaacctttcatgtaaaaaactcaggtctcatgagcctgcgtttcagcctcactaaaaaagaaggttaaatatttcgtttaaaagaaaaataactaaacctacaacaccacaagagtttccagacagacggtatgtacgctggtcagttgatgagccgtcgtcggtcattcgatcgcatccaaatggggacaagatcttatggcatggagcatggacacaacaatacaaagaatgggcacgggggcaacggaaggagccgctctttcgtcaaggtcgaaaactgcttggtcccgtcatgccatcaagagattacagagttgtatttacgcctgtcagcgccactgcttggcgatctcctcgtcgaggatttgggtagcctgccgcctggagaagtcgtccgggctgatgttgctcaccagtagactccgtagggctagcagctcattgc

SEQ ID NO: 270250 - DNA, 417 bp, Zea mays
cggggcgggccggccttttttttttttttttttttttaatcgggcgtaccagtgtgctattatattgctaaaacaaccacagcagcggcgaaacagttcctactacagatgagctcttatctgcatttgtgctgttacctccatacaacaacatgaactgaaattaactcccaacaaggagaaacgaagtaaaaaacgacaaataaagtcaaaagatctcaatctagctcagtaattttctctacttggattttcccaattgtgcgtccgtaactacggcagacactgaaggattaacacaagagcccaattattcataaattaacacaacagaaaaggaggggctgaataaagcaagggctcagaactacagcaggatctcactaggcaaagaaattctgcatgaatgggcttttc

SEQ ID NO: 270251 - DNA, 694 bp, Zea mays
ggaaacagccctgctaaaaataaaataaaggtacagctgaacaatcttaggtaaagaaactacaaactggaactggattcctgtaagtgggacactctgcttcagtacgtcttacaaagaattcatcgtccctattattttaaccaatagatagataagtaacgtaatcctagttatatataatggctacagcaggttccgatggttcgtactcagtccgtacgctctacacttcatgtgattgacctccattctattcatgggtgcacgaataaagaacttgaccaacgcttcaacaacagcgaaagaacaaaacttcgctagccatgtgttccacaagttgattggttagctgctaaggtgtcatttgtatccggttcccaaatggtggcattgctagtccagcaatgagaataacggaatccccttcgcattgaaactagaacatttcactactagttcctggccaacttcaaattcctttaggccatttgcgctcaaatttatgcattccacgcacaccatcactcaactcaagtactagtccataggctcgaatctggtagacctttgctgtaactacatcacccaacttcattgccccagattggaatttcgtgggactctgattctggtcagaagtgttgtcagcactctgttctggaacatcagaaccactggtttctagtccatt

SEQ ID NO: 270252 - DNA, 422 bp, Zea mays
cgggcggccgcccttttttttttttttttttttttttttgttcaatcatgattgttcaccagatactaagccttactacagagttagggctaaacgtgtgtccctcaagggacaccctactactgatgccatataaatcatggtgacaggcacaactcattttgattgccgaatgaagattaggctatccacgaacaaaacctaacagaaagcacgttcatctactagggtccccaggcacaggatggtacagatacccagcaccaaaagccaccattcatcattcctggtgagtccgtgccgaggtagccttaatcgctctcctctcccttcgctccctcatccttctcaggaaccacgtcagcgtcgtcgtcgtcctcctccgcggcagccttctccggagtgacgaggtacgccccggg

SEQ ID NO: 270253 - DNA, 339 bp, Zea mays
aaggtcaataggtgctggtagctgcaagtctggagccgcaaaggcgaaccgttaactgttcaatcatgatcgttcaccagatactaagccttactacaaagttagaactaaacgcgggtccctcaagtaacaccctactactgatgccatataaatcatggggaccggcacaactcataatgattgccgaatgaagattaggctatccacgaacaaaacctaacagaaagcacgttcatctactagggtccccaggcacaggatggtacagatacccagccccaaaagccaccattcatcattcctggtgagtccgtgccgaggtagccttaatcgctc

SEQ ID NO: 270254 - DNA, 1561 bp, Zea mays
gcggccgcccttttttttttttttttttttttttttttttttaattaaactacatactataattaacatatatataatatataggttcacgaggagatggggccaaactcggggctgcttcttacaaccatcagtcatcagcacaaccaagcagattactaacaccaaacgagacatataccacacatgcaatgatacggtgcatgtactagctagtacatccatacacacacatagcttaccaactactggttattacggaatatacaaaccatgcatgcatcatatttcacaaaatgcaatgcagatatagatattacatgcatatttaatttatgcgaattcatgtctttgccctccaccctccacgttttcagtacttccacacgccatccatctctatggtggtggtggtcgcaggccctgggccggccacggacatcatcgacgagatctcagcgccattagcctggtcgtccttctgcgacaccatcgaggacggcctactctccggcgcagaaacatcgaagccgccagcgcaagcagtccccgtgcccatctggtggtagaagctcatgggctggggcgcggccatcggattgccgaacagggcggcgccgttgaggtggagcccaccggcgccaccacctatacctgctgccataggaagcatcggcatccccgcgccagcgttggggtacgggtagtaggggggcaccgggtccaaggagaagtcgggcagcatggaaaattgcatcggcatggggaaggggatgttgttctgattctgatccatctcagcgccggccatggccacctggtacgccggtgcagcagtggtggtcttcttgatcccagtggtcttgtggaacacacgacataccacccactcatcctgcttataagcagaagctttcaaggccgccgcggcgttggcggcggctgagccggttgcggacgcgaggccggcggggagcctgccgctgccttcgagcctgtactcgtgcatgacccagtttgtcttgtcacccctgggagccctgcccctgtagaagacgagcgtcttcttcatgccgaccagtaccgccaccccttccgcggcgttgtagacctccttgtccttgcccgtcgccttccagtaaccggcctcggtggcccggttcgccctcagccccgtcgggtacttgcggtccttctggtagaagaagtaccactctttctcgcccatcttcgccttgctcgggaggtcccatggctcaatcttgtttaggtcggcctccgtgatggcggtgcaggtgaagcgcgtgttgagcaccttgttggtgaggtagaagctgacaatctcgaagtcgctcgggtggaagcggaaccctggaggcagcctgaggccgccgccggcagcgtcgttcatctcctcctgcagctgcggctgctggtccgccgccatggctctctctctctctctcttgcccccggcccccaaatgcacaaaactctcttcttgagctgcaggaccaagttgttcgatctctggtattacagtagtcagtcagtgagcgaa

SEQ ID NO: 270255 - DNA, 1073 bp, Zea mays
agctgctgcccccatgcccatctggtggtggtagaagttcatcggcaacggcgcgggcatcggattgccgaacagggcgccgttgatctggagcccgccggcgccgccaataccggccgccataggcggcatcatcccggcgccggcatttgggttggggtagtagggggccaccgggtccgtggcaaaatctggcaggatgggaaattgcatctgcatgggcacgggcagtggcagctgcagcggcatggggatggggatggccggaatgttgttctgattctgatccatctcagcaccggccatggccacctggtatgccggcgcagccgtcttcttgatcccggtggtcttgttgaacacacgacagaccacccactcatccttgcaagccgaagctgaagctttcatcatggccgcagcgatgttggtggctgagccggatgcggatgcaggactagcagggagcctaccgctgccttcgagcctgtactcgtgcatcacccagttggttttgtcacccctgggagccctgcctttgtagaacacgagcgtcttcttcatgccgtccagcagcagcccttccgctgcaagggggttgtagacctccttgtcccttgccggtcgccttccaataacccgcctcagtggcacggttcgccctcagccccgtagggtacttacggtccttctggtagaagaagtaccactccttctcgcccatctttgcaactttcgggaggtcccatggctcggtcttgtttaggtcggcgtccgcgatggcgatgcagctgtagtccctgtcgtgcaccttcttcgtgaggtagtcgttgacaatctcaaagtcgctcgggtggaagcggaaccctggaggcagttcgaggccaccggtacgatcaacgtccatctcctgcggctgctgctgtggctgctgctggtccgccatggctcatgcacaaacacgcgcttcgttctcggcctgccggcggccggtcagtctagctaggtctctcactcgctcgctcgctcaccagaacgacggatgatgcagagctagcgagcggacgcgtggg

SEQ ID NO: 270256 - DNA, 434 bp, Zea mays
agatctccctgtccttgcccgtcgccttccagtatccggactcggtggcccggttcgtcctcagccccgtcgggtacttgcggtccttgacgcagaagaagtaccactccttctcgcccatcgtcgcccgggatggcaggtcccatggctcgcacttgttgaggtcggcctcgccgacggcgcgcggggcgaagcgggcgtcggcggccttcctggcgaggtagtgcgtgatgagctcctcgtcggtggggtggaatcggaaccccggcggcagctccatggcctgctggtgctggtggtgcacgtcgtgctccatctcctgctgcctggctagagagccgaggatcgccgtcaggcctgcttttggccaccctgcttgcagctttttgggtttatgccggaaggatatgggttttttttccgcgggagtggag

SEQ ID NO: 270257 - DNA, 906 bp, Zea mays
ggcacaaactatatgctagtatatcaaaatacactacgcctttgtggcacaaatttaaacaaacaatgtcactccaactggggtgaattttactaagatacatctgaattgcatatatagttacctaaatcagctttcaggcagtccatcgcacacaccacgccttgtcaggaaataacagcaactaaacaagcaagatgcaccagaaatagacgacgcagacacgcagtacatactaacacagacacctggtgaagaaaagttcatctaggattgcatcgcgtcctctccatctgcttccccgggcacttcgttgaacatgtactggctctggtactccatcaggtactgcgtcgaccgcttcacgtccaggaacaactggtacacccggctaatgtcctccatgtcgaccaccttccccttgcgcctctggcaggctagcgcggcagatgtgataaggttgatggcataccgcagagaggtctccacaccgatcttggtgagcagaaccttggcgtccgcggacatctccacgtcttcctcgtcgcaccggatatccaggatcttccggatctcatcctccgtgtagggatgcgtcgtgataatcagtagccggtcaaggaagtctggcgggatcccatgcggcgagcggtagtttgtcccacggatagacgtgatccctcggtttgttgcgattactaagatcggcgccatgtcgttttccaatgcgcggttgaggaaggagaagcactcgatgtctagcatgtggacttcatcgatgaacagaacaccagggacaatatcagcttttccttcctctctccactctgcaacttttgtgtcaatctgctcccgaacctctgcacgaatttcacccgtgtcaccagtcatcaatgcaagagtccc

SEQ ID NO: 270258 - DNA, 433 bp, Zea mays
tttctttttttttttatattttttctcttttttcttttaaacaaaccacggtttccaaccggggtgaatttaataagatagattgagttgcatagtcacctacataaagctaacaaacagtccaccgcacacaccgtgccttgggtcagggtaacagcaacctgaacaagaaagacgcatcataaatatacgccacgcggtacatactataacccacacacaccatgtaaaggaaagttcatctacgattgcatggcgtcctctccatctgcttgccccggcacttcgttgaacatgtactggctctggtactccatcaggtactgcgtcgatcgcttcacgtccaggaacagctggtacacccggctaatgtcctccatctcgaccaccttccccttgcgcctctggcagctagcgcggcagatgtgataag

SEQ ID NO: 270259 - DNA, 342 bp, Zea mays
actagtctcagtttttttttttttttttttttttttttttttaaacgaatgagactgcatatcacactggcctgcctgccaacggaaatcccataccacaaagacggaccacagaatccataatcccctaacatataggcacatcgtgatagttgtagaattaggccattcactggcactaaatagttagtcaaaatgggacagcttattggtaccgttttagagcgctagcttactgatcaggaaagaacggaagagtgctttggagaatgaaaacaagcctaaaagtatcaagcccgcccaaatgcttaacaagggaggccccaactaccttgatgataa

SEQ ID NO: 270260 - DNA, 651 bp, Zea mays
gaggtttgggcgcttgtccacggccgccgccaacaacgagttcctgacctccgccgtctcttccccgctccctcgcgctcgcagtcgcagctccggccgccctattttgcggaattcggtagatttgtttccttcatgggtcgcaccatcaagaaggccaggaaagcgcaacccaagaagtccaagaagaaaactgaatcgtcctcgtcgtccaaccctgcgattgcctctggtccggctaaggtctggcaaccgggtgtagatacactggaagatggggaggagctgcagtttgatcctcaggcttacaattatctccgaggttttggcattggctggtcttgcttgagttttgatgttgtgcgtgatcaacttggactcgtccgttcagagttccctcatacattctatggtgttgctggaacgcaggctgagaaagcttcatggaactatattggcgttttcaagctttctaacataagtgggaaaaagcgggaacctataccagcttcagcagttgatggtgacactgatgtggatagtgacagcagcagtgatgaagaagatgaagaaattaacgaggatgcaaagcccattctatcatctaaaaaggtgtcttatgctgtgtgtgttaattgttttctcttattt

SEQ ID NO: 270261 - DNA, 1324 bp, Zea mays
attgaattatccagcaaaccttatgcaccttgttgtttatggaaaggagagcctttattacattcagggcttggttgagcgtatgtttagtgacataaaaaacactgatcagagatgcttcaaatgtccaagtcatcctctttcagaggaacatttgcagcttcttgtcaaagcactaccaatagaagaaggggactatctaagaattatatggccaattactcctagcatccagttttacaaagaagcgccttgccattatctgagtcacctcattggacatgaaggcgaggggtccatcttccatattataaaggaactaggatgggccatgaacttaatggctggagagtgcagtgacagtaatgagtattcctttttctcagtaagcatgaggctcactgatgctggccatgaacgcatggaggatattgttgggttgatcttcaaatatcttcatctattaaaagaagacggagtccatgagtggatatttaatgagcttgcggcgataaatgaaatggagttccattatcaagacaaagtccgcccaatcaactatgtgatgcgcactgtctcaactatgcggttgttcccaccagaagaatggttggttggagcagcattaccatcaaagtatgcatcacagagaataaatatgatactcaatcaactaatacctgaaacagtaagaatattctcggagtccaaaaaatttgaaggatctacgagttctgctgagccctggtataacacaccattttcagttgaaaatgtcactccttcagtgatacagcaatggattgaaaaggctcctactgaaaaactccatcttccagaacctaatattttcataccaaaggatttatctcttaaagaagtgcatgaaaaggttacttttccaacagtgttaaggaagagcccactttcacagttgtggtataagcctgatacgctcttctccacaccaaaggttcacattatcattgatttccactgtccattatccagccactcccctgaagcagttgttgctactgagctctttgttgatttgttagtagattatttgaatgcttatgcttatgatgctcaaattgctggtttattctattcaatatatgttacttcagctggattccaggtttctttaggtggttacaatgacaagatgagagttctcttaaatgccatactagtgcaaattgtgaaatttgaagttaagccaaacagattttctgcactgaaggaaacttctgtcaaggactaccagaatttcaatttccgacaaccttattctcaagcgtcatactatgtctctttg

SEQ ID NO: 270262 - DNA, 458 bp, Zea mays
gcggccgccctttttttttttttttttttttttttttttaataaatcaataaatctacaacattgtatcaatatgattgctgacattccacgttacgaactacatcaacatcacgttgtgtttgtaaggctaaaatgttaaaacaagagaactgcggctggcaaaccgtcaaggaatccaattgatataggtatcagtggtgaaactaacaccatatcagtccaactgacatataaaagtggagcttcagtttgatacgcagcaccgcaggaccagagctttgtataccgaattccaaaattatgtgtctgaccaatgctttctcatcatcagaaattcataaccgaacaaggtggcatcgtcagtgttgttattgcgcccatcgtttttcatcacattattacacttatgaaatattgggctgattgatcttacctgaaataatacattcccaaggt

SEQ ID NO: 270263 - DNA, 913 bp, Zea mays
gcggccgccctttttttttttttttttttttttttagaaaaggttcatttatgacaacgcttgttcatcatacaggtgcactgatacgttcaagccagagctaaatatcactggcaacagcatctagaaaacctaccatgtctcaggttctacaagaccaaaccactggtagcaaagtttaattctacacatcagatccaaccatccatccaccatctaacgagcaatgtacattagaacctgtttgacctgtggaagcagttcacagcggcccaaggaagtcaccagcgatcgtagcaaggagctggaattggcggtcagcctccatccagcggaaccctaggaccttgaagcgcacggcggtgtccttctccagcttcgagtggtcgttcatgaacatcgcattctccccacctatgtacttgtaattactcatcgacttctcagccaggaagatgctctccacgggtccggatttgaggaacacgccatgcttgaggatcctgtccacgtgcccaaccatgacctctcccttcataggcttctgtgtaatgcaagtaaatgaaactgggaacagaacatctccagttagctcacgcactttcccttcagatattgccttcagctgattaacagcaatgtagtagccatgctctttcgaagccctcctgtttgtgacatcctccagaagacgcacaatgatagccttgcggagcaggaggcccttgcggtccagctggctaggtgagatcaacacattccatgacatctctgcctcaagaaaaaccatggctgaatacctggtgagtgcttgccgacgaaaatgccgacgaaggcctcggcgcctggcgtagccgcgtagggcggcggcggcggcggtcaaaccagagatggagacgtgctgtaggttcgc

SEQ ID NO: 270264 - DNA, 1365 bp, Zea mays
tgcggccgcccttttttttttttttttttttttttttttttttttttttttttttttttttttttttttttttttggtggtttttttggaccaaaacgatatcattaattacccagttttagttgcacacactaacataacagctaaaacaagattaaggacacagactattgtttgacagcctgtgttgcgattggtgactagtcaacccaagcacgaaacagatcacgtaagacaccagagatgaatatgctatggagtagcagtgtgcatgtgataagtgcattagacaatattcaatactgtgaggaaaacggtctaacatgaggccgagtcattatgagcccatctatctcttcatgatatatcccagtagcattcccaggagagcaatggccaccacgaccacaaaggagaatccaccattctgcttgctggcttccctcctcgtaaggtccagttcctctcgaagcttattgttctgctgaatggcagagtttctctcttctgtcaactttgaaatcaaagcagatgtctcggaggtgtagtccttttgatctatcggagtttttacagccgagaacaacagtgactcatcagattccctcgttgtctgcatctcttgataattcaagttaattccatcggacaatgaaggtcggggtgatgagccttcttcagattcctcatgcactggggatggcggtttgggtggtgggatgtagacgaccttcagcttagcctcatccaccacattagctgattctttggtaaacatatcgccagtgatgtccttgactaaggtcccttccgccacaacgacactttgcacaagaaacttgtccttgcactgcatgtctggtggcgcctccttttgtgcttgcattgtcacaatgacatcgctggtggaccgaggtggcacgatgccgctgttgggccggacacagtacttcttcgggctcgtcgtcttaaccttaaagccgatgtagtcatctgttcggtttgtcaactgcatagagcacgagatctgcttctttgtctcgaatgggaatcggagctcgaggggctcgatctcgagcaagtccttggagtgagaccacatcccgccgccgctggagtccgggaggcggaggcacgctgtacggagttgatccgggggtggttgcctggcaggccacgcgggcgggagagcgaggagctagggtttgggaagcgaggctggtttgcgctcgccacagcccacaggagcagggaaaagagcctggagtggagtggagtggagcagcaggagggcagatgggaatttggaatcgccgtaggcaacaacgggagttggtaggaactaggaggagcggaggagggaat

SEQ ID NO: 270265 - DNA, 622 bp, Zea mays
  unsure (1)..(622): unsure at all n locations
ttttnttttttttttttttttttttttttttttttgggttttttttttttttttttggagtcaaagttctggtgaattccttaacgaatcagggagtacatcgcgagtaacagcatctattttttccccctcaattcccactctccagcccagggcaaataatccgcaaaatgaaacaaaaaataaaataaaacttgtatcatgctgaaccatttcttctaagttcttaagtaaggcgagcgaatccggtattagagggtcatcagacccgtttttttagctgccagacgacattacacgaaaactgtcttcctgtccttttacctccggaactaaatcctgctagtccacctttttgttgcctttggaactatcatcatcttgctcctcttctgtactgccttcctccgactcagtttttgactcgtcaaactccagtagctgtttcacttctccataccacagacagggaacagcgacaaaaccaatcacaccaggaacaaggtatagtagagcaggctgcgccgcttgaaaccagttcattacaacgatggtcaccgtcatacccacagcgtatcccaaaaatgcactgttgaagtaacgcttcttggtacctcttgag

SEQ ID NO: 270266 - DNA, 673 bp, Zea mays
ccaagtcaaaatctttcatattttcttttccaatccatgatgtataggaacatccgaacaaggacttacatggttcaagatattgttcagcagcacccataagaaaattcagtcacgaaactaatggaccgccaagcagcttcggaggtaaacatgaggccccaacataacctctcataaaacagtcagttttccctacagcaatttcacaccaacacctcttagagaatctatcacggccttgaccttgccatggtacttctggtctcttgacatggagacagatactgcagggatacccttgaacagcaagcgctctccaagcaacttcccaatctttgcagccgcagcaacatcccgtgtcgactccatgcttggcctcaggagtttctcctgagagcttgcagagcatgcgaccgtggctgtcggtgtgtggatgacctgagcgctcacgaaactgtttgtgaaatgcatcttcaaaatatacggcttgaggaacttggtgattgcaggagccctagctggtggagggataaccatattgcctaatcaagctgaccgggtcagtcggcagtcgccgtgtccgaggtgcttcacgagggcggtggctccccctcgcccgtcgtcgccacgggcactgggaggtgcgcggacgcgtgggcggacgcgtcgg

SEQ ID NO: 270267 - DNA, 593 bp, Zea mays
gaaagcttgcagagcatgcgaccgtggctgtcggtgtgtggatgacctgagcgctcacaaaactgtttgtgaaatgcatcttcaaaatatacggcttgaggaacttggtgattgcaggagccctagctggtggagggataaccatattgcctaatcacgctggcccggaactgtcgagtctctgggacgagttctatgtcgttgctgcaaacccgcggcggtccaccgggcgctggaggcggcagtctcgatgaaacaattaccgcgtaatctgcagtgcgctcaaccagatctggctttttggcagcgggaggagtggctggagaggtgggtgcatggggcttgggggcttgacggcgtagtattctgggcggatcggcgatgagcatccgcgccgccgtcttggatccctagaacgacttcttgtttccacgggagcggtgcttctttccacggggacaaacccacgacgggggcatcgggggaaatcgcctaccgctgcgttaaacccagcgcaggagagagagaaatggggagggagaaacagtgtaccgggtcagcgccagtcgccgtgtccgaggtctccgagggca

SEQ ID NO: 270268 - DNA, 447 bp, Zea mays
tgcgtccggccttttttttttttttttttttttttttttttttttggaactcaaaagaagacctgctaaaataatcagggggggttcagatattcattggccggctcattggcctgcgtaacaaaatcaaacacttctgacactgacccaacagtccaccaggaaatcaccaaactaatttaaaatgtgctagaacatagaggctcggtataccagctaagcagagcgacctataaccagatttaagaacccaaaaaaaaaaatctggacccaacttcccgatgctacttgctacctcattcacaagcttcttcccagtggtccacctctgcgtcaggctgcagcttggtcatcgatggcccagcattcccaacattttggtattgcgctgtatgcagtatccatgcgctgagcaggcttccgctcgtcgcctggaccaaatcttgc

SEQ ID NO: 270269 - DNA, 430 bp, Zea mays
agtcggggccgccctttttttttttttttttatacgaagagaagttgttatttccactcatctgatagacgaccgatacctatctacaagcacggagcgaaacttgaaaatcgtctatatagccgacaaattaaacactcgacaactggttacacttgcagacaaacaaccgagcaaaaaatcaaacaacaaaagtatgaagcatatcgggatgggatgggatgcgatgcgatgcaatgcaatgcaatgcaagggccccttgtgatttggatttggcgccccagatttactcccggatcacatgacgatctcgggcttgaggatgctggatttgatctccttgtgcgggagcacgacgccgccgttgctgtagatctcgtcgcagacgtggacgtcctcgccgaggatggtcatgttcttgactcgcgcc

SEQ ID NO: 270270 - DNA, 321 bp, Zea mays
tgcggccgcccttttttttttttttttttttttttttttttttttttttttttttttttttttttttttttctggaaaataggctgtatagccgacaaattaagacacgcgacaactggttacacttgcagacaaacaaccgggcaaaaaatcaaacaacaaatgtgtgaagcatatcgggatgggatgggatgcgatgcgatgcaatgcaatgcaatgcaagggccccttgggatttggatttggcgccccagatttactcccggatcacatgacgatctcgggcttgaggatgctggatttgatctccttgggcgggag

SEQ ID NO: 270271 - DNA, 524 bp, Zea mays
  unsure (1)..(524): unsure at all n locations
attcccggggcggccgccctttttttttttttttttttttttttttttttttttttttttttttttttttttttttgantcgggccggcaaattttagagaaaagagggccgatctccattcccctaagaggcaaaacccgctccatgctttccctgatctctacacatactagcagtatgcatacatgccatgaggtatctaggtgcagtttctaaggctaaacaaccatccctagcatacaagctactacagatgtttaatcctacacaacgactaatacttccatattccaagagacattacacgcagaagacgatggccaaaccaccggtctcaaaaaggttgaactctccagccagccttcgaagcttcttctttgttccggtggtcactgatcgatgggcgacgcaggtgacttcactgatcgatcagcgacgtaggtgactccactgctagctgctccgacacctctgcgagagaattgaggttgcacttgatcacggcctcgacgaagtagcatgt

SEQ ID NO: 270272 - DNA, 1134 bp, Zea mays
  unsure (1)..(1134): unsure at all n locations
cccacgcgtccgaaccagcccgacagccgccgccgtttctccatcttcctcgcagcgccggcactacatcttccgctcccaccccgactcgcgctcaacacgcaggcgacggcggcagcgctcccaggctcgggctctcagggacggcggggcagtcccagactcggcgtcgtcgtcagcggctacccttcccgcctctcgccaatcgcctcgcgccctcgactccggtcctccgcacaccggcctgcgaccctgccaatagtgtataacttggagatatggatttgcaagagaagacgaccccaactcataaaggaaaaggaatgaaaaaagaaagcgcaaagaaaaaagaaagagcaaggaagagaacgtcatctgttttggattccactaatgacacagtcatcagcgaggaaatgccagagtataatcttgatgaacctactatggaggaaaaactggcaaccctgaatttaatcaatagagagaatgaaatacatggtagtgagaagcaatcgctctctgtggcaccaccaagtgcagattcagtccatatcttgctgaagcaagctcttcgtgctgatgatagtgtagcactgttaacttgcttgtataatagagatgagaaggttattacgaagtctatatcactcctaacaccagcagatgttgtgaagcttctcaagttctttgtcttgcaaatacaatctaggggtgcagtgttggtttgtttactcccgtggctgcaaactttattgaatcgacacatgagcagcatagtgtctcaggagtcttctctgtcattgctcaactcgctctaccagcttattgatgcaagaacgtcaacatttaagtcagcattgcaactctctaccactctagattaccttttcagcgagattgctgatgatgaagctgatgaggaggtaccacgcaccgataatctatgaagataaggacactgatgatgacgagtccgaagttgatgctatggaaaccgacagagaagaggctgaagagctaggtgctgttactgatgcctctgaaaattcagatggaagtgagatcatgagcgactgattgccttttactctcccaactgctgaagtccanatatcaacatcaattattcac

SEQ ID NO: 270273 - DNA, 377 bp, Zea mays
agaagagaactagtctcgagttttttttttttttttttttttttttttttttaagctgaccagaaattaagattgtggaatcatcgacatacaatttctgtgcttgaaacaatactcactatgcttgtacactgtacatgacatgacttacaaagaagcctacaaaaaggacaaaaaacatatcgcatgaggggcagggcgccagggatcactcttggacaagattttccacacctacaattgtcgcagtaaaatgaggcctctagactaggagtaactcacaagaactgcctatgctgtaccgactacccggatatggaatggggatccgcgacacagtataggttcatctggtgactccgcctttgcacgagcac

SEQ ID NO: 270274 - DNA, 1047 bp, Zea mays
  unsure (1)..(1047): unsure at all n locations
cggccgccctttttttttttttttttttttttttggaccgngaatggttcggcaattggacaaatgacgtcataaacgtgaacatgttccttccggtggtccgggtttgcagtttgcattgtcactgacggctcgatgcgacacaggaacatcattaggggaagcatgccgcgttcacttctatacagaggacatccacatacacacacataacccaaaaagggcgcctaacacagtaacgcaagtgggtgcagaattcaatggaatgaatggaatacatagctatttctctgaaatcatacatggtgctgtgtacttgtatctaaaaaccagcaaggacgtctttcatttcgttgactgacatgatcggctcattcccatatatccgtgttaccatctgaacaaagctctcgtatttgtccaaaaactccttcttgcacttgtcccacagcgaaggaaacaactcatcggaggtcagtgtcttctgcaacctcctgtacatggcgctaatcgacttatcaatcccagataagctggatttcagtaccctccttaggtcagtttttgataatcccagctgaaacggtatctcctcagcagcaatagtgtaagtcaattcgtcaactttccggttgaattgaaataacctctcaaattgcagataaatgagtgagctgatatggcgagtgcaagctagttcatatgattcactggcttgatggtagaactttgcaagcgttggcacaacattagccaagtcataaagactgttctggaaagcagcataattctcaatcaacacaatatcagcagttttaggatcactctgtgcaattttctccaaagttgcgaacattgtgctaactagctttgtgtatgctttatcaattaaatccctggattgtccttgcatatattgttccatacgtgatgcaacgacagcaaatcttggaatgtaggctagaattccagtttgccgcacatttctttcgttacgctcaatttgatggcatgcttcatcaataaaccggctgaactgtactgata

SEQ ID NO: 270275 - DNA, 736 bp, Zea mays
cccacgcgtccgcccggccatctcaccgaggacaacggtttcgatgttttcgtcaatggacgacgtggcggcggcggcggcgtcggcatgaggagggccaacatcgcggactacttcgttggccctggactggatgatcttatcgagcagttgacccagaatgatcgccgaggaccaccacctgctgcacagtcctcgatcgacgctatgcccacagtgaagatcacccagaggcatctcagtggggactcgcactgccctatctgcaaggagaagttcgagatgggatccgaagaagcaagagagatgccatgcaagcacctgtaccactccgactgcatagttccttggttagagcagcacaattcctgccccgtttgccgttacgagctcccgccacagggctctgccacgggtgctagctgctcgcgcgcgagatcaaccgaccagagccagagctcaagtagttcaagcagcagcgggagaaccagtgggcgtcaaaggagaaggaacccgttctcgttcctgtggcctttccgctcatcaagtagttctcgctagattagcctctggtaatctttgctcaggttcgaaatactgtttgtttttttgggtcaaatacgctggtctaatgggctttaatgtggtgggatctcaatctgtactgtatggtttgttaatgatcgccacacgatgtatctccttgcaagtatattattattcccccggtttcatc

SEQ ID NO: 270276 - DNA, 699 bp, Zea mays
accacgcgtccacccacgcgtccgcggaccgtggcgaatcagaaaattccccaccaaaatctcctccccctgaagtcccgaagctcgcggaagcgccgagatgtaccatcccacgagaggcggcgtccgcggcggcagagatcaattcaaatgggacgatgtgaaggttgacaagcatcgggagaattaccttggtcatagtgttaaggctccggttggtagatggcagaaaggaaaggatctttactggtatactcgggataagaaatccgacacggaagatgctcttaaggaagaaatcaggagagtgaaggaagaggaggaacaggctatgcgcgaggctcttggcttagctcctaagcgcagcaatcgaactcagggtaatcgcttggataagcatgaatatgctgagctgattaagagaggatcaactgcggaggacttgggagcagggcacgctgaagcagcacaagtgcagggtctaggattgtacaaggcccctcgcgatgagggtgggtcaagttctttgagccttgaccctcctcaaatggagcctgagcaggctgaacccctaccagcacccaaggggaaaaggccacgtgaacgtgacgagaggggaggggagaaggaacggaaacgggacaggcatggtgatggaaaggagaggaggcgggacaagcacgagaggaggcacgactt

SEQ ID NO: 270277 - DNA, 757 bp, Zea mays
tgcggaccggccggattccggtcgcccaccgtcgctttgcgtccgcccgccctctgcccgctactggcgtcgatactgtaggtgagctcccctccaatcaccgcctccgctgttacgagtcctgtaaccctagattgcagcgcccccaggtcctctcgccctcggaagaatcggggaaaaccacgaatggagggtgccgtgacggagaatgcagcggtgcctgtgcgaacggcggcccctgaagccgctgttcactcggatcagcatgtggagagtggtgcgatggtggaggactctgcggcgtccacggtggctccagagtcaacttctgacgcagatcaggctatcgaggacgcagccccggaggacggggtggacgaggatacagtgacaaatgttgatgtcagtcctgaggacatgagaagcatcattgaagctatagcctgacaccggaaagttctggcatgactggaggttcctcaagagtgtactgtctattcaattgaagcaggtcttggatgaatattttgaggttgaaatggtgagccaaaatgatgggcaactgaggtctttctcagagctatttagtcggctaaatggtgcccttgaaaggtttgaagagggtcctccattcacactgcaaaggctttgtgagattttgttggattcaaaaggaacatatactaaattaccaaagctttacattggccctggagatgaaacttctagttacatttactataactaagttcacttg

SEQ ID NO: 270278 - DNA, 688 bp, Zea mays
gtaggccaacaaagcaaattgattgtacttgctcaagtgcttccttggattcatctacaaagactaaggaagtaaatgatgcagaaccaagatgttctaaatctgtaaaaacttttgagcatgtcatggccaagaaaagaaaacgacctattctatcatatgatgaagatgccaaggccatgcagatggaagtgaggatgcgcaggagacacagggaaagtggtgtgatgaagctgcgaagatccacagaaaattctgatgaagcgatgtgtccaggaaattcaaataatcaacttaccaatgatcatacgaaggcaaggtagcagagaagggccaacaaagacaataaaacaccaccagtgaacgctagtgttccatgcacacagattgatgctgcacgattagcatcagatcagcaaagctttatttgcacgcgacccattgatagaccttactggactggaatcatgaagattggccaggaatatatttcattggttgcacacctgtcaaatcaagcatgcaagaaggtgcaggaattatcgatgtcattaccaccactaatgaaagtaacaaagcattcaaagttgaaagcctggccagggaggtgctcagcatcggaacctactgctgaatgcgctggcttgtatttcttctcagataatatgagggaactggatcaacttgt

SEQ ID NO: 270279 - DNA, 719 bp, Zea mays
ttaaatcaccaagtacgctgatggtgatagcttgaaaatgtctcatgataattttactcagcagagccactcaaatgagacagcttgcctagcaaacgctcaggatcattcaacagatactgttgttgtagacggtcggtttacaagggcatgggtggatactgatacaatctgcattgatggtgtcaaggatcctctagccattgagaggtggcaggcacaggcgatggaggctgataaagaattctgcagtcggatacgcatacctgatgaagatgattcaagtagtcagaagcacacatgccgtagttctgcttcacagggtgccgatagcaaacctgcatctgagcggcaatcaagaggtgtggagcatataaaacagggtctcgtgaactttatagcctcgctgctgatgccattatatagaggaaaaaagatcgaccgagaggggtacaaaacaatcatgcgcaaatctgttaacaagatcattgatacatgctcagaaggagagaaatcaatgactactcttgagtttcttgatgataaaaggaaaattaagattgaatcctttgtgggcaaaatggttgacaagcatttgcatgttgttagcaagtcggccaaaccttaagattcatatgtgtagtgaggtgttctctgcaaagggatctactctcttttaaaacacctatgaatcagtgattgttgatccaagtgaacta

SEQ ID NO: 270280 - DNA, 1432 bp, Zea mays
caagtacctaacacacccgagcatatcacagtgacagacacgatggtgagcgccagaattgttgtcctcctcgccaccctcctatgcgctgccgccgcagtcgcgtcgtcctgggaggacgacaaccaccaccaccacgggggccacaagtccgggcaatgcgtgcggcggtgcgaggaccggccctggcaccagcgcccccggtgcctggagcagtgcagggaggaggagcgggagaagcggcaagagcggagcaggcacgaggccgacgaccgcagcggcgagggctcgtcggaggatgagcgagagcaggagaaggagaaacagaaggaccggcggccgtacgtgttcgaccggcgcacttttcgtcgcgtggtccggagcgagcaggggtccctgagggtgctccggcccttcgacgaggtgtccaggctcctccgcggcatccgggactaccgcgtggcggtcctggaggcgaacccgcgctcgttcgtggtgcccagccacaccgacgcgcactgcatctgctacgtggcggaaggcgagggagtggtgacgacgatcgagaacggcgagaggcggtcatacaccatcaagcaaggccacgtcttcgtggcgccggccggggcggtcacctacctggccaacaccgacggccggaagaaactggtcatcgccaagatcctccataccatctccgtgcctggcgagttccagttcttcttcggccccggcgggaggaacccggaatcgttcctgtcgagcttcagcaagagcatccagagagctgcatacaagacctcgagcgaccgtctggagaggctgttcgggaggcatgggcaggacaaggggatcatcgtgcgcgccacggaggagcagacccgcgagctgcggcgccacgcctcggagggcggccacggcccgcactggcccctgccgccgttcggcgagtcgcgcggcccctacagcctcctggaccagcggcccagcatcgccaaccagcacgggcagctctacgaggccgacgcgcgcagcttccacgacctcgccgagcacgacgtcagcgtctccttcgccaacatcaccgcggggtccatgagcgcgccattgttcaacacccgttcgttcaagatcgcctacgtgccgaacggcaagggctacgccgagatcgtgtgcccgcaccgccagtcgcagggcggcgagagcgagcgcgagcgcgacaagggcaggtggagcgatgtagaacatgtagaatcggctgtcgagcactatatggcctcgctgctgatcgcacatctatcgagcgcggctgatcgaccgcacggcgtacgtggcgatcatgcgcaaatctgttgacaagatcattgatacatgctcagaatgagagatatcaatgactactcttgagtttcttggtgataaaaggaaaatt

SEQ ID NO: 270281 - DNA, 308 bp, Zea mays
agccgccgcagtcgcgtcgtcctgggaggacgacaaccaccaccaccacgggggccacaagtccgggcaatgcgtgcggcggtgcgaggaccggccctggcaccagcgcccccggtgcctggagcagtgcagggaggaggagcgggagaagcggcaagagcggagcaggcacgaggccgacgaccgcagcggcgagggctcgtcggaggatgagcgagagcaggagaaggagaaacagaaggaccggcggccgtacgtgttcgaccggcccttcgacgaggcatccgggactaccgcgtggcggtcct

SEQ ID NO: 270282 - DNA, 669 bp, Zea mays
ggaaaacccggggcggccgcccttttttttttttttttaaccatgtttgcaaaattttcattcttcttctgatgtataaaatccaagtgggcagcctcccataactaccaaaccatgtaagttgcattttgtagctcaacagcagacaatctagataagaactcaccaatccaatactaatgagaaatcagagtggaagacttgttaagcctacaaagtagaccgcatgtcttaaaaatactccatatcctagctgacggaccaacaagttacaagcaagtctgcttaacataaaagagaagttacaaatcactacacacagttctcggatcctatccatgatgtgctctttctctgttaaattggacctcaacatgtaacggtgtgcctccaaaacagcaaagttataatggcacagatctaattaaccctttgaaatgccactatgagcatctgcatcacatgacatcagcactatttgtagggcagctgttttgattttctcaatcctcccaaaaataaaatggcacaccgtgcaagatccaccttcctgctacctccagtctgattaacattgctgacctcgacgacaacaagagcttgagttccagctgcagtgcctgctactatcctgtctggctaaatcatattcaagcacggacgcgtggg

SEQ ID NO: 270283 - DNA, 511 bp, Zea mays
gcggccgccaccagacactagcatagttctagtaaaaacacagcctaacacaacaacggaggcataaggaacaaaacagaaagaaagaaaaacgactgaagaacacgtcgacacgtatgtccggaactaccaaaagaatccctaggatctctactaccactagtacagagcaccaaaccacatggcacatggcagccaccaccaccactagcacggggaaggacaagagggtcagttgaataacagtaaaccccgtgctgctactacgctgacgacggctgatcgatcaaaacccagcgcaggcgcgcacgcacgcacgccagacagcgggatccactgcgcgtgtcgtgcccgcccccctccctcccacttacacctcctagcggaggagaggtgcggcggcggcggcgaggccgaggccgagggcggccaccacgtgcagcctggagacgcgccgcgccgcagcgtcgatgtagtcagtgctgcctgctcctgacgggccgtaggcgcc

SEQ ID NO: 270284 - DNA, 1103 bp, Zea mays
gcggccgcccttttttttttttttttttttttttttttttttttttttttttttttttttaaacgaacaaagccttactgatagattttaattggggaaaaaaaatagagaagtcagttcgcctccacgtgaacatctcggtcttttcaatgatccaaagctgaacgctcatagagtacacaacaacgtttacagctttacatgttctctctctctaaaacaagtactgcatgatgttgaactgacgacgcgcctcacagccatgactatgcgttgaaaaattcacatctttgttgccagctatccaggttctcaatagactttttcttcttatccgaggaaatcaacatgtcatcatttcttagccttcctacctctcttcgcaggttgggttttcctcgtgccctttttagggccctttcctgcaaccttcgccttcttcggtgccttccccgttgttttctctgctttccttttggtctttgccttaggttgaccttcatcttcgttattattcagatcgttttgattagcctgtggttcatagagtttgtcaccctcctcatctgaatcaaatgtgaatccatcaagggtaccttccaccatagtctctgcttcaaataaattggattgtggttccagttgaatgaagtcattcattatagcctctatctttgcttctgattgtcccacactcacaacacaaaatgtcctggatggaactatagttgttttgtatattgttcctttcaggtccaacaacaaatcctgttttgcagtaggaccatttgaaactactatcctcccaaccgcaccaatatctccacttaaatctatcgagtcaccatcacattcaatcaatgcctttgaacgttgaactttatctggaaatattaatggtaacctctgggagacagagttccctgtgagtttatcttgcacatcatcctcagcatctccattccctgcttggtctgcaccagtttttgttccagcatcctttgtttttttagtcttagtttgctgagcattctttctcttgccactcctaagtgagccctcttcatcggacgcgtggccgaacgcgtggacggacgcgtggg

SEQ ID NO: 270285 - DNA, 867 bp, Zea mays
gtttcctctgctttccttttggtctttgccttaggttgaccttcatcttcgttattattcagatcgttttgattagcctgtggttcatagagtttgtcaccctcctcttctgaatcaaatgtgaatccatcaagggtacctaaacgaatgatagatctttaatattagagcagaaaaattgtagcacaggctattatcatataaataatggaaccacatcttcatgaagcctggttacttcctcatagtgcaagaatgaagctacagccacaaatgtcgatgcacaaagaaatagctcgataaaaaaacgatacgaccatgctactatttacaaatttgctttatgcatgccaattttatacattagagacactctggagaaaaacgaagtcatattagccggcaccctgcagtaactgtcggaagtgggtaccttccaccatagtctctgcttcaaataaattggattgtggccccagttgaatgaagtcattcattatagcctctatctttgcttctgattgtcccacactcacaacacaaaatgtcctggatggaactatagttgttttgtatattgttcctttcaggtccaacaacaaatcctgttttgcagtaggaccatttgaaactactatcctcccaaccgcaccaatatctccacttaaatctatcgagtcaccatcacattcaatcaatgcctagaaagaaaacaaacaaacagaacaatgatcataagttgggaaatataaataaaataaaattttggatatgaagtcagaatgttgcaggtatacgtataatacgttacgggataacagggaatgatagattcaccaagttattatccagagtctagttctacac

SEQ ID NO: 270286 - DNA, 704 bp, Zea mays
gtttcctgaatctttgtgttctttattggagcacttgtagtttgtacaatgtttaatattggcgtgttcaggtttaggcccgtcggaatcaaatgcacaactgcaggtatagccagataagataatcggtggagctcaatgcaggctcgggattggacgattgtagacatcactaacaacatcagaggagcgagcttgcggtcaaaaacacagatgggcaacaacaacaacgaacacgaaacgaaacatacggacacgagacgaccacagacgaagataaaccccctctagactagggtgaacacggtagcagaagcgaacaagataactaggcctcagcggaccccaccgctcagttcctccagttcccgtcgttgttgccgtagccgccgccgcggtttgcaccaccgtatcccccaccgccgccgtagcctccacgaccaccgccgtagcctccaccgccaccgccgtagccgcctccatcacggcgcccgccaccgtatccgccaccgccgcctccacggccgccgcgggactgggcctcgttaacggtgatgttgcggccgtcgagctccttgccgttcatgccctcgatggcgctgcgcatcgcgtcctccgtggagaaggtgacgaagccgaagccgcgggacctctgcgtctcccgatccaggatgacttcgcccacgcgtccgcccacgcgtccg

SEQ ID NO: 270287 - DNA, 404 bp, Zea mays
cggccgcccttttttttttttttttttttttttttttttttcgttaataattttcctttttttttttttttttttgggaaacgggggagctaaattcatgctcgggattggcccattgtaaacattactaacaacattaggggggcgggcttgcggtcaaaaacacagatgggcaacaacaacaacgaacacgaaacgaaacatacggacacgggacgaccacagacgaagataaaccccctctagactagggggaacacgggtgcagaagcgaacaagataactaggcctcagcggaccccaccgctcagttcctccagttcccgtcgttgttcccgccgccccccccccggtttgcaccccacaagtcacggacgcgtggcagaccgggaatccggaccggc

SEQ ID NO: 270288 - DNA, 576 bp, Zea mays
gttctagatcgcgagcgccttttttttttttttttttttttttgacatcactaacaacatcagaggagcgagcttgcggtcaaaaacacagatgggcaccaccaccacggaccacgaaccgaaacatccggacccgagacgaccacagacgaagataaaccccctctagactagggtgaacacggtagcagaagcgaacaagataactaggcctcagcggaccccaccgctcagttcctccagttcccgtcgttgttgccgtagcctccaccgccaccgcggtagccgcttccatcacggcgcccgccaccgtatccgccaccgccgcctccacggccgccgcgggactgggcctcgttaacggtgatgttgcggccgtcgagctccttgccgttcatgccctcgatggcgctgcgcatcgcgtcctccgtggagaaggtgacgaagccgaagccgcgggacctctgcgtctcccgatccaggatgatcttcgactcgaggacctcgccgtagccaccacgaccaccgccgtagcaaccaccgcggtttgcaccaccgtatcccccaccaaaaaaa

SEQ ID NO: 270289 - DNA, 467 bp, Zea mays
gcggccgccctttttttttttttttttttttttttattttttttttgcagcaacagctaattgattgatggatagattcttttttgagcaggtgacacaagagaaacacagaataagatactatactggagttgttgacgttgatcgctacggtggactgattccaagctgctcaaaatatcctgagccattgccctagattgtaggcaaatagatttggtgttgggttcatttcagtaattaatgctaatccagggaagaaaattgttttagtaatgaaaaaaaatcacactaatcgctcgttccacttagcaatggcactactgtaattcaagctcaattcaatctctccaggctttaactgcacaagaacactgcaaactacaacagtccagagaaaatttaccatcaccgctagttgatcagaactatgctgccgccgtcgtcgccggtgttagctcttccag

SEQ ID NO: 270290 - DNA, 1703 bp, Zea mays
ggcggccgccctttttttttttttttttttttttctttttactctttttttttttggagggcaaatgaaattcattaatcacgctgcaaagattatgtcaaattacagtgcaacactaaccagaagagctgctgatttaactgaacaacaatacaatggcatggatcgacaaccagaccgctagaatcagggggaaaaaaagagaggaaacaacacaacagatttactggaaacgatcgggaatcgcgagggaaactgcgctatgcaggtggctatcaactttgctgaagctctataaggaatccactatgcaacctagctaccgtctcctgctaaactacgctgtaccccctcatggcgctcgtgcagtctccgatggcttgtcctccaggggcgtcctcgtcccagaagagtaagaattccggacctccgtgaccctcctgatcacctcctccatcttgggccgctcctcggggtgagcggccacgcacgccatcgcgacctggagcatctggaccatctcgtcctcgacgttggggtgccgtagcaagtccacgtcgaagacctcggcggtccactcctcacggaccacggactgcacccacctcggaaggtgctcgacggaggggtcctcgcgcccgggagacctgaggggggcttttcccgtgagcatttcgaggagcaggacgccgaagctgtagacgtcggactgctgggtcgatttcttgttctcgaggacttcgggcgcccggtacccgacgggccccggcggggtctgtggggtggtcatgatctgtgccaggccgaactcggagacgcagccgtcgaggttctgcgataggaggacgttcgatgctttgatgttgccgtggatgaacttccctcctccctcggcatgaaggtgggcgattccatgggccacgtccagagatatcttgactcttgtctcccagttcaatggagctcttccagcagctttattcccatgcaaaacagcagcaaggctaccagatgggacataatcaaacaccaacaacttctcatccttggagtaatagtaagcccgcaatggaattacattttgatgctggccaaccctaccaattatctccatctgctgttcaaaatccttcttgctaaccaccacttccttcaatctcttgacagcaactatggttgcatcctcaagaacagctttgtaggtagttccataacttcctttgccaaggacttcagcagaagctctcaacgaatcctccaagtcaaaattaaatgaactgccctcgaagaaaaccaatttattcctctctgcttcctgaacaccactgctgtagtcttccttagggttttctgccctgccacctgcaatagcctttcctttggacgaagctgtggtaggttcagtgtgtccctttctcttgaaaatacatatcaagagcacgagaatcaaaataagcaacaatacccctccaacaacagcaattccaattatcacaccagttctgatctttttccataagctcttcttggtcttactgggggatggtggtgatactggagaaggagaaggtgcagttccaaaacatggttccaaaggaaacccgcacaaaaaagaattccctaagaaagaactcgatggaaacctctgcaaggaaggtggtattggcccactgaggttattgttgctcaaattcaagtgtctc

SEQ ID NO: 270291 - DNA, 492 bp, Zea mays
cgcggccgccctttttttttttttttttttttttttttttggaggtcaacatacctctctgtaaaaatgcaggggtaaaacttgttatttcttttcttgaaaaccttgtctgtcatataactaattcaaaattaggaaaacaaaaaagagaggaaggaatgctaccggctcaaacctcgatagacaaacagcaactagaattactacagagctgtatcagtacacgctaaacgctggtgaaacccgacatgggcatttgcttcttcaagatgaagccacacattctggggggtgcaattctctcttcttacaagcaattctgtcgcaccttttttctctcatcatcatggtgaactgaggagctcaaatccacatgtcaattcggtgccatgtaagattcctcacggccgggagctttactggagccaccatcaatgttaaaatggtgaattttgcagcacgaatgaagaatcagcaccctggaagcgactg

SEQ ID NO: 270292 - DNA, 527 bp, Zea mays
gcggccgcccttttttttttttttttttttttggcgcaccacaatacagggaatcacatttctatgtgcaccacaatacagggttacaacagaattccatggacatctgtaacagagctaacaggcaacactcctctcttcccctattcaggaaaactggcaacacagcagttaaggaaaacaaaaaattgagtcaagacagacctctaaccctcccttcccaaagaaaaaaaaagggtcatcccaactaggtggcctccttcccaggaaaatggccaagggaacttgcgcatttctgcatgcttggttcctgagttatcaaggttttacaacacacaggagccaaggtggcctgtttggcctttaatcccttccaagctgtatgcccacaaatctcctctgcttctgccttcagatcttgccagcttaacactcacctgtgattaaacccaggaaatctctgcacagaaccattaccaccaatatgtgactcgctccaaactgaattcaacctccttgcaaagtcc

SEQ ID NO: 270293 - DNA, 491 bp, Zea mays
  unsure (1)..(491): unsure at all n locations
cggacgctggncgtgacgcgtgggtgacctaccaggccgggctggcgccgccgggcggggcgtggcagtccaacgacggcacccacaccgcgggcgaccctgtgatgcacgactaccggagggcccggtaccttgccttcttctacagcaactccacctccttcgtggcgtccgtggtcgtcgtcgtgcttctgctgccagagtcgctgcacaagaagtggtggtggctcggggtcatgaacgcgacgatcgtgctggacctgctgggcctcttgatcgcctatgccgccgggtccagcaggacgtggaagacttctgtggttgtttccgctctcgttctcgctgtgctcgcctatttcgtcatacatgtgctgctgtcaagctgcgtcaggagagggaagaagacagcccccgactctcggccccatgaccaggagaacagagaggaaaacgaagcggcaacgaaagaggtcgagctccagggtccagct

SEQ ID NO: 270294 - DNA, 556 bp, Zea mays
ggttcctggggcgacttttatttttttatggggcgtgagatagtacaaatttacactaacaaacatcaaattaaaaaaaatcggagggagtacttgccatgatgtaagcatgatctagcgatctggccgtctttatttaggctggagcgaatctatagtttttggttttggtttgacgaaaaaaagataacatcaagatattctatgatactctcctcaaccaatgtcaacgaaaagaactatgcaagaatccatggaccatggtcaggtggtcaccactcaccagtaatccccgcaagagcaggaaccaccattgaagtggtggaatcgcacggcatctcggatcacgaattctcggccagtcactgtggatatcagcttgatcacagtgtgacagtcgccgcaaatgcgcagattcttcatgatgtggatcggcatccaggtgggcaaggtcatgagcccgaatgctacagctagcttctcgctgtggtgaatctcggagcgcggggagtctgtcctcacgtaccctatgcgcgcgatcttctccatgagctca

SEQ ID NO: 270295 - DNA, 478 bp, Zea mays
cggccgcccttttttttttttttttttttttaaccatataagaacaaggaaaacctagcctctgtttctttctttcataaatatacagaacgtacgggttggacgtgaaatcgtcgccttgctccacggcaaacatcaaaatgacacgcaccacaggcacagggcgcaggcgggccatccgctgcagaccatgcacaccacaagcaaccactctttgcacactacaaatacccgcaggaaaggaaaaggaaacaaagaaaagaagagccagagcttctttgcatgggatatcacgacaaactcttgtggtatgccgccaatccgtgacagattgcgttctgcactaagagcatcccaaacatttacttagtgggcctaagaagaattcaagaaagcctgacggttgcggtgggctcggttcctcggttttcgaaggcaggtgtctgaggaatgccctgacggcacctgtcaccccgtc

SEQ ID NO: 270296 - DNA, 364 bp, Zea mays
gcggccgcccttttttttttttttttttttttttttttttttttttttttttttttgggtcaaatagcaatggcaagccttattattttttgcaatacggggtttgatacatcagtttgttacaaaaagatgacacaaatgtaaaactacaaaattgttacaccatgagatggggctgttttggtagctaccaatgtttaccaagtggactccttgctgtgtaacaaactaacagctacagcaaaattgtaagcctagagtaatatagccatggctgctgctcaacaacgctccaatgcctagtcatgccatgtttgagaaccagttccattttaatgcccgccttcaaaaaaatattaacttt

SEQ ID NO: 270297 - DNA, 738 bp, Zea mays
aaagggctaaaccatttaaattaattaatctatacgtactggtcatcagattttaatagtagcatgctagtagtagaagtagtagtgctggtcatgactaaacaaacatatccacacacacacccaccattagccaaagctgcaaaaaggaaggcgtacagctacagcctagtacagcgatgttcgttctacggcgtcgctgcggggctggagtcaaagctgcagcggtaaagaaagtctgaaagggtgggcaaagattccggcgtcccccagagtccagtccagtctctagggcgactgatgagctgagctgctgtgctgcctcctgcctgccatcgattcttttgttcctcgagatggccgctggcgttacggtcctcgccgctgctgcttcagttcagaccgtcgatgggaggtcgcacttgcccatcttcggtgcctggttgacgacgtaggcggcgccggcgaagtcgcaggttccgatggaccggcccttgcgctggtagtagtcgttgaaggcgtaggaggcgtgcgcgaccatggtgttgggctcgaagcacgccgcgccgggctggatcgccttgcagtccgcgccgccggggccgcacgcgtagtccagcgccgcctggagccgatgctccccggccatcgcgttcgccacgcaccacgcctccccggtcgtcaccttcaccccgctcggcgggttggtgctggtgctgctcgccccgccgccgttct

SEQ ID NO: 270298 - DNA, 849 bp, Zea mays
taggtactacaacagctaggcgccataatgtctgcttggacacttccgctgtgtaaatacgcgcccaataagagcggcgtatggatagatgttgtcactatggaccattacttgttgtatgcactgtatatctgtcttttcttgtatgggatttttacttcaaagcttcatggttcatgaactaatacaacaccacaacagtccacagatatacagtgcatacaacaagtaatggtccatagtgacagcatctatccatacgccgctcttattgggcgcgtatttacacaagcggaagtgtccaagcagacattaagggtactacaacagctaggcgccataattggttccaagcagacattaagtgtactataacagctaggtgccgcaataatcggctactcgcagtaggcttttatcaaagacaaaaaaagaagaggtgagcccccgctgatgtcctgggggctgtggaatctctcatgacatgcttattgctgtggcaacttcagggtggtagtgaagcatctcctgccacatcatttcccggatcatctctgagctgatgttttcgtctatgtccagatcgatgggcacttgggctgggggatttgcgcttggatcatacagaggggacatgtaagggtgctcgagagcttcggtgacactgatccttttggtggggtcgaagatgagcatcttctgcaacagatcaatggcaagagggtgcgcatgtgggtacatacttacgagaggaacaccaggggtatagggaagggacttgatgtatctccgagcctttgggttgtcgatgaactctaggtcagcctcactcatggtgccgaggacgtt

SEQ ID NO: 270299 - DNA, 724 bp, Zea mays
gcctgccgtaccggaccgaattcccgcgcggccgcccttttttttttttttttttttttttttttttttttttagagcagagacagattggtattcctcaagatgaatatttggatagcaacatgagcttaaacagtacagtaatctaaaaatattccaacatccgacacaacagtaaggctgactgagccatgattgaaataaacatgatataatagcaacattaagccgtctagagacccgccgacaagatgcaaaacagccctcatgtgttggttgccctggtgtatatctgctggctggaatgaacagagatcatccttatgagtccccttgccatcagatccttgattgccctccgtgccaatgatccattaatcctgagacgctcggagaggacggatggggtgatctgcttgtacttgggcacctcggagagcagcttgtcataggtggcctggtcgaagagcacagcgttgttgaccttctccttttgcttacccttgctccacttcttcttcttctgcttcccgcctccggacttggccggcttggacgacggcggcggggccttatccttcttcggggccatggcagaggtggtggcggaggcgcgaggcgagcgacggagaggaaggggcggcggcgggagttgatgcgcgtcggggcgagcagcaggtatatgagttggacgctagggttttgagctggtgttgctctccac

SEQ ID NO: 270300 - DNA, 712 bp, Zea mays
aacacacgcaacatcttcagcaattgtaattgcagagcagagattggttgatattcctcaccaagattaaaatttggatggcaacatggtcttaaatgttataaaaaacatgatattaaaatagtacaataatctcaaaaatattcgacattcaacacgacagtaagattgatcgagccacgattaaattaaacttgatataatagcaacatcaagtcgtctagactagataacgtccacaagacgcaaaacacccctcatgtgttggttgccctggtgtatatctgctggctagaatgaacagagaccatccttatgagcccctttgccatcagatccttgatggccctccgtgccaaggatccattaaccctgaggcgctcagataggatggatggggtgatctgcttgtacttgggcacctcggagagcagcttatcgtaggtggcctggtcgaagagcacagcgttgttgaccttctccttctgcttacccttgctccacttcttcttcttctgcttcccgcctccggacttggccggcttggacgatggcggcggggccttctccttcttcggggccatggtggaggtggccccggaggcgtgaggcgagcgacggagcggaagcggcggcagcgagcgaaagcgtgggtcgaagccggaaatagccggaccggataccatgcagagcgtacgcagattacgcctat

SEQ ID NO: 270301 - DNA, 1453 bp, Zea mays
gccagatctgcacaagaacatgaggaacttgaagaagccgagattgaattggagcttattcaaaaagagaagtcagttcctaactttgttgagcataccaatgatacgatggtgcttgccatgccatcatatgaccgtgatggtagtgaggttaataaacggctccagcaaatccgggaaaatattcggtccctggaaaggtctaggctgaaagaggaaattacagcgcgcagacaaaagaagctgcttctaagacatgcccgtgaaaagtacctagaagagacatgctccagggaaacggagcttatgcaagagctcgacagggaaagagctctcgagatggaacgtgaagtagaaaggcagcgtcaactggatattgagcgtgcaaagtctagggaactgcaattcaacattgatttggaaaaagagaaacaaactcagagagagcttcaacgcgaactggagcaagtcgagttggggcggtcatcaaggcgtgagttctctgccaatcccaacagccgctccagggagaggtaccgcgaaagggatggtggaggcagagcacagcaggaggcggggagcctgaggtcttcgagcagccgaggccaggaggggggctctgcccaggcgcccgcaccggccgggccgggccctaccgtcatgctcgccgggtcaaggacgttctcgggggccaaccttccaacgattctgcagcctcgcgagcgcgctgccgacgaggacagcgcttgggccgaggacgctagcagcaacggagatcctgaactggacggcgtgaggccgcatgggccgcgaggcagcaggtcatcctcctctaggcaggttgcggagaggagggagcgggatggcactgctgccggcacgggcaggagagaagggaaatgggagaggaagcagcacccgtgactattccctgcttgtgttgtgcctaagcctaacggaggcttcctcaatcgcgttgtaattgtactcgtatgggcattggatcaggtggctgcttagtcaacggtaccgtgcattgataaaaaggttggatcatcgtatgggaacactaccaatcagctgcctgctcagtcaacagcaccattaccatcacactccgacttttgtcagatcccctaagggtgtgttcggttacaccaatccagaggggaggatttaaatccccttctagtcattttgactaagaggagatttaaacccccccaatgatgactagaggggatttaaacccttccaatctctctctggattggcctaaccgaacaagcccaaaaggcgctccatggcccacgctctcccttggctctgtcgactgccctcgtcctaagcactagcagcctgcttaggctttgttgggtttgacgtggattgagatggattaaagagattaaatatttttttatttaaatttgaataagagaggatttaattc

SEQ ID NO: 270302 - DNA, 1018 bp, Zea mays
cggaagtgcaagggcatctaatcatgcaggtagtaacatgacttctgacaaccagtctcatcaagcctcccaatcagttggtgctgcaggttctcatgatggtggtaatgtccaaggacaagatccggaacgatctacccctgaaggtggcacaaataccagccatgatcaaggtcaacagagttctacaggtgctgagggctcacaagttccgcttagacgtaatagcggacatgggtgggtaacttctgcagcaagtgcatttgatgctgcaaaagacataatggaagctcttagaagcaaacatactaatctagccaatgagcttgagcttttactgtcagaaattggatcacggtttgttactctgcctgaggaaagacttctagctgtggttaatgctctgcttcatcgctgctacaaatatccaactgcaaccactggcgaggttccacagtctctcaagaaggaactctctggtgtatgtagagcttgcttctcacaagatgctgttaacaagcatgttgattttgtgaaggagtacaagcaagattttgaacgtgatcttgacccagagagcgctactacttttcctgcaacccttgctgaacttacggagagattgaaacactggaagaacattcttcagagtaatgtagaggatcggttcccagcagtattaaaactggaggaagaaagtaaaacacttcgggattttcatgttgttgatattgaactcccagggcagtacttcacagatcaggaaatcgcaccggaccacactgttaagttggacagagttggacctgacattccaattgtccggaggcatggcagtagctttcgacggttgacactcattggttctgatggttcacagcgccattttattgttcagacatcactgactccgaatgctcggagtgatgaaaggatgctgcagctattccgtgtgctaaataaaatgtttgacaaacacaaagaatctaggcggcggcatctggctatccatactcca

SEQ ID NO: 270303 - DNA, 423 bp, Zea mays
tcttgtgggttgcggacctgcctctctcctgtgcggctctcccaccggccaccggccaccggccgccaccgtcgccgccatgccttttcgattccagttcccatggctcaagaacccaactacaaacggcggcacctccaacatagacactaaccctagcccccgcttccccaaccccttcctccctatccaagcccatgtcacctccttcctctcctccttcccccgggcgctcccgccgccgccgccctgggcgcgcatcacctcgccagcctccacctccggggccctacctacctctgagatcgaggagcggctcgccggggtgcccgtgtacgcgctcgccaacgccgcccaggagttcgtgcttgtgtcgtccacacgcgtgggagggcaagggggcgagagcgtgagtccaacgca

SEQ ID NO: 270304 - DNA, 2096 bp, Zea mays
tcgctttgcttccggacgggtgtcgccgagggcagccgctttttaagagcccggaccgatgtcctgagattggaaagagggaagccgcaggcagcatctgcatctctcgcccacctccgctccgcctactgctgctggtggtagggaggcggagaaggaggcccttgcgcccgcccgccggccggatcagagccgtagcaaccaccacccatggcggacgtgcacgaacctttggtgcgccgtaagaggaagaaggttttggtggactacttggtgaagttccgatggatcctcgtgatcttcgtggtccttcctatttcaactctgatctacttcaacatcttcctgggcgacatgtggtccgccatgaagtcggagaagaagcgccagaagcagcacgacgagaacgtgcagaaggtcgtgaagcggctcaagcagaggaacccgaagaaggacggtcttgtttgcacggccaggaagccctggatcgctgttggcatgcgcaacgtggactacaagcgtgcgaggcatttcgaggtcgacctttcttccttcaggaacatccttgagatcgacaaagagaggatggttgccaaggtcgagccccttgtcaacatgggtcagataaccagagctacctgcccaatgaaccttgcccttgcggtcgtcgccgagctcgacgacctcactgttggtgggctgatcaacggttacggcatcgaggggagctctcacctctatggccttttctccgacacggttgtcgcgatggaggttgttctcgcagatggccgggtcgtcagagccaccaaggacaacgagtactctgaccttttctatggcattccctggtcccagggaacactggggttccttgtctctgcggagatcaagctgatccccatcaaggagtacatgaagctcacctacactccagtcaaggggggtctaaaggagatcgcgcaggcctacgcggattctttcgcgccgagggacggtgacccggcaaaggtccctgactttgttgaagggatggtgtacacagagagcgagggtgtcatgatgacgggcgtgtacgcttccaaagaagaggcgaagaagaagggcaacaagatcaactgcgtggggtggtggtttaagccctggttctaccagcacgctcagacggcgctgaagaggggcgagtttgtggagtacatcccgacgagggagtactaccaccggcacacccggtgcctgtactgggaggggaagctgatcctgcccttcggcgaccagttctggttcaggttcctgctgggctggctgatgccaccgaagtgtccctgctgaaggcgacccagggcgaggctatcaggaactactaccacgacaaccatgtgatccaggacatgctggtgccgctgtacaaggttggggatgcgctggagttcgtgcaccgcgagatggaggtgtatcctctgtggctgtgccctcaccggctgtacaagctgccggtgaagacgatggtgtacccggagcctgggttcgagcaccagcacaggcagggcgacacgagctacgcacagatgttcacggacgtgggcgtgtactacgcccccggggcggtgctgaggggggaggagttcaacggcgcggaggctgtgcacaggctggagcagtggctgatcgagaaccacagctaccagccgcagtacgcggtgtcggagctgaacgagaaggacttctggcgcatgttcgacgcgtcgcactacgagcactgccgccaaaagtacggggcggtgggcacgttcatgagcgtgtactacaagtccaagaaggggcgcaagacggagaaggaggtgcaggaggcggaggcggccatactggagccggcctacgcggacgaggaggcctaaaagctcgtggtcgttttgcttagcccattttaattagaacttgatggatgtagtgtgtgtctgtctcaagtcattttaattagaactcttaaagctcgtggtcggtcggtcagtcagtcagtcattgtcgttgatgtccagcgttgtgttttttttatattctctaatggaatctctcagattgattcgggccttgct

SEQ ID NO: 270305 - DNA, 396 bp, Zea mays
cccacgcgtccgcccacgcgtccgcccacgcgtccggcccacgcgtccgcccacgcgtccgggacatgctggtgccgctgtacaaggttggggatgcgctggagttcgtgcaccgcgagatggaggtgtatcctctgtggctgtgccctcaccggctgtacaagctgccggtgaagacgatggtgtacccggagcctgggttcgagcaccagcacaggcagggcgacacgagctacgcacagatgttcacggacgtgggcgtgtactacgtccccggggcggtgctgaggggggaggagtcaacggcgcgaggctgtgcacaggctggagcatggctgtcgagacacagctacaccgcatagcgttcggactacgagagatctgcgattcgcggtc

SEQ ID NO: 270306 - DNA, 826 bp, Zea mays
gcgccgccaacatctccggcggccacgtcaacccggccgtcaccttcggcgcgctgatcggcggccggatctgcctcgtccgctccctcgtctactgggccgcgcagctgctcggcgccgtcgccgccgcgctcgtgctcaggctcgccaccggagggatgcatctgccggagtacgcgctggcggggggcgtgagcggatggaacgcggcggtgctggaggcggccatggcgttcgggctcatgtacgcctactttgcgacggtgatggacaaagcgcggagggtccgcgccggcgccggagcgctggcggcgccgctcgccgtggggctcctggcgggggccaacgtgctggcctgcggcgcgctggagggcgccgtgatgaatccggcgcgcgcgttcgggcccgccgtcgtgggctcccgtcgctggagacaccaatgggtgtactgggtggggcccatggtcggcgccggcctctccggcgtcgtctacgagcacctcgtcgccggcccggccgccgaggaggaggagcccgcgccgagctgcggcgaccgccgtcgtgcgtagaggactacatgcatgcaggagcagcaggacgtcgtcgtcgtccccgctcctcggaatcttctgaataaaaaaaacagcttgcatgcgtgctcaattgttgtgtgtcgtggtcgatcatgagtagaattaatgtttcatgcatgcactcttaccgtcttctacttatgtccttgtttgcttcaataatctggcttgtgcgctgggtgtaaaaaaaaaaaaaaagggcggccctcgcgatctacgcgtgacgcgtggct

SEQ ID NO: 270307 - DNA, 535 bp, Zea mays
caatttctcaatagcctggtcgtcctcaccagacctcgtacaatatagacctttcttcagcacaccagaacttgttgagttccctacatccaagtctggccagaaagcttatgcctatttctacccaccatcaaatcccaattttcaaggtttgcctgatgaaaagcctcctttgcttgtcaaaacacatggaggaccaactgctgaaacacgtgcaattctggacctcagtgtccagtattggacaagtagagggtgggcatatgtcgatgtcaactatggaggaagcactggttatggaagagagtatcgggagagactattgaacaaatggggtattgttgatgttgatgattgctgcggctgtgcgagattcctggtggagagtgggaaagtagatgggcagcgcctttgtattactggtagatcagcaggtggatacactactttagcttcacttgcattcagagacacgttcaaggctggagcttctctctatggtgttggggacttgactctgttgagagcggagaca

SEQ ID NO: 270308 - DNA, 913 bp, Zea mays
ttcgcttatcagcagccgtcggacatgcaggtcgactcctccgtcgccgaggagaagccggccatcagattctccatcaacgtgcttgagctcatgagggaggcgcagatgcagcatggtctccgccagagcgactacacgcggtaccggagatactgctctgcacgactcagaaggctgtacaagtctctcaagtttttgcatggccgaggtaaatacaacagaaggaatataaccgagtcttcagtcacggatgtgaggtttctccatctcgtgtttcatatggccgagcgagcatggagtcatgccatggagaagaaaactgctggtacaaacgcaaaacaacgcatctacatgttgggtcgatttcggaaagcagttaaatgggcatcacttttttcacaattatgttctgtaaaaggagattccaggacatctctagaagctgaggcatatgcttcatatatgaagggtggctttgttttttgagcaagacaagaatatagatgccgcaatgataaatttcaagaatacgagggctatatatgaggagcttgggaagtatggcagtatagaaaatcaacttttatgccgtcagcgcatcgacgaagtggagcctatgattgatttctgttcacataaactaggtggatcatatttacaagcacatgaactcctggatactgctaatgatcttctcaaggcgaagatggaggctgtattgtctgagacaagatcacagcaggcagcttccatgactgagtttaactggcttggtcgcacttttcctattacaaatgcatagacccgtgtctctattttgaaagcccagcagcttgagagagacttgagtgctgcagccacagaatcagttgctgctgacaaaaagcttgctatattggataaaatattt

SEQ ID NO: 270309 - DNA, 546 bp, Zea mays
cctcttcgtcgatcggtgtccctagcctccccctgcccggctgtcctcctcgatttcgcaagctcctggttacggcggcatctatcgttccgccgcaagggccgcatcgtctctctcgcgacgctgccccagaccgccgagataatggctggccaccgaaacagtcatggaaagcgccagtctgattttactgaaaatggaggcagtaagagaagaaatcctggcgatgatacatatgcacctggtcctgatgacactgtgtatcgctacctctgtgcctctagaaaaattgggagtatcattggcaggggtggagaaattgcaaagcagttgaggactgagacccaagctaagatcaggattggcgagagtgtccctggatgtgatgagcgagttgttaccatatttagcacaagcaggaaaactaataccatcgatggtgctgaagatgaggtttgccctgctcaggatgccctctttagagttcatgagaggctcgccagtgatgagggtcttgggaacgaagacagcgaataaattcacctc

SEQ ID NO: 270310 - DNA, 435 bp, Zea mays
cccatgcgtccgcccacgcgtccgcccacgcgcccccacagtcccactgcccttttcctcggtccatcgcaagctgctgcggtcctgcctacggcggcatccacccttctgccgcatcgtctttctcaagacgctgccccaggtccatcgcgcctagggttcgccgagtccggcggcgctaagataatgagtgggcaccgaaacagtcatggaaagcgctactctgattatactgaaactggaggcggtaagagaagaaatcctggtgatgatacctatgcccctggtcctgatgacactgtgtatcgctacctctgtgcctctagaaaaattgggagtatcattggcaggggtggagaaattgcaaagcagttgaggactgagacccaagctaagatcaggattggtgagagtgtccctggatgtgaagagcga

SEQ ID NO: 270311 - DNA, 916 bp, Zea mays
gcggccgcgctttttttttttttttgggtcctcagagcaaaggaagtgcttattaaaattctgccagttgcttatatggtacattttacaggagacgggcgaataattaagctgctaaggtcatagctaggtagtcaccacacaactcatacagcagatgaaccttcctgggttaagctaatcaaaggcggcaggcagctttgcacatggatgcctgcctgtgcctctcaaacccatatggaagaacgtctgatcgaacacaatctgcaggttggccggccagagttcacatcgatctggggccgggagctgagctgagacgatggggtaatgtatgtagatcgtcgaggagggttattactcctagagtagtgcaccaattaataaactaactaactaactataattaaattaaacacgcctagcgatctgttgttgtcgtcgtctgttactgctttcgcccccttgggcgcgccgccggcgatggtgatcgcagtggattccactgccccagacggaccaagaactccatgacctcagtgggatcttggagagagtaggtggcatcagtctccttggggcatttcgagacacggatccctatcccttgacctctctccctcaacaccttgaaagcatcctcgtcggtccggtcgtccccgatgtacaccggcaggacgttggtgcggtcgtcgtcgaatccgagcgacctgagcaagaactcaacggccttgcccttgtcccacatgatcgacggccggacctccacgactttcctgccctcggtgagctccagctcggggaagtcccggagcacggccttgaccttctcagccaatgagctccagctcttttcgtcgacgcatctgaagtgcacggagaggcagaacttgttgttctccaccctggcccccgt

SEQ ID NO: 270312 - DNA, 534 bp, Zea mays
cagccgcccttttttttttttttttttttgtctcatcacatttcatttattgccaattaaaaacaaacatctctacatttatgcagtcgtcgttacagttggacttgggatatataccactatgtttatactgttgttgttggtgcagtataatgccagcaaccacccagaaattagccccgaatggaacaaggacagacgaatcaatgaaacattgatcacaattcaagggtacaaactcaacccattccacaccacaaactggtatcggtattcattcatacatactggtagccagaattgacatgtggctttcataaaatgaccacattgaggattcacgtatcatgtgcatcagcatcggccggcaattttgcttctcaagcggtaaaaaaatggaagaaaagaagcagcacatccatcagctgaaatcacttcccagtacgaaggcgtgtatttctgaccagctagaaaccgtatagaggactccagaccgtgccttgaatacggatgcatcttcctccgccagttgcc

SEQ ID NO: 270313 - DNA, 590 bp, Zea mays
aaccggtgcggccgcccttttttttttttttttttttttacataaatcgctattctttttattaacttaaaccaaagaagcggacggtgatgttccacaatatagtgtttgatgggcaaagtacacgcaccaatgttagcaaagtacaccgagcacaagagccgctgctaacacatccaggcaaccacagctgctgagagacccccagcagcagtcatgcggcaaaactgactgtctactaccacaaatcttggaatcagcatcatgtggaggtaaccaaaaataaaattacagcaggcaccttctttcaccaccctggaagaaaacttggacgtcgagggctccagaggtattccgatgccggaccaacaaacaggaagctacattagagagctgaatcaacaaggaacactacgaatctaccatctcgtcttgcaactcgctaggggcaatgagccccggaatggcaagcatacgttggcgctccctctctctttgggcagcagcctcttccgcgtatagatccttgttatcctgaactgagaactccttggactgcaccaggaagtctctaatatggtttttgaagc

SEQ ID NO: 270314 - DNA, 407 bp, Zea mays
agcggccgcgccttttttttttttttttttttttttttaagaaaaatatatatatgagatatctgagaatagtacagtacagatatatcaaggttcctatcagcctggatccatctatgagcttcaactgaagaagcatacaatgctgtaccacgatgatataccatgggcaaagcacacgcaccaatgttaagagccgctgttaacacatccaggcaagcacagctgctgaagacccaacagcggttccaggaacctcccctgcggcaaaactgactagtccattcccagtctacaaccacaaatcttggaatcagcatcatgtggaggtaaccaaaaataaaattacagcagccacctttcaccaccctggaagaaaactcgcacttgaaagacgagggctcccg

SEQ ID NO: 270315 - DNA, 414 bp, Zea mays
ccccccctttttttttttttttttttttgaacaaattactacatttatatatgtaatctccgcaccagagtgctaacaaaagaacatagttttttctccatacacagccaagccaaacctacccttgttgatgagacagcaaatctacacattgaggaatgcaccaaagaaaaagaaaaaaaaaggcgtatgagatatctcacagaatagtacactacagacatagtaacaaggttcctaccagcctgcctggatacataaatcgctattccatcgattaacttaaaccaaagaagcatacaatgatgtaccacaatataatatatgatgggcaaagtacacgcaccaatgttagcaaagtacaccgagcacaagagccgctgctaacacatccaggcaaccacagctaatgaa

SEQ ID NO: 270316 - DNA, 1183 bp, Zea mays
cgtaccgttccgtgattcccggtgcagccgcccttttttttttttttttttagaagaaaaatcgagaggttcttattggcaaattcgaggcctcacatcacagcaagcctcctgatccttttacaaaaaatattcgggtaactcaaaccttattctcaagtaaagatcagcctcaacagtacgcacgcatattcttactctgatagctggtataaacacacacaagaatcatctcaacactgaaatctcccttgtctttccaaactaaaaagcctgtgcaagtaataaactggtatatttctgtacgatactcgtgccacatgtagaacatgttcgaccggggcgaacacgacaccatgcgaagctgatcacattatgatgccaatgtccgtcccttatattcactgatgcacgaatttgttcagtgccgtcacatccagtgctggaaattcattcacagcagcaagaaccgcaagccccagcttaatcgcatcatcgttactctgtgcctcaatgtttaggggaagaacaggatcatgcagagagagcctcagcaagaaccacccaccatatcctgaaacccttacgccctcatggttcaccggggctttacggagatttgggtctttgctgattgcattctctaaatgtctcaagacggattctccatagtcacggaaggaccctcctttcaaatctgcatgattctgatcaatctttaaccttatttcaactgtcacatcagcttcttcaaggccctcaaccaaatcagtcaaaactttactaccaatacttgaacccagtgttctagcagcagcaagtttattcaaaagtttgaccataaggtatgctccatcatcaagccagtggttctctttcagcgctccatgcccacttgtttccatggccaaatgtgactcctcaccaatagagttcagacgaatagcctcgtctattacattcttgtaccctcgtttgaaacggtgatgcttccctccaagtttattttcaataaatacagtcaatccatctgaagtcacactatctgtcacaactgtagttcctggatgttcctcaagaactatggcagccatcaaagcaatcaatcggttacgagatatcccaatctgatgatgttcgactgctgttcttcttccgtttctaattctttcggacgcgtggg

SEQ ID NO: 270317 - DNA, 632 bp, Zea mays
tgcgcggccgccctttttttttttttttttttttagcagaggaatgtatctttatcttatggaataaaatcgtaacttatttccagactagaaatcaagagtttggcatgcagaaatcctaatctggtggagcgcaatctattcacgcattcccgtttcagtttaatactactcaagtgatgagcccagtaaaatcaaaacttcgaaatgtctccacggcccacagccatagcagctaaacgaataactgggagacaaataaatgcaaagataaagtagaatcgttttaatccctgtcgactaatgccaaccactaattgtacatgtgtctagaatttgctcaaatcgtcttactctccgagagccataccaaacccaaatttgtaatctttcttccagtggtccagctctgcagacaactggaaagtgacacctggagtcaatcgctcctccaaaagagaagaaattacgccattggtatccagtttccctctcaatcgacactgtctcagcatataatcataaccaaagcttgctgttacatcctttgtcatttgattgtacatgaaatcggttccctggcatctgatttcatgtacaatcaaatgacaaaccttgctgttacatccttt

SEQ ID NO: 270318 - DNA, 613 bp, Zea mays
attacgccattggtatccagttcccctctcaatcgacactgtctcagcatataatcataaccaaagcttgctgttacatcctttgtcatttgattgtacatgaaatcagatgcaagggaaaccttttcagaaactttctgtacataactaagcgcgaccattccagtggttgcaatttgtgcagtcgcaaccattttctttgtgtcatagcgagcaacaacaccgactccagacttcctttgctgcccaagccaaaaggcttcagttcccaaggaaaggttcttgctgacactctggatgtagtttgctccatagaaaccattgtttccgaattgaacctgagatctaaaatctttgcccttataatcaaaattcagcatcccttgggagtagtggggctcacttgtcaactgagcatttatctttaaagaaaggttgtccgtaatatcatgcttgacacggatgttctccctcccttcatgtgagaccctccccatgagcatcgtcctctgattgataaagttggcaccaaactcataattggaggtgggaaccttgatcacctcgctcccctgtgccgggatctcaatggatcccatggcaacgctgtgag

SEQ ID NO: 270319 - DNA, 464 bp, Zea mays
cgcggccgccttttttttttttttttccagtaaatcatgcacgacatttatacgtttatcagaatgtacatgactaagatagtattaagcataccaatctgggattatgtcagttctgaaatctctagcccttggtttctatcacctattgggggttcctaaaacagcatcagcatcacgtgccaaacattcaaccatcacatcttgcaagtatctcccaccaacacaagattgttacaagacccggtgcttcaggccacctgcacttcaaacaaaagaaccttgcagcaggggcactccagcttcatcaaaatgtagttcatgccgaacccagatattcaactgggaaactccgaggccactgcttcccataacagcctcggaacttacccggagtacagtggctcctgtgccacacattgaggtcaccagaatcatagtgggaaaatggatggggttttagt

SEQ ID NO: 270320 - DNA, 390 bp, Zea mays
gcggccgttgtagaggcaccatgattacctcctccttcctgcgacatattttttctattatggcgcctactataaacaaacggctcgccgttgtacaacaacgggactgctgaaacaaccctgtcaccacacatattaatcttgttgcacatcatccttttttcagctggtgtcataacaacgaggagggcaccaatcgtcgttcttaacaacagctgagcatgcttgatggatggtgcgacccgtgctgcagcgcatcattcaccgcggctgttgtggtgactccccgcatgaccactacatctagtcagcagcctactagcggctgcttctgctgctttccttcccttctttgtcacattggtcggcttttttccttaagaagttaat

SEQ ID NO: 270321 - DNA, 396 bp, Zea mays
gcgggcgcctccgacctgacgggcccgagctccctccttccggttggctggctggctggttgcctggttcactttctccggagccccccgcaggccgccgccgcgcctcgcctcacatcaccgagcacccgttggggttctcgtcgctgaacatgctgtcgtgcgggtggcgctgcggcatcgggtagtagtacgccggcggcggcgggtactgcggcatcgccgggcgcccgtacccgtacccgccgtggccatggtggccgtggccgtggccgtgcccgttcatcatcatcatctgttgctgctgctgctgcatgatcgcagccatgtgctgctgctgctgctgcatcaccgccgccatgtgctgctgctgctgcggaggcagctgcgacatgc

SEQ ID NO: 270322 - DNA, 1232 bp, Zea mays
  unsure (1)..(1232): unsure at all n locations
ttttccntgctgctcagtaaaaccagcacaaaagattattttttattcaggttgccaaacttttccagtacaacaaactcccaccctgaagaacagttaccacgttactgaacagttcgctgaattaagctctcacatatgccctaaagccaaaactgcctcaatccctaagcaaattcaagaaaagttaaacactggtgtgcaataggagggttaagcaccgagaacgtgaagcatgatggcgttctgagcgtgcattctgttctcagcctgggggaacacgattgagtttggagcctcgatggcgccgtcagtcacctccactcctctctctgcgggcaaacagtgcataaggtaggcctgtgggccagcaatctccatcagggcttcatccaccgtgaatccctggaacttctgttttctataatcagcttcttccttttggcccatgctggcccaaacatctgtgtacacaacgtctgctcccttaactgcttccctgggaccgtttgttatttcaatcttactgattccagcactcctggcgatctccactgtgtttgcatcaggctcaaatcccttgggacaagcacatacaaagtgaaaaggaagtacagcagccaatagaagccacgagtgcacaatgttgttcccatctccaacatagacaaccttagtgttctcaatgcgaccaacgtgctcaagcatagtaagtgcatcagccattatctggcatggatggttatagtcggtgagaccatttatgacaggtacagctgcatattttgccaagtccagaatatcctgatgagcaaagaccctggccataatgatatcattatagccagaaagtactcgagcaacatcacgagtctcctcacgcttgcccatctggatatcatctggacccaaataaatagcatgcccaccaagcaagaagaatcccgtctcaaatgaaacacgggtcctcattgatggcttggcaaaaatcatcgccattgttttccctttgaacggttggaagctcctgtctccagactttatcgctgccttaacctcgatcgctcgattaaggatcttcattattgtatccttgtcaaaatcattgatttgaaggaaatccttgggagcctgtttggcatccttcccccgcgacggccgacacagcggggtgacacggcgggacggaacccgcggggcacgcgagggggggattgggacgtgggaggagc

SEQ ID NO: 270323 - DNA, 475 bp, Zea mays
ttgcggccgcccttttttttttttttttttttttcattttctaaccagcacaaaagattattttttttattcaggttgccaaacttttccagtacaacaaactcccaccctgaagaacagttaccacgttactgaacagtacgcttactgaacagttcgctgaattaagctctcatatatgccctaaagccaaaactgcctcaatccctaagcaaattcaagaaaagttaaacactggtgtgcaataggagagttaagcaccgagaacatgaagcatgatggcgttctgagcgtgcattctgttctcagcctgggggaacacgattgaatttggagccccgttggcaccgtctgtcacctccactcctctctctgcgggcaaacagtgcataaggtaggcctgtgggccagcaatctccatcaggggttcatccacctgcaatatagtatagggtaaaaaccagaagtgttagct

SEQ ID NO: 270324 - DNA, 1888 bp, Zea mays
ggaacttgccgctactcatattataaaaacttaaaaagtcatgtctttgatagcaccaaatgttaaaaatggtaaaaacaattgtcgaattatcaagcaaaaaagcagtacagcctcagataacaataggtctgaacggtacaatatagtttgcgtttttcactataatagccagccatggatcttcaatcgtcatcaccaaaggtggtcttctttcctgtactagctgtaccagcggtctgtctgaaaggcgtaccccttccaccacggcctctgtcaccccttccaccacggcctccaaatccacgcccacggctaccaccacgccccctgtcactcctccctcctctgccaccactgaagccgccactcctccctctgccaccacccctgtcaccactgaagccaccgctgttatcaggtctcggcttggcttcatcgacatacaagctgtagccaccaaggtcggttccattcaactcgtatgctttattcaaggaatctgggtccttgaaatccatgtacgccattcctttgcttacaccagtgtcataatcctttggaattgaaatccgagtgatatctccacatgatccaaaatgctcttcaagagcggtgcggatctggtcctctccaccagaggtgtcaaagcccttaataaacacggtgttgcctgaccttggagcgaacttcttgaaagaaccgttgtccttcccgctgctaggagtgtatgcacccctctcggtagccatgtcaatccttagaggccgtcccatcaggtcatgaccagcagattcaagagccttctgagcagcttcaacagtagggaattcaacatgtccaaaacccttgaaactcccatcatcaaaagtagccaaacgaacatcaacaacttcaccagcctcctcaaaaaattccttaacttgttcacgctctatactgtaggctaaattcccaacaaaaatagtctttgaaccagtagcctgactttggcttttggcaggagttttaggttcattatgtgccggcttctgggtagtgactacagaagtttccttagtttcaacttgttctgtatcctcatcatcagagctttcttctgaactttcatcatcttcatcactgctgctttttttctttgaaacattagtggcagcctttgcagcaccagaaggtgcagaattcttagttttcttttgtggaggttcctcgtcactttcatcagaactctcatcagagctgtcatcagatttctcgctggattgttcattctttttatttgttgctagaggccttttcgcagggacagtaggtttttcaggttctgaatcttctgaatctgactgtgagtcagtttctgagctctcactagaatctcccttctttttaatagcagcagccttggcaggttgtactgttttcgcattgctatcctcatcgtcagactcaaattcactatcagaatcagaactgctaccagattcttcctttttcttggctactacttgagctttagcaggaatatcatctgattcatcctcatcagaatcactgtcagagctgtcagattcttgggtcttcttttgcacagagggaaccggaggcttctttaggttagcagcaggtttctcatcctcggactcagaatcactatcagaatcagaactgctactggactcttcctttttcttggctactacttgagctttagcaggaatatcatcttctgattcatcctcatcagaatcactgtcagagctatcagattcttgggtcttcttttgcacagaggcaacaacaggcttctttaggctagccgcaggttttgcatcctcatctgagctactgtcagagctgctgctatcaggtttaacctgttttgaaccat

SEQ ID NO: 270325 - DNA, 390 bp, Zea mays
cgtctattaaaaaccttgaagctacaatgtattggtactggggatgacgccctagatgctattggttcattctgtcctcttttagagatcttgtcactcaacaacttcgaacgatttacagacaggagccttacttcaattgcaaaagggtgcaagaatctcacagatcttgttctcactgattgccagttactaactgatagaagccttgaatttgtagctcgtaactgcaaaaagttagcacgtttgaagatcaatggttgtcagagcatggaatctgttgcactggagcacattgggcgatggtgtccgcgccttttggagctctctctaattttctgccccaggatcgagaacagtgcattcctggagatttggagcggcttgctt

SEQ ID NO: 270326 - DNA, 564 bp, Zea mays
cagcgcttttccgcgccgcacgcctgcgtcggtcgccgaccccagtcaccggtccacgcccgcctccccctttctcctccgccctttcttgtgaccgccgccgcgggccctagcccgccgttccctctccggcgccccgctcccgcacccgcaccggatcagtccgggccgcgtggtcgcccccacctaccgcctcgggtccactcgctcgcggttgcgtgtcccgcggggtggcccctcgggcctcggcagctcccggtttcgaatggggctctcgtcggccgccactggcgacggggtgcagctctgcgtgttcgacctccagagggggcagcaggagggccaggagctcgacaagatcctctacttctaccccgccgactgccccatcctgctccagctctctgtcatcggcctctgcgaggggatcgtcactttcactagaatattttccccagaagaggattgcgaggttatagaatcagagaaacactcccatgttttttaccaagccgaaacggatatttggatggttctgttggggaaaataacaggaaaatgatt

SEQ ID NO: 270327 - DNA, 538 bp, Zea mays
gtgagaggctccaactcgcaactccgtagctgagcacgccgaaaagctcatcagtgctcatcccctgctggcccgttctcagtcccagtgagaggctccatgaagatcctggtcgcggtgaagcgggtggtggactacgctgtcaaagtgcgcgtgaggccggacgggaggggcgtggagacggccaacgtgaagatgtccatgaatccattctgcgagatcgccgttgaggaggcgctgcggctccgggaggccggcgtcgccgctgaggtcgtcgccgccaccgtaggccctgcccagtccgccgacacgctccgcaccgcactcgccatgggcgccgatcgcgccgtccacgtgctccacgacccggaccctgcgcggcccctcctccctctcgccgttgccaagatccttcgcgccgtcgcgctccaggagaagcccggcctcgtcatcctcggcaagcaggcaatagatgatgattgcaaccaaactggacacatgttagctggattgctcaagtggctcacaagaacctttg

SEQ ID NO: 270328 - DNA, 804 bp, Zea mays
gggctgccaaaaccgtttaccaggtgatccattctgctcgggccaatgcatctcacaaccatggattggatcctgataagctcattgttgaggaggcctttgtgggaaagggacttttcctgaagagagtgtcttaccatgccagagggaggtccggcattatggtgcgacccaggtgcagactgacagtggtggttagagaagctacagctgaggaggaggcaaagatcgccaaactcagggtgagcaactacaagaagctgaccaggaaggagcagcagcttatgcctcacaggctcatcgaggttagcccgaggtggattcgcaagaggaaagcggaggctggtgctacggcgtagtactttatgtatgcagaacctgcattcactgctttgcacatccgaggagcgaacatgccttccctggcacaaatacttgatcctctctcggtgtcgattcacgcaaacgggttacaaagctaggcttggtttgttttgctctaaatccatgtggattggatgtgtttaaatcgcaaacaagtcaaaatcctttataagtttttctaatctcatcaaatccacatgggatagagaataatcgaacaagaccgtaggtggattcgactatttggtaatcttggtcgtttggagtctaggaagagaggaaaatgctatgtattttagcgatgtgcattgtagccaactaaaacctcgccaaagcattggatgtgcatgagacacgtaccattgcttctacaatttcatgcaactattggtttcaaaaaaaaaaaaaaagggcggccgc

SEQ ID NO: 270329 - DNA, 2341 bp, Zea mays
gtacggtccgaattccgggtcaccccaccgacagcgcccgacggggctgaaaaacgatagagaaagagagcctgtcagcccaagaaaaggttcctcccctccttccccacctcgccctcagccctcatcatcctctaacatccgattgtgccctgtgctctgcggttctcggatccaagatttcgccggccggccgccggcggtggctccggcctccgggagcgggagaaagactggatttttcgggccatggagatgtggcctgatccgttcaggcccgggcggtggggtggcttcctgagcaggtctgattcgtatcggttcaaatgatctcggcggcttgattggtcggttccgcttccgccgggggatcggagctagggcggtggtttcttggccggccggtggattcatcggctcgggtctggtgggatcttggtggttgctggttcagcacacgagccgcaggtctgcgtagatcccctcttcgcttccgtggcggatttgtactgctagggttttggttgggtctggtggaagatgattaagcagatccttggcaggctgccgaggaagccggggaaggctgggggtagccgggaagctgctgctgcggggaatggaactgagccgtcgaattcctacagtgttgcgaggagcatggacccaggtcacaaaagggctggaaatggagattacccagttccatctggtgtaattccgaatccagtgatgaatggggctgtggtgtatcactccagtgaacccttaccggcattcaaggacgtgcccatgtcagagaagcagaatttgtttgtcaagaaggtgagcctatgttgcgctgtgtatgactttgtggatccaactaagaacctcaaggagaaggaggtgaagcgccagacacttatggagcttgttgattacatcacttctgcgaatggcaagttctctgaggttgtcatgctggagatcacaaagatggtgtcgattaatttgttccggagctccagccccacacctcgtgagaacaaagccattgaaggggtcgatctggaggaggatgagcctctcatggatcctgcatggtctcacctacagatcgtgtacgaggttttcttgagatttgtagcttcacaggagacagatgcaaagttggccaagagatatatagaccattcctttatccttaggctgctagacctttttgactctgaggaccccagggaaagggactatctaaagacgatacttcatcgaatatatggtaaattcatggtccatcgaccattcatcaggaaagcaattaacaacatattctacaggtttatattcgaaacagagaaacataatggtgttgcagagttgttggagatcctgggcagtattatcaatgggtttgcccttccgcttaaggaagagcacaaattattccttgttcgtgcattgatccctcttcacaagccaaaatgtgtatctatgtaccatcagcagctatcatattgcatcacacagtttgttgagaaggattgcaaacttgctgacacagttattagaggcttacttaaatattggcctgtgacaaacagctcaaaggaggtgatgttcttgggtgagttagaagaggttttagaggcaacacagcttgcagagttccaaagatgcatggttccactcttccgtcagattagccgtagcatgaacagctttcatttccaggtggcagagcgggctctgtttctctggaacaatgaccatattgaaaccctaattaagcaaaactacaaggtgctgttaccgatcatctatccagcactcgagagaaactccagagatcactggaaccaagctgtccgtagcctgacactgaacgtacgcaagatcttctcagaccatgattccacattcttcggggagtgcgtccagaggttcagtgacgaggagctcaagcaggcggaatctgattcaaaacgagacgccatgtggaagcgcctggaggaaatgggtgcctcaaaacctggcgggaaccatcccttaggtgcacccaatggcaaacccagtcacgctgctggctagaatacaatagcccaccgtaccagccgcatccgtgtaactcttcggctctcgtgccaagatctcctggaacctgggttgtgattttagctttgggattctttttgcgttggtttgcccctgttgtaggtgggtcccatgtgtttggttttgtaagaactgtatgttcaaaatgtacacacggaggaatttgacagatttggcatgtgtagcaacattaatcagaattactatcatatagtccaataaccaacgtcgattttgattgcag

SEQ ID NO: 270330 - DNA, 446 bp, Zea mays
catttttcggggagtgcgttcagaggttcagtgacgaggagctcaagcaggaggaatctgattcgaagcgagaagccctatggatgcgcttggaggaaatggccgcctcaaaacctcgcgaaaacagtcccttaggcgcaccgaatggcaaacccagccaagctgctggctagaatagcccaccatatcagccgcagccgtgtaactctgactctgggttgtgattttagctttgggactttttttggtcgttggtttgcctctggccctgttgtaggtgggtaggatgtgtttggttttgtcaggactgtatgttcaaagtgtacacatacagaggaatttgagagatttggcatgtgtagtaacattactcagcattaccatatagcccaataaacaacgtcgattttgattgcaaatacctagtttgggtggtttatataccg

SEQ ID NO: 270331 - DNA, 394 bp, Zea mays
tctgtacgccccgctatcggtgttggtctgactatttctgttgcaatgggggctgcgagcatttgctggtctgtacaatataatcagccctcttgggaaggattacgacacagagcatgcagataccgatcaagaagcacaaatccatgccacctcaaccgagagtggcagaccaacttcacggcttcagtcattcgagaggagatactctttcatccagagcgacgaacgccgtttcgtggagagaaggcctcagtgggttggcgggctaatggatttctgggaccagatatccattgcgtacttgtcacttttctgcagctgctgtgtctttggctggaacatgcagaggcttgggttcggtaacatgtacgtccacatcgcaacgtttctg

SEQ ID NO: 270332 - DNA, 699 bp, Zea mays
tggacggtcaaacccatgcatttgccaatttgagggaactggcaaagccgaccagtttgaatcatcaaaatgagcatcatagaatctctccggaatactttccgctgaaggcgacagaaggaatttccagtatccgcttagagatttggcgtacggtaagcccttggcccaaaaggcagcactttccagagcaccgtgaacagcgtcatcgttccagacagcagtgtcagcattgtgatagttcacattcctccgttcatgccaatacttcagagccgcttccagcgtgtcctgtgagcgcagtggcacatgcgcctcacgctttctccacttgaagaatgacgggtcctcccaagttttatgtgaggggctcgacggaggaaacatggcgctggcatgagctaaagccattgtggacaaacaggggcacctctttcctcctgtaacgatctgtcaaagacacatgtccggaccaacggaagacggcgcgcgccagcaggaagtgggttccgcgaccgaggggcggcctggcgtgtggtgtggcgaatccctcaccggcggagatgggaattgggttgcggagcggagcggagcggagcggattggattggaacacagcgcaacatccaacgagtgttttcgtcgtcgagcgatgagtcagagcagaggagcgagcaccgtcagttgtgcttgtgccga

SEQ ID NO: 270333 - DNA, 513 bp, Zea mays
tagacccaagcgtcctacctgtaacgcgctcttcaccaagaccggcaccaagggcgactgtcttcgtcttgccgcgcggcctcgtccacttccagcagaacagggggcacggccccgccgccgtcgtcgccgccttcaacagccagctccagggcacgcaggccatcgccatgacgctcttcggcgccgtgccgcccgtgccctccgacatcctcgccaaggccttccgcatcagcagcggcgaggtggaccacatcaaggccaacttcgcgcccaagtagagatccaacgtctgcattcccttgattttctcaataataaatccccgcggtgtgcagttcgatttgttcgtcttcgcttggtttggttcgagacattgctgaccacgcttgttactgctaatttgtgcggaccggagggagttgcttgtgctccgataaataagataaataatcaattctatcgtaaaaaaaaaaaaaaaaaaaaaaagggcggccgctcgcgatctagaac

SEQ ID NO: 270334 - DNA, 435 bp, Zea mays
  unsure (1)..(435): unsure at all n locations
gcttcgtcgccgtctcctcagctcgacgcggctatagctgcactgaccgcaccgcgaccgcgtgcccaccggcaccgctcagtgctagcgcgcgctcatggcgtcgcttggccagctcctcctcgtcgccggcctggccttcctggtgctgctgctgggtgcccaggatcacgggcgtggagagcaagcgaccggcggcggcccggccgttggagcagcagccgccgccgctgctcctcccgcgcgggaggctgtaatcatcagccggcaccagcattcgcagccgtcggccgcggcgatggccgagagcaagcggctccccatccctccgtccgggccgtccactaagtggaactacgaggcgaatcacgagaagccgtcgtcgccggagtcgggctcgggccgccgncgnctcgggtggtggtggtccccgtg

SEQ ID NO: 270335 - DNA, 395 bp, Zea mays
tcttcttcccacttccttccacttcttggccctgctcctgttggttttagcatcctgctcggccgaatgctggatcagaggctgcagcaaaggtagtaagtcgcttctcgtatttcccgtcgagagagggacagggggggagaacccccaaccgaggcgctgcaagttccccacggccgggccgggcttctcttgcgggaacatgaggaagctgttgttcatctccttcgtcctctcgctgtccgctgcagcagttcacggtgaagacggtgcgtacattggcgtgaacattggcacggccatgtcgtccgtgccagcgccgacgcagatcaccacgctgctccggtcgcagaacatccgccacgtgcgtctctacgacgcggacccggcgatgc

SEQ ID NO: 270336 - DNA, 271 bp, Zea mays
attaatcagaagatcatatatacatctgatcgttagttttggcgtttttatcaggaaaactgtgatgctcttgttaccgtcgttagatttctatcactcgttcgtaacttccatcaagaaagaaagatttcttacactttggttctctgcattatttgttattgttgtcatcgcgtacaggtgcgtacattggcgtgaacattggcacggccatgtcgtcggtgccagcgccgacgcagatcaccacgctgctccggtcgcagaacatccg

SEQ ID NO: 270337 - DNA, 731 bp, Zea mays
gtaaatgccaaactagacacgattaccagtgagccattgcgacatgaagaaaagagaaaatctcgaaggaaaatatctgcaagactgaattcagtatcttctgagcacacagatatcgttgttgagactgagcacaaagatgttattgtttctttggccggttccacttcaaatgtctcaatggagcagcggacaaatcaagagcaggatggtgattgtttctcaaggaaatccaatgaaaatcagatattagggaggaggtctctaagacgagctgctgaaaaggtcgtctcttacaaggagatgcccttgaatgttaagatgcgacgaccttaactgccaggaggatgaccatggtgacatgttgtagcttgctgtcctgactagccttaagcaggtatccttctgtttttttgtgtgctccagaatcagtgattgcttgcacatctcgttctacttcaaacgaaccaccaaacagtggcgaagctagagcaaacttgaaggttgtacaattgtcttgtgggtgcatagacatcatgtgatcgttgtgtatgtaagatgaaagtttgttctttataattagttctgcactttttagactccaacagcgaactcgttaaatataggggttggtcagctcctttctctttttcaacaagaggctgtaaaaggtctgtaatacctaaaattctattttgggaaatgtcttctcccaatgggttccccccttt

SEQ ID NO: 270338 - DNA, 878 bp, Zea mays
cggagatataaacaccgagccaccgaggaaaactcgagggggaatataatcccagcggcttcccccaaacaaaacctcttctccgccagagtccgcgtccgcgtcggccagatcaaacgaatcggcacgacgcatcggcatcgcctccgacgatcttgagacaaacaaaacccaccgctgcggcaactccgcctcccgccgacccggggatcgcctgacaacaggcagcgaaaaggggcgcagggtttgcccgccaagatggaggacgtggacgtctcgcggcagctgaagcagatgacggacttcatccgccaggaggccgtcgagaaggccgccgagatcgaggccgccgccgccgaggagttccaaatagaaaagttgcagctggtggaagctgaaaagaagaagatcaggcaggaatatgaccggaaagagaagcaagttggcatcaagaagaaaattgattactcgatgcagctcaatgcttccagaattaaagtccttcaagctcaggatgatttggtaacagatatgtgggagtcagcaaggaaagagctactgtgcataagtagagatcacctcatttacaagaagctcctcaagacacttattgttcagagtttgctgcgcctgaaagaaccagctgtgcttctccgatgcaggaaggaggatcttcaacttgttgatttagttttggagtctgcaaggaatgagtatgcagataaagcaaaagtatatcctcctgagatagtggtagatcgtcaaatctatctgccatctgctcccagtcattatcaggcacctggcccctcatgctccggtggagttgtgctagcttcccgagatggaaagattgtctgtgaaaacacactggatgc

SEQ ID NO: 270339 - DNA, 1421 bp, Zea mays
tcgttcttttctcgatggagctgctccaggctgtcatcctcatgtcaacggtggagggccttgtgcggatcgtgcaagaagctccacacgttcctcatcaataagatcagttcgaggcttggccatgcctttaaatatagatagggagctgttcaagctggatattgatgagctgatagctgattattccaaggagaactgtacgtcactctttgaattcaaacgagtatggatgggcaagaaattttcttatatctatgaaggcagacctaagacaaactcgggtttattcatgcagtccctctttctgcattgtattggtcatttgacttctcaaagttcactgcaccaaagattggctgggctatactgcctttactgtctgtatgagtgccagccatacaagccgcagttcaagatttacttgtctcttgaggagtgcaggcaactgaaagatgtcgttgttatggcgaagcaaaatggactgcagctcgtgcctgcacttgtcaaaaggatgctggataaagacatgtttttgtttggctacatgaatttgatcgacgacaacggggacaagcaggtcgaggaattgaccgcattgcagaacaagcgagtaaaatttgcatgtgacaagttatttgcaaatacccaagcagaaagatatttgcacatggacttgggtgctgagttcgagcttgatagcatcaagaaattgtcaaaggagtatgcacaagcaaaggaactggcccttgcgggtgcctgtcccccttgcagaggcaagccaaactgtcgaagttgacgatgctaagcacctccttcagagtgagaggctgttgggcgacaagatagatgaagtcgtcaaagaatgggatgtccagaaggaggggttctacgagaggacaggattatcctcatcccctggcgaccagctcatggccatcgacaacgatgaatcaggagctcaatgtcacgaggatggatcccgtggcgatcagctcatggcggtcgacaatgatgaatcgggagtacaggatcacgaggacctcgatgacgacgacgacggctttgccgagttagaactgctgctagagtgaagaacatatacaagtctgtaaactcttactaccgccgtataaccgtgtaatcagaacaccgagagatgtaatcctcgctcgtctttactagcctctcctttttagttgccagaccttctgttcatctacactggctgcagtaactgtacattgaaataatccagtgcgccagcctatgcaggggaggaaaaaaaagaggtgagcttgattaaaaatgtacatgagcagtgacaagaaaaaaaacgctggctgcagtaactgtgcattgaaaaaaaaaaaaaaaaaaaaaaaaaaaaaaggggggccccccaattattgacccccccc

SEQ ID NO: 270340 - DNA, 540 bp, Zea mays
accctctgttctcctcttccgtggcgggctagcggtgcactggtgtggtgctcctccaagctctgctccgctccccgcctccccggcgaccggcgactttggccccggcccccgggctaggaagcgagttcaccggtggatccgcgcgtggccctccctgttgcctgcgggcgctggccgttggccaggtcgccccagccggccaccccccgcccccgcaccctgctgacttgggcttgctgtatagcacggaccagatcaagggtcgccgtcgaccacatttgaggcttggccatgcctttaaatatagatattgatctgttcaagctggatattgatgagctgatagctgattattccaaggagaactgtacgtcactctttgaattcaaacgagtatggatgggcaagaaatcttcttatatctatgaaggcagacctaagacagactcgggtttattcatgcacgccttcacatttacttgatcaagcaaatgaccgttttaatgttgattgtcactattttgtaacttctgatac

SEQ ID NO: 270341 - DNA, 1008 bp, Zea mays
cccacgcgtccgcccacgcgtccgcccacgcgtccggtcacgcgtcagttcgttccctcctctgtgtaccggccagtaaaatccgaacccacagcgagaaatggcggcggcagcgctccgtccggcgatcctccgccgcatccgcctctccccctccccttcgctcgccctcgccgccgctgggacaggtgcatcccacccgcacgcgctggggcggtggctcgcgcggcccatgtcctcccacgacgcgcacctcacccgcgacgaagtcatcgaccggatcctcgacgtcatcaagagccaccccaagatcgacccctccaaggtgaccccggaggcgcacttcgagaaggatctcgggctcgacagcctggacaccgtcgaggtggtcatggccatcgaggaggagttcaagctcgagatcccagacatggaggctgacaagatcgactcactccctctggccatcgagtacgtcgccaaccaccccatggctggctgagcctctgctcgcccgagaggaggcgagttgaggtgaggcttcgcttggttttgtttccgagggcaaataatctgctggagtggcacagaaaaacttgttcctggtgctctgcattgcttcacggtgacggatgatgatgtcgaaatggaacattaacattttcagcgttagattgttgtttttgtgtgcgtgttatatctatatatactggttgacaaactagtttggttgattgagtctgatcgttgttgggttatttgaattgggttcgtgatagtttcccatgatattttatctgttttccatgggcttttgggaacctaaattgataagaacggcttacaaggattgatgtaggttaaaagtctcagggttcatgacagctgttagtgtggcctcttgttgtccaactcttgttcctgttaatgaggcttgagtctgttttatttgtcaacattatggttttgttggttggaagtattccacctattgcatgagaagagatc

SEQ ID NO: 270342 - DNA, 364 bp, Zea mays
gtaccggccagtaaaatccgaacccacagcgagaaatggcggcggcagcgctccgtccggcgatcctccgccgcatccgcctctccccctccccttcgctcacccgcgacgaagtcatcgaccggatcctcgacgtcatcaagagccaccccaagatcgacccctccaaggtgaccccggaggcgcacttcgagaaggatctggggctcgacagcctggacaccgtcgaggtggtcatggccatcgaggaggagttcaagctcgagatcccagacatggaggctgacaagatcgactcactccctctggccatcgagtacgtcgccaaccaccccatggctggctgagcctctgctcgcccgag

SEQ ID NO: 270343 - DNA, 708 bp, Zea mays
tttataagtttgtctatgaggcaatgatgttccttgatcgacaaaaacaatcaaagaatcctaaatatattctggttcactgtacccatggtcataatcgtacaggtttcatgattattcattaccttatgcgcacacacgtctcttgtgttgctgaggcgattagtatatttgctcaaaggcggccacctggcatatacaagagggactatattgaagcattgtattcattttaccatgaggttcctgacaatatgatgatagcatgccctccaacaccagaatggaagagaccagatgatctcgatttaaatggcgaagctaagcaggatgatgacgacgacaatggtgatccagaaccaccgcgtaatgaatcagaggataaaatcatcaccaatgacgatgtgttaggggatgaagtgccatatgaccagcaagaagctttgcgtgtcctatgttatcggttgcttgaaatgccccttgtaagggggcattcacaatttcctggatcacatccagtttctcttaacagtgaaaatctgcaactacttagacagcgatactactatgctacatggaaagctgacggaacacgttatatgatgcttataatgagacatggttgtttcttgattgatcggaatttttgctttagaagggttcagatgcgctttccccataagagccttgaaggtctgcatgatatga

SEQ ID NO: 270344 - DNA, 456 bp, Zea mays
gatggtcgtgagtgtccgcacgaacccatcacacgctccgcccactcccccaggcgcacggccgcacctctccacctccggcgactaccaccaccatggcggccacctccctcgcgcgcctctcccgacgcaccaccatttccgctaccgccgcggcgccctccctccggcgcctcctctcagtcacctccacagcctctgtcgcggcaaccgccccgccgccgccgccgcccagcgcgactggcgccgcggccgtgggcgcggatcgggtgcggtgggactatcgtgggcagaggaagcttgttccgctgggacaatggatgcccaaggtggccgtggacgcttacgtcgcccccgaggccgtgctcgccggccaggtcaccgtccacgacggcgcctccgtctggagcggcgcagtcctgcggggggacctcaacaagatcacgctcggcttct

SEQ ID NO: 270345 - DNA, 396 bp, Zea mays
cccacgcgtccgctcgcggccactctccttcgagccgtccgccgctcccacccccaccagtgccaccactcgccagctcgccacttcctcccgtctcctcccttgcagaggcggcgcgtaaaccccgatggccgcctctctcctccacgcctccgccgccgccgcctcgctcctgagctccacccagcacgcccgcgcgggcgccgccgcctttcaccccctcgcgtgtgccccatccctacgccttacgcgctcctcgttctcgaccaatcgccacctcgagatttcactccgggcgatctcggccagtcgccgtttcgcggggaggggggcacccgggaccgccacgttgtcgccgccctagcgggggagcaaacccgggggtcagaggtgggg

SEQ ID NO: 270346 - DNA, 402 bp, Zea mays
aaagcaccacgcacgatcgccttcgccaaccgcgccgctctctctctctttctctctcgcacgagccgcgccggcgccgcctccacgcgcgcgggagacagagaccacagccgcagccaccgacgggcggaataggaatggtggcgccggggggaggagcaggaggaggtccgttgcggtggccggcggcggaggagcttgacactgtacggaagaaggtggtggagattagtggaagggatgaacaagaggttatggttgctgcttgcccctacagaatttgccctttgggggctcatattgatcatcagggtggagtagtcacagctatgaccataaattatggagtactccttggtttcgttccctctaatggttctgaggttttacttcattctggtc

SEQ ID NO: 270347 - DNA, 534 bp, Zea mays
aataaccgggcggccggcctttttttttttttttttagctgtaaactcacaaagcacttttatttatagacggcgccacgaaaaaaaggacggaacaacacgtgactgacaaggcgcagtaacaagagtagaaacactttccggtggcgcgcgcgcttctgaggaagccaagagtccaagactgaaagatcaagcagctcactccgccgccgcctgctcgacaaccatcggcagtgactcctctttctccctccctttcttcccatgctcctcctcctccttcccaggagaggacggcataatcagggcctcccgttgcgcacgcaccagcttactgaactccttttcgcgagcgccgaacgcggcggcgatctccggccctagcatggtacggagcaccgaggaggcgccgaccaggaactgcggccggttgcggcgcgccgaggtggtgaagccgaagaactcgaagggcccggcccgcgccgccacctggcagaaggggaagtagcgcgggatccagaacacgtcgccggg

SEQ ID NO: 270348 - DNA, 856 bp, Zea mays
aaacggccgccttttttttttttttaaaaatacggttcaaataaaccttgaatataccagcaccaaatttcaggcattagtaccattaccgacgagctgtctggctcagacatgcacatgttctcagatctcaaccaaaactgtaagtcaaaactcccaaaaccagtatagctatcattttctcctttttcttttaccacggtgctatgaatttaccaactccgaaaaacagtatgtaaatcatcttccccatccaagttgggattggggagaagccaattaaggcgcagatgaactagcctacttattaaggctaagatgcgtttagggcatcaagttgacgctggagctcctcgagatcatcatcatcatcaatagcgctggaactcactggagcagctggtcctgcgtatgaatcagcgtctggaagctcacggacaagaccttctggtaggatatctggagtgtttcgaatgcttgatgtctcagtttcttcatcatcaacaacactaatattccactcattgtctaggtggacaggacattcattttctgtggatgcttcagcttccatcttagtcttcgctgctgcatctctagcaggtttggattccatatattctttctgtctgtgaacacatgctggattcgagcattgtggatttggcctcatttccatagcagggaaataatccttaagtgagttatatcccaagtaaggggaaacttgtccaaagttcaacaaatatttcagagcattctggaccaggagacccgcaacaacacccattgtagttggcaaagaggcagcacaaacacccggacgcgtgggcggacgcgtgggcggacgcgtggg

SEQ ID NO: 270349 - DNA, 498 bp, Zea mays
aggcaaacatcacaggtccattcaagggtgaaacaggatgaaatgttgtagcagaatttataacacagaggctactatttgtttgtggaaatttaaatgtgcaggaatctggctactgtaggcttacacaacaatgcagtctgtttctgttaaggaacgcaggaaggaactatcagagaccaacgatcgttgggtggtgttgtggctgtgcctcttcagggctgtgccccatcctcgtcggcggccgaggccgtgtgagccgggtacctccacatgatgtcagcccaggtgctctgcccgtccgtcacttccttcaccaccgaggccacctcgtccacatccacgcggatctggtccttgctgtcacgatcgcgcaccgtcacgctcgtggtgtgatcaaccgtgatcgccagggggacaccaatctcgtccgtccttgcgtaccgttttcctattgtattacctgtcatgtcgatgatatgtgaaatcccagctgct

SEQ ID NO: 270350 - DNA, 590 bp, Zea mays
ctccaacccgaccacgctgcgcctccgccttgatacccagctgagcggggcaagggaggaatggggaagggtacgggcagcttcggcaagcgccggaacaagacgcacacgctctgcatccgctgcggccgccgcagcttccacctccagaagagcacctgctcctcctgcggttaccccgccgcccgcatccgcaagtataactggagtgtgaaggccatcaggcgcaagaccactggtaccggaaggatgaggtacatgcgccacgtgcctcgccgtttcaagagcaacttcagagaagggactgaggctgctcccaagaagagtgctgccgctgccaactaagtctggatgttgctatcaagaacctgataagctagaacattggaacattttgcttgagttgtacttctgaactatttgcccgtaatactctggatgtgtactggtttatagtgctttgaattaaagtcagacgccctggtggcttgatggttcttcttttaattatttggtaccacagtttgatgatgctcatgctcgcatggaaacatttgcgccctgtacggtattagaggagaaagagagct

SEQ ID NO: 270351 - DNA, 559 bp, Zea mays
tggagtgtgatagccatcaggcgtaagacaactggtaccggaaggatgaggtacatgcgacacgtgcctcgccgtttcaagagcaacttcagagaagggactgaggctgccccaaagaagggtgttgctgctgccaactaagtgtggtcttgctgccatcaagaagcgctagaacttgagactttttgattgaattgtacttctgaactatttagcccataatactatgcttgaattaatttcagacggcctggagaggtatgatatgtatctttttggtgagaatggttcagcacgctctagtcttgaaaaaaaaaaaaaaaaaaaaaaaaaaaaaaaaaaaaaaaaaaaaaaaaaaaaataaaaaaaaaaaaaaaacaaaataaaataacacaaccaaaaaaataaaaaaaaaaaaaattatacaaaaaaaaaaaaaaaaaaaaggggggcgccccaatttagggaccttgtaccccgggaaaaaatttcatcccctgacacttggggggtacaaattttccctaaaggggtaagtttaaaacctgggggaaataag

SEQ ID NO: 270352 - DNA, 324 bp, Zea mays
tcgccgtttcaagagcaacttcagagaagggactgaggctgccccaaagaagagtgctgctgctgccaactaagtgtggatgttgccatcaggaacctcagaagctagacgttggatctttttgattgaattgtacttctgaactatttgcccgtaatactattacagtactggtttaccgtgtcttgaattgaagccagacgccatcttctttgggagcgtgatttatatattaccccagttttatgctcaaaaaaaaaaaaaaaaaaaaaaaggaaaaaaaaaaaaaaaaaaaaaaaaaaaaaaaaaaaaaaaaaataaaaa

SEQ ID NO: 270353 - DNA, 1104 bp, Zea mays
gcgcgaaaagcaacgttctgtgcacattttatacatacaatgatataaatggcactgcactcttcttagtgacccgtttgatcatgatgtcgtgctacaaagcatattgccggtaccagctgcctacaaaatttcctcgagctgcctatcaaccgattattccacccaatctttacacacccccttaaatgtacacaagaataactcaaccagccaccaggaagcagcatttgccacttccgagtttgaacagaacgaccttgtgtactgtacacacaaaaaacatgcacaactcagatagtcagatcaaagttctttaattgtgtcaccaacgattgcatgctctcgagcttttcgctaagctgcctgatgtcctcggcacggttttgatcctcagtgctgcttgcctgagaaatcagtgccatacatttggccttggattcggaaatctcgccttgtaatgaggaaatagttgcttccagtgtggttttcgaactcatgacgtctgcaatggcttgcatagttggagtccgaggagtgcctatgctaccaaaactgttctgcctgctgagcctcctgggtgaaaagatattgtccatgcctccacttcctaggttacgtagttgttctatagttccttgcccaagagatttgtcaagtttaaggagacgaagaattccagcagtgatcctccccattgcatcagcctcagatctgcaaagcatcacaaggtgctctagttcttcttttgttgcaaccgcctcgattggttctttgacagaaaatttgacattatccattgtccatttggcaccctcaatctcgtcttcgccaatgaccatggtagcttcgacatcaactccatggtcaccaacagaacttgaactattaaaatctctgcccatctcatgattgtttgatggtccttttttagtgcactgatctctcagacgaggttttattgcctgcaaaccttcaattccagccgtaaagcgttccactggaaatgccttttcgggtgacacctttcttctgcctcccaatttaagtcggtcactgctcttgccagagatatgtagattcctgaaggttgaatgccagcgc

SEQ ID NO: 270354 - DNA, 1359 bp, Zea mays
attttaatttttttttttttttttttttttttttctttttttttttttgtttctttttttattagcagaaaattcaacagctgaaattaataggtgtttttgctgcatcaagtttgaagtggtcactgcaaatgatgtgtgcacaggcttcaagcaaagtttcagtgtccaatggcatgctagtggccaaaattggctacagatgtataggaaccacattgtcttggataggctacgtgtttcaacacaagcaaaagatggcatcatcatgcagtgccatagatgatgcagtcaaggtaagattgatacaataccccaaaaaaaacagaaaacaatgtgaagatagttaactacggtatggaaggcagccatcatctcctcctcccagcaacagcagcaggtgcccgttgtgctccaggttggccctgccctgcagcttcctctggtatgttggcagctgccgtaacagcattcatgacaataagaccaagcggaatgatgtacatccaatatttagcccagaaagatttctcaggtggtttcattacttcgccaagaccattgtcagcttctattaactgatctgcaaacgatggggttcttggtgcctgttcagcagtctttaggatagtgtaagagctgaatgtccattttgatggcaatttcataggcctagggtattggcacccatcaacagagccataattgactgccaagatatttacaccatccatgtggataacaatgtgttcatccaaactgtcacgtggaatgcatctagctctgattgaagaaacaacatgatgtttctttgtagtgtccaacacattagatggcagcctaattgtataaaagccatcttcctgaagcacttttttgaacgccgctttatcatcctcagtaaaatcattccttgtaaagcgaagtttagtgagggtctgcgtgccgtgggcgaaggtcttgaggcgggccgagaaggttccagctgagacgaagcccttgccgtcgccaaggtcgtgctcgagcgtgaactgcactgcgttggactcgcctgacccgggcaacggcgcgtccgctgatctgcggcgggaggaggagaccaccggggccgccggcggggagggggcggaggggcgggcgacgacgccctcgaactcttcgtcatcgttgaggaggagctcgtcggaatggaaggaggcggccccaagggagagggagaggaggagagcggcgaggacgagtagagcgcggcgcggcggcgccatcgcgagaaggcggaggaaaaggcgaaaaggcttggagtggactcgggagagagatcggacagatcggtcgaggtttccacgccgcgtgggacga

SEQ ID NO: 270355 - DNA, 274 bp, Zea mays
gcgcgaaaagcacgttctgtgcacattttatacatacaatgatataaatggcactgcactcttcttagtgacccgtttgatcatatgatgccgtgctacaaagcatatttgccagtaccagctgcctacaaaatttcctccagctgcctatcaaccgattattccaccccccttaatctttacacaccgcctcccaagatatataaatgtacacaaaagaataactcaaccagcccccaggaagcagcatcccacgcgtccgcggacgcgtggg

SEQ ID NO: 270356 - DNA, 469 bp, Zea mays
gacagtcccaaaatgcaatatgttcataaaattcaaaggatggcacaaagacatccatcaattcgactcccatttcagatatagccatcaattcgattccatttcatcatcgtttcaatccagcagtagacacccaaccacacaatacattttcaggactccacgatcgccaagaaacagatcaggaactagagcagcacatacggcgaccaccactcagtgcttgttcctcggcgaggtcctccttgacccagccgccgacaagggcgccgcggctgttgcagcagccttcctctttggcgacgccctcgccggcgccccagcagcgggtacagaagccttcctctttggcgaagccctcggcacggtagccttcctctttgttgacgtcgtcgccggcgtcgcggcacccggcttctgcttgctctccaacaccagctgctgctgctgctccgcggcgatgcggtcg

SEQ ID NO: 270357 - DNA, 2318 bp, Zea mays
ggccgccctttttttttttttttttttttttttttttttttttttttttttttcccataagaactctgatgtcaaactctttacaccgatttcacacagtaaatacaaggctccttcaaatgtagataatattctactgtacataaggcaaaagaaataccacacctaagtccaaatccaaacatgtcagatcatgcaccagcaacgctactttgggttatcagccatttgtgccatcaattcagtagcactcaagacaaacggagcaatctacagagaaataaatccaacaaaacaggtttccacactaaaaataacccgggataggtgcatcgtcatcccacagttccttgaattcactcatgtccatctctgctgactcctccggcatcttttcttgcatagcctgagactcctgcatttttgacacgacagtgaaaatcctctggtactgatctcttgcttccgggtactgagccatggacttcactcttgcaagagctttctggagccgttcttcagtctgttttcgtccttcttgcagaaaatcgtaatcatctccagaagacttattttggatcgaactgctacttgttccgccactactgctctccactgatccttctgtagaccgaaacccacgtaacccagcccctctacgcctccaacgcaatataactttctccacgatcccaacagaccaaactattttccgataatgcttcctcacttggtgacctcgcacatgagcctggatcttcacaattcgctgcctaataagaagaaattcctttctccccttccatcctctgaacttattttgtatgcgagttgcagcagagtgcagaggatcaagctgccctgacttgggtggcttgacagaaaggagtgagagagcacgctcatcagacatgccacctttatcctcatattgagccgcttgctttctctggaaggattgcaccctgaaaacttgatatatccgcgcagcagcttgagtagcatttcgaacaggacccaatgaatctccacttggaggctgcagtgaatctctctcggtaacatctccaataccaggtagaccagatatttgagccatattagcttccttcagattaaggacctgaagatgactggtcagagaacactctgccaagaaaccagatattccctgttgaccattagaagatgcaagatctgctggtgtacttccagggaaatcgggagttgggtctgtcaaagctccaggagctgctcccagtgcaataagcgcaactacagtactctctcggccacaaaaggcagcccaatggagtgcagtccagccatgaatatctctgaaattaatattcacgccagcagcaagtgttggccttatagcccaatcatatccaagtgcagctgctaagtgaagcacgccctgcccttcatcatctaacacactgggtcccttgccacccataccaactttatttagaagccagatatgcaattttccctttatcaagttttcagcaaactgatcctgctgatcagcagtagaaggctcattatcaacagccaactttagcaagttggaccactcatcgttgctcgccatcagtgaacttatcttcctgcttaagtcaaccatctccagagtaggattagatacagttgcctggtactcatccggtccaagggataacaacttgtcaaggcgtatctggaaataaactttgtttgtttcaccatgtggactaggagcatccatgtactgggagacagttggtcgaaattcaaactctcgcacttcactgcaggccaacctgttggagcaggtgatataaaaaggtactcgaccaggtttatgctgcggtgagtaacagatgagagtaccatctgctaggatatttgctggaacttcagcgtctccaaacatacatgaccacttggatctctcggtgatttgactgtcattcaggatgttaccagcaactaaaatcttagtctttgaacctacatatgtccagtttggagaaaagtcaactatactaaagagctggtcctgcgagagcatcggggaaacagtgaactgatccagtgcctcatggtttgatgcttcgatgatattatttgcttcttcactgctccagaacgccccagaactagattgaatttgagaatcttccacttcaggaagctctttgctcatccatcttgtaaaactgtcagttttcttaaagctgtcttttaagatatcagatagattggatgactgtgtcttcaaaaatggatagccaatggctgcctccagagaaccatcaatttcttgtagg

SEQ ID NO: 270358 - DNA, 628 bp, Zea mays
ggccgcccttttttttttttttttttttttgcacatttctttttttccttttattgctgagggtgtctgtacaaaatgaaattatcagttaatgcatttcctccaccagatttacaccttggcatcttctctaacaaaaccccaatatttcatgtccaataggatgaaccattgtatcttgacaacagatcaaacggtcaaatgtgttagcaacgagcactttgtatcagcaactagtttaactggttggagctacaccggaaaccctttctgtcctgagaactactttggctaattctctaatgcctcagtaggaccagtaaaaatcatctcgatgcctaaggccaaattttttttgcagaaacgaaaagggaaattgtcaatcaggcatcaagcaatgttccctacagtgatgaaaagatctggtcgagcaactcagagagcttgcggatctttttggtcatttcactgctctttgaaaagtaagattctgcatttgaaagcatcacagtggtatcatgtctgacagcccccagagttctgtaatatttgtcgctaatcttgccttgatcacctcaatagaaaattgaacaggaaacctgttgatgaaatctgacccacgcgtccg

SEQ ID NO: 270359 - DNA, 862 bp, Zea mays
ggcggaggttctatcagagatagaggaggaaaaacttgaatctgaagaagtagaggcagaagaagcgagttctgaggatgagttagatccatttgtaaagtctgatcctaagttaccaagagttgtccgaatggcaaacctctgtgttgttggtgggcattcagtaaatggtgtagctgaaattcacagtgaaattgtgaaacaggatgtgttcaacagcttctatgagatgtggccaactaaatttcagaataaaacaaatggagtgactcccaggcgttggatccggttttgtaatcctgcattaagtgcattaatttcaaagtggattggttctgatgactgggtgcttaatacagacaaactggcagaactgaagaagtttgctgataatgaagatctgcattcagagtggcgtgctgctaagaaggctaacaaaatgaaggttgtttctcttataagggagaagacaggatatattgtcagtccagatgcaatgtttgatgtgcaggtgaaaaggatacatgaatataagcggcagctgctaaatatccttggaattgtctaccgctacaagaagatgaaagaaatgagcacagaagaaagagcaaagagctttgttccaagggtatgcatattcggtgggaaagcatttgccacatatatacaggcaaaaaggatcgttaaatttattacagatgtggcagctaccgtgaaccatgattcagacattggagatttgttgaaggtcgtatttgttccagactataatgttagtgttgccgaggcgctaattcctgccagtgaattatcacagcatatcagtactgctggaatggaagctagtgggaccagtaacatg

SEQ ID NO: 270360 - DNA, 1125 bp, Zea mays
tcggacgccactgtcgtgcgcccgagccggtgcatttccccggcacacacctttcgatttttgccagtacacacccccaactgcctccccacttcgcaccgccaccgtctcccgaccgcgacgccggcgacctccgcaccgcatcgctccagccgatcgttccgagatttgttgatcaaagaaccatggaaggatcgttccagttgaatcccaacgccagtcctttcatacctggattgctgggttcatctgcacaaaaagccccagaaaaacaaggagggtcatcatcaaagggagagccttctggtagcacctttgatccttctgagtatgaggaaaatgacatggatgaacttgctctagtcaaaatggtcttttcaatgttcccaaatgtctccacggacttcattgatgagttaatcaaggcaaatgattttgacatgaatctgactgttgatatgctttatgagctgaactcacaagatatggttcatgatgattctgaggttatcaatcattttcatgatgattctgaggctaccaatgaccttcatgatggcaagggcgtacctggtgctgattaccacaagactgtggtgcccgagagtagcagcaacatgaatcaagacctgcagaacgaggagtcagcaacaacttctgatgtgaaatctgtgctgccaaagttctcacagatcaatttgcttcacaatgacctgggcctgcctgatgatgataagtcagcggggacttctattgcaaattgatctttcatatcaaggcgctccgtttgacccgagttagtgggttatggtgtacatactagttgcacccagaagtagaagtgtggcttggaaggtcaaagcagcggaagcaactgtcccatttccgtttgccggaccagttaactgtttctggtggttatcctgactttgaaatcccctgttcagctccttttgggccgagtagttagggatttctggtggggggtgtcatgagtttttacatctagttcgctcttcaagactgagtagtacttggtggtcatcctgattttgcatgtcagggttagctgtgttgggtttggtacccagttagtacaaacaatccaagttatggcgtggctgt

SEQ ID NO: 270361 - DNA, 677 bp, Zea mays
attgctgctgggtgctggccgttgcgggcgaaccgaaaatcacgggcgcgagagatcggagcacggcatgtcggaggagcagttcctcgccgtggcggtggaagccgccaagagcgccggcgagattattcgcaagggattctaccagaccaagaacgtcgagcacaagggccaggtggatttggtgacggagacggacaaggcctgcgaggacctcatcttcaaccacctccggaagcacttcccggaccacaagttcatcggggaggaggagtccgcggcgctcggggccaccgctgacctcaccgacgaccccacctggatcgtcgatcccctcgacgggaccactaatttcgtccatggtttcccatttgtatgtgtctccgttggcctcaccattgggaaaattcccactgtcggagtcgtcttcaaccccatcatgaacgagcttttcacggcggttcgtggaaaaggggctttcctgaatggctctccaattaaagcatcatctcaagatgagttagtgaaggctcttctggtaacagaggctggaaccaatagagacaagaccactgtggatgatacaaccaacagaatcaacaggctactatacaagattcgatccatacggatgtgtggatcattggctttaaacatgtgtggagttgcctgtggta

SEQ ID NO: 270362 - DNA, 1776 bp, Zea mays
aaaagaactccatctgcttctggcttaccagaagattatcctaaggatagtgacttgcaacaaccggttttagatagcttctcagtggtttcatcttttcaagacaatatatctgggaagaaaactgtttctggtgtagcaggcagtgagattctttctttaagtttagcaactcctgattataaacatgaagatgctttctctgaggaagcagtatgcagaacaaagaattatactggaacttcctcggtagatcccaggcatttagacatggaggggcactctgtttactccgagggaggtactgaaaaatctaatctgcaagataatcttgcatttctaagcgctgagagtggaaaagatgaacctattatttgccatgttgagaaactggttgacgcacatgcttcttcagaaccttatacataccaaggtccttgtcaagatctaggcagacatgaagaacaagagagctgcatgtctattcctatgcaagccaaagaaagtgtaggggttttgaggtctagccacacgaaagggtcagttacagcagcccaaattgatttggcaggtgatgcccatcttattgtgagtgataatgctgctgccaagcaagtgtttagtgagaagaaagaggaaacaaagtctatctctacttcagatattgatatcctccatgaaaaatcatactccagtggacacgatgaccatgctgcttgtgctgccgaaactcagttctaccatccacagaaagcatctatatctgatggactacatttgggtcctagttctttgcaagtagaatcactggatgctttggatagcgatatactgtatgttaacacaggagttctcgagcagcatcataaagagggttactatgaacccagtgtctaccaaatcacttcaggcatttgcacaatgtctgaagctgaaccattcgaagttttagaaactggaaaagatgtaaaaacgccatctaagctagatgagcaacttaatcctgggttggacggagatgaagctgagaaacacagcttagactgtggtacagacaccagtcctgtgatgagcaagagaaccctttcttcaccaggatcaggaccatgccagcagtatgtaaatgaaagcaccaccagtacacagtcgactgataatcacccaaacgacctacccgctccgagatctcctgaacaatccgcgtgttttcagaatgacaacgattcgggttcagtaggcatttgtcaaagcaacacgcgaagaagtatatatgaactctgcggtaagctgcagagtttcaaagtttccagcgccgtaaaaggaagctacgtagctatgggtgcacctcgtccgaagcctggggacagcacgagccgatctgcagccgcgctgctcaggaacatagagaacacaactgctgttaaagctggccgtcctcctgtcaagccaaacgccgatggtaaggactcgtctaggcgagccctgcagcccataagcggaaggcctgacagtaggtagttcggcggttccttaataagtgtgtcgtgtttgtgttcaaccctttgttgaaagccaggtccgtgtatttgtgcagcttgttgtcatgaagctgctgtgtgcgtgtcatttaacataagcgtgcgtgaagttgtgttatggaagtggctaaatatgtgttcgttaggaggtcaattggcttgaactgaccctgctgttccgtgatttctgtctaaataaacttgtgtggctgtgtcaaaaaaaaaaaaaaaaagttaa

SEQ ID NO: 270363 - DNA, 935 bp, Zea mays
tacatttacgagggtttcgacttctccgccaaccgtgtgacacgcagcatagacgagagcctcgcccgactggggctggactacgtcgacatcctccacgctcatgacatcgagttcacccatcttgaacagattgtgaatgagacaattcccgcactccagaagatcaaggagaatgggaaggcacggttcattggcatcaccgggttgcctctcagcatctacccttatgtcctcgaccgtgtagcaccaggctcggtggacgtgattctatcttattgtcactacgggatcaatgacacctcccttgttgatctgctcccctacttgaagagcaaaggtgttggggttatcagtgcttcgcccctctccatgggtcttttaacagataatgggccaccggagtggcaccctgcaccagatgaacttaagtcagcatgcaaggctgcagcagatcactgtagaaagaaggggaaaagcattacgaagctagctatgcagtacagcttaatgaacaatgaaatctcgacagttcttgttggaatgaactctttggaacaggtggaggagaatgtggcggctgcactggagttgtcaacatcaggcatcgatgatgaacttctgcgtgaagttgaagcaattctcgagcctgtgaagaatctgacatggcctagcggcatccaacaagcctgacggccagaagcagctttgcctaactggagaagctggcatgatgagcgtataactgctgttcgatgcagtcaattgtgcacaccagcatcattggctgctgattgcaaaatttgcaatgcccgtatggtcattgatggaaggggacgattgggactgttgggcttttatggttgggccctgtggtaatttagacatgtcgaataaacgcgatacgagcaatgaaagatcgatgctgatcattg

SEQ ID NO: 270364 - DNA, 520 bp, Zea mays
cccacgcgtccgcccacgcgtccgcggacgcgtgggttaccctattacctttctgctcgtggtgagtgctgacaccacctcacgcacacaagccgccggcggcgaccagaccgaccacctcgcgcactagccttgctcgcttctcgtcgccggctcgttgccggctcgtcggcacgatgtcgtcggagcctccacccgccccttctgccgccgcagcagagggactggctgctgacctttccgccgccaccctcagcaagaagcagcagaagaaggacgccaggaaggcggagaaggctgagaaggcggcgcagcgccagcaacagcagcagccggccgacgccgaggacccatttgcggccaactacggtgatgtccccgtcgaggagatccagtcaaaagccatttccggccgcttgtggtcccagatcggcgacctcgacgactcctctgcggggcgttctgtgcttatccgtggagccctgcaggctattcgcccggtcagcaagaagatggcttt

SEQ ID NO: 270365 - DNA, 533 bp, Zea mays
ggggaacagagtaactttatttggtataccaaagtatcgttatgttgcaactccaaccgttcgtgatggaaagcataaaccttgacaaggtaatgactaatgagttatgcaaatgagtaatgacatattccctcaattttgtggtgatcgtgggttccaacaatgtgcaatgcaactgcatcttcttctgaaacaaagggaaaagtctgcataccaacacaggctcagagcatggtgagtggtggagacaaagcagatgctcaagatgctccccgtgctagccatcacgttcgttcccagtgcgatgatggcacatatcaacacactgttcgtcaagcagggcacgacgctagaccctttctctagaagcccccaatccgcaccgctgacggcaccactgtattccaattacatgatttaactggaaagtatcatccattcattgcatgtattttgtaccattcagtcatagaccaacactatggcaaattagtacctgaacaatagcctctttcacttgcttttcatcgcac

SEQ ID NO: 270366 - DNA, 565 bp, Zea mays
gcgggcgcccttttttttttttttttttttgactccacataccaaacatccattattagttaaaaatggtttccatctggttcattatttttgtggggggcgtcgcttgccaaattaccggacatggacatcttttttaggcaccatgagacatctactttgcacatatataaaaaaaaacttgcagcgctactgcacttcataacttcacgctgaaatgtggaccactaactaaacattactacatctttacttacggaaatttacattaccactgtaactatgggcaaggagaagcacagctggacagacagtttttatacttgcagtttcttatgtacacagtgaactcttgtatgacacaacacttactggacctaatccttctttcttcgattcatttcgacaaatggactgtacaattgaggttcgatgcattgccaagatagggcaagaactgaggaaccaatatgatcaataaccctgaggaaggtgtactggaatctggtacttgcatctataccctcacttcaactatatccccatcctttagctctgtttgggg

SEQ ID NO: 270367 - DNA, 1348 bp, Zea mays
gaaaaaaccggccgcaatgcaggcggagcatgggagaacttttacaacatggtcttttttttctcttctctgttttagcttgatgtaaaaaaaaagggtctatggagagttaaatgaaatgaaacaagaacagcatgaacatgtcagatgcgagacctacacaagccaccaccaccgcaaccaggaagggctcgctccgctaacctaggcgcaagggcaaccacgaacgacgaaaacacacatccaaactgggtttgctgagccgcttcagcttcgtacttctcttctgcccagctgttcaagccgaagatgccacaccgaacccaggcaggagccatccactcttcttcgcgcgctgcacataggaaaggaacttctccctggcatcaggaatgtcgagagccagatcgtcgagcccatccctgacccttgagaaccccttggtcatctggttgatggttatgatcccttcaccaaagcactcctgcagcaggttcagggtcctctcgttcttcttctccattgccatcacgagcgccttcttgacaacttcatggttgaagaaagacatacccagctcacggatgcagttgcatgcctcccctacatcgcctccactctcatactcctccaggagctttgttatcttgtccttggcatcctccacagcccatccggttccaccgccccagcacctcagaagcctctcaccggcatgacgggccgacgcaagggagcgtgccatgttcaatgtttcagccccactgcagtttggtggaagcttgctgctaatctcatccaagtttagaggtgcgagaacgtcatcaatcacagccctggctaggaacagtcccagctcatctgaggcatccaatatgtccagcgcggtgtcttctgcagattcaaggagcattacaaatcccttggcgatgtcttcagacgagaacagctccatgcttaatgaagggagaagaaccgatgccatttctttctccctgttcttgcggtccatagcaattgttatgagcttcttgacgaagatcggattgtattccggataaccaagctctttgacactacggatgacctctgttgtatcatcagagaaaaagtattcgtgtattatggatacagcctccctcttgtacctagccagcttctcatgttcatcgtcttcaacgcttccgttgacacctgagttcacataggaagaatctaaccatccctcagaaatggcttttgataccaacaactgaaattcagactttgcagatggtatgtcaagaatgagatcatcaagactctcagcaacacggtggaatcctttcatcatcggacgcgtgggtac

SEQ ID NO: 270368 - DNA, 758 bp, Zea mays
ccggacttgaattcccggtgcgggcgcccttttttttttttttttttttggtggacgaaacagtccaatggaggcgactgtaccgaaattcgcattacactgggttactgattcatctggtatggaaaacatgatgggatcaaaatctacccccaaaacacgttcaagcatcacagatcccgcagctcttgcggcaaaacccgagagtgtctttggtcccaaccatgtacgtcgggttcctgtggcactccccgatagcagcccatctagggcagagctccttgtcgtcggagcacggcgcgtccgtcctcacgtctggggggttgtcgaacgacctgacgtggatccatttcgtcgccgaccatttctcgccctcgatcaccgggcagctcccgtggagactgcctgtatcggctgtggcgttgacgtggaggttgaagaacagtagcgcgtctcctttctttggcttcactgccaggccagatcttgaacactccgaccaagtttcgtccttgtactgtaaatggcttccctcagcgtttggaaatacagtctctccacctttcttgacatctgtgaggtacataaggacggtcgcaactcgctggccgccgagcttcaggttgtttctgtcgtggaaatagtcgaagtgggcgtcatacttctggccggtttcgtagcgcaggacctggagtgattcggcgttttcttccgggagaaatgtccaagcagctacgcgtttctcaatcgcagacacg

SEQ ID NO: 270369 - DNA, 619 bp, Zea mays
gcgggcgccctttttttttttttttttttgagctcaagttcaaacgggcttggcttggctaccgatgcgttaaatgggggctggtgcatcagatttcgtgcagaatccaacagcctcataaccacccttcctggcacttccataaaccaccacatatacgtagcttattttgattgaaattattgctgatactaacaaaattatgttcagtgcaacacctaacaagctgatcttggggagaactaagccaccactagtgcggccggtattgtgttatcaaatgtatctcgtagttcaggcctcattgaacttgaagacgcaatcataaagtcttcctcctaaaaattgggcgacctcaggatgcttaaccattccaatcttgatcgagtcacatttcatctgcgcatataggttagtttcaattgctcttcccatgccttcgagcaccaccaggtcagcatcatttgccataaaggcaagctctggtgatacactagacaagtcaattacaggcagatcgttgccagagttggcaacaaggaggccagatgcgtccacatttgatagcttaccatctgcatccttgagcttgtttataatctcaacaagctctggatac

SEQ ID NO: 270370 - DNA, 454 bp, Zea mays
ttgaacattggtattgcactctggttggctgctggtggtgatggttgggtggatggaagtatatgtcgtatgcaagaggggtctcgctataagtacaggtcgagatctagagtccttatagtgggttctggggctgatgagcagtgtgctggttatggtagacatcggactaaatataggcttggagggtggttcgcattggatcaggagatgagactacatgtgcagagaatatggaaaaggaatatgggaagagatgataggtgcatctctgatcatggcaaggaggcccgtttcccatttcttgacgagaacgtgataaaaactttgttggaaattccgttatgggaaattgctaagcttgatgaacctgttggaaggggtgacaagaagatcttgagagaggttgcaaggctgctgggcctacaagaagctgctcttcagccaaagcgcg

SEQ ID NO: 270371 - DNA, 1497 bp, Zea mays
gacaaattgagtcgacggggaaggaaataaagaaggggaagagcacgcgccgccgccagcaccgcgtccgccatggccgcctcctcccgccgcgcgtctcaattgctggggtccgcggcctcccgcctcctcctcgggcggggcttcgccgcggcagccgccgcggcgccctcgccggcggtcttcgtcgacaagagcacccgtgtgatctgccagggcatcacggggaagaacggcaccttccacaccgagcaggccatcgagtacggcaccaacatggttggtggagtgactcctaagaaaggtggaactgaacatttagggctcccagtgtttaactctgtagcagaagctaaggctgaaacaaaagccaatgcatctgttatatatgttccaccaccatttgctgccgccgctataatggaggcaatggaggctgagctcgaccttgctgtctgcattacggaaggaattccccagcatgacatggtgaaagtgaaggctgcactaaatagacaatctaaaactcgattgattgggccaaattgccctggtatcattaagcctggtgagtgtaaaattggaatcatgccaggttacatccacaagcctgggcgtattgggattgtatctcgttctggtaccttgacatatgaagcggtgtttcaaacaacagctgtaggcttggggcagtcaacttgtgtaggcattggtggtgacccattcaatggcacaaattttgttgattgccttgaaaaatttgtcgatgaccctcagacagaaggtattgttctcattggtgaaattggaggtacggctgaggaggatgctgcgacattcatccaggaaagcaaaacacaaaagcctgttgttgcattcattgctggacttacggcacccccaggccgtcgcatgggtcatgctggagctatcgtggcaggaggaaagggtactgcccaggacaaaatcaaggcactcagagaggcaggtgttaccgttgtcgagtcaccagcgaagattggctctaccatgtttgaaatcttcaagcagcgtggaatggtagaatagacgagtggtacagtagagagacattgagaaaccgcattttgatgctcatgggcaattgcgagcaattccttccatggcctcaaacaaaactaatgaggctaccttttcttacgtgccttctgtttggaagatggcctgacttcacctggatcaccttccaatgagctcatttccaataagacgtttcagagccatggacatgcttggagtcaatgtgaatgcctaatttcgaatttttattgtttacacatgtcaatctaggtttaccaatctgtttccttgtattatattgtgcggtaaattgccccacagctgaggacgattgctttgctcggtgtcatgtttgagaaaatttcttatttggccctgattgaaacttgtctatcttggcccttgtcctgaaataaaatttcttacctattcgacctc

SEQ ID NO: 270372 - DNA, 473 bp, Zea mays
acgttcatccaggaaagcaaaacacaaaagcctgttgttgcattcattgctggacttacggcacccccaggccgtcgcatgggtcatgctggagctatcgtggcaggaggaaagggtactgcccaggacaaaatcaaggcactcagagaggctggtgttaccgttgtcgagtcaccagcgaagattggttctaccatgtttgaaatcttcaaacagcgtggaatggtagaatagacacagtggtacagtagagagacattgagaaaccgctttttgatgcttgcgggcaatcgcgagcaattcctcggtagatccttctccctggccacaaacaaaactactgaggttttcttttcgtacttgtcttatctttggaagatgtcctggccttcttcacttggataacctttcgctgagctcatttcaataagacgtttcggagccatggaaaaaaaaaaaaagaagggcggccg

SEQ ID NO: 270373 - DNA, 1707 bp, Zea mays
tgtcccaagcccaccgaaccctactcaccaacccacccgcaggagaacggaaaaaaaaaatcgtgtcgaggcgactttcgccgccatggcaggcgatcccccgacggctgcggagaaggagaccctggtctcctccttcatcgagatcaccgccggccagaccctcgagactgccacccagttcctccagatgacgagctggcacctggaggaggcgctgcagctgttctacatcgacggcgaggccgcccacaccgccgtgcattcggtggacccgtcgcctgcggcggcggccccgtcggcactagcggcagcggccggggcggaagaggcgatgaggttcgctccacccccggcggctgcactgggcgatgcaatgttgcatggatttggggtcggggaggacgacgacgtccgcgcgcctctgcctgtgaagagggagactctctacggcgagggcatcgtatccgtcatgcgacctaatgcatcagctgcatttcgtaactttgaacaagaagcaagacaatctgctgtttgggactctgaccagaatgctacatctagttctggtgataatcttgcttctttataccgtccacctttttctttgatgttcaacggaccctttgacaaggcaaagttagaggcttcttccctggacaaatggctattaatcaatttgcagtcgacagcggaatttagctctcacatgcttaatcgagacacttggggaaatgatgcggtggctcagttgattcggtcaaattttattttctggcaggtttattatgacaccagtgaggggaggaaggtatgcacctactaccatttggtgtccatgcctgctattctcctaattgaccccgtcactgggcaaaaaatgcatgcttggaatggaatggttcacccagatcgtttacttgaggatttactaccttacctggataaaggtccgaaggagcaccatgcagctcaacctcaaaagcgcccaaggaaagttgatccggaagcttctacgggcaagcaaggcaaaatagctgtagaggatgaagatgaagagctagcacgggcagtagcagcttctctagaggagagtaaagaagtcattgaagcatcagacgccagtgatgacatggttgaagctgaacccgaggaggaaaatgagcccaccctaaacaccaagcctgattaccctcctctccctgaagaacctacaggaagcagggaccttctctgcagggttgcgattcggctaccgaacaaccggaggatccaaagaaacttccttcacacagatcctatcaagctcttgtggtcattctgcgctcctcaggtcgaggacggggagaggagggctttccacttcgtccaggcaattcctggggcatcccagaagctgcagttgggaagcgacctaactttcaaggaagccgggctggccaactcgatgatcaacctcttgtggggctgagacgcttccatcttgcgcttggaaggccttgatcaggacgtgtccagtgtcctccggatgggcttgaagatccagttatttttcattccttgaggattaactcttcatattctgctccgtcccctgggctgcatgttgaaatgctcctttttgccgttcgttcttgtgtctacacatacatcgctgtccccggtagggttttgcctcgatttagtgcacatatctatcagagattc

SEQ ID NO: 270374 - DNA, 633 bp, Zea mays
gcttcaagctccaccagagaagacagcccgccgaggcgccgacggccgcagccgcgggcggactcgtgagtcgcgagtacgccgctgcagttcccaactcagggtgcctgcccgtaacctacccaagagcggtcccgccatgcgcgcggaggtcacccagatcagcgccctaaccgccgtggccgcgcacgtgctctgctctgcgggccttgctgccgcccacgccctcgctggccgcggcgcgctcgtctccgaccccgcgctcgcccttcgccttctcatggtctgtgaagcgcccatagtcatcgcagtgttcagctacctccggcgtgatgctaaaagttgctcgtttttcagggctgttgcaagaggattgatcggcttgcccgtgggagcgttccttaatgcatttggagcaatcattcttggggcacctgttggagtcaagtactggatagctactatttactggtcgcttgtcatgtccctgttcacgtttgttcccgcagcatgtgtctttggagcatccaggatcgattggcaggatgtgctttctcactccatttatttcacgccaactgatgttgagaactacatgatctctgcaccttgccatggagctgtgctaggagc

SEQ ID NO: 270375 - DNA, 666 bp, Zea mays
cccacgcgtccgcacgtagatagcagcagcagcagcggagctgttcgacgaaatgccgccatggccgccgtgcctccagcctaccctcaccaccgctcgccgcgccaccgtattctccaggacgaaatgtctctcttctacccccgcctctcctacctacgagcaggggcaacacgaggaggagccatcgttggtcgttgtggggggcggcgcggcgggcgtgtacgcctccataagggccaagacccttgctccgcacctcaacgtcgcggttgtggagaaaggcaggttcttgtccaaggtcaagatctccggcggtggccgctgcaccgtaaccaagggccgtcaccttgagcccatgggactggccagaaattatccaagggggaacaaggagctccgaggatcctttctttacggctcacggtccgcaggataccatgcgttggttcacagatcacggtgtaaagcttaagacggaggacgatggcagagtcttccctgtcactgacaattcactttaagttgtagactgtctactgaacgaagcaagaaggcttggggtttctctgcatgccggcaaaactggggctagtgcatctgttgctcaagacgggaagtttggtctcaaggtggagatacgtactgccgatcttgttgagtata

SEQ ID NO: 270376 - DNA, 826 bp, Zea mays
tttgtcttgaagtaaaatctgttctgacagaagcacctgcaggcccaggagatgattcatatttttggatctcaacagactggcttcgtcagtgggcagataatattactcccccctcttccatcgacaatggtgcaattcaatgtgaacatggaaaggttccagcatctaaagtcacatcaatgaagcggttatcatctgtagcttggcagaaattacattcgaaatatggagggggacctatattgaacagtgacgatttttgcatggagtgtcttaaagacggggcaaaaagtgcagtatctgctgatgtttaccgtgaacgaagagcatcattgaaaacactcgcagaagcagcacttgctggtaattgtccagatggtccttcttactttatctcaaagacatggttgactcattggctgcgtagaaaaaatgctgatatcccttctgatggggataacggaccaacaagtgctttaagatgttgccatggggattttctgccagaacatgctccaggggcaaaacgggtatctgtaccagagatcctctggctatttctctaccaaacagtccatgagaagaaggctgatgatacagtgacttttccatcagatagtcatccatgtgaaacctgcagccgagaattgtctgatgttgcttcttgggaggttaatcttagagcagtgaaactcaagcaacgacagaaccatgaaagttgatatctgggaaaagctttgcgcttcatcctggtcaaaaatatatttggtttcttcatttgtttgcagaatggagagcttatattacagcaactgggaaaaca

SEQ ID NO: 270377 - DNA, 1391 bp, Zea mays
cctcgagccgacccgcggcactcgcaagcagcgctcattagtcactagggttttaaactttccccccgatccgcctcgccgccggcgtcgtcctccgccggaaatccaccaccctacacccagccggagacgactatggtgggtttcggctcgatggcgggctacgggatccagtcgatgctcaaggaaggccaccgccacctctccgggctcgaggaggccgttctcaagaacatcgacgcctgccgcgagctgtccgccattacgcgcacctctctcggcccgaacggaatgaacaaaatggttatcaatcacttggacaagctgtttgtcacaaacgatgctgccaccattgtgaatgagctcgaagttcagcaccctgccgctaagattctggtactggctggtagggctcaacaggaggagattggggatggggccaatctcaccatatcgtttgccggtgaactgcttgagaaggctgaggagctcatcaggatgggcttgcatccaagtgagatcatcattggctacactaaagccatcaacaagacaattgagatcttggaggatcttgttgagaaaggctcagagaacatggatgtgagaaacaaggaggacgttgtgttgaggatgagatccgctgtcgcaagcaagcagtttggccaggaggatatgctgtgccctcttgtggctgatgcctgcattcaagtttgccccaaaaatcctgcaaactttaatgttgacaatgttagagtggctaagctacttggaggtggtttgcacaattcttctgtggtccgtgggatggttctgaaaaatgatgctgttggtagcatcaaaagggcggagaaggcaaagattgtcgtatttgctggtggtgtcgacacctcggcaactgaaacaaagggaaccgtgttgatccattccgctgagcagctagaaaattatgctaagactgaggaagctaaggtggaggagcttatcaaagctgtcgctgactctggtgccaaggttattgtcagtggagctgcagtgggtgacatggcacttcatttctgtgaacgttacaagctgatggttctgaaaatcagctcgaagtttgaactgagaaggttctgccgtactactggggctgttgcaattttgaaacttagccaacccaatgcggacgaactagggtacgcagactctgtttccgtggaagaaattggtggtactcgggttactgtcgtcaagaacgaagatggtggaaattcagtggctactgttgtcctgagaggcagtactgacagtatactagatgatcttgaaagagctgttgatgatggcgtcaatacgtacaagtcaatgtgcagggacagtaggataattcctggtgctgctgcaac

SEQ ID NO: 270378 - DNA, 273 bp, Zea mays
aggattagcctctaggacgctgccgccgtcggccgtcctccgccctccagcccgctgctcgcccgaccggagtgaggcggcgcgctgatggagcacgggtcgctgacagactcgacgtcgtcgactttctccatcatgtacgaggaccacactctcgccaactctgccagattcgtcctcaaccaggaattatgtagctccaagcctccaacaaacaactgttaccggatgatggcaacaaaagatgatgctcagaggatgaaacaagcagca

SEQ ID NO: 270379 - DNA, 409 bp, Zea mays
agcggtccgccctttttttttttttttttttttttttaaaagaaatttaataacttatattaatctctaatctaaaaaatgctggatgtggtacacaagatggcagcaatgattcaatgtagcaaacaatcagcacgacttgaaaccatgtaagttcatataaaagcattgagccaaccttctcagatagcctctcccaagcacattatactactgaaatggatctaaagatcactcatgatagtaactagtaaggaacttataaagataacgaagctaagaacacgatgatgcttcagccggctcttgctttttgtgctcatcgccttcattctgttctccagaaacatcgctggtgtcactcttggattccacaacctctgcatcctcaacgttcagtccatcaact

SEQ ID NO: 270380 - DNA, 533 bp, Zea mays
aaccgccgccgcggccgcttagaactcctgggatgcggacccgatgccggccttgcccttcccaccggccttcttggccagcaccgtctgatgaatgttgggcaacacacctccggcggcgatggtgacagctccgagcagcttgctgagttcctcgtcgttgcgcacggcgagctggatgtgacgcggcacgatgcggttcttcttgttgtcgcgcgccgcgttgcccgccagttccaacacctctgccgcgagatactcgaggacggcggagaggtagacgggcgcaccaccgccgacgcgctcggcgtacttgccggccttgaggtagcgcgcgatgcggccgacggggaactgcagcccggccttggtcgaccgcgacacagccttggaccccttgggcttgcccctgccgccgccggaactcatattcgcctcttctcgtccgagactactctctcgcccagtctactcgacggaatcgcggacacgctggtatggcggtggtgcccacgagtccgcccacgcgtcca

SEQ ID NO: 270381 - DNA, 1227 bp, Zea mays
  unsure (1)..(1227): unsure at all n locations
ttnnttttttntttttttttttttnnnnnnnnnnaaaagacaaaggcctgctataagccccatattaattgcctgaatacttggttcacgaacaaagctttgttaacgcatgtaattgcgataacaaaatttcagtgacaagaatcttacatcatattggaggcagctattgctaaaggttgactttcacgtgctgggcacaacagaatgcaatcgctacagacttttgtaacatgtagttatttatgaaggacgagtgaaatgtttccgatgtgtcggctaaactgtcgaatcaccatccggttcgccatatggatggatggctttcgtcgccatcattcatgtactgaaataagataggtctaagaagagaaagccatgttaatcagctagctgaaaaaggctcaagcagggattacaattctccttctggtccagagagcaaggacatgataccgaacagcaggaagagcactccgcttgacagttcgaccatcttctcggatatctgggaggctaggctctttccaccaagaacagcagcagtagtgcagagtgcttgcgctatgattccacccaggacaacaccaaatgggttttcatcagcagccaagccaatagtagcaatctggctcttgtcaccccactcaccaaagaatgtaatagaaaatgcctttatgaaaattggtgagaagaactgcatgagaaatggtctttgctgtttcttcgtatcatcgttcgccttagatttatttttagattcacctttattactcttaaaggcagcatccagctctgcttcaacttcagccaattcttccgaatctccatcttccttgaagccttcccacaatgaccaaatgccaaatagaaagaacaatagagtggtcaaatgatgagtccatttacgtgaaatcagatttggtgcaacccaacctagagaagccgatagagctgtcatgactattagtgcagttaaacagcctgccaatacgagtttcctgggatggcgcatagccagaatcgcggcggcgaagaaggtcttgtccccgatctcggagagcaccgtcatggccaacgacttggtgaaccccccgagcagagacggcgccattttggaggagggcggcggggcgccgcgattccgatctcgcgggtcgcgggatagaggtagagcagccgaggcgaggcgctgcgggcgtgcggacgcgtgggcggacgcgtggg

SEQ ID NO: 270382 - DNA, 442 bp, Zea mays
caacttcagccaattcttgtgaatctccatcttccttgaagccttcccacaatgaccaaatgccatatacgaagagcaatagagtggtcacatgatgagtccatttacgcgaaatcagatttggtgcaacccgacctagagaagctgatagagctgtcatcactattagtgcagtcaaacagcctgccaggaccagtttcctgggatggcgcatagccaatatcgcggcggcgaagaaggtcttgtccccgacctcggagagcaccgtcatggccagcgacttggtgaagcccccgagcagagacggcgccatggcggaggagggcggcggggcgccgcgattccgatctcggagggggcgcggggtagaggtagactggtagagcagccgaggcgaagagcagggtcgggtgagaacgcgcgcgcggggccgtcggatccg

SEQ ID NO: 270383 - DNA, 536 bp, Zea mays
tcaaccataatttagtcattccagctcactaatcaaatccaagttcgagaaatccctgacaatcggatcctttagggctagttagggagattagatttcttttttttttttaaataaaccattatggtgttattgcaacctaattaacatataaacctgtcacatgtcgaacaatttggtgctcgatacatagaaaccatgaccaataaccaccgggacatcaaaacccaccctttcgctttgcttcaagaagagtggtgcaatcctgaccgtttcacttggagatcttagcagtgagctcccgaaccagcttcgcggcgaccatggctgtcatcccatctaccgtgtcacgctgtgggttgaactccaccacatcagcggcgacaacgtcaccctgcaaattctggaggatgttgaggacattgcggaaggagaggcctccaggttcgatgtgagagaccccaggagcaaacgctgggtcaaggcagtccacatcaactgagacatacacaccctttacgccttccccaagtttc

SEQ ID NO: 270384 - DNA, 837 bp, Zea mays
cctgctaatttccaaactaaccattagaagatatagctcatgctaaaacccggcgtgaactgattcttgtgctacggaatcaagtttctgtgactgcgcagaacagaaacaaccaaaactacagagtacagaccccttgtcgctaagacaagatttttacgatgatgaaactacccgatggatgaattacaatgaaatgactgcgatatggtggcagtctatcatatagaaatctaaaacgggtattcatgagtccatctccacgggttctgtggctgtaaaaattggttccttgcccctaatcactgcagtcatcatcaatttaccagcatctggaaaatcctcgtgctgcatcaacacttcttcaactgacaaacatttactctccaaacctctcagatgtacatcctctttctttacaggcagaacatcctcaaaggtgccgtcatacaccacagcatccgggctgtaacacaacctggaagctttgaagaggacagttgcttgaagagattcttcgatgacctcgtcactccaaccttctgacatggatgcctctgaaagctttacccaatcatcttggtcagttgcattcatccagcatgcctctagaaggcctctgttagaacttcggaacgatgagcttgtcaaagcaaatacttcaaaggctttaagggagagctctcggtctctcttcaagcacatctcaatcagttttgagggcccaaccaaggggttggtaaatttgactggggaatattttcgatcatgttgaccaatttcttcctgcagttttagaatccgaatgtcggtttctaccggtgcaaccttcacttc

SEQ ID NO: 270385 - DNA, 850 bp, Zea mays
atcaacccctcccctcgtattaggccccacctccccgcgcgccctaaccctagcttctcgattcaactctgcccgagcaagccgaattctctcccgaattcgctcgcggggagcacctgctacctcgcgcccgccttccgtcgcgcggattcggtgccgcgcctggagatggacccgatggacatcgtcggcaagtccaaggaggacgtctccctccccaaatcaacaatggttaagataattaaggagatgcttcctcctgatgtacgagtggcaagagatgcacaggatcttcttgttgaatgctgtgtagagttcatcaatctcctttcgtctgaatcgaatgaagtgtgcagcagagaagagaaaaaaacgattgctcctgagcatgttatcaaggctctaagtgatcttggcttcagagagtacattgaggaggtttatgctgcatatgaacagcacaaacttgatactttggattctccaaaagctggcaaattcactgggattgagatgacagaggaagaagctgttgctgagcaacaaaggatgtttgctgaggctcgagcaaggatgaataacggagcccccaagccaaaggagccagaacaagaaccgccacagctaccacaagcacaaccccaacttcagctgcatactgaaccacagcaacccatgcaatctcaagttcagttgcattcgcaaacacaacactacctccaacctcaactgcagctccactctcagccgcagctgcaacccctcagccgcagttgcccccacaattgcaggtccatcagcagctgcagcaacccccacaagtgcaggtccagcagcagcccgaagtgca

SEQ ID NO: 270386 - DNA, 530 bp, Zea mays
gctttctacactcagacttggataatgggcgtcgatccacaacccaattcggggagaaacttccatggtttcttgacgcacttccatcgagtgattgttctaaaggcggaaaaggagcttattcaacaagtttagacctcagtggttatgaaagtggcattatacaagcttcggcattccgaacataccatactccccttaacaagcagagtgactatgttaactcgatgagagctgcccgggacttcagttctaaaatgtccagagatttgcagatgaaaattttcccatattccgtgttctatatattttttgagcaatacctgagcgtgtggaagacagctatcatgaacatatgtgtttgccttggtaccatttttgttgtttgcttcatagttaccagcagtttatgggcttcagcaataattttaactgggctagcaatgatagtcttggatatgatgaaggtgatggccatccttggtattcaactcaatgcaacctctgttgtaaaccttgttatgtcgata

SEQ ID NO: 270387 - DNA, 499 bp, Zea mays
ccgtctccgtctccgattctggatctgcccatgccgtaacccgcaggctcccggcatctcgttctcgcctccaaaattcaccttcgccgattgccgccgtgggccgccgcgacggcgttgcggacgcctcgtaccacctccgtcgcattctccgctgactcccccctcggtggcgtcccactgcgctcctcaacagcctgctccattcccacgccacctcctctcgctccgctgcgaccaccgaggaccaccagagcgggacgccgcggaactcgtcggccacgtcctggccgtcgcgcatgctgacgacgaggccgttgccctcccgggcaccctcgacgcggagctcgcgcgcgtcctgcgagcgcacggcgccgctcaggcggcgggcgcgccggcggaggaacaggttgaggtaggtccagaacagaggacagggagggacctaaaatcaagcccaaaggcccaaagcccgaagtttcttttcttccccgcaaag

SEQ ID NO: 270388 - DNA, 440 bp, Zea mays
cccacgtgtccgcaaaagccaccttcgccgattgccgccgtgggcctccacgatggcgttgaggacgcctcaaccaacctacgtcgcattgtccgctgactccccccttggtggggtcccactgcgctcctcaacagactgctccattcccacgccacctcctctcgctccgctgcgaccaccgaggaccaccagagcgggacgccgtggaactcgtcggccacgtcctggccgtcgcgcatgctgacgacgaggccgctgccctcccgggcaccctcgacgcggagctcgcgcgcgtcctgcgagcgcacggcgccgctcaggtacgccttcacctcctcgtaggtgctgtcgttgtcggagacggagccgtagcgtgagtagcgcacctcgacgccgggctccgagatgttgatggtcacgtaggggtccacgacgtt

SEQ ID NO: 270389 - DNA, 2147 bp, Zea mays
  unsure (1)..(2147): unsure at all n locations
tttccgctctacgcgtccgcccacgcgtccgcggacgcgtgggttccgcctctcctcccgtcctctcgcaagcccacaccacacctgcagaaatcacagcggcaggtgcagcaaaaatctccatgcccccgctcggctagatctccgacgagccggccccgcgctgtagcagattcgctccccgatcccgaccgatgggcggcgaggtgccggagccgcgccggctgagccgcgcgctcagcttcggctgcggcggcgtccccgaggaggcgctgcacctcgtgttcggctacatggacgacccgcgagaccgggaggcggcctcgctcgtgtgccgcctctggcaccgcatcgacgcgctctcgcgcaagcacgtcaccgtgggcttctgctacgccgtggagcccgcgcggctgctcgccaggttcccgcggctcgagtcgctcgcgctcaaggggaggccacgcgccgccatgtacgggctcatccccgaagactttggcgcctacgcggcgccctgggtcgccgagctcgccgcgccccttgactgcctcaaggcgctccacctgcgtcgcatgaccgtcaccgacgaggacatcgccgtgctcgtccacgcgcgcggccacatgctacaggcgctcaagctcgacaagtgctccggcttctcaacagacgccctccgcctcgtcgcgcgctcctgcaggtctctgagaaccttgttcctggaagaatgtataattgaggatgaagggagtgaatggctccatgaactcgctgtcaacaattctgttctggtgacactgaacttttacatgacagaactcaaagtggagcctgctgatctggagcttcttgcaaagaactgtaaatcattgatttctctgaagatgggtgactgcgatctttcggatttgattggttttctccaaacctccaaggcactgcaagaattcgctggaggcgcttttttcgaagtcggagagtacaccaagtacgaaaaggtcaagctcccacctaggctatgcttcttggggggtcttaccttcatgggtaaaaacgagatgcccgttatctttccgtattctgcgtcgcttaagaaactggacctgcagtacactttcctcaccactgaagatcactgtcagcttatcgctaaatgccccaacctaatggttctcgaggtgaggaatgtgattggggatagaggactggaagttgttgccgatacatgcaagaagctacgaaggctcagaattgagcgtggcgacgatgatcctggccaagaagagcagggaggagtctctcagataggtttgacagccgtagccgttggctgccgcgaactagagtacatagctgcctatgtatctgatatcacaaatggggcgctggaatccattggcactttctgcaagaatctctatgatttccggcttgttctacttgacaaacagaagaagataacagacctgccacttgacaacggcgtccgtgccctactgaggaactgcgtcaaacttcggaggtttgccttctacctgagaccgggagggctttcagacgtaggcctcggttacattggactatacagtgggaacatccaatacatgctgctcggcaacgttggtgaatctgacaacggattgatccagtttgcaacgggatgcaccaacctgcggaagctcgagctgaggggctgctgcttcagcgagcgagctctggcagtggccgtgctccagatgccctcgctgaggtacatatgggtgcaggggtacagagcctctcgaacgggccgggacctcatgctcatggccaggccgtactggaacatcgagttcgtgcctccccgtcccgagagcgcttatcgggtgatggcagatggacagccttgtgttgacactcatgcccaggtccttgcgtattactcccttgctggaaggaggccggactgccctcagtggctggtgactttgcaccctgcgtcactgtaaatacgtcaagctgtcccgagtgtggtttttgtaccagctgcttgtgtaccgtaataaactctagtactgtagtggtggaggcgtagtgcaataaagttgcagttgttgcttgtaaaagtaaccaaaaaaaaaaaaaaaaaaaaaaaaaaaaaanaa

SEQ ID NO: 270390 - DNA, 488 bp, Zea mays
tcccacgcgtccgcccacgcgtccgcccacgcgtccgcggacgcgtgggtggctccatgaactcgctgtcaacaattctgttctggtgaaactgaacttttacatgacagaactcaaagtggagcctgctgatctggagcttcttgcaaagaactgtaaatcattgatttctttgaagatgggtgactgtgatctttcagatctgattgggtttttccaaacctccaaagcattgcaagaattcgccggaggtgccttttttgaagttggagagtacaccaagtacgaaaaggtcattttcccacctaggctatgcttcttagggggtcttaccttcatgggtaaaaacgagatgccagttatctttccgtattccacattgcttaagaaactggacttgcagttcactttcctcaccactggagaccactgtcagcttattgctcaatgccccaacctaagtgttctcgaggtgaggaatgtgattg

SEQ ID NO: 270391 - DNA, 446 bp, Zea mays
ctctcgaacgggccaggacctcatgctcatggccaggccgtactggaacattgaattcgcgcctcccattcccgagagcgcttatcgggtgatggcagatggacagccttgtgttgacacccatgcccaggtccttgcgtattactcccttgctggaaggaggccggactgccctcagtggctggtgactttgcaccctgcgtcactgtaaatacgtcaagctgtcccgagtgtggtttttgtaccagctgcttgtgtaccgtaataaactctagtactgtagtggtggaggcgtagtgcaataaagttgcagttgttgcttgtactagtgaatctaatcctaggaggttgttgccctgtgctttcttttccccggaattgtatctttgctccactgtaaatatcagaaatggcctgtgctagatgagttggtgctagatccgttg

SEQ ID NO: 270392 - DNA, 467 bp, Zea mays
tgggtgcaggggtacagggcctctaaacgggccgggacctcatgctcatggccaggccgtactggaacatcgagttcgtgcctccccgtccccaaagcgcgtgtcgggtgatggcggatggacacccttgtgtcgacacccatgctcaggttctcgcgtactattccctccctggaaggaggccggactgtccccggtggctggttactttgcatcccgcgtgactgtagatacggcaaggtgtccgagtgtggttactgttactaccagctgcttgtgtaccgtaatgaactgtagtgccgacgtactgtagcggaggtgtagtgtagtgcaataataagttgcggtgttgcttgtactggtatctagtcctaggaggatgtatactaagttatgctgtgctttcttctccccggaattgtactctgtggcttcccctgcccataccaccagtggctttttgctag

SEQ ID NO: 270393 - DNA, 919 bp, Zea mays
cttttcgccgccttcctccgcctctctctcccctctcctcttctctcatctcccagcgggaaccgcggccggccccacgcgcgggcatgggcatgcatgccgtgcccgcacgcaagcactcacccacccactgcgggcgctcgtcgatcgccactttcggccccggctaaatcaggatatagaccagtgagggagcgacaagaggcggaggaagaggaggtggtgccggtggtcgtgctgctgctgctgctcgtggtggtggctgtgcaggtgcggagatcgtcgatcgatcgctgcggttcgtcggcggcggtgtcgagatgtcgatggacttcggtgccccggcggatgaccccaaggctttccgcaacatctgccgcgaccggatactgaaggacctgcttaagcctgacaaggataaggagaccaaaagctcatggaaggttcttataatggacaaattcacggtgaagatcatggcttatgcttgtaagatggcggaaattaccgatgcagggatttcgcttgtagaagatctgttcaagagaagggagccaatgccttcaatggatgcaatctactttcttcagccactggaagaaaatgtcataatgcttctatctgacatgtctgggagatgcccactttacaggaaggcatacatcttcttcagctcaccgattcctaaagacttggttacttacataaagaatgacagtagtgtaataccacgcatcggtgcactaagagagatgaatttggaattctgcactattgacatgcagggctttgtaactgaccatgatactgccctgattgatttatacggtccaagtgaacaaaattccaaaaagttcaacgatactataagcacaatggctactcgcattgcgactacatttgcatcattgaaggaatt

SEQ ID NO: 270394 - DNA, 2157 bp, Zea mays
  unsure (1)..(2157): unsure at all n locations
gcctgacgcgcacgtgcgagccacgctgccctctcctgtcaaaaccctagtttcccaacagcgtcggctcctctctttcccaccgccttcttccactactcttcaccctcccctcctccccatcgcgaactcacaagagaaccaagtagacgagggagaaggagatggcgaagaagaaggagaaggcggtgaacgtgtcgggcaagccgcggcactcgaacgacgtcaaccgccccaatgacaagaagggcgcgggcggcggcgccggtggcgggagccggtccgcggctaccgtgcggcggctcaagatgtacaagacgcggcccaagagggaccgctccgggaaggtgctcaggaacgattttcagtctaaagagctccccaacacccgcatcgagcccgaccgccggtggttcggcaatactcgcgttgtgggccagccacagcttgaaatgttccgggaggaactccagagtcggctttccgacaacttcagtgtcatcctgaaagaacggaagctgccactatcgctcctgcaagatcatcaaaagcaagcgaaggcacatctgcttgaagttgaaccttttgagcatgcttttgggccaaagggcaagaggaaacgtccgaaactaactgctcttgactacgaatctttgctgaagagagctgatgattcccaagatgtgtttgagcaaaagtatgcttcatcaaagttgccaagggaggaagaagaagatggcttacgtgatctagtgaggcatacaatgtttgagaagggacagagcaaaagaatctggggtgaactatacaaagttattgactcttcggacgttgttgtgcaggtgttggatgccagggatccaatgggcactcgatgctaccatctagagagacatctaaaagagaactgcaagcacaaacacttggttttcttactaaataagtgtgatctaatccctgcttgggctacaaaaggatggttaaggaccctttcgaaggactatcccaccctagcattccatgcaagcatcaacaagtcatttggcaaaggatctcttctgtcagttttgaggcaatttgctcgtttgaagaatgacaaacaagctatttctgtcgggtttgttgggtaccccaatgttgggaagtcatcagttattaacacactacggtcgaagagtgtctgcaaggttgctccaatacctggagagacaaaagtgtggcagtacatcactctcactaaaaagatatttttgattgattgtcccggtgttgtatatcaaaacaatgattcagaaactgatatagttctgaagggtgtggtccgggtgacaaatttggcggatgctgctgagcacattggtgaagttcttaggcgtgttaaaaaggagcatctccaaagagcgtacaaaattcaagattggtctgatgataacgattttcttgtccagctgtgcaggaccactggaaaacttctcaagggcggggagcctgatctgacaacagcagccaagatggtacttcatgactggcagaggggtaaaatccccttctttgtaccccctccgcagcaaagcgacggcggtgcatctgaaagtgctgaacaacctattgggattaccaaagaggacggagtaagcagcgacaggactgccgcagccatgaaagccattgcaggaataatctcgtcacagcagaacatgaatgtgccctgccataaggaaaacaatgcagacaatgaagacactactgaaaatgcagataacgaagacattgagagttcagataacgaagacaatgatgacatcgagcctgcagagcgatctgagtgatctttgggtacagatgtggattattagagttgatatgtcaaggctaattaatttgtcagcccaggtgttgtgtagctacttgaccatatcactggcgtgccagaaaaaaaggcatcatgttgagttgcactttttgtaactatcgtacctgaatctttgtaatagggcaagatcagttttgctaggtacctggttgtatcgggatggttatctgtgctgtctactacaaatacagttacatctattttacttaaatcaagtggaacttatctctaaatttttattgcggacaaaaaaaaaaaaaaaaaagggcggccgcnccgggaat

SEQ ID NO: 270395 - DNA, 1298 bp, Zea mays
gtttggatccgaatgaatcagataacaatgggcatacagcactgcatatagctgcttccaaaggagacgaacaatgtgtcaagcttcttctagactacggagctgatccaaatcctagagactctgaaggaaaagtgcctctatgggaggcattatgtgacaagcataatgcagtgatagagctattagtagagagtggtgcagagctatcatctggagacacggccttgtatgcttgcatcgctgttgaggaaaatgatgctgagctgcttgagaacgttatccgttatggcggcaacgtaaacagctcaatgaaagacggaaccacgccgctgcatcgtgcggtctgtgatggaaatgttcagatggttgagttgttgctggaacacggagctgacgtcgacaagcaggacagtaatggctggtcgccaagagatctagctgatcagcaaggccatgatgacattcaggctctcttcaaatcacgaaaagcacacaggaagcatgcctcaaatggcagagtggcacctatgctgatagggagattcaacagtgagccctcgatgccagatatgagccatgaaaacgccagagtacgcagcgaagttgttccgcagaagctcctccgaaagagggtgagtttccagaattctcttttcggcgtcatctcttcgtcccacgcccaccaggacaccggccgtctgctctcgaaaggcctcgctggaacagagggtccaaattgccgtcacgactccctcatcagggtgacaatcagctgccctgagaacgggaggaacgccgcagggaagctcgtgcgcctaccgcggtcgatggccgagcttctcggactaggtgcaaagaagttcggcatcaagcctgccaaggtcctgacagttgggggtgctgagattgatgaggtggagcttatcagagacggtgatcatattcttctcgtcagtgatgaatgggtgccagatgttgcacaaattaggcctaaacaataagtgagccagctgtggtgctcttattgcaatttgacatgatatgggaaaacatgcccctgtgaccctgtgtgcatgtccccatttaaactgaagtgtagcttatgatggttttgaagctgtaggatgcatccagcttggaaatgaatttgtagtcagctggtctgtatgtagtttcgtcatctctttccatgggaagggattcacaaaatgtaattacatgatttcttttttttcctgtctttagatcaagctttctctggaagtgagaaatattcgtgagtcatgaattttgag

SEQ ID NO: 270396 - DNA, 619 bp, Zea mays
attatgagcgattcatagatgttactctgacaagggataacaacattaccactggacagatataccagtctgtcatcgagaaggagagaaggggtgattatcttggaaagactgtacaggttattcctcatgtcacggatgcaatacaacagtcgatacagtcagtgtcttcggttcctgtggatgggcagactcgtccagctgatgtttgtgttattgaattgggaggcactgtaggtgatattgagtcgatgccattcattgaagctttgcgccaattatccttttctcttggcaaggaaaatttctgcctcatacacgttagccttgttccagtattgggtgtagttggtgagcagaaaactaaaccaacacaacatagtgtacgagaactgagagccttgggtctgactcctgatcttctagcatgccggtcagcacagccactaataggatctgttaaagagaagctttcacaattttgccatgtcccggtcgagaacatacttaacatccatgatgttccaaatttatggcatgtcccacttattcttagaaaccaaaaggctcatgaagctataatcaaacaactaaaccttgctagatctgctggaccacc

SEQ ID NO: 270397 - DNA, 464 bp, Zea mays
tcatgatccaattctctagatgcaaaatatgcaaaaaaaaaatctattgcctgactccttcaaaccctgcacaccccacctgccttgtaccaaattcccctaacccgtcggtctgctatcccatctgagctcacggcgatcctctttctcctcatcggcatgagcggcttcttggcggtggtcggcaacgtcggcacctttctgctgtgggtgctgttcctggtcttgcagaccgccaccaggatcgtcggcagcctccttgccagctcagctgagcagcaggatgaccaccatcaggaatcggcggcggcacggcgcaggtcgccgccagcctccccacatcccgaactttacgagccggcgtctgcgtctctggcgcagctgtgggacccaccgcctcttccgcaccttgcttttgctcccgctgcggatgagagtcttcgtcctccagtttcggcggcgtg

SEQ ID NO: 270398 - DNA, 492 bp, Zea mays
cccgtccgttccgccactgcggcctacagttgaaggccggtaccttttgccttcctttgggctgtgcctctgcatttaatcgctgcggttcttaatcctcgccaccggacctttgtcgctcacctgttgcccccaagtccaaatgatgaagtccctcctcttctccgcccaccccacgtcgctgctcctccccgctccccgccttcgcaggctcctccgcctccgcgccgcctcctctgcctccgcctccgcgccgccccgagccgaccgccgctcccccgggacgccttcgcgccgaccatcctcctccctctacgcgcgccccagcctcctcgacatggagcgggatcgcgccacccgccgcgccgatgtcgacgccttcctcacctccctcggcgttgacccgggcgaactcgcgggcctcgagctcccagtcaccgtcgacgtcatgcgggagcgcgcggagcttttgggttacctcgggctcaccca

SEQ ID NO: 270399 - DNA, 405 bp, Zea mays
cacatactcctccccagcgcacacatcgatagggaattcgatctatatatcctcttcttctcatggcggtgttcaagacgacaatcgtcctagtcctagtttttgtggtcttgtcttcaacgtctccgtgctacaaagccggacgaagctgcattggcggctgtgatcaacagctagatgcgacaccatgcgtggaccctctcaagaacgacgcggaccactgcacgaccgcgacatgcgctttgcaatgcctatccgccaagcacaagaccaagtcggcctactgcaagcatgagggcagcaaatacgagtgctgctgcccgccatgagagcaaccagctcttgagcagcggttgtgtgatactctctattaatttattttttctgttttgttcactatatttt

SEQ ID NO: 270400 - DNA, 675 bp, Zea mays
cggtcgcgtgggcggacgcgtgggtcccgcgccggtctaccgtcgcttgagctctctcgctggcggaccgcccccctcatccctgcggtcacgcgcgacctccatgacctccaccgctgcagaaggtgcaggaagcggtagcttgaaccctccgcattcgaaccctagcggcgatggcggccctaggatccggtcgccgccggggaaagggaataagcccgttgctctcgccgacatcactaacactgggaagcccaacgccgccagatccatcaccgtccccgacctcgttaaggagaacaccaagttgctgactctgctcaacgagaagacaaagattattgacctcagcagggttgagatatacaagctccgtcttgccctgcaagcatcaaagcaacagaatctacaccttacacaaaccaattcgcagatgcttgcggaaataaacacagggaaagatcgaattaagatgctgcagcatgagctttcttgtacaacagcactgcttaaagtaaaggattcagagcttgatagaaagaaaaacgctggtaatgtacagaagggagttaaatctcaagtcttgaaagccaaagcttccacagtagccatagaggctcaccacgttgttgacttatttaccagtggtggttgaccccatgtggtttatatcta

SEQ ID NO: 270401 - DNA, 1236 bp, Zea mays
tcacccacgcgtctaaatatcttcttaccccaaccccgcccgggaacccttgcggcgtcgcactcacactagcgaccaacccccaaccccagaccttcctctccggcggcggccggcgcgcgcgcgagggagatggaccgcccttccggcacatcgtaccagcgcttcccccgcgttcggatccgcgagctcaaggacgactacgccaagttcgaactccgcgacaccgacgctagcatggccaacgccctccgccgcgtcatgatcgccgaagtcccaactgtcgccatcgatctcgtagagatcgaggttaactcctccgtcctcaacgacgagttcatcgcccaccgtctggggctcatcccgctcacctccgccgccgccatgcaaatgcgcttctctcgggactgcgacgcttgcgacggcgacggctcctgcgagtactgctccgtcgagtttcacctctccgtgcacgccaccgactccgaccagacgctcgaggtcacatccaacgacctgagatccatggaccccaaggtctgcccagtcgaccaagcacgcgcctaccagcacgcgctcggaggcaccgacccctttggagccaatgcctcgaacgaaaacaggggcatacttattgtaaagctgcgtcgggggcaagaactaaggcttcgtgccatagctaggaaaggaattggcaaggaccatgccaaatggtcaccagctgctaccgtgactttcatgtatgagcctgacatacgtatcaatgaagaactaatggaaacattgacggtggaagagagaataagcttgattgaaagcagccctacaaaagtatttgagcttgattctgccaatcaggtggtggtgaaaaacgcggaggcatacacctacgacgacgaggtgatcaagcacgccgaggccatcgggaagccaggcttggtggagatcaccgccaaggaggacagcttcgtcttcaccgtagaaacaaccggcgccatcacagcctacgagctgatcatgaacgcgatcacggtgctgaggcagaagctggatgccgtccgccttcaggacgacgacggcgaccttggcgagctcggcgcccaccttggtgggccttaggagctttgagcaagaaggaatcgccctgtggccttcctccctcccactgcctacgtaggcctatctaactgccgtgcgtgctagtcgatcgatcgaaaccgaacggttctgataaac

SEQ ID NO: 270402 - DNA, 622 bp, Zea mays
gtcagggacattgggcgcaaagtgcaatacacaaatggtcattcctcaccttactgaaaattatggagcttcaagagacccacctgagaagcaggcacccatgtgcacagtccattcttttccacacaacatcggccattgcttgacatgggcccgttcagagtttgagggtttgctagagaaaacaccaaatgaagtaaactcttttctgtctaatcctgctcaatatgctgctgtcatgaggaaggcaggtgatgcccaagcaagggaattacttgaacgcgtctccgaatgtcttgacaaggagcgatgcaatacatttgaggactgtataacttgggctcgattgagatttgaggattatttctcaaaccgcgtgaagcagcttacattcacttttcctgaagatgctgctactagcacaggcactcctttctggtcggccccaaagcgctttccccgccctctgcaattttcagccactgattcatctcacatcaacttcctcatggctgcttcaatactgagggcggagtcatttgggattgctatacctgagtgggcaaagaacactagcaagctggccgatgcggtcaataaggtttgcagttctaaatttgag

SEQ ID NO: 270403 - DNA, 594 bp, Zea mays
tcatattcttcactttactcgggtcgcaatttgggtaccagcagtggtggctactatggaggtagcggttccagttcatattactaagatttggcatcataggactttggtgtaggccctgcattttatggagctcctcgatttaagccacacagatctgtaaaagaagtgccaagcacccaagtgaggcaatgttttccaataagacatttcaacgaagccagaccatcgatttggttcgagcagtagttctgaggacgttctggcttgtttatgtaatgtaaggatttgctttatctggtcaagagttctgaacataacaaccagatatggtgttttaagtgtttcgacatgtttacttccagtgtttctataacattattgagacagatatggagtgtactttgaggtagtttctgcaattcaagttatttggggattacatcttgtgatgtgccggcaaaggccaggcttacaaaagaagttttggaatgagtgcttcttgtaaggctgttagtttctgaaaccctcccttcccttctgtcttctagaggatcaataatcaccaagacagaatgttgattggtcagactt

SEQ ID NO: 270404 - DNA, 524 bp, Zea mays
gtagtggtggctactatggaggtagcggttgcggttcatattactaagatttggcattataggacgttggtgtaggccctgcattttgtggagctccttgatttaagccctacagatctggaaaagaaatcccaagcacccaagtgaggcaatgatttcaaataagacatttcaacgaagccagatcattaagttggttgaagcagtagtcccgaggatgttctggcttgcttatgtaatgtaaggatttgctttatctgatcaagagttatgaacataagagccagatatggtgttttaagtgtttctactggtgttttaagtgtttcgacatgtttacttccagtgtttctataacgttattcacacagaatggagtgtactcccacctagtttctgcaattcaaggtatttgagattacatctttgatgtgctgccaaagatcaggcttacaaaagaagctttacaagcagtgcttcttgtaaggctaatagtttctgaaaacctttccttctgtcctcta

SEQ ID NO: 270405 - DNA, 516 bp, Zea mays
gtaaattcgtgatgaaattctggaccaccagtacatttttcaggatctgaaactaacagaggcagaagaaaaggagttgagatacaagatgaagatatatgatcttgtcaaggaacatgttgagactcctgatgatgttggtgcgtacaaaatgcctgaagcttatgacatgggcgaaaatgtcaatcaagagaagagattcgctgtggccatgcaacggtacaaagatcctaaggccaatgataaaatgaacccttttgctgaacaggaagcatgggaagaacaccaaataggaaaatcgaaactgcaatttggatccaaagataagaagccgtcttcagatgagtatcagtatgtatttgaagatacgattgattttgttaaatcatcagtcatagaaggaacccagcctgaagatgattcagataaagaagacgttgaagcaaaagatattttgaaaagggagctccaggatgagcgaaagacactttcaattttcaaatttagggatgaact

SEQ ID NO: 270406 - DNA, 589 bp, Zea mays
atgacttgtcaagatgagataactcaggtcatgattcatgaactgatacatgcctatgatgactgtgttgccaaaaatctgaactggacgaattgtgctcaccatgcttgctctgagattcgagccaatcaccttagtggtgattgccattacaaacgtgaattgttgcgtggtttcatgaagataaagggtcatgagcctgaatgtgtcaaaaggcgggctctgatgtctgtgaaaaacaacccatactgctcagagggtgctgcaaaagatgcaattgatgctgtatgggatatatgctacaatgacacacgcccatttgatagagccccatgaaatcttttcagaacctgggatacattagctattttgtgcacacctgcattgatattctgagccccttcagaaacttgtatttcagcaacctgtgtcagcaaagtacagaaattttctgctgtagccaaggcgtgctgcatcccgcgatgagtctgcacacactaacgatttaattcgtgtaattcaattcttttacacgatatcccgacaaagtttaataaattataaacgtaacctttgttggtggcgtgcc

SEQ ID NO: 270407 - DNA, 479 bp, Zea mays
tgaaccacacacgtccgtttcattgttgaacactgaactccttccgggcggcgtcccggttgggggctgtcggcacgaccgccggtagcccgggacgcacgtcgcacggccccatccctcctagcggccggtgacggcaccggcggccctttgctcggctgtgcccaagctgcgagggcgagatctacccccgcgtccgtgcatcttcgtcaggcccttctccggacgagcactcacaggatgtgttctgaagttcatgttgagggagatgcaagtgtcggacagaagggttgcaaggatataaggccgtacaaatgtgaattttgcacagttgtcaggtcaaagtaatgcctaattcaagctcacatggttgcacatcataaggatgaactggataaatcagaaatatacaactcagatggggaaaagattgttcatgagcaggaacataggtgccaagagtgtggctgttgtttcca

SEQ ID NO: 270408 - DNA, 885 bp, Zea mays
gtcggcgtccagagcgcgagcaaccaacgccgccccgctgtctccgccggtccgcccccgtccctcccctcccccgaatcgcgtcgtcccgtctcctgctgccgcggaaccctcgccatggcggaggcgcccgagaccgccgcccccacccagccgcctcccgcgccggcggcttcgtccccgcctcccaagtcggggatcccgccgcggtacgacctggacgccaagtgggacgcgtgcctcgacctctccatccgccgcgtcgcctactcctccctcggcggcgccttcgcgggcctcctcctcttccgtagccctactactcgctgggcatcagttgcccttggagctggtgtggggataggggctgcatacactgaatgctcatacttattcaatggtgctccaaagtgttcacccaaagtatcaactattccctctgcacactctgatgggggagataagtaaacccttgctgttggattggtccatctcggtggagtttttgtatgtgtgaagtaccggttgtttcatgctggatattgcgctacttgtggccatagtatgtcattgaagctagatgcgcctcacttgagagttttgttgcaaacctattccaattgtggtctgatgacccctggcaaagagcttttgcaagctgacgttgaaactgtggcttggtgaccgctaataaattttccatcttgtgaacttgttctcagaatgttttgcgccttacatgagtaatatgcttttacacattgcacgacccgtttctggggctattgcctaagggccttgttcgcttctttcggaacgacgggctggaataattttctgttgaaactattcactaatttatatagtttttgttaagtcggaccc

SEQ ID NO: 270409 - DNA, 403 bp, Zea mays
actcgagccgaatcggctcgagcaagcttcaagcatccccacacgacactccgcctccgctccgctgtctccaccggtccgcccctcctcccctcctttgcgcctccccgaatcgcatcagcctttctcctcgtgtcgcgactcgcgagcgaaaccctcgccatggcggaggcgaccgacaccgccgcagccacgccgccgccagcgccacgatggcgactttgtccccgcctcctaagtcggggatcccgccgcggtacaacctggacgccaagtgggacgcgtgcctcgacctctccatccgtcgagttgcctactcctccctcgccggcgccttagcgggcctcctcctcttccgtagccctactactcgctgggcatcagttacccttggggctggtgt

SEQ ID NO: 270410 - DNA, 1080 bp, Zea mays
ttgaagtttggtgcctaacactcagcagtcgcggtgattttgttgtaacaggttcacatgatcgttccattcggcgttgggatcgtactgaagaacaactgttcattgaggaagagaaggagaaaagattggaagaaacctttgaggctgatttagaaaacgataatgactatagatatgggcagaaagatgatgcccctgatgaaggttctgtgggtgttcctggtaggaaaacaaaagagacagtaacttctgctgatgcaatcatggatgcacttgacactgctgaggaggaactaaaacgcattaatcaacataaaatggaagagcaaattactgcgaaggcagctaaatttcaacctaatgttataatgcaagggcattcaccttcagattatgttctaaatgtagtttcaagcatccgtccaaatgatctggagcaggccctcttggcattgccgttctcggatgcactaaagctcatgtcttacttgaaggagtgggctttggttccttcaaaggttgagcttgtttgtagggtttgcttagtgctccttcagacacatcacaatcaattaactgtcacgccagctgcaagatccttgttgacagaactgaatgatattctttactgtagagtaaaggaatgcaaggatactataggcttcaacctcgccgcaatggatcatataaaagaattgttggcgttgagatcagatgcacctttccgtgatgccaaggcgaaactcatggaaatcaagaaggagcagtcgaagcggtcaagtagtaggcttgacggagatgaaaaaaggaaaaagaagagaaagaaagcgtccgctgaaagctgagccaacaaacaaaaacaaaagaatgttgtattggtgtccttaccttctgcaactactacatggacgtgctcgtttccttggttcacgagcacgcagaatttttgttagatgggtgtaatcggaaagtgcgtggacataaagatttctagaggttcgtcttgcgtatctgatgaaagggaatatatcaggttgatgaaagggaatatatcaggtggaacatatacattggtgt

SEQ ID NO: 270411 - DNA, 420 bp, Zea mays
gtttttgttgtttacctggcgccaccacccgagtgagtgacccatcccctccatcggactctccactcccaccgtcccacgaccacgaataccgccgcccccggccctttcctcggctcctcctcctcctcctcctttcaccgccaccatcgccgtcggtgcgcctcgcaggaggcgcgagaggtcggtcgtaaagcacagccatggcggcggtcaaggtggacaaggccaccaacgagctgctgctgggccccgactggaccctcaacatcgatatctgcgacgccggcaactccgatcacgggcaaggaaaggaggtgattaaagctttgaaaaaacgtattcaacacaagaatgcaaatgttcagtttcttgctttgacgctattagagactctaataaagaactgtggggatcatg

SEQ ID NO: 270412 - DNA, 309 bp, Zea mays
cgcatacccatggaggccaccgcggtgccgcgggctctgtccctccttgggccatctctgtcgacggcgccgctgctgccttggatgcgtatgaactgcttgcgcgtaccgcttggaggaggtgtcaggcggcaggggggcgtagtctgggcgaagaagacgagaaggggccgggacgacgtggcggaggagcgggtggacacgcacagctttgcgccaaaggccgtcctgcttagaaagaaaatggtgagagaggatggccaagtgtcaccagaatttgctgatgccaatgaagaaaagctgtatgat

SEQ ID NO: 270413 - DNA, 330 bp, Zea mays
tttcattttgctccgcgtcggcgtcgcatacccatggaggccaccgcggtgccgcgggctctgtccctccttgggccatctctgtcgacggcgccgctgctgccttggatgcgtatgaactgcttgcgcgtagccgtctggaggaggtgtcaggcggcaggggggcgtagtctgggcgaagaagacgagaaggggccgggacgacgtggcggaggagcgggtggacacgcacagctttgcgcgaaaggcgggcgagtctgccgagctgttccccgaggccgtcctgcttagaaaggcaggccagccgagtgggccgctcaaggcctggtg

SEQ ID NO: 270414 - DNA, 527 bp, Zea mays
cccacgcgtccgctcttctcaccagcggagagaaagcaaaccctagtccccgtcgtcgccgccggcaacccttcggatctgcggcgagcgccacagcggttagatcgaatccacccagggggagattgaagcccctttgtctgggaatttcgcggggaagcaagcggttggtgatttggtggtgaaggaggctatggggtcgtcgtcgaaggtggtgcggccggaggaggtgctggagtcgctgaagaacgacggcagcatcgacgcgctccgcatgaagatcatcgcccagctcaaggccaacgaagatatgaagaaaaacactatgatgatggtggagcaaagcaaggtactgaatactcctggagctgagaaaaagccaaagagggagttgtttgatgcacttcgacaggaactggagaccccagtccttgaaaaagcctccaaggcagtttgggagctgattctagacaatggtgggttagggaaagagataactgaaacggttgagaaagtcttctgccggc

SEQ ID NO: 270415 - DNA, 465 bp, Zea mays
aaatgtagttcttttattctgcatggttgattgactgaacaatcatttgagattctaacctgaagaatactctcgtcatttcttttttggttacttcctacaacagtgtagcgaggaaatttctggaccttgatgcattgctatcacatgcttatgatacatgcaagggccggtttgaagacaaaacacttggggtttcacaaagcactgtgtgttctgatggggtggaattggcatgttgctccagacacatctaaatcacatcactccattccatctgaggaagtaaatgccatgaggggagacctcatgctgtggcctccagttgttgtgatacataacagctcgactggtcatgaggcaaaggatactgatgcaaagattgtgtccatagaagaaatcgaaggtgtattggcagatattggagtagcgcatgagaaggctagggttagccatggaagatca

SEQ ID NO: 270416 - DNA, 358 bp, Zea mays
cctgacgccgcgaccccggccccgagctggctttgccggccaatcggctcgcccgcgccggccaccgcgccgcttcccctcgccgagatcgcctgaaaaggcaagcgaggccagcccgatccccctccccgcccccctcaagaaccaaaaaagggtgtcatttcgtcctaggatcgcagctcgagctcggtcgctctcgctcacctcgctccctactcgcctgctttccacttcctccgcgctcccgatttcctctccgattccttcgccgactcctttcttcttggcaattccgtgcgccggccatcgccccgaccgcacctgggtacatcagctacaggacgggacaggtccctct

SEQ ID NO: 270417 - DNA, 1068 bp, Zea mays
aacttctgtagcagctgaaatagtacggacgtgtttgaacatgtacaggatctcgaggctacatctgtaaaacgaccacccctcacgcggaagcggagactggaaatcgggagggagaccggagacgagaccgccggagatggagccgagatctgcaatctacagatccggcgccctccttctcctcgccgccatccttgcggaggtcgtcatccccgcatccgccatcggagacaagtgcgccgcctgcaaggccgttgctgcggagctagagattggaatttcgagtgagaagccgagaaatcacttggacttgcgcaaccgcttaaattctaaaggccagagggaggggaaggtcattgattatagggtcagtgagcttcgggttgtggaacttctggatggcctatgcgataagatgcaagattataccttaaagaagttggaatcaggcgaaaagggatgggttaaagtaacagactggaatagctttcaaactgaaaataaggcagcagcaagagcgcactccaaaaaattgtccaccttctgtggaaggctactggaggaaacggaggatgagctctctgagtggatcaaaacaacctccacagaatcagaatatgtaagcaaggccctttgtgaagatattagcaaacactgccgatctacaagtgctaccatccagattgatgatgagctatgacatgccgggggcaggtcgttgtttcgcaaaaagcaaaacaggcgacaggttggaaaatgttaaagaacacagctctagtagtccctgacaccatttagagagacatgcagctgccaattctgattgtttgtgttgcactcatatttcctgtaaacaaaagcttagactgatctgtagagaaagcaactggacatcaatttttgcataccgatgaactacagtttaaaacggccggttgaattatcatgtcaggggctataggaaatttgaatgcttctattctaaggtcttgtgtgttgagtactgagtatagtttgatgactgcatgttggtcaatgacagcaccaaagattacatgcaacccc

SEQ ID NO: 270418 - DNA, 693 bp, Zea mays
aaaccttttcactgctccagccgccgccgccgccgtttcttcgtcttcctcgcagcgccgccgctccatcttccgctgatccgctcgctcccgcctctcgccacgcaggcggcggcgctcaggcccgtgatttcagcgacggcgtcagcggcttcccctcccgtctcttcccagtcgcctcgcgccctcgcctccggtcctccgcacaccggccggtgaccctgcatccaccatgactggtgtcagcactggattgttgacgggcttgaggagggtcatggaacagcaaaggatttcaaccgctttctgcagacaatcacgagtttcgagctctactgtttctttctctgacctcgatgagaagggtgacatggaatatgatgataactctccaaattcaaagagggagttacgaccccaaggtgtagatcccaataagggctgggaattccgtggtgtgcacagggccatcatctgtggcaaagttggacaagtccctgtgcaaaaaattttaaggaatgggcatacagtaaccgtttttactgttggaactggtggcatgtttgaccagagggtaattgggcctaaggatttgccaaagccagctcagtggcaccgcatagctgtccataatgactacttaagtgcttatgctgttcagaagctggtgaagaattctgctgtctatgttga

SEQ ID NO: 270419 - DNA, 971 bp, Zea mays
atgttcagcctttgatggaggttcgtcaggcaatcgagaacatctggattatgatgggattcactgagatgccaaccaacaatttcgtcgaaagcagcttctggaatttcgatgcactgtttcagcctcaacagcatcctgctcgggattcacatgatacatttttcctgaaagctccagcaactacaaaacagttgcctgacgactatcttgagaaagtaaagcaagttcatcagtctggcggttatggctccaaaggatatggttatgattggaaacgggatgaagcggagaagaatcttctccgtactcatacaactgctgtttccacgagaatgttatacaagcttgctcaggagaaaccttttactccaaagaggtattactccattgatcgtgttttccgcaatgaagctgttgaccggactcatcttgctgaattccaccagatagagggacttatctgtgattatggtttgacacttggtgatctgattggtgtattggaggatttcttctcaagtctaggcatgtccaagctgcgtttcaagcctgcctacaatccatatactgaacccagcatggaaattttcagttaccatgatggtttgaagaaatgggtggaagttggtaattcaggcatgttcaggccagagatgttgcttcccatgggactgccagaaggtgttaatgttattgcatggggtctttcacttgaaaggccaacgatgatcctttatggtatcgacaacataagggacctgtttggaccaaaggttgatttcaacctcatcaagagcaaccccctatgccgattgggcctgtagtgactagtgaggtacagggacttttaagcttgatcccaatgtgccaaaaaagttgttttccttttttgttgggcccccttgaagtttgaaccccgattcatgtatctctggttatggctcaaaaaaaccgctcatgttcagccc

SEQ ID NO: 270420 - DNA, 1660 bp, Zea mays
cccacgcgtcctgtcgtccagcgtcctcccggcgacgacgcttcccgagctctctccttcccgcgaccctctcctctgccccgctccactagggttttgccgcagacctctcgctcgcttccggttccgcgaggcaaccgtccgaccggtcggaatggtggatgtggaggagaccgggaacaagttgcaatcgcagatgcgcctccacgcggagccggaggacgacgccgccgacctccccctcccggccctcttcgatagggcgtcgcggctccacgccctggcctccagctccgccctcgaccaggatgggatccgcacgggggttgacctgctgcggcgctgcgacgacatggtcagcaagctcggcctcttctcccccaacgagaccaaggaggacgtctccacagcaaacctcaagtacctactggtcccatattaccttgcagaaatgaccgaaaagatagcacaggaggatcggatcccggttcttaagacgtcacaggaccatctgaaggagttcattgctctatgtgaagtactagagcttatcccagaggatgagctagaattgtctaggcagaagcagccagatactatgacaaacagaagagcgcagaaggttgcccggttcaaacgtcaaaaggctgcagaaacgaagctccaagagatcagagagagaaaagaaaggcgtggacgctcattgagagcagctgctttgtctgccccaattgaagctggagaggaagatgacctggagaatgatggggaggaagaaagagaggcttggttagctaccatctcattggctctctgcaaggcttttgatcttctcgacatgctaaagaaggaagaagaaatgcttcaagctgtaaaggaaaggaaggcaaaggatgggaatgcatttgctcgtgaaatgctcgatgaacgaacgaagaaggccgaaacatggcaccataatgctgccaaccgtgtggcatattccaaaccagctgatcctatcacttgtgcaacatttgctcaagatgtcattgaaggtagagcaagcgtttcacaagctcacgagcacaaacaccagcccctgatatttggacctgcaagtattgttggtggtggtctaaccagtgaaagggaaagaatgacagcgcaagtttttcagcctagctacaggatgccaacaatgagcattgaagaagctggtttgcgcgagatgaaaatgatggagaaatggcaagaaaggaccgctgagctgatgaaagaatcaacctccgcgtggcacaaggatggcagcagctcggcccaagaggatgaggacgccgaggaggaaaaagcaagagcgtgggacgactggaaggatgacaaccctcgtggcgcaggcaacaagaagctcacgccctgtggttaatttgtgaaacacgctgtgtattgatactccacatggaacatgatgctcatgtagacggtaggatgtttaattttatcattgttgctgtgttttttctgtagtgatgttgagtgtatcgtagcctgtttgtgcaagtgcgatatgtcctccctaatacgacacgtttttctggagccaaagaaatcgtatgcctgtctgcaattgtcatgctgcttggtgccgtttggcttattaataagggccaaaattggttgt

SEQ ID NO: 270421 - DNA, 288 bp, Zea mays
tcgcataaaaaaaatcttcgtcctccccgcgaagacgcttcccgagcttctccttcgttcctcctcttccccgcggctctcctctgccccgcaccggcaccgctagggttttgccgccgacctctcgctcgcttccgggctccgcgaggcaaccgtccggaccggccggtcgaaatggtggatgtggaggaggtccggaacaagatgcaatcgcagatgcgcctgcacgcggagccggatgacgccgccgccgacctccccctcccggcgctcttcgacagggcgtcg

SEQ ID NO: 270422 - DNA, 544 bp, Zea mays
ggaatctaccaattgcttttcgtctcctgtccatcccttgggcgctaccgctcctctcccttggcaacgacgactggcgccgccgctgccagacttcgctgggcatctcgccggcgacgagctcccaccaggattagagaaggtgatggcgaggagtgacagctgcctggcgcgcgtgggtgccggagttgcgatcggtggcgcggtcggcggagccgtcggtgcttgttatggaacttttgaggcattcagatacaagatccctggattgctaaagatcagacatatcgggcaaactactgttggcagcgctgcgatttttgggcttttcttgggggctgggagcttgattcactgtggaaaatcctactagtttgtttccctttttttttctgaagtctgaacacccctttgtcgatgggcttcagtgaaaactattcaatgcctgtttcatgtaacagctaatagctcagggttggaaaagacccacccagttatgtcccagttttggggtggatggaaataaaatcaacgttcttttgcc

SEQ ID NO: 270423 - DNA, 471 bp, Zea mays
cccacgcgtccgcccacgcgtccgcgtctgtgctaccgccgccgccgccgcaagactgcgtcgggcactttgccggcgacgatttcccaccagctatttctactcggatccgatctatttacaagcccaacaggatcagaggaggtgatggcgaggagtgacagctgcctggcgcgcgtgggtgccggaattgctatcggtggcgcggtcggcggagccgtcggtgcttgctatggaacttttgaggcgttcagatacaagatccctggattgctaaagatcagatacattgggcaaaccaccgttggcagcgctgcgatttttgggcttttcttgggggctgggagcttgattcactgtggaaaatcctactagtttgtttccctttttttttctgaagtctgaacacacctttgtcgatgggcttcagtgaaaactattcaatgcctgttttatgtaacagctaatagc

SEQ ID NO: 270424 - DNA, 1351 bp, Zea mays
cccactcgttcgaccacgcgtccggagtccgcctccgccgcggctccggcgcccgcatccgtctcaggagtcccttctccccgcgggtggagacatcttgatcgtttctgagattaaactgatgatgctgatgctcgttcagttatcttggtttggagatatatcagatatgggtgatcggaatcatggacgctctctccctctactgctctatctacatcttttgctgccaatacttccgtttgctatggcagatatagcctccgagaagcaagcactctttgcttttgcctctgcagtctaccatggcaacaagctgaattggagcccaactatcccagcgtgctcatggcctggtgggacatgctcactgcatcgatcatgtatattggcccttagggtgccaggtgctggtttgattggtaccattcctgctgatactcttggcaggcttgtgtccctccaagttttaagcatgaggtctaaccgtttgagtggaagccttccgtacgatgttgtctcacttccttctttacaagccatatttgttcagcacaacgaactgtcaggagacttgcctccatttctctctccaaaccttaatacccttgatctctcttacaactcctttacaggacaaatcccatcaggtttgcagaatcttaccaaattgtctgtcttgaatttagcagaaaattccctgtccgggccgattccggatctcaaacttcctagcttaagacagctaaatctgagcaacaatgaactgcatggttcgattcctccctttttccaaatcttctcaaatagttccttcctagggaactctggattgtgtggaccgccgctaactgaatgttcttttctatcttcaccaacaccgtcgcaagtgccttcaccaccaaaattaccaaatcatgagaagaaggctggcaatggcttggtaatcgtggctgttgctgggagctttgtcatatttctgctagctgctgtgatgttcactatgtgcatttcaaagaggaaggagaagaaagacgaagcgggttacaacggtaaggttactgatggtggaaggattgagaagcgcaaagaggatctcagcagtggcgtccaaatggcgcataaggacaagttagttttcttggagggatgcagttacaactgtgacttggaggacttgctgagagcttctgctgaagttctcggggaagggagctatggaactgcctacaaggctatactcgaggatggctctactgtggtagtcgagaggctaaaggatgtcgtggcatggaagaaagaatttgagcagcagatggagctcgtagggagggtaggtaaacatgcaaac

SEQ ID NO: 270425 - DNA, 1078 bp, Zea mays
cccacgcgtccgcgtttctatcgggcacctgagatcattcttgggttagcctatgatcatcctttagacatgtggtcagttggctgctgtctatatgagctttataccggtaaagtcttatttcctggtccatcaaacaatgccatgcttcggcttcatatggaattgaagggtccattccctaagaagatgcttcgaaagggtgcctttactatgcaacacttcgatcaagatctcaattttcatgctaccgaggaggatcctgtgacaaaaacggctgtgagaaggttaattttgaacattaaaccaaaggatgttggttctttgtttccgaactttcctggcgaggatccaaaaatgctatccagttttaaggatcttcttgataaaatgtttatattagatccagaaaagaggataaccgtatcacaagcacttagccatccatttatcactggcaagtgacataagatgctgattcctcttgatattgaacttagcatctacactgtaaaatacaatttgggtttctcttgtctaatcatcgacgtttctgtcttgtgtcctgggagctctgagaacaaatacatggatgaagcacggaactatcgaagagatggctatctgcagaccttgttgcatgcacttatcatttggatatgttctgttgcttgattctgccagggcctctgctgtgtgtacactttatatgcttaagcgccaacatttgaagtatcaattgaatggttttgcttttatgttattgaggtcctgggatggagatcgctggaccctcctctcctcatcatggcttctcatccccatcaacagtgctccatgtgattaacaaaggctcagatgtcctaatgcgatcctccacaacatgtcagaatcgtatagaaagcaaaatctcacagattttcatcttcgcctctatggaagccaatttgggacttggaccaatcaccacttaaaaaaagttggctcaaagcatccttatgcctggttttctgattcgtgagaaaagcaaaagtgaaaagcatttggcaaatcgagtggttacatggctcaataaatc

SEQ ID NO: 270426 - DNA, 417 bp, Zea mays
cggacgcgtggcgagacgcgtcatcgagtttgtaccgggaaacagcttggtagtataaccactgaagatggtcagtgggaggccgcatggtgaattggactcatggttcaagagcctcatggtgacctctagcagcgagagggggcaggctgggagtggtggtccagcgccaacattaacaggatggaaggaccttccgatggagctcctggtgcggataatatccacagttggagatgataggatggtcatcgtggcgtctggtgtttgcacaggctggcgtgacgcgctgggatggggggtcactaaaccttcaattaaaaggtgcaaactgagcatgaataatttaatgataactcctgcccacaagttcaccaagttgcaagttctcaatctccggcaaaacaaacctcaact

SEQ ID NO: 270427 - DNA, 845 bp, Zea mays
tcggtacaaatacatggatgaagcacggaactatcgaagagatggctatctgcagaccttgttgcatgcacttatcatttggatatgttctgttgcttgattctgccagggcctctgctgtgtgtacactttatatgcttaagcgccaacatttgaagtatcaattgaatggttttgcttttatgttattgaggtcctgggatggagatcgctggaccctcctctcctcatcatggcttctcatccccatcaacagtgctccatgtgattaacaaaggctcagatgtcctaatgcgatcctccacaacatgtcagaatcgtatagaaagcaaaatctcacagattttcatcttcgcctctatggaagccaatttggacttgaccaatcaccacttaaaaaaagttggctcaaagcatccttaggccttgttcgtttgtgtcggattgatgggtcggaacgaatccgagccggattgcttctttaatttatataaactttgattagccggaatgattccgggtgcaatccgatgtaaacgaacaaggccttatgcttgtattcgtgagaaaagcagaagtgaaaagcattggcaaatcgagtggctacatgtctcaataaatctgggacataaaagcacgcaggcgaaatttgtagtgccccacaattttttattgagatcattggaaggcatcttggctgttacaaattattgtatttgtgatcaatccaaggggtgcgacagataattcccaagggacacaccccttgtgaactcaccccttcatatgtatataaacataacccctgctgcaataaagatagaactgtcatttgtctctctctc

SEQ ID NO: 270428 - DNA, 273 bp, Zea mays
catccatttatcactggcaagtgacacaagatgacgattcctcttgaccttgaacttagcatcttcactgtaaaatacattttgggttcctcttgtctaatcatcaacgtttctgtcttgtgtcctgggagctctgagaaaaagtacatggatgaagcacggaacttcggaagagatggctatctgcagaccttgttgcatgcacttatcatttggatatattctgttgcttgtaagacaactagccagttggcattccattccctgtgtaca

SEQ ID NO: 270429 - DNA, 477 bp, Zea mays
ctggtccatgtacgatacctgggcgaggaacggacgttcacctcaacccagctgcttgccatggtgctgtccaatttgaagggcattgctgagggtaacctgaatgctgcagttgttgattgttgcattggtattccagtctactttacggatctgcagcgcagggctgttcttgatgctgctactattgcgggtctccagccattgcgattgttccatgagacaacagccactgcactggcatatggtatttataagactgatctcccggagaatgaccagttgaacgttgcatttgttgatgtcggtcatgcaagcatgcaggtcagtgttgtcggttacaggaagggacagctcaagaggttgtcccatacgtacgaccggtctgttggtgggagggacttctatgaggccctgtttaagcactgtgcaggttaattcaaagaggaatataacattgatgtgtaccataatgcg

SEQ ID NO: 270430 - DNA, 2200 bp, Zea mays
cgagaagtttactgacctcatggttaaagacgagaagacaggcacatgctaccgtgctgaccacttgttgaaagatttttgcaaggagaagcttgagaaagaccttgccttgccccaagagaaggctgatgaatttaagcgtattcttgccattttggatgacctctcagcagaggaacttggtgcaaagattaaggaatacggcattgttgcccctgatacaaagaatccgctttctgatccctacccattcaatcttatgttccagacatctattggccccactggtcttagcgtggggtatatgcgaccagagaccgcacagggtatttttgtaaacttcaaggatctgtactattacaatggccaaaagctcccttttgcagctgctcaaattgggcaagcttttagaaatgagatctcgccacgacaaggacttctcagagtgcgtgaattcacattggcagagattgagcattttgtggacccagaggacaaatcacatccaaaatttgttgatgttgctgatttggagttcctgatgtttccaagagagctgcaactctctggggagtcagccaagctaatgaagcttggggaagcagttgcaaagggaactgttaataacgagacacttggttacttcattggaagggtctatcttttcctgacatgcttgggaattgataagggtcggttgcgcttcaggcagcatttacctaatgagatggctcattatgctgctgactgttgggatgctgagatagagtgctcgtatgggtggatagagtgtgtgggtattgctgatagatctgcatatgatttgaaagctcacactgacaaaagcggtgtcccacttgttgctcatgaaaaattctccaagcctagagaggttgagaaacttgtcatagttccctcgaagaaagacctggggctggcttttaagggcaaccaaaagatggtccttgaagctttggaggctatgagtgagaaagaagcatttgagatgaaagctgaactagaaaccaagggggagacaaattttaaagtctgcacgcttggaaaagatgtggtgattacaaagaagatggtatcaatcagcatggagaagaagctggaacatcagcgagtcttcaccccttcggtcgtcgagccgtcattcggcataggacggatcatctactgcttgtttgagcactcgttttacacaaggcctagcaaatcagaagaggaacagctgaatgtcttccggttccctcctcttgtggcccctatcaagtgcaccgtgttcccccttgttaagaatcaagagtttgacgatgctgccaaagtaatcgccaaggcattaacaactgctggtatctcccacattattgacactactgcaatttctattgggaggaggtacgccaggacggatgagatcggtgttccatttgccgtgacagtggattcggcaacaaacgtgacgatccgagagagggacagcaaggagcagatccgtgtggacataaacgaggtggcgtccgtggtgaagcagctgacagaaggacaaagcacctgggcagatgtttctgcaaagtatcctgcccatgttggaccccaaggtgaccaggagtgaaaaatcctgccacccttatgtctagccatggaccgagaaggagccaggatggatttcattctccgattgccgagaagattgactagcctaaacataaccgcatttggtatttgacacgatccagcgcggtagtcccccttctcatacatacatgatacgtgctgttataaaatcggcagagctcaccaatgtttttgtttcttgtaaatgtctttttttcttaatatattgtctcacccacccaaaccttactatttgagttacttctgaactagttgcccttttgtaaggtcaaaccgtgaattgaactgggatccacagtggaattggaatttaaagagtttggttgtttcccataaaaggcccgtatccaggctccaacaccaaaaggagggcctctccactccctatctcactctttatttttaaatttcactatgtaaacggtatactctataatgtattcccttgtcttagaatataaaaaggcataaccatttttttattgtcccacaatataatatgtgttctttctatacacatacgtacattgatacagtggtacagagagaattacat

SEQ ID NO: 270431 - DNA, 390 bp, Zea mays
gctcgctcctccaccaccttccagtcctgtccagtgccgccgccttgccctgccctcccctcccttcccccgattaccctcgcggttgacctcgccaatccggtcccgcctccgtataaatccgcccttctcgcccccgctccgaccacaaaccctagcggcgcgccccggcatgggctagggttcccgcggcgatggagtgggacagcgattctgacggcggcgatgacgaggaggaagaagaggtccgccccgggggtggggacgcgggcccggggttctcgctggccatcgagggcgtgctgggcgcgtgcggcatggtggtctccgacgcgctcgagcccgacttccccatcatctaacgtaaccgggggttctagaggttcactg

SEQ ID NO: 270432 - DNA, 942 bp, Zea mays
gttagacataacccgagccaactcgaggaaaaaaaagaagttactgcaaataaattctggaggatatagtgtatctgaacaagataaaattaaattctcaatgcgtatcgtgcactttttgcttccttggctgaaacaattccatcaagagcagatgcaagagaaaagtgccgaggctgcaactaaaggtattgatgcagacaaactggaggtccctcttcccgtttgtggaaaaaaaggaacggatatactgcgacgactgcaggacatctattgttgacttccacagaacctgcaataaatgtaactatgatctctgtctccagtgctgccaggagcttcgtcgaggccttgtttctggtaatgatgccaaggttgatggtggaggcaagcaagattttctatcgggagttagtcatgataaaatcataagcaaagggccatccgatggacagaatgacatgttgatagatagtgtagttcctggtgaaaacaacacttctagcttgagacagtggagtgtgaataaagatggaaccataccttgcccaccaaatgcatttggtggttgtgggagctctcttcttgaactgaagtgcttgtttaaagagaagtttattgctgaattactggagaaagctaattcagcgctcaataatgaaatggaggtgaagatagaaggatcaaaatgtccctgcttcactgaatccggtgacatggatgatggtatatcacggaaatcatcttgcagggagaattcctgtgataactacatatattgcccaaccgctacagatgtccaaaatggaagtttagaccatttccaggagcattggttgaagggtgaacctgtaattgtccgtgatacacttgcgttgacttctggattaagctgggaaccgatggttatgtggcgtgccttacgagaaaagaaagagaaag

SEQ ID NO: 270433 - DNA, 587 bp, Zea mays
tgcaattccctggttgtattgttctcatcattagcctcctgaaatcagagtccattcttgcctgcgacagccacaggtcttctgcgtaacattacgtcagttcacatatataggaagatggctggtgagagtggagcaatggaagaaatcattaatcttctctgtaaatctacaataacccccaagattctagagcagtgtttgtgtaccatttggaacttttctattgatgaaaaatggaggtacaaggttctgaagagcgatgtcctaatgaagattgttggttacctggatgaagaagacatacaagtcaaagaagccgctggtggtatcatatcaaatttagctttgagttcctttagccatggatctaggaggcgagatcccaaaattgcatcatttttttcattccaaagaagatgactataagattattagaaaggaagctaaaagttcactaatacagctggccactgatgattgttactacagccttataataaaggagggtctagttcgggttcctttggttggctcagctgcatataaaagcctttaaacctttcccttatttatggccctttttt

SEQ ID NO: 270434 - DNA, 510 bp, Zea mays
acgggtgccacaactccctgccgatccagtgccccggcaaattcccacccggcgcaccgccgctcggcaacaccagcggtcggatcgggggagaaacggaagggcaacagcagagcgcgaattcctccgacaaatccaaggtttcgagcacagacacaggcgaaactcgatggcggaggggtccaagccggacgtgccgctgttccagctcctcagcgatcttctccagcaggtggagtcaatgagcaatcaggaagaagtagagctgcgcgctaagattgaagcattaggattagaagtcactaaggtaccagagcagcccgctaatcatctcagcgagctagaaatagctgcagagttggacaagctgtcatcgcggcttgataacgtcgacaagatgatatcatctgccatggcctcagatccagaggtgaagtctcttctgagcagcacatctgatatctggatgccggtcataacagcgtctgccaatgagaggcgggggtttgt

SEQ ID NO: 270435 - DNA, 687 bp, Zea mays
gttagggagggagagagggaagaggagcgcaaggcgggggggtgcgcggggcggcgcctcgcgtctgcggcggcgctcggcttccggcgagccacccgcgtcaggtttcgacgttcaacaagcggagtcctgggaatgcatatacccagaaccccaccttggcactgggtaatatctgccactctcttatgctcgccagtccatcataaacgcagtcgctggttgcatctgatgcaagaacatcctgttcctcagacactaactggacatagccctgatttcgttcatcgtatcttggtgcactctcataatctcgttccttctcctactgactggggccgccctgaacgaccagagaggcgaggagaacatgtacttcggtagcttctgctacgtggtgaagccgggggtcttctccgggggagcggtgctggccctcgccagcgtggcgctagccatagtctactacgtcgcgctgtcatcatccaagggccctccgccggcgttcgcagccccgcagaaccagggcatcgcgatgggccagcccgtgatcatcccgcagcagagcagcgagccggtgttcgtccacgaggacacgtacaatcggcggcaacaggtcccgtgacctgacctgaccacacagaggtctatggttggctcggttggtcgtgcttggtctgtataggt

SEQ ID NO: 270436 - DNA, 400 bp, Zea mays
ttgctttctaacacaacaggttgcactccactctggcacctccactgcgctggccggctgcctttataacgcggcgagcccagtgcggggaggcagagaacccaaggacgcgcctcgcctctcctcgcctcgagatccactcggagggccaccgcgaccgctccggtcggttccggcgaggtgccgcgcggtcgtaagtcgtaacagcatacacagggcagacaaagctgcgattttgggggggctgttggtccagccgtggttgttggtggagataaaccacgtgaaggctggtgctctggttcatgttccgccaggcactgatggcatttggccgaggtggaaagatggacggccgccggcgtcactcatcgtcgtcgtcgtcgacgatctgcacaac

SEQ ID NO: 270437 - DNA, 1227 bp, Zea mays
gctatcaaccctatttgatatctccagagaagggtttacgttccttaataaaaggagttcttgaaatggccaaggagccatcacgactctgtgttgaagaggtacaccgagttttgttagacatagtaaatgctgctgcaaatgctacaccaggactaggaagataccctccattcaagcgggaggtcattgcaattgcatctaatgcattagatgctttcaaaagtgatgcaaaaaagatggtggttgcacttgttgatatggagcgagcttttgttcctccacaacacttcatccgattagtacagaggagaatggaaagacagcgccgtgaggatgagttgaaaaataacagatcatctaagaaaggacaagatgcagagctatccaagatgaaccgggcttcaagccctcaaactggatccgatgaagctggtggtaatctgaaatcaatgaaggataaatccaataagcaagataatgatacaaaagagggaccaaatttgcaggttgctgggcctggcggcgaaataactgcaggttaccttttgaagaaaagtgcaaaaaataatgaatggagtaaaaggtggtttgttctaaacgagaagagtgggaagcttggatacactaagaagcaagaggagagacattttcgaggtgtcattgtcctggaggaatgtaacctggaagagatagaggaggaagagatatcgaagagttctaaggattcgaagaaggcaaatggacaagagaaaggcccaagtcttgtttttaagattactaacagggtttcctacaaaactgtcttaaaagctcacagtgccgttatattgaaggctgagagtatggctgacaaaattgaatggatcaagaagataaaaggtgttattcaaagcagagggggctctgttaagggtcccactgaagatggtcctatgagacaaagccgttcagatggatcccttgatacaatggctcggaggcctgctgatcctgaagaagaacttcgatggatgtctcaagaagtccgtggttatgttgaagctgttttgaacagtttggctgcaaatgttccaaaggctattgtactttgccaagtggagaaatcaaaagaagatatgctaaacaaactgtacaactcaataagtgcacaaagcaatgcaaagatcgaagagctactccaagaggaccacaatgctaaacgtaggcgggaaaaataccaaaaac

SEQ ID NO: 270438 - DNA, 821 bp, Zea mays
  unsure (1)..(821): unsure at all n locations
tgaggattcaacatatcaatacnactggagatcaaagtgtttggcgcccattttttatgttcgtagagcacctacgtgacaaacatgcaaagaatgaggttttgcatggtgtgttgttaaactactctttgtgaactgtgctcgtctttctgtctagagttgtgtctgatactctgattttcttgatccatatccagaggaagaggaaaaacctgtgaggaaacggggccgtccaagaaaagttagagaggtaccagatgtaccagatctacgcggtgctcggcatgtacgtgggaagaaactttttagagatgatgggcacaactctagtggtgaggaatctattggtgcatctgaccatcaggatcacggtgaagatgacgacagcaacggcgatgcagatcagcccttgatcaacacgatcaggtcttccgccgccaagctacggtccttgaagatctctcaacagggaccaagcagccaaaaaggggtccctggcccatccggaagcaatagctgagaggatgcatgcagtgcccctcatcgttggtgatgatttccagacattgactgaccgattcaagcagcacagggggctggcactaacatcagtttgacgaggacaccattccacgcggagctgcagtcatccgctgtttagctgcttgttctaattgtgtaagcgctgtatatgatttgcacttgggtcctgtgactccctttgtatgcgggccctccccctttccctccctatgttctcagtgtatattaccaaatcatcttcatgtgtaataatatttacaggagtaggttgatggatt

SEQ ID NO: 270439 - DNA, 422 bp, Zea mays
gattattatccgagatggtgtttcttttgctttggttgagcttccaaaccaatgggtgttcctcgaggctgctcttctgccatttgtttctaaacttcaagcatcagatattccagatatcttggcagatgtagagaagaggattcaacatatcaatacgactggagatcaaagtgtttggcgcccattttttatgttcgtagagcacctacgtgacaaacatgcaaagaatgaggttttgcatgaggaagaggaaaaacctgtgaggaaacggggccgtccaagaaaagttagagaggtaccagatgtaccagatctacgcggtgctcggcatgtacgtgggaagaaactttttagagatgatgggcacaactctagtggtgaggaatctattggtgcatctgaccatcaggatcacggtg

SEQ ID NO: 270440 - DNA, 576 bp, Zea mays
ggaggtactggtttcatgaagttttctacaacagaggcagctgatgcagcaatttctgctgccagtgttgctcctggcttaggaatttctttaaagagcaggccacttaatgtcatgaaagcgatggacaaggagtcagctcacaaaaaggcacttgagaaggcaaagactgaggtcgaggatcgacggaacctatacttggctaaggagggtgaaatacttgctggaataccagctgcagaaggtgtgtcagatgctgacatgaataaacgtaattggttagctagaaggaaagcggagatgcttcagtctccaaaatttcatgtgtcgagaacaaggcttatcatctacaatttgcctaagactatgaccattaatgacgtaaagaagctttgcagagaagcagtcatttctcgtgctacaaaacaaaatcctgtcatccggaaggtgaatatcctgaagaatgaaaagaaaggcatacagaagcattcacgcggtgtagcctttgttgattttcaagaacatgaacacgctcttgttgctctaagggttctaaacaacaatcctgaaactttt

SEQ ID NO: 270441 - DNA, 431 bp, Zea mays
gtccaagtccaactccaacgaggcaacgactcgtcagtggtcagtacactacaccgtgaccgtcgccggaatcgatcgacccaaagctccctttagagcccgagctctatccaacccacgatcgggatcccgatgcccgtcgcggcctcggttctcgccgcagcggcggtctcgcccccgctgacgtggcggagatggactcctcttctcgccgcgtcacatccacaggcgaacccgcctcccgcactgcgcccgcgggcgcccgctcctcctctccgggcctcctccgttccccgcgattcctgcgccggagccgccgtccggaggacgccgtgtgcggcggcggcggcacttggtggatgtgtgaaggcggagtccacggagcgggaggcgctcgatcgggatgctctgaagcgggtggcgctactcgc

SEQ ID NO: 270442 - DNA, 806 bp, Zea mays
gtgatccagtggttcgaggtgctggacgggctgctgggcccctactggaaggcggcgggtctggccttcaactgcacgttcctgctgttcggctccgtcatccagctgatcgcctgcgcgagcaacatctactacatcaacgaccggctggacaagcggacatggacgtacatcttcggcgcctgctgcgccaccacggtgttcatcccgtccttccacaactaccggatctggtccttcctgggcctcggcatgaccacctacaccgcgtggtacctcgccatcgccgcgctcctcaacggccaggccgaaggcgtggcgcactccggccccaccaagctcgtgctctacttcaccggcgccaccaacatcctctacaccttcggcggccacgccgtcacagtcgagatcatgcacgcgatgtggaagcccgccaagttcaaatacatctacctgctggcgacgctgtacgtgttcacgctgacgctgccgtccatggcggccatgttctgtgtgttcggcgacgagcttttgacctatttgtacgctttttcgcagtttctgattttcttgttgcttgtctctgttgttttaatattgcgtttcttttttttttttttttagttattttttttttatttttttttttttgattttattttttgttttttttaatttatttattttattgttattttatttttattttttttattttttttttttttgttttttgtttttatatatttttttatttgtttatttatttttttttgttttttctttttttttttttgtttttgttt

SEQ ID NO: 270443 - DNA, 521 bp, Zea mays
cggacgctggtcgagacgcgtgggcggacgcgtgggcggacgcgtgggtgctgatgctggtagcaccagttcatcaacttcggcttcgcatgcacgccgctctacttcgtgtgggagaaggtgatcgggatgcacgacgccaagagcatcttcaagcgcgcgctggcgaggctgcccatcgtcgtgcccatctggttcctcgccatcatcttccccttcttcgggcccatcaactccgccgtcggcgcgctgctcgtcagcttcaccgtctacatcatcccggccctggcgcacgtcctcacctaccgcacggcgtccgcgcgcatgaacgccgcggagaagccgcccttcttcctgccgagctggacggggatgttcgtcctcaacatgttcatcgtggtgtgggtgctggtggtcggcttcgggctgggcggctgggccagcatggtcaacttcgtgaggcagatcgacacgttcgggctgttcgccaagtgctaccagtgcccgaagccgccggtccc

SEQ ID NO: 270444 - DNA, 474 bp, Zea mays
gtccttcctcggcctcggcatgaccacctacaccggctggtacctcaccatcgccgcggccgtccacggccaggccccaggcgtcgcccactccggccccaccaagctcgtgccctacttcaccggcgccaccaacatcctctacaccttcggcggccacgccgtcacagtcgagatcatgcacgcgatgtggaagcccgccaagttcaagtacatctacctgctggcgacgctgtacgtgttcacgctgacgctgccgtcgtcggcggccatgtactgggcgttcggcgacgagctgctgacccactcgaacgccttctcgctgctgcccaagacccggtggcgcgacgcggcggtgatcctgatgctgatccaccagttcatcaccttcggcttcgcgtgcacgccgctctacttcgtgtgggagaaggtgatcgggatgcacgacgccaagagcatcttcaagcgcgcgct

SEQ ID NO: 270445 - DNA, 624 bp, Zea mays
cgcagcatccccatttctccgtcccaaaaccctagtctagtccccccacacctggatccatcgggtcggaggccatgacgacggcgaggctccgatcctcggcctccctccgcggggctctcctccgccacttctccgtgggtcccgcctcgactccgcgcgccgtctcccgggtcccagatttccaggttcctcagtctattatgtggaggcatttcgcaacgtccaggcctaattctcttgcaagacgcgacaactttggtctgatggcctgtttgcacgctcagatacgatgcgcttcgcaggctgctgctgtgaaagaaaccgaatccagtagcagcaagataagcatcgggcccaaaccaaaacagatcaaggaggatgacgaggatgctaacctggtataccaagggccaatatcatcgaccataaagaaagtgaagcttctctccctgtccacctgctgcctctccgtgtcgctggggccagtggtaacattcatgacttcgcctgacatgaatgtgatcctcaagggagcggttgcatccaccggcattttcctcagcgtcactacgactgctgagttgcattggttcgtgagcccttacattcacaagtttcggt

SEQ ID NO: 270446 - DNA, 682 bp, Zea mays
  unsure (1)..(682): unsure at all n locations
cacggaccggnccgaattcccttttttcccacgcgctcatttcattgagagtcccgggcgcattccatgccttgtagagtgccttctctgcatgcctgaaatgcacacattcaagtgctgagccgtggcgagcacgcctattggaagctcaaaatattatcaaccaagggggttcaatagaagatgcagcagatgctgctaagaatttcggggacacttcaaacagggaagaatcgtggcctctgatggagagaagcactgacggtagtaacaagcgtagtctggctgaagacatgaatcatgtgacagaggatgatgtccactccactaaaagagccaggcaatcaattgatgctaatgaacatagtgaagaggcaaacaagacaaattttgagtcgatgtctgttgatatctcatctagccagcccagctctataagaactgggaattcagaagctgtgtatcaattaattggtatgtttgctgcactagctgcacaaggtgacagagcagctggatcactgcatatcctttcatacagtatcgctagtgacttactagcggtggtggtaatggttaacatgcaacatcttccaatcttttgttctgaagttgtccaacagtagtttccttctacgtgctcttgagatggacttccactttccatggttctcctttttgc

SEQ ID NO: 270447 - DNA, 880 bp, Zea mays
ctttatccttcgtcgcatccgacacgataacgtcatcgcactccacgactccgtcaaggatcatgggagtatatatctcatactggagtattgtcgaggtggtgacttacatgcataccttcaacgtcataaaagagtttctgaaaaggttgctaagcacttcatccgtcagttagcatctggtctgaaaatgcttcgcgataataacgtggttcaccgagacctaaaacctcagaacattcttcttgttgaaaataatgaaaatactctgttgaagattgccgactttggatttgcaaaatttttgcaaccctttgccctagccgaaacactttgtggttcaccactttacatggctccagaagtcatgcaagctcagaagtatgatgcaaaggcagatctgtggagtgtcggtgtcattctatatcaacttgttactggaagaccaccttttaatgggggcaatcagatccagttgcttaaaaatatactcaggacatgtgaaatacgcttcccatctgattgtgacttgagccatggctgcattgacttgtgcagaaagttgctgcggctcaattcagtggagcggcttacagttgaagaatttgtgcaccacccatttctttctgaacatgctccagagaagactttgagccttacacaatctgacataagagatggctttccaagaaataatagcagtccaacaaggcattcaaaccatagttcacaagaagattgtatgccttttcctttggatgatgagtcaagtggacaggacgagggtccagttcctgacagtaagagtctgatgaaatcttatgggtttcccacaggtaaaagattggataaaacttcaggccagagtccatcaaaacat

SEQ ID NO: 270448 - DNA, 785 bp, Zea mays
gctccttcgtcccactcgctcctgcgagctccagatccggtgtggcggcacggctcatggtggcaacgcgccgcaaccgccgtcgcgcccacacatgccatatccaaccaccatggagctcttcctcatcaagcccatgacatgagctctcgtcgaggtgggctccaggtccgttaccggcgcgggccgctctgtacatgacgccaccgccctcggggccaccttcatggcgccctccatcagcaaccctaccagctccccaagtcccatctccatggcgcactctatcagcggtggcgacaccgacctgctcccacctccctgaagtgctccggtcaaactgcacgtgccaaggcagatgcgacgccgatccgctcccatctccatggcgcgctccggcagcggcggcaatgccgacccactcccacctccctggtatactcacagacgtagaaatgatgttatcactatcttcttctgcagggcatattggacccagtcgttggtagacaagatcagattgagcgtgttactcagattgtgggcaggcggacaaagaacaacccctgcctaattggagagcctggtgttggaaagactgctattgctgaggggcttgctcagcgtattgccaatggggatgtttctgaaacatttgaaggaaagatggttattactcttgtcatggggctcctagttgctggttctaaataccttggagtgttttgatgagtgactaattgaatcttatgtatttatttttgcaacttgaatacatttatttt

SEQ ID NO: 270449 - DNA, 602 bp, Zea mays
cggccgccctttttttttttttttttttttttttttttttttttaggccaaccaaaaacgcacatctgtcaacgaaagggtatcgacccaattcacacagggacattagctttcttttagcaattatatcacttaaaatatccaacatcgttgcataggggccaccaagcactgtcgcatgaaaaggccttgaatgctcatgagcaaaagcatgttcacactcacaacccatttctactgatagagaagagacaacatactacctaagctctatgatactgcgaaacagtagtgtttttggagcatgatgtgctcgcttaacttggctcgggcttctctaggggggtggggttgagcaacttctcaatgagggcaacatgtgtcatgagcattcgcctgcagcagtagcggaacaattccaaagcatccagagcatccccttctgagtagtcggcctggaggaggtcgaggtagacatcccacttgttcccaataaccttgccgcaggtgaagatgattatcccagtgcgctgcttcacctgcggcaaggttattgggaacaagtgagtagtcggcctggaggaggtcgaggtagacatccc

SEQ ID NO: 270450 - DNA, 582 bp, Zea mays
cggacgcgtgggtgcgttagtagccaggcccaatcttccagcccaaagttccatcccattgctcgctctgtccctccgttcacaacctcctccacgaccgaacgagcagagcagacccttccccctcaccagctccgggttccagcggcggcggcggcgaagatgatcataccggtgcgctgcttcacctgcggcaaggtgattgggaacaagtgggacctctacctcgacctcctccaggccgactactcggaaggggatgctctggatgctttggaattgttccgctactgctgcaggcgaatgctcatgacccatgttgacctcattgagaagttgctcaactacaacacactggagaagactgagacaagttaagtgagcaagcatatcatgctctgaaagcactactgtttcgcagtatcatatatattgtaggcggtatgttgtttcttctctatcaggagaggattgttgtgagtgtgaacttgcttttgctctcgagcattcaaggactgacaagggcatgttgcatctatgttacgatgttggagattttaatcgatataacggctaactaat

SEQ ID NO: 270451 - DNA, 542 bp, Zea mays
cggcggaatccggtcacacccggtccgggacctggcgaccaacgaggcaacgaccaaacgtccaaacccttccccctccctagctccgtgctccagcgggagtccgcggcggcggtgaagatgattatcccagtgcgctgcttcacctgcggcaaggttattgggaacaagtgggatctatacctcgacctcctccaggccgactactcagaaggggatgctctggatgctttggaattgttccgctactgctgcaggcgaatgctcatgacacatgttgacctcattgagaagttgctcaactacaacaccctagagaagaccgagacaagttaagcgagcacatcatgctccaaaaacactactgtttggcagtatcatagagcttaggtagtatgttgtctcttctctatcagtagaaatgggttgtgagtgtgaacatgcttttcaaggacttttcatgcgacagtgcttgttgccacctatgcaacgatgttggatattttaagtgatataattgctaaaagaaagctaatgtattt

SEQ ID NO: 270452 - DNA, 600 bp, Zea mays
ttcattgctcgttctgtcccttcgttcacaacctcctccacgaccaaacgatccgggttccagcggcggcggcggcggcgaagatgatcataccggtgcgctgcttcacctgcggcaaggtgattgggaacaagtgggacctctacctcgacctcctccaggccgactactcggaaggggatgctctggatgctttggaattgttccgctactgctgcaggcgaatgctcatgacccaatgttgacctcattgagaagttgctcaactacaacacactggaggggaccgagacaagttaagtgagcaagcatatcatgctctgaaagcactactgtttcgcagtatcatatatatctgaggcggtatgttgcttcttctctatcatgagaggattgtttgaagtgtgaactagtttttgtatttatcattcgtgtactttcatgttttttatgttttttttttattttttttattaatttttcttttatttttattttatttaattgtaagtttttttttatattttttttattatatattttttttaattttaattttaaatttttttgtctttattatttttttatttaactaattta

SEQ ID NO: 270453 - DNA, 1308 bp, Zea mays
ctagttctagacgcgagctgccgccctttttttttttttttttttttttgagggcaacactaacagtgtccctattccacggataaaacacccctcgtttcctttggtttttaacatcacaaaatacaatatcgaatgctaggtcaaaatgcatttgaaccttacaccattatacaagacagtccgaccaaacaattacactctagcgctatacaataccaaaacgatgaatgctagtttctagttattcactatacaagttatttattttatttgactactcgcaacattattcatcgtctgatgtctttgtatgaatatgggttcaggaaacaccggtctgagggtcttttctggagcaacaaatatgatggaactcttcacagtagaagcattatttacataaacttcgttccccgaccatgccctaccaggctggttctgcgttcccatcacctgcagtgttcctttttctcttgcttttgtccgacgaggatgacgccgaattgttgtgccagttccagttacgctggttgataaaccagttattgatctgcttcagttgtagccctgtttcctgcaccagtcgagccttgtcttcctcggttgggtacggccacttagaatgagcctgccaccatgcttttaaggtagaagcagtgtcgccagggagtttcccagctcttcgcttccgcaatatctcttcccgaatatccacaagtttgtctctgtacccctgcttaagctcatgctttagctcctgccggacgcgctcaactaaggatctctcaccctcagtcaacattaatgggccaaatcccattccatctgacccctcatttccatcatacatgttgctctcactgtccacctgattgtcttcatcgtcagacatagttgccccagtgccctcaccaggagatgcacctgtaaggctttgtaaagtttgttcgagctcccaacaagccatgactgcttccattgcatgaacacggcacatgctgctggagttgttccttgaatgaacagaggagcaacacataatgtgtcatgaagaggtcgagctcctcgcctcccgagtgtgctccgcccgccgcagcagccgcagccgcggcctccatgggcgggggcctcgccgctatctgcgcgtcgatgcgcgggagctggtcgacgggggtggcgacgcggaggcaggcgacgtgcgcctcgagaagacgctcgtacagcgggtgcgccgcgatggccgccttctccctctcccagccgggccccccggccatgccacctccgaagacaaagctagggttc

SEQ ID NO: 270454 - DNA, 607 bp, Zea mays
attcccggtccgacgcactcgaccgccgccgttcacttcctctccagcctccactccgccagatctcattgcctcctaaggccgatcgcccaccccgatcaccgcgcgggtatcggagcatggcgtctgcggcggcggtggacgccggcgacgcgccggagcccacggtgcggaacctcctagaccaggagtccctcaagtgggtcttcgtcggcggcaagggcggcgtaggcaagaccacctgcagctccatcctttccgtcctcctcgcgggggtccgccagtccgtgctagtcatctccaccgaccccgcgcacaacctcagcgatgccttccagcagcggttcaccaagtttcccactctcgtccgcggattcaccaacctctacgccatggaaattgacccgaaggtagaaaatgatgatttagccaatgaaggaatggagggattcctttcagaactgacaaatgcgattccaggagtagatgaagctttgagttttgctgaaatgctaaagtaaggttttgctccgttcagttgtttgccatgcttcccaatatggccagctacttttgttaccatctatttcatatttcactcgctacc

SEQ ID NO: 270455 - DNA, 298 bp, Zea mays
cccacgcgtccgcccacgcgtccgttccagtaccgcttctgcccccagcaggtgccagcgccaccgccgttcgcctcctctccacactccgccagatcccatccctctcgcccaccgcgcgggtatcggagtcggagcatggcgtctgcagtggtggtggacgccggcgacgcgccggagcccacggttcgtaacctcctggaccaggagtccctcaagtgggtcttcgtcggcgggacgggcggcgtcggcaagactacctgcagctccatcctctccgtcctcctcgccggggtcc

SEQ ID NO: 270456 - DNA, 260 bp, Zea mays
agccctccactcgccggagcccgaccgccgggatgcctcgagatttgcgaccagccgggatgcgcctgttcggcgtcaccatcgcgccggtgcctgaggcgaggcctccgggacgaaatccgagccccaacccacccgtggctgccagggaggacgtgatgcgcaagtgctagagcatgggcaacctcgcggcccttggcgctggcctttactgtggaggaggattcgcgaactgtggagttgctttcgactggtacctc

SEQ ID NO: 270457 - DNA, 621 bp, Zea mays
tgaaattctgatgatcataaaacccacgatgaagcatgtgacaatgttgtaacttctctctctattgatgctgaaaggaaattgggtgtttgcaactccatgaatgttcatgagaatatcagcttaaaagatccagaactttccaatgcagattattcccaaaagttcaataggtctgatgaaacttgtgatgtacataaagaggtttcttcaactgtgaatgatcctgatgaaagaaaatgcacagatgattcaacgaggtgtactaatatgtcctgtgatctactgcatggcaaaattgtcagttctcctgaagaacatgattttagtaaccagctagaaagtaacccactttcagtatctaggaatgagcctgatcttaattcaattggtccggaagtggatggtggcaatataacttgcaatgcggaaaaccccagaagcttcaaaagtgagaaatctgctgagctcaagattatggattgccgacatgacttcttttaaagacaagtgaaattaaaaatgatgtcagagtaagggatgtaaatctcaattatgtttggattcaatatctttccctatttctggtggaaacaatggaacatctgatcctcctgatga

SEQ ID NO: 270458 - DNA, 424 bp, Zea mays
cccacgcgtccgatcccgtcgcatcccatcccactaccacccatctcgtcgtccgccgattcgatccggttcttccaacccagggtgagtctccggatccgtcgccgtctggtatccgtgtgctctcgtcgccgtcgccgtcgccgccgtctgactgcccccctcgcctcccgcggcgtcgggtctctggtgctgctgctgctgctgctgctgcgtgcagggcagtgatggcgacaaagaggagcgtgggcaccctcggcgaggcggatctgaaggggaagaaggtgttcgtgcgcgccgacctcaacgtcccgctcgacgatgcccagaagatcaccgacgacacccgcatgcgcgccttcgtccccaccatcaagttccttctcgagaagggcgccaaggtcattctcgccagccacctggg

SEQ ID NO: 270459 - DNA, 667 bp, Zea mays
cccacgcgtccgcggacgcgtgggtgagattctctgttaaaaggagtaccataatggcaagaaaactcctctggagcatcgaccgactctccacctgaggaccgccagctccttcctccgcctcgacaagcgttggagagatggtgaagagaagcaagaagagcaagagcaagcgcgtcacgttgcggcagaagcacaaggtgctgcgcatggtgatggagcatgacatggaaaaaatggttacaaaggctgatccaagtaaacggattgtactacttcacaacaagatagatcttgttcctaaggaagcggtagagaagtggcttacatatctgagagaagaaatgccaacaattgcgtttaagtgtaatacccaagagcagcggaccaagccgggatggaaatcttcaaaactagataaaacaaacagcatcccacaaagtagtgattgccttggtgctgagaatctaattagattgctcaagaaatattccagaagccacgagctcaaactggcaattacggtgggtattgttggactccctaatgttggcaagagcagtctgatcaacagcctgaagaggtcccgagtggttaatgtcggttccactccaggggttactagatcaatgcaagaagttcaattagacaagaaggtaaagttgtt

SEQ ID NO: 270460 - DNA, 803 bp, Zea mays
catcctccctctggagtaccgaccgactctccacctcaggaccgcaagctacttcctccgcctcgacaggcgtcggcgagatggtgaagagaagcaagaagagcaagagcaagcgcgtcacgctgcggcagaagcacaaggtgctgcgcaaggtgaaggagcaccaccgcaagaagcgcaaggaggccaagaaggagggcaaggccggccagcggaagaaggtcgagaaggaccccgggatccccaacgagtggcccttcaaggagcaggagctcaaggcgctcgaggcccgacgcgcgcaggcgctccaggagctcgagctcaagaaggaggcgcgcaaggagagggctcggaagaggaagctaggattgctcgaggatgaggaaattgctaatttggcatctgcagcttccgcgcagggcagtgagtttgcagcaaaggatgcagcaaaggataaagctcctttaacagtggcaaagagcaatgatcattctgagagatctttctacaaggagcttgttaaagtaatcgaagcttctgatgtgattcttgaggttcttgatgcaagagatccgctgggcacccgttgcattgacatggaaaagatggttaggaaggctgatccaagtaaacggattgtactacttctcaacaagatagatcttgttcctaaggaggcggtagagaagggcttacatatctgagagaagaaatgccaacagttgcgtttaagtgtaatacgcaagagcagcggaccaagctgggatggaaatcttcaaaactagataaaacaaacatcatcc

SEQ ID NO: 270461 - DNA, 1687 bp, Zea mays
atgccgtcggcgctcaagctctgcgtggatccggccaagttcgtcatggacgccgtcgccgacgtcttccccgtcgaccgccgcgaggtccggaaccccgccgacctggcctgggcctgcgtgctcatcctcgaggccgccgtgcccgcgctcgccgacacggacccggacatcggacccgcgcgcccgctcgtgccgcgggccgcgcgcgaccgcgcgcggggcatggccagggactggaaggaggccgtcgagaagaaggggggcgtcgagggcgccaagccgtccgacgcgcacgccttcctgcagctcgtcgccacgtttgccgtcgccgagagggaggacaggccgctgtaccgcaggattgtcgtcagcttctcctggcgccgccagatgccacgcctcgcgctcaccctcggactcgaggaacaaatggccgatatcattgaggaactgattgctaagaggcagcagcttgatgctgtaaatttcgcttatgaggctgggcttcaggagaagttccctccagttcctcttctgaagtcctacctggaagactctaagaagacatcaaccgctgcttcagataattcaagcactagcagcggccaatcagggagcaatgtgaacaagaaagaacagtctgcactgcgagctgtcatcaagtgtgttgaggatcgtaaactagaagctgagtttccactggagggtcttcggaagcaacttgaagaactagagaaagccaagaccgagaagaagaaggcagcatcaagcgctaccagtggcggcagcggcggccctgcaaccaagcgcatccgtgcgagcactggaggcccaatgcctcctgccaaggcaggtcgtctcactaacaatgcttgcgtgtcttctctcccagctcccaccacattgacccagtctccctcccacgcgtcatacgccaacacctccccgtcccgcacctcagtctccccttcccatgcatcacacgccgccacagcctccccttcccacacatcctatgccacgccgcctccttacccggttggacatggcctgtactgcagccggagcccgccggtgatcaggggggagccatacgcttacccaccagccgaggaggtagtcggtttcaacgtcggcatcaccatgccatactccaccccacccatgagctacccccctgccccctatggcgggtacggcagcgggatggcagcttacgccaacggaatggcccctgctttccaccaggcttactaccggtaggttcagtcatgaaacaaaccaaaaacaaagtaaaacaacaaaaaaagtcgctgatgaatgacatgacaacaactgataatcgcgcaatggccctgttttgtagcgactgactacaacggtaggttgggtatgtcattttctatgtcctttccatcaccaccactaggtttgtgtgttgtgtctagctcgtctcatcttagaccactgcctttcttttttcactggtaaggaacctggaacctgggtgtaaattatgtatggtatcagcgagactgtcgtcgcagccttgtgtaactctgttcggaactttggtctttttttttgttgttgttgaaaagatcagcatgtgatcgttaagtaccggatgtaccatgaactttaacacaacctgaaaaaaaaaaaaaaaaaaaaattataaaaa

SEQ ID NO: 270462 - DNA, 945 bp, Zea mays
tctgctttcctgcaaccaagcgcatccgtgcgagcgggtggaggtccaatgcctgctgccaaggcacgtcgtctcactaacaatgcttgcgtggcttttatcccagctcccaccacattgacccagtctccctcccacgcgtcatacgccaacacctccccgtcccgcacctcatacgccaatacctccccatcccacgcctcatacgccacagtctccccaacccatgcatcatacgccacaccctcccctccccacgcatcatacgccacaccctccccttacccttacgacaggccggttggacacggcgtgtactgcacccggagcccgccggtgatcagggagccatatgtttacccagctgaggaggtagccaccgtcaacgtcggcattcccatggcctactccaccccgcccatgagctaccctgctgccccctacggcggctatggcaacgggatgccagcttacaccaatggaatggctcctgccttccaccaggcttactaccggtaggttcagtcaggaaacgaagaagtcgctgatgaatgacatgacaacaactgatgatgccaacgactcgaaaccccgctcaatggccctgttttgtagcgactgactacaacggtaggttgggtacctcatcttccatgtccttacccaccgctactactagatgtgttgtctttagctcctcgtctcatcttagtccgctaccgtaatttttttttactaccactactaaggaacctggatgtaaattatgtatggtatcagcgagactgtcgtcgcagccttatgtaattctgttcagaacttttgaaaaacgaaaaaaaaagaagaaaccagcatgtaatcctgaagtaccggtctaccggatgtaccgtggacttaattaaaagtgttttttttatagtttacttgtttggtgttgatgtgtgt

SEQ ID NO: 270463 - DNA, 400 bp, Zea mays
gtttttcacacaacggcggcgatgtcgtcggcctcctcctccgccgccgccaacgccggtgaaggaagcgggggtgcggaggagggcgtggagatcacttacgtgagctatggcggggagcagcatctgccgctggtgatgtcgctggtggacgaggagctcagcgagccctattccatcttcacctaccgctacttcgtctacctctggccgcagctcaccttcctggcgttcgatgccagggatggcaagtgcgtggggacagtcgtgtgcaagatgggggagcataggggtgcattcaggggctacatcgccatgctcgtcgtcctcaagccctaccgagggaggggaatagcaactgagctagttactagatcaattcgggcaatggatggaatct

SEQ ID NO: 270464 - DNA, 749 bp, Zea mays
ggcgactggtacttttttgtcgctgcggagacggggagtcttccgactcttccccaacgggaattcctcactcacatctctacgcacgaacggaaacgccccgtgctgcgctcgcagtctcgcatggagtccaccactgctgctgctaccgcggcggcggcgccggcaccggtgctgctggtgacgaacgacgacggaatcgacgcgccggggctccgcttccttgtcgaccgtctcgtcgccgcagggcgataccgcgtactcgtctgcgcgcccgacacagacaaatcgggtgtgagccactgcatcacatggcgccctgcactccgctgtaaacgtgttgatataataggtgctacagcatttggagtttcaggaactcctgctgactgtgcttctttaggcatctctggaaaactatttgatggtttggttcctgatctggtacttagtggaatcaacattggaaataattgtgggtaccatgtcatttattctggaacagttgctggtgctagggaggcattcttatacgggattcctgcaatagctatgtcatatgattgggttgcgggtcggagcagtgttaatgacctcaaggtgtctgcagaggtctgcatgcctctgataaatgctatcgtgactgagatcaagaatgggacttaccctcaaggatcattcttgaatgtagatgtacctacagatgctgcgcagcacaagggctacaaaattacaaaacaaggaacata

SEQ ID NO: 270465 - DNA, 796 bp, Zea mays
cagttgctggtgctagcaactgttccagaataaatgacatggtacccacaattattctggaacagttgctggtgctagggaggcattcttatatgggattcctgcaatagctatgtcatatgattgggttgcgggtcggagcagtgttaatgacctcaaggtgtctgcagaggtctgcatgcctctgataaatgctatcgtgactgagatcaagaatgggacttaccctcaaggatcattcttgaatgtagatgtacctacagatgctgcgcaccacaagggctacaaaattacaagacaaggaacatatatggccagaattagttgggagcagacggtttacaagaagcctgcagtagaaagttaccagacagcaaacatggatgttgatggtgaaaaggatagcgaactagttacttcagaaaatgacctactgtttaagagagtgattgtagggagaagttccaatggagtggaaggagaggaaacggaccataattccctagttgatggatatatcactgttactcctttgggtgctctttcccgcacagaaccagacgccataccctatttcaaagcttgtgtctcacgtctggttgataatttctcttctcctggctcttctttttctagaagcagaggatgagccatgaaatttctaaagctgtttatttatcgcaatgatcaagttccacactgctttttcctaccccataacattgttaccatacatgggcaatattgccattcctcctacctgaatgttattactgcaaaaaaaaaaaaaaaagga

SEQ ID NO: 270466 - DNA, 952 bp, Zea mays
gacccaatcgccgcaaacccctccggaatttcttatcccccctgggctgctccacctccgacctcgcgcgagacgagcaagcccaagtatggccggagcagcagcagccgccgtggcgtccggggtctcggcccggccggccgcgccgaggagggcttctgcgggacgccgcgctcggctgtcggtggtgcgggccgcgatatccctcgagaagggcgagaaggcgtacacggtgcagaagtccgaggagatcttcaacgccgccaaggagctgatgcctggaggtgttaactcgccagtccgagccttcaaatctgttggtgggcagccagtagttttcgactctgtaaagggttctcgtatgtgggatgttgatgggaatgagtacattgattacgttggttcctggggtcctgcaatcatcggccatgcagatgataagggtaatgctgcattgattgaaactctgaagaaaggaactagctttggtgctccatgtttgctggagaacgtattggctgagatggtcatctctgccgtgccaagtatcgaaatggtccgctttgtcaactcagggacagaagcctgcatgggagcgctccgcctcgtgcgcgcattcaccgggcgggagaagatcatcaagttcgaaggctgctaccatggccatgccgattccttccttgtcaaagccggcagtggtgttgccacccttggcctccctgactcccctggcgtccccaagggggccacctacgagactttgacggcaccctacaatgatgtcgcggcagtgaagaaactgttcgaggacaacgcgggggagattgctgccgtcttcctcgagccagttgttggcaacgctggtttcatccccccacagcctggtttccttaacgctctccgcgacttgaccaaacaggatggtgcgctcctggtcttcgatgaagtgatg

SEQ ID NO: 270467 - DNA, 2023 bp, Zea mays
ctcgagctcgattcgttgccagtccacttgtctcacggcctgtcgccatctccttcctggttttttcatccgaccatccccggctcctccgcgccgtcggcgacgactccatcgagtcactcggccgcagcaaccggcgaccatgtaccgagtcgcctccgggctcggcgccctcaagaggcatggggcaaatgctcaaatgatgaatgctgcaattaggtgtgccagcacaagtgttgcacagaggtcttccggtggcttctggacctggttgactggtgcgcgttcaaatgaaatacctcctccagatttcacacttccaggagtgactattcctcctccgctgcctgaccatgtggaggctggcaaaacaagagtcacaacacttcccaatggtgttaaaatagcctctgagacatctgcgggatcatcttgttctgttggagtttatgttgattgtggttctgtatatgaagcacctgaaacaacaggcgccagtcaactgttgaagacaatggccttcacaaccactgccaacaggagtgagttgcgggttgtgcgtgaaattgaggcaataggtggcagtgccaaagcatctgctagccgtgagatgatgagctacacttacggagccctgaagacttacatgcctgaaatggttgaggtgcttattgattgtgtacgcaaccctgcttttcttgattgggaggtaaaggaacagattttgaggctacaggcagagcttgcaaaatcatcaagttatcctgaaaattttcttttggaggctcttcattctactggctattctggtgctttagcaaacccactaattgtgccagaatattcagttagcagattgaatgcagatgtcctggagcaatttataactgagaactacactgcttccagaattgttctagctgcatcaggtgttgatcatgatgaattggtatctattgccgaaccccttctgtctgacattcccagtgtatctggaacaacaaggccaaaatcaacctacattggtggagaatacagaagaagtgcagattcatcgaacacagacgttgcattggcattcgaggtcccaagtggttggctcaaagaaaaagattgtgtcactgtatcagttcttcaggcacttctgggtggtggtggcaagttttcttggggaaggcaaggaaaggggttacattcacgtctaaaacgcctcgtaaatgaatttgatcagatcaagtcaatctctgctttcaaggatgttcacagtaatactggcatctttggaatccatacatctactgatgcatcatttgttcctaaagctattgacctagcagccagagagctcacttcccttgcaactcctggacaagttgaccaaagccaactggaccgtgctaaagcctcagctaaatcagcgatactggcgaatttggaatcacaggcatcactaacagaggacatggggcgccaagttttggcatttggtgaaaggaaacctgctgagcaccttctcaaggctatagatggtgttactatgaaagatataacgtctgttgctgaaaagatcatttcatccccattgacaatggcatctcatggaaacgttctgaatatgcctacttatgagtcggtcagtggcaagttccgctcaaaatgaggagtacatgacccttcccttcattttatcaccttgtttgctggacaagttttaccagtaccttgtcattcacgtctaggccatggttcttggtcagtttcagaagaaataagcaacctcatgcagttttgttcgtgaaacctgtgatcacttcacaattattcccttttctcattcttttgcggaacattcgtgtggttaatgctggtgatagaccagtaacgtgcttgtaaatttaaccgaaccctggcccctcattcggtaccaaggccccaagagaatgtacaaaattgtcgtaaaactcttgacaaaaatgttgtcgcacatgaataatgattctacagaactgaagtttgcatgagt

SEQ ID NO: 270468 - DNA, 436 bp, Zea mays
acgtgagtcctccctttccgtttaaggcagcaagcaggagcagacaggaggcgccgagagcccagcgtcggagatctccgccgccatggagacgctggccagcgccatgcggcgcgagaaccgccggtccaaggccccgccctcctcctctgcttcctccgccctcgcctcgggcagggtccctctcgtcatggccttcctctcctgcctcgcctggctctacgtcgccggccgtttgtggcaggacgcgcagacccgggcgatcctgtccggcctcctcgagaagagctctaccagcgtcccgaaggtgctctcggtggaggacaagcttaggaaccttgggtgcaaggcgattggaaggaaaattgttgaggcggagatggacctgaccaaggccaagagcgaggggtacctgtgggggacaggactgcagctg

SEQ ID NO: 270469 - DNA, 480 bp, Zea mays
cggggcggccccacccgtccgaaccgaggcggccaggctccctcctccctcctcctccctgcaaatcgccaaatcctgcaggcaccaccgctcgttttcctgtgcggggaacaggagagaaggggagagaccgagagagggggaggcgcggcgtccgccggatctgctccgacccccgacgcagcctgtcacgccgtcctcactctcagccagcgaaaatgggtgccggaggcaggatgaccgagaaggagcgggaggagcaggagcaggagcaggtcgcccgtgctaccggcggtggcgcggcagtgcagcggtcgccggtggagaagccgccgttcacgttggggcagatcaagaaggcgatcccgccgcactgcttcgagcgctccgtgctgaggtccttcttgtacgtggcccacgacctgtcgctcgccgcggcgctcctctacctcgcggtggccgtgataccggcgctaccct

SEQ ID NO: 270470 - DNA, 613 bp, Zea mays
  unsure (1)..(613): unsure at all n locations
gcgcgcacgcaaacnnaagtcctctacagncaaaccacacccacttctttttgtgattcagcatgttctcttccggcgtgaacagtctcagcccaaggcctggaagttatccgttcatggaccacaaagctcgctaagcgtttgaatgtttgtggactaatgaactgtcagtatgctatatctacttctggtgatgtgttcctacttgaggcgaaccctcgtgcttcacgcacagtcccttttgtatccaaggcgattggccatccgctagctaaatatgcatcattgatcatgtctggtgtgaccttgccggagctcgggttcactaaagaagtgattcctaagcatgtgtctgttaaggaggctgttcttccatttgagaaattccaagggtgcgacattcttcttggaccagagatgcgacactggagaggtgatgggcatcgactatgagttctccggtgcctttgcaaaagcacagattgccgctgggcagaagctccccttaagtggcactgtgttccttagcctgaacgatttgacgaaacgacatcttgctgagattgggagtggattccgggagcttggcttcagcatcattgccacatctgga

SEQ ID NO: 270471 - DNA, 1068 bp, Zea mays
cccacgcgtccgcgccaggtcttcgtttttcctttggctggaaacaagcatccaccagggacaactcaagggatgctcgagtggctctagttacttagcagaaccaaaagaggaaggccatcaaagatacgagggctttttctcgccatgtctcggtcgccacacctcccaccccgctgcccacccctgggtcctcagatcactcgaagggatgacagcatgttcacgcagagctgcaggtttccatctggggatacgttctttagtgagccaccgtgctggctcgatgatctccttgcagattccgggaaagctcccaagctccctcctctcagaagggcctgcagcgattctgatgccatcttggatgcgctgtcgacattccagagcccaatttatccaatcgaggaatgtgatctaaactcaagtggtgaagctgaggacttgttgggtggagtcgaaggtgatgaaagtggttctgtggtcgaggctagctgtttctatggtccgaattcgccaagacagaagagtaggcttacaacttcagagagttccatggtaaatgctgtgcttgagaatgttcccggcaaccccttgcagtacctgaccatcgatgcctccagcggtgtgaatggtaatgtggccaatgtaactgctgatacctgtcatgcttttggccaccctgatcaagacaagtcatttaaaaggcgttcaggccaaagatctagggtccggaaacttcaatacatcgctgaacttgcaagaactgtcgactcgcttcagaacattggtgctgatttggccgtcagagtgtcatcacttttccagcttcacaatgctctatctatggaaaacaagcagctgaggatacagatttccagtcttcagcgtgcaaaactgattaaggatggtcagacgcaggccctaaagaacgaagccgaaaggttgaagcggatgtccgtccgccggagcagaagcgccacggactactgttacgacccgggctcgttctcgttcggagcagatgcttcgtcagtcagctggcagatgcctgacatggcaaggctc

SEQ ID NO: 270472 - DNA, 391 bp, Zea mays
cccacgcgtccgggcgccgactgcgcaaccggcaccaaccttcgccaggttttcgtgggctctttcaccgatacaaccatcctccaggctacttatattcggatctaacccaaagttgctgttttttccatatatgaaaagaagaacgcaagggatgctcgattgactctagttacttagcagaaccaaaagtggaaggccatcaaagatacgaggctattttctctccatgtctcggtcaccccacctcccaccccgctgcccaccgctgggtcctcagatcactcgaagggatgacggcatgttcacgcaaagctgcaggtttccatctggggatacgttcattggtgaaccaccgtgctggctggatgatctccttgaagattctggg

SEQ ID NO: 270473 - DNA, 617 bp, Zea mays
cgtccccacgactgacgacggagagccccggtctccttccacggctccaccgccaccaccccgcataaaaaatcctacagctcgtattcgcctcatctcgcagcagcagcagaagaacaagggtatggcgaaggatgggggtcccgactggaacggcctgctcaagtggagcctcgcccacggcgacagcaccaacccgccgcgtgctctcagcgaggaagacagaaaatggttcatggatgctatgcaagccaacacggtagatgttgtgaagaggatgaaggagatcactcaggtgatgaaaactccagaagatgtcttgcagtctcagggcgtgacccctgagaacatcgaagatatgttggatgagctacaggagcatgttgaatccattgacatggcaaatgatctacattctattggtgggctggatcctctacttggttacttgaaaaattcaaatgctggcatccgagcaaaggcagcagaagttgttagtacaattgtgcagaataatcccaagagtcagcaacttgtcatggaatccaatggactagagccactgttgacgaacttcaaatcagatccaagtacaaatgcacgcacaaaagctttag

SEQ ID NO: 270474 - DNA, 279 bp, Zea mays
ttacacgacgccacgactgacgacggagagccccggtctccttccacggctccaccgccaccaccccgcataaaagtagggaagagagctttgcagcgagaaccgtatcgatctattctcgtctgaagcaattcgcccctgtcgtgagcagaatcctacagctcgtattcgcctcatctcgcagcagcagcagaagaacaagggtatggcgaaggatgggggtcccgcctggaacggcctgctcaagtggagcctcgcccacggcgacagcaccaaccc

SEQ ID NO: 270475 - DNA, 510 bp, Zea mays
gcggccgccctttttttttttttttttttttacaaacaaaaaactcattatgtaaattatattttattacaggcataatttatgaaatcatacgacaacataacggctccctctgctgatcaaaacatatcagcgatctacctcaaaaacaagttctattcttaggtacatccttctattcttaggtacatgctcgagggtgaaatacagtgaaaacatagcacagagctatacatccggcatatccccgctggcttcgtcttcacttgatcaagagtgaagggcatatcgacagaaacacgtcaacagaaacgcaaggcatcctcaagctccttctcatcagtgcagttgtagcccaacataatcgcccgtgcgtaacgtccagatcccatgaatggctctgcttcatccactacaccagcctgttgcagatcggtatcatcagcatcccattcatcatcaggacacagccacctctcaaagcagtggccagatatcgtacaaagaagc

SEQ ID NO: 270476 - DNA, 803 bp, Zea mays
gcggccgccctttttttttttttttttaagtacacaatagttctgaattgcggattcctctttggggcacattgcaaaattgttcttgttccattaacggggcgaaaagagtacactgaggctgaagtaggtgccagcacaatactacagtggatagacgaagatcttgccatcaacgtggtgtctttcgcatagtttcttcaatgtacccccagagtgctgcattgcgttcagcttggtatccatgaacatggccttgtagtcatcaccgtacttctctattaatctgccaatgcaaacacgttgaactttagtaagtggttgcaacggtgcagatttgccatccttccttttcttcccaagagcagacttcaggtcgtcgtcctcgaggtcgctgccggtatcgattggctcgaactccgggacgggtgcatgcgcggcggcgacgtcgggcgcctgcagcgccgcgctctggacgagccgcggcgtgccgcgggagtgcgcaccgagtaggtttgggttggccaccaccccgaacgcggcgtagttcttcactacgctgccctccgcgtcccagcccgccccggccccggcggcggcggcgagtgcctcggggagttcgaaggccgccttgaattcattgggtttccggcggggaagccccacgcggaccttagtgcgcgagcgcttcaatttgcgccgcgaccctcccatacgcgggaaccggcggcagctaggtgcttggagggaggcagggaggagatttagggttttggcctttgggggaagaagcgggtgcagga

SEQ ID NO: 270477 - DNA, 421 bp, Zea mays
gcgctcgctcctatgggggcacccgcgcgccgtcggtttcctcggggagcacgagtactgcctggggttcgtcctcgtacgacctgacgtggatccacttgggcgccgaccacttctcgccccggatcaccgggcagctcccgtggaggctgaccgggtccggcgtgccgtcggcgtgcaggctgaagaagagcacggcgtcgcctttcaccggtttcactgccaatcctttgtgtgcacactcggagaaagtgccgtccttgggctgggactcccaacccttggcgttggggaacacggtctcgcctccctcgcggacggtggacaggcacatgagcacggtggcgtaccggtggccgccccgggcctggttgaccctgtcgtggaagtagtcgaagtgcggctcgtacccacgcgtcca

SEQ ID NO: 270478 - DNA, 867 bp, Zea mays
agcatcatggccatcgataatattactatagaagcaaaacccaatatatatagtgtggtacgcaatcacgaacacaacagtccaaacctacacaatgaacccatgaaaattattcttttgttaactactactagcaccacccaacaaaatactccgaccagcaaagaaaccaggaaccatggattacatgcagaatcatcatcatttcttcttggcagccgccttggtcaccttggctcccgttgggtccttcttctccacgctctttatcacgccgaccgcaaccgtctgcctcatgtcgcgaaccgcgaagcgccccagtggaggatactcggagaaagtctccaccaccatgggcttcgtggggatcatcttgacgaagccggcgtcaccgttcttgagaaacttgggggcgctctccagctccttgcccgaccgccggtcgatcttggtgagcagctccgagaacttcacggcgatgtgggacgtgtggcagtccagcaccggggcgtagccgttgccgatctgccccgggtggttcatgatgatcacctgcgcggtgaagctggcagcctccttggcggggtcgtccttggagttggaggccacgtagccgcgcttcaggtccttgaccgccacgttcttgacgttgaagccgacgttgtcgccgggcagcgcctcctgcatcgcctcgtggtgcacctccaccgacctgacctccgtcgtcaggcccgtgggcgcaaaggtgaccaccacgccgggctccaggagcccagtttccacgcggccgaccgggacggtgccgatgccgccgttcttgtacacgtcctgcagaggaagctgcaggggcttgtccgagggctgtgt

SEQ ID NO: 270479 - DNA, 787 bp, Zea mays
atatatggtctttatgagccggtaaggccacgctcatggcttacatttttttctcagaggtcaaagaagttgcatgtttattgggtttcaccaagagaaacaaatctgaaagagttggattggacatagacacttcacccaacctgtgcccaacaacaatgcggtagtagccactcactcgagtctcaaggtgtgtgcgctagtacttgccagcggggtgcatgagcacgaacaggttgatctcgttgacgtccgtctccggcgtcggcttgcttatcatcttgaaaagcatgtacccgcgcgccagcctgaacttgccggtgccgccgaccacggcgcgctcgatggtgcccgtgaacccgagcaggggcccctgcacggacagggtgctcccgttgtactcgccggcggtgaacaccagcgtgatggacgacaggtagccggcgcccagctgcacgctcgtgccgaagaagacgccctggtaccggccgacgagctgcgacgaccggtccgggcccacgcgtatctcgtcgtccaccacgcccatgctcccgaacgacgagttggcgcccagcggggactgcagcacggcggcggccgtggcgttcgccccggtgtacgtctcgtgcacgtacaggtggatgtgcgtgaggccgtggtcggcggcggcgaaggcggcgacggacgacaccaagaggaggacgaaggggaggtgggcaagcgccatcgtgatggctgcctgccttttgggccttagccgtcgactgttccccggcttcgtttacat

SEQ ID NO: 270480 - DNA, 502 bp, Zea mays
gcggccgcccttttttttttttttttaaaatatgagaattccgatacaattgattgcaagaagtaacataacattacagctccgccaccctgaaacataactaaacgcgaggcatttttaacttaactcggttatcgatattccggcaattctagctaaccatatagtacagcaccgccaccctgaaacataaacaacttaatggcctagaatgtgagtgagaaaattgatagaaaaaaggccattaaaatcctggtatgttatgctaatatcaacattacaccaaaacattgagcgcgtgctcggcattatctgcaatcaaattcgcctgcgcttatcgacccctggtttcctggatgctgctgaggtactggaattatcaccaccagattgtatcttatcaagcttccctctgactagctttacagtagcattcatcgactcggatggaaaataatccttgtctgagggcacatgactgaaacgaggatcttaataggag

SEQ ID NO: 270481 - DNA, 571 bp, Zea mays
gcggccgccctttttttttttttttttttttttttttttggagcataaacaaaataaaataggtttgagagatcaccgaaggaaagcgactcctggaaaagccaacgcgacaccaatccattcttccctcttccacaggctgaggaccgaacaccgaagccaggcagccagccgaggaagccaggcgacaggcgacgccaagtcgagaacaccctaggtggtcgctcgcaggctgcgagtgagagccgtggcggagtcgccgtccttgcccacggaggaggacacagccgccggcgcagtgggatggcgacgccgacgcccatgcccggaagcgaggggacgctcgtggcggtgatgccgcggtccccgttcccgacgccggcggaggcggggacctcggcgaccgagacgcccgggctaatattcctttacttccacaaggcgatccgcgcggagcttgaggcgctgcacggagccgacgtgctcctggtcaccgagcgcaccggcgatgtctcggtgctcgccgagcgctgccgttttttcttcagcatctacaaacaccactgcgatg

SEQ ID NO: 270482 - DNA, 388 bp, Zea mays
  unsure (1)..(388): unsure at all n locations
gcggccgccctttttttttttttttttaccagcaacaagacagcagcagacgattatatatggtaaatgtgaaacccagcttgcccttttgggcgggcttttggtttgtttcgcttcgttatattagtaggatatgcagagaatgcaacggagcatcgtccccttggggagatcggaatcggaacaacaagcattcggtgggcggcggggcgcttccacgaccctttggatggggcttttgcttgctggtcgatcgtcgtcgtccttcctgttgcatgcgatcagtagccgttgccgccgccgccgccgttgttgttgttgggtggcgggggcggcgtggccgaggcctcngtgaccacctccatcatggttgactgctggtcggcct

SEQ ID NO: 270483 - DNA, 922 bp, Zea mays
tgtcttacggcccgaaccttacgatcgtcggggagccaccggtgctgagccccacagacatcactgtaccacacggtttggtggtgtggccactggcgacgatgcgcacaagatcagaacaagagggcgagaaacatagggagaaaggaggagaggaacggagagctggaaaaggcaggaaagacccggcttttgaccccaagtaccctgttgagggcaatggcggccacctccgaggaggcaatcaagcagttctcggcgctcatggagcagctagaggagccgctaaagagcacattccagaatgtgcatcaaggaaatctgagagggactttgatgcgttttctgaaggctagagaatggagtgtgcctaaagcttataaaatgctaatggattgcttaaactggagagtacagaatgagattgacatcgtgttagctaaacccattctgccatctgatatatatagagttattcgggacacgttacttgttggattgacagggtactccaagcagggacaacctgtttatgcatttggtgtgggtcttagtacttttgacaaggcctcggtgaactactatgtgcaatcacacatacagatgaatgaatatcgagatcgtgttgtcctgccggctgcatcaaagaagtttgggagacagattaatacctgcttgaaggttatggatatgactggcctcaagctgtctgcactgagccaaataaagatgttgacgatgattactactgttgatgaccttaattatcctgagaaaacggaaacttattacattgtaaatgctccatatgttttttcagcgtgttggaaggttgtgaagccactcttacaagaaagaacttaaaagaagatccaagtcctgtatggctctgggagggatgagttactgaaggtcatggact

SEQ ID NO: 270484 - DNA, 1182 bp, Zea mays
  unsure (1)..(1182): unsure at all n locations
gtcatctananattcagtttctgagtcagagcttgatgaggccaaagaggaaaatggaagtattttttatgccctgagccaaagaattgttgagctagacgatgcgcttcaagaagcgaggatagagcttgatgctttagaagacaagcatgcacattgccagaatgatttgagtacgaactcagaagctgctgaacatggagaaaaactgcatacttcagatgtggattccgacaaccttaagaaggatccagaagaaacggattctgctttagagagctcaacagaagtcaacagcctaaaggaagcattggaagctgtgctgtttgagcgcaaaaatgaaatcgaaattctgaaaggtgcaatggcctcagctgctaagcaatttgacgttgaattggaacatcgtgatcttgaaattgataagtgcaagcatgaacttggagtactctcagagaagtatttgcatgataagtctactcttgaggatgagcttagaaagctccatggagtcatcaagaatatggaaggtgacctagaaaaaatttcacaggagagattgcagctcaagtctcggattaaagagctcgagcaggcagctcacagcttagactattcagcttccgagatagttgagctacaagaagtaataaggaatacacaagcagaattagaaaaggtcacagaggagaaagttgtgctcaaagaacgcgctaacgaatttgagcaacttttaagggcccttgaggtctcaggtacagaggttgcaaagctaccagaaactatcaagaacctggaagcccagctagaaagagccttagaagagaaatcaatacttcaagaccagatcaagcaggtggagcaggttatgtctgaatctttggagaaacattcacatgagcagtcctctcttgctgctgaccttttgaagttatctgaagcgaacacttcacttggaggcaaattatcctctgtggcggcagagcttgtgcaagtttatgctgataaggaagaagaatctcttgataatgagaagcaaattcctacgtcctcaatcaagatattgccgatctgaggagaaagcttgaattgttatcatctgagaaagccgcagttgatgatgagttggccaaactgctagctgatattacgactcgtgacgaaaagatgaagcgaatggat

SEQ ID NO: 270485 - DNA, 525 bp, Zea mays
tttttggagttttggtcagaatttgagttggatgctgcagatatgttggtaggagtagttgtttatgtagctttagtcggcatgttagcgccatgggctcgatttggtagcagatctgcatcagatggtctccttgggcgcgttaggcatgcttatgatgccctcccaagcagcgtttttttatctttatagccaagatacaaattttctgtgcaacaacggataagaacatactttttcaaaggaatattgtatggttctgttggattcttttgtggtcttgtgggacaagggattgctaatttgataatgacagccaaacggagtgttaagaagtcagaggatgatgtccctgttccacctcttctcaagacttctgctttgtggggtgcattccttgctgtttcttccaacacacggtaccacattattaatggattacagcccctggttgacgcttcacctgttgccaagcgtgtcccggctgcttctttgccattcaccgttggtgtgaggtttgccaat

SEQ ID NO: 270486 - DNA, 516 bp, Zea mays
gcggccgcccttttttttttttttttttttagaaaaacgaagttccatcataaaaacctaaaaaaatacatattacagacttacacacaaatcattaatggactgaagtagctaaaacgctaaccacagtgcagtgaactgcttgctacacgaagggatggaaccaggcccagatttacatacagaattttacaagccatagaaccatgccaacacgaaggaatgacaccacacaagagaaccgggcaaggaggctcccagattaacttgctaaatagcaaggaataaccacaaaaatgaactgataaacacatttcccccaggcaaggagctcagggcacctactgacagtacaccaccgtgcatcacactaccttgctgagggaaccgtctcacttgaatcaacagcctcctttgtcgcatctgccttgggactcctctcctccgtgacgcagtccgagctatcaggtccggatgagccatggaacgagatatcaggcttgaacagatcaccat

SEQ ID NO: 270487 - DNA, 366 bp, Zea mays
gcggccgcccttttttttttttttttttgaacaaaatgaaggttatgacgagagcagctaccagctaccatataactggcggtacacatggatcgattatctctttacaaacaggttcgatcagccatatctttttacaccaggtattatcagctaaagagaaatgctaatccatatccatgactgaacttttggccctatatctcctcttgaaaacatcttccctgaatagcttggtttcagccatcaggtccatggccggtttctgctgtatggtttccttcccgctctccagcatgctcttccgttttgtgagggcgtttatcgcaccagccagcctgtcggtaaacagcggcttctcctcct

SEQ ID NO: 270488 - DNA, 975 bp, Zea mays
tttacttttttttttctcaaaatgacggaggccagaacggggggattttaaattcctaatcaactgaattcaggtgacgggaagggaaacatccgcactgagtagatgtgcaattaccgcaccatcgcaaatgcaaggatgagacgcccgcccacaacacaaaaatctttgcaaattacaagtatgaagttcgatcagcatgttcatttgctgtggactgccccgaatatgcatagccccagtcggtgttttacagggtaaacaccacactggtgatgtccgggaatttctccttgatggccgccttgataccgctgccgatggattccggcccgtcgtacctcaccaggcagtcctcgccatcgacggccaacacatccacgctcccgccgtagttcgcgatcgctggccgcagtatgtccaggtgccggttcaccgcctcggccgttgtctccgccgccggctggtccccgtcgaacacctgacggatttccttgaaagcgtcgccgaacttctccttgagcacacgctcgatgcccatattcatcgtcgtcgtcgagctggggcagctgccgcaagctccttcgagcttgagggagatgacaccgtcctcgacggcaacgacggtgacgttgcccccgtcagagatgaggtacggccggacgtcgtccaggacgcggtctacgttttccggggtcagctcgtacgtcgccgccgagtagaggccgcctcccggcgccggcggtgtggacgcggaggccgcgaccaggcatgcccgcgaaccggaggtccagatcttggagggtccggattggaggcgccgagggcgtgggagtggactcgatttggtgattcggatgcggattcgcggcggagggaacaagccgacggcggcggcggcaagggacgcttccatgggttgtgtggtttgcgtatgagcgtgctcgtttgtgcttatgctggcgtcaaggtgtg

SEQ ID NO: 270489 - DNA, 863 bp, Zea mays
gaggagtgagaagatactagactgggttattcctgaaatcaaacggggcaatacaacatactattatattgcaattctttgaccaaataacagaaaaaattttattgtaacacatggaactttattgtctgaccttagaacatcacgaatgcttatgtacacaagagtatgaatcaaattacaaactgtaaagctagtaaaatgtagcaccccatcatatcttgagtggatcacattgcgttcaccctagcagcttgagtgcaaaacaaagccgctcagttttcaatgtacacccttttcgcgaacaacaccgctcagttttcaatgtacacccaatcccattcacgaaaaactttcacctctccattttcttgcacagcagaggtgtctacgaacaactttcacctccattttcttttacagcagaggtgtccagtttccaatacacaggtcgatttctccctttgcaaattgcaattgcaactataaatcatttcacgtcatcctcttccaagtcactaaaagacacgtcttcctcgtcacctatgtggatagttgggtggccagcacgatcagcctcctcgaaccaatcgtctatgccatcatcaaaggcctcttgcaaaacatttgaggtctcaccatgacccttgggcagctcctcttcgatgaccgatttgcccacaactgcaacttcagttacttggataggctgcttctcaatctcaatttctgtcatgggcataacagaagctgcttcccatcgcgtgaatgggaatgcttctgtagcatctttcaaggtgtctcctcgtaattgaactccacccacgcgtccgcccacgcgtccgcccattcacccgtggacg

SEQ ID NO: 270490 - DNA, 602 bp, Zea mays
cggggtaccagatcactttacgcgggcccccccctttttttttttttttttttttttttctttttttttggtactcaagggcgagttaactatttgcattagagggaattgtcaactctgacatttgttccgctgatgtgcctttttcacaatgtcatactccatttgatacacgggttcgttctgtatagcatcgagatatatttattctaatggaacaaacaaaatttcatgccagtttacagcttggagggggatcgataccatccccacggctcatcagagatgtactccgtgacttgcttgacgctcaggtagttatcaatgcccccttctccaagctcacgtccaaatccactacgcttgttaccgccccagggagcctggcagaagcagggctgtgagcagtttacccagatgcatccagcgtcaatctcctcagataacctctggcagcgctcccgatcaccagaaattacagcaccagccaaaccatactgtgtatcgttggcaagttcgatggcttcatcttcagtgctaaattctttaacgcacaggactggaccaaagacttcctccctccagatttccattgatgtggt

SEQ ID NO: 270491 - DNA, 997 bp, Zea mays
tgagatatataagtaactaaccctttgatatatggaacctgtaacaggttatatgagccttcattgaatgatgttagttcctatctgattctttattgggttcctacacggcgtgatggacaggttggcgatccgtcgatggctatctctgatgatccggtcatggcagcttttccatctgtttcggatgttcacttagagcagaaaagttcagatgtatattgtggactaggcatctattatggtggatatgagggattaagcttgtatagatggtacagggaatctagtgatggaactaggcttcacatagatggtgctgattcagtcacatacgaagtgacagatgctgattacagctgccgtctactgtttggttatactcctgttcgttcagatgggataagtggagaagaaaaactctctgaaccatctgatgtaattttgccagaactactcaaaatcgagacactcaatttcaaggggaatcaggttgaaagagaaacactgactgctgctgaacaaattccgtacagtgagattcaacaacatatatggaaaaattataagaaagagatgaaatatcaatggtttatttccaatgaatcaggaggcgatcagtcttttgaaccattggcaacccagtgttctcgctcatacaaagtgcgctttgaggatattggtcgttgcctgaaatgcgaatgctttgtcactgatgtatttggacgatctagtgaattggtatccgctgtgactgctcctattttgccaggaaggcctaaaattgaaaagctggagattgaaggaagaggtttccacactgacctatatgccgttcagggtacctatagcggaggcaaagaaggcaagagtaaaatacaatggctcagatcgatggttggaagccctgatcttatctccatacctggcgaaactggaagaacgtatgaagctaatgttgatgatgtagggtataggcttggtgcaatttatacac

SEQ ID NO: 270492 - DNA, 863 bp, Zea mays
tcgagcctaacccacggttacgactccgacgacgccaccccggcggcctgctgcccagctccctctgccttcgcgcagtgcctcctacccttttgaatccgcgccgtgccacccgagtccaggccggcaggccccagggtgcgagggcggcaccggcgcaggcgaaccgcagtccgcgcctccgcactccgccccatccgaagctccgagcagagcaggagcagcaaagcaagcgagcgtcaggttagcactctgcagcccaccaggcacaaggccacggctaccgggcgggcactggcgaccgctacctggccgccagcagcgctgtcctccaaccgctattgcgtatctactgtcttccggcttctgcgtctgagcatcgcctgtggcggactggctgaatcgagaggtggaggcagcaaccaacaaggtagcactatgaaggtcaagattcttcagtggcatgcagtggcttcttggacgtgggatgcacaggatgagacatgtggcatatgcaggatggcttttgatggctgctgtcctgactgtaagttccctggtgatgattgcccactcatttggggtgtctgcaaccatgcttatcatcttcactgcattctgaagtgggtcaattctcaaacatccacacccctttgccccatgtgccgtagagagtggcagtttaagggctaaggtactatggacatctagaactgcaccaagcgactctcagttctcagagaaggctgatgtttttctggtacttctgtgatgctttattttaactactacatattgttttccgtatcataaatcctgatgtcagtgcctgatcctgtgtatgcttccgagcttgtagtgga

SEQ ID NO: 270493 - DNA, 375 bp, Zea mays
gtgaagggaagcagaagcgagacaaatccccacccggctccaaaccctagccacctcccccgtcccccccttttcgtcccccagatctcgctggcgtctgctccgcctcgcttcgatgtgaccccaccctagggtttgagacggtgttgcggtgtgtgcgtgtgtcgcggcgattcgcgacgcgagtaggattcgaggtgtcggcggcggtgcgagcgcaaatgaaggacccggcgcaccgcacgaaggtggtgctccggcggctgccgccggcgatcgcgcagcaggccgtcgtggaccaggtcgatgcgcgcttcgctgggcggtacgactgggcctgctttcgtcccggcaatgccagccaaaagaatcata

SEQ ID NO: 270494 - DNA, 495 bp, Zea mays
ccctctcgtcctcccacgcgtccgcagtagcccgccgctgcacgcacgcgccgcgaggaggtctggagcggctagctcgtctggagctaagtcagccaatctcccggaccgtcccttctcagttctcatggccgtccgccgcaggcccgcggctgctgctgccggggacctgcctccgcaggctccaccggcagatgcagcgccgacgcctgcgccagacgaactggtcctccggccgccaaaccttcgtgtggccgctgtggcggcggtgctcttcctcgcgcccttctcttatctctcgttcgtgcgctaccgcttgggcgccgatctgcagcgatccatcttaaaatgcggcgccatgagcctcattgggttctgcgtcgcgctcaagctcatccctgtcgcggccagctaccaccttcgccgtcggatgttctgctactacatcaacaagaaaggcttgcccacgggccaaatcaaagtgcctgaagcact

SEQ ID NO: 270495 - DNA, 473 bp, Zea mays
tccgctgtattttttcaaatctggctatattgtggagttcagtcgctttagtgctttaggtgtactttctgtttgtaaaacacttaagacaggctgacggtctgaataatgagttcagaggaagggaaggaacgagtttgccttcccatccgctctcaaaaaataatatataatacaataaaaatatttttctttccctacatctctatcgaataatacatcatcatgataagttgtcatttggtctatgacttgtgaaactgcaatccctcagcaatctcttgtgcatttttccttttagattcatgcaattcctgacccaagtcaggtgtgtgttcttataatgtttctcgcttctttttaatgtttcttgctcccttgttgctcagacagagcagttcggaaccttggacatctgatcaggaatgaagaggaaaacaaatacatacaggttgttcattactactcaaaag

SEQ ID NO: 270496 - DNA, 386 bp, Zea mays
tctagaacggtcaaaaggaagccgtggctcttattaggcaacaaactcatccgaggcaaatccgctgcagtctttttcataaccatacttgcgtttgctgtactcgccttcgcttatgggacacaattcaacaatatggatctggaataggcaaatagctaagtgttgtcatggttcacttcatatatatatatatgcatatatatatgcatgtagcccgacagctatatattccggaatgtgcttgcgcccgagatgtaagaaaacgttgtacactatagatcagttctatgcgtaacccggttgggatttttccattcccgatcatgtatacactacaatagtgcatagtctagtacagttggtttttggattggctagagctt

SEQ ID NO: 270497 - DNA, 348 bp, Zea mays
cgtttcagtgtttctgggacgctttcataacgatgagaaatttttctgcgcttgaaaaaggaaaatctggttactatgaatattatcatcatcaatgatgtgagcgaggaagcgaggaagcttcacatacaacaaatcgaccgggaattaatgttttagctacaattgctaaataatatatgagctgaacgatcatcagcgccacaaaatggaactcagttcagcaatctgaacactccaatcatctcttccctcaacttcaattgatccccgcaagttccggccaccccttcgtggccgaacaaacatggtcgtcgttgggctcagggattcagcttcagagaggcc

SEQ ID NO: 270498 - DNA, 482 bp, Zea mays
gcggccgccctttttttttttttttttttttttagataacacatgacgctttgcttttccgttagaacaaacataacggagcacaaggcaagcgaataaatctaacgagtctcgtctccagaactctagattaggactgtagctaatgaaagttcgtcaaggctacccactgttccaacaacagcaccagtgctcaggacatcatgtcattgtcatgacgtaacattcttaagaaggcaatgacagaaagtatctctcagctccttcctcgacacgtacaaaaaacgagtaagcgtgacccgagtgcagcttcaggcttctgcttctgctgccttcgaagagttctcgggcgcctttagcggctcgtccggcgctttgcttgccctgtgaaactccaccgcgtccttgaattcctccctgggggctgtgcccttgaacttgagagcaaacgtggcaaggctgctcggcgactccccaatgct

SEQ ID NO: 270499 - DNA, 437 bp, Zea mays
gggacaagaacaacaaaattagtcgagcacaagaaaccattaaaatacagagtccgtgagcacggtatttatagacaacttcgatcaaaacagctgttcacatcccttttgcaatcccctactaccttgtgagttcctagcagttatttttttctctggaacgagcagaagaactgcacatcattctattaaggaggaaaaaaaggtccaaaatgaaatatctcattctcaatctcaaatttagtgctttggagaaaaacttaaagcatggtgctccggaagggcggaaactagccttggtgatagcagcaggacaaatgccaagattgagccaaacagcatcttggtgaggtaatgcgtcaggtccatgctgggaatcgatgtcgtcaggctttctggtcgcgagcgcttaagcagagggcagggcttttacgaca

SEQ ID NO: 270500 - DNA, 970 bp, Zea mays
gcggccgccctttttttttttttttgatgcaaatagctcactactggctttgagaggtaaaacattaccaaatccaatggttcataggtacggaaaattcaaatctctaggcatgagcagtagcccgtatacaaatgaatacatgacaggcattctccgaatgaactagtcaagaccccccattagagcctcacgccatttcaactccatacaacaactgcctccacatgcttgctactcaagtccctaggactactctctcgaggcagatctttaacaacagatctagtttgtttcagaatacttgaaaccatgcttcttgaaatattctcgaaatccatacacgctttggtcatagttgaacggtagcacttttacagaatacttggtgatgttaggatccacgctctttcctgggcttgcagcctgttctgggttgtagaatacttcaacacatggatattcgttcctttgccttgtgaggcaaaacccagggtacttcgggcactcaactcggacaaacttgatatgtggataaaatttagctgcggcctcttccagaactttatcaagatgctgtgtatatgtgcacttaatagtaaaggcaacgactacaggcctgccttcatgtaatagctgcacaaactgacgctcagatgtgaatggtataattcttgatcgccctaagtccttgggatatccagtgtagtacttgcatgttgaccgaagttgggaaaccatcctatcaagaaaagactcatccatcatctcttaggatccaatgcagttcagatgcaatgttgtcgcagggtcaccggccggtgtgcggaggaccggaggcgagggcgcgagggtaagcccgtgacgccgtccctgagagcccgagcccgagcgccgccgcctgtgtgccgagcgcgagtaaggaagggagcgggagatggagcgccggcgctgcgaggaagatgatggt

SEQ ID NO: 270501 - DNA, 444 bp, Zea mays
tcgccctaagtccttgggatatccagtgtagtacttgcatgttgaccgaagttgggaaaccatcctatcaagaaaagactcatccatcatctcttaggatccaatgcagttcagatgcaatgttgtcctatggtaatgaacaggtaattaataatggacaaaaataagaatggacaatcatgtatgcactaataaggggggaacagagttcataaaacaacatattagacagagagagaaaatggtatgaataaacactggttggaagcttatctaatatagtaattagtaagagacttatctcatatagtaatatgagatttctcacataagtacataaaactgaacatttgtctcccccactcccattcccaagggcaagtgctgtataatgactaatatacagaggaactgataacctataacaggactggcataagttag

SEQ ID NO: 270502 - DNA, 1322 bp, Zea mays
gcggccgccctttttttttttttttaaagagagagaaaaggattttattacaggatcgaagagtgttgttacacccaggctcgcctttaactatacacatacttttcttataagcttttacagccagtaaacgtcatacttatatgttgtattgacgtatctactattgcatcagcagaagattattcacagtcgcgtttatgttgtttgtcctcatcaaatcctctataattagctcgtcaggaatatgaggtagaacttcccgcaccctatctaccatagtgagtacctctgaaagacttccattgcctgtgcctgcactaccacggagccgcaatccggaagcagatgcactaccaggcaccatcgaggaagtggatggaacaagagaggaccctgccatgggctcgggccataggttccaggtaccatcagcatgcccataactgtcggtcacagaagccaactgcctcatcatcatctgaactccagtaagacctactgacctcactgcactggaggaactcggatggtccatcacagggcttgaccacggtggaatccagctagcatccagaccagcacctctccatacagcatctgaggggttctgctgttcaacaggatgttccttaccaggaactctctgctgatccatccccatagtaagttgttccgcaattcgctgaacatttgctacctccgcagttgtagaccttctttgcccttcagatgacaataagagcggtctccgacaagttggacaggagtaaccttccattagtccttgatccaaccatgaccgcaaacaagctagatgaaatagatggttgcatgacaactttttagctcgacccatcggtcccctgcagatggcacactcatcatcatatgcacaaatttcatcatacgtagcatctggaagtgctccatcgagtgaactaagtgccttccgtaacttgatgtaagttttaatcctcttcaaaaaggaaactataagagcacgcaagttccataagagaactgcatcaaccagatgaaacgccataccacgaagccaaaagatcatcgagtaatgaccaagtgacatcaacatgcttatcaaatcaatggcaaaaccaaagttcctagtaagcttgcccctccattcagaaaaagatcctgctgcttgcttataagatttctgtaaatcaaggaagtctgcaccactttccattagatgatgctgccagatgtcaaataactgacacccatgcaccatagtagactgcagtgtatcaaaggcaatacgaggggctcaaagagcgtcacgggtcgctcga

SEQ ID NO: 270503 - DNA, 643 bp, Zea mays
ctcatatccctgatgaggtagaacttcccgcactctatctaccatagtgagtacctccgaaagactcccgttgcttatgcctgcactaccacggagccgcaatccgtaagactcccgttgcttatgcctgcactaccacggagccgcaatccagaagcagatgcagtaccggtaatcgaggtagtggtaggtacaagagaggaccctgccatcggttcaggccataggttccaggtaccatcagcatgcccataactgtcggtcacagaagccaactgcctcatcatcatctgaactccagaaagacctactgacctcactgcactagaggaactgggattatctatcacagggcttgaccacggtggaatccagctagcatccagaccagcacccctccaaacagcatctgaagggttctgctgttcaacaggatgttcattaccagaaactctctgctgattcatccccatagtaagctgttctgcgattcgctgaacatttgctgcctccacaatcggagaccttgtttgcccttcagatgacaatacgagcggtctccgacaagttgggcaggagtaaccttccattaatccttgatccaacccggacgcgtgggcggacgcgtgggcggacgcgtggg

SEQ ID NO: 270504 - DNA, 909 bp, Zea mays
  unsure (1)..(909): unsure at all n locations
aaaaagnaaaaaaaaaaaaaaaaaaaaaaaaannataaataaaaaataaaaaatntttatattttnaaattttttagtgaaaagctcgattatgcatagccaataaactaattccctggcgtcaccagctgtttcgttttacagagtatcaaacactacacgaccaattgggacacgactaacctggaaaaaaactatcatcggagttcagttcttttactagtgtacactgcaaataacagaagttaaaaacaaacaattgtacacgttttatgtagctaaactctctaacaaaagccctggatgcgttgctgtaacttttatcttccgataaccatctaaaactttgctccaggagaagtggaagacggatgagatttactgacgtgattcaacaatgcttcagagctcagttttgcttttgctggatttggcaggcttctttgcccctttccaccatttctttaccataccggacaccttgtttacatgccctttcaacttcttgctggtatccttgaactgctgcacgacttgctgtttcaaatctttcttttgagagcccttgtttttcagagctttccccaagttctttgggaagttgtcatcctcatcttcatcatcctcctcgtcgtcgtcttcagtaccaaagttatttttcatcagatcgtccctggagtacattttcatgcttggggctcccggcataccctccattgatctcaatatcttttccatctcagcatcctttgatggcttccttgcaaatggttccccagggacacgatcttttggaactgacggtgggtccttggcacatgctttcgaaagatccttgcaagagaaatttcataagctgatcgaccgaggggttatttttgtatacaaactcagcaacctcgagccgaa

SEQ ID NO: 270505 - DNA, 1066 bp, Zea mays
tttagtttattttgttatcctttttttcaatatgtttttctttttagaacaagggtagatttgcccaaaacacatgtccatattattacatcaactaggccaacaacacagcgattacgttaagtttccgaaaatcacctccgacacttccccggttctttctttaaacccagctctagttccagtccactccgaaactacacccggcgctgcttggggagccggcacccattgtgaggaagctgggtcacgtcgtggatgtacatgataggagattggtccctcaccctttcgcctcggaacccttctctgaagctcaggatcaccttcttcttcttcttgaagaacgaagcccctttcaccttcatgacgatggagctcaaccccatcttcctggcggaccgtccgacctgctccgcgaccgcttcggaagcgtatcgggagagacgggaccgtcctttcctgtcctccaagcagccggcggaggcacccgtctttttgttcccgctggagtctgtcaccgtcacgaaggtcttctttctcttcagtaggacgtggacgaaagctctcttcttggaatactgttcgtggtccatggcaaaggtgcggaggttgactgtgaagccctcccttgagctgaaagggttctggccacggggtgtcccagacatcgccgctccattatctgtgttgttgaagttgacctgtgtcttagcacgaatatcttgagacacaaaaccagatctgttaaaattctgacgtggatccgtatctgcaacaactccagacccagaaggtgggaaacccctgttgtgtcccgatgcatctgaggcaaaggaacgtgggaggagctgcccatggagaaaccttcgcgaaaagggatcctccgcggcgcggcagaggcccgccccaagagaggcagctcggcgtagggcaaggcgggcggatgagaacatggccgtcttcctcgatctcgtaccggtcggcgctcttcgccggcgaaggcctcggcacctggcgttgggcggggcggcggcggcggcagtatctcaaccggacgcgtggg

SEQ ID NO: 270506 - DNA, 370 bp, Zea mays
gcggccgcccttttttttttttttttttttttttagaacaaaccttgagaggtgaggtctcaatgcaagatctcatatcataccgcggcagacatttcagaactcaacagcattattacgcagaattgtctataactcatcgagcgagtaagttgcttccatacaatacaagaacaggggtagatttgcccaaaacacatgtccatattattacatcaactgggccaacaacacaacgattacgttaagtttccgaaaattacctccgacacttccccgggtctttctttaaacccagctctagttccagtccactccgaaactacacccggcgctgtttggggagccggcccccattggggggaagctg

SEQ ID NO: 270507 - DNA, 1020 bp, Zea mays
agtgcaaaatcagtacagtaccaccttgcataatttaatgacagccaagaacattgaagtcccgcatttgtgttgcgaacaaccaccgccagcagtgagcaggaagaagtcggtgtcgtgctcgtgcagcacaccaaacacaactagtgctaccgcatttttcacagcacgaaccctacaatatcaccacccatgtcattgtacagttatggtatatcattcacagcacaccgtagagaaacaactcaacttcatccacatacatttcgacgatagtattaataccgcacagaggccaataagattccatctcactcagggcccagaaacacccttgtcaaggccgtaatccgtcatgcccacaccaacctcattttggtgcttcatgaacccacccgtcgcagcttttgagtaactccagtagtacaccagggacgccaggaggttgatgatcatcattgcagcagctgctgcaaagactcccttgcgaagggcggcgcacgacaccaagtcatgcttcatgtagtagcctaaatacttggtgtgctttgcattcctcaccgatcctcctatgagacaagcttctgcgacgaggaatgttatccaggagaggacgaatgccgttacggcacagccgcgggaggagagcacgggtccgaagcagaggcaccgcgtggcggcggtgacaatggcctgctggagcagcagcacgaagaaagcggagacgccgtacaccgtggaggcgtcagtgtcgtagaggcagtaggaccgctcgtcgtactcgtccggcatcaccttcccggtgctgcggcggcgctcggcgccgacggcgagaaggacggcgaagaggttgaggaaggtgaggaaggcgcagagggcgacggaggcagggcgcgaggtcccgaagccacccataggtatcgagctccggcagcgacgtcgctctaaggcggaggagagaggcggagagctctctcttccttcactctgggggagtggtagcttcctggtacgtagggg

SEQ ID NO: 270508 - DNA, 1354 bp, Zea mays
gcggccgcccttttttttttttttttctaaaaatttagccttaagtaaggtataaaaaacagttattcatgtgccttagccttaaacatgaacaaatgaaaaacagttatgccctgaaacttattttgtgcttttgttgggggttttaactccactgtagctttagaactaagctgacttaattgttgctgctaaagcagatgagaacgacaatatacagcggagtcaaatatatttgactggcacaacccgattctaatttcagcatgttcggtgcatcagaacctacaaggaatgctctccaacttcaccattagtttacagctggagaattttacaagagtccagattataagccagccacctcatgagaactacaaaattcacaatggacagaatggtttgattagacctacagcccactttagtttgtttgtactgatagctcatcctccaagaagttgtactcgaatgtgaagtcattcttgattctttggcaccatcctgagccatcctcggtgacatggaaatcaaagtatacatatgatccccgctcatactcatcagtcgtaacctgtggctccacatgccgctggaaccaggtattgtacctccggtgaaatctccacgattgcttcttcaattctctagcagccatgtattgttgatatgtgttctgctggtaatagaacgcaaagaatagcatgtcggtagctaatgtgtcgctaccaattctttcccagaaggagggatgagatacaattgatggctgaacttggggatagctagcaggggtaactgcagggtgccgcggaatgtaagttttagcacgctcagagtccttgggttgtggaagcttgtggaatgcagcttctagcatttgcaggttataattctgatcatgaccagaactaccagaagttccagtaaggttatctccgattgtaccaagatcagatacacttcttcggccgataacaccaacaccagatgatggcattccaggttgcaaaggctgcccaggtgatggatcagtatccctaggcagctgattgctttctgctgcaggtgctgaaggattcgaatatggaatctttgtgtcatcttcacttgtttgtttatttgctcctgttgttgcagaagattccacaccaacatcttcagccaaaagttgttcttcttcttcactttttatatgccccgcgtctgttccttgaactccaagcccaagattcacttgggaagatatagaggaactctgtgaattaaactgttgtagaaggggatttggctgtggtgttggaaattgcttctgatttatgccagttatatgggaaacattcagaaggctgcc

SEQ ID NO: 270509 - DNA, 1017 bp, Zea mays
gcggccgccctttttttttttttttttttttttttttttttttttttttttttttggctcaaggaaacacattttattgccaaatagaaaagctaggggagcccccgagccagggattatacagcatgcagtaaagctaaccaagtcaaatcaaaagggcgaaatgatgtatgtacatgctactatctagttagaccacacatgcaccagcccatggctgttgccggtgtagatctcattcctgtcctcatcataaaacagtgcagtgacgtcctccagagcttctggaacggtgctccagtccgaggaccgcttgctgtaaccatttctgcgtccgggtacacttagggaaggatcattggcagtaatcttggcgatacacctgccagtcatgatctcgctcatgttgatggatccaactggaacaactgtaccatcctcagccactgcctcggatttgcagtacgagataatgagatcctggtcactcgtgatgtaaatattgttggtgctacaatcattatgccagagcaaatggtcttcaaatgaagtcacaagctctcctctgaagtcccatacagcgactgttctgtttcggaatgtcaagaagaggttgttctcatacagaaaaatgaatgctgaaggggtcataaacttggagacactgacttcaattagctcagaactccgcacatcaagtatctggaagttttcgtcctcttgcttgacaaggagcttctcattgaactgctcgatgaaatcaattttcttgttgcgatgcaacaagtgcttaaaaaatttcagttgtttcccatcttcaatagataatatcttcaatgggacataacttggtgttctgtcgtatatcaagagcatgattcctggactgatctttatctcctgcacattttcatctggtattgaatataggaaggagtagttcttcaagtcaaagaccttatatatgccatcctgcgctgaatatgtgagtacttttccattcaccggacgcgtggg

SEQ ID NO: 270510 - DNA, 592 bp, Zea mays
ccaaactgaagtttgcaacaagatgatcctattacggtctccacaagctccctgtcacatccactatatcatcatctgtttcaaactatcacaacccctattttacatgatccaccaaagacagcctgataatcaagattctgaacgcaatttacatatgtgatacaccataccagaatgagaacgcgatgcatgttttttttaggggaaggggggttataagaaaaatagcatatcactattgaaaaatggaccaataataatgcaaaagaaagatgttacaattggagaaaagagagaagaggaaaagcacaaactagttacaaatgagattataactgctgtatctagctccatgggtcgtcccagcctttgggcccctccctcttgacaaaatctacaatggccacaactgcttcttgcactctgttggacagagcatggtttccccattctatctcgactttctctgcacctcccagcgccctacatagcctgtctactagagccctcttatcaacatattcaggcacatattcatcccccattgaaacaataacctggcactgtgtggttgacatatgaccaagtc

SEQ ID NO: 270511 - DNA, 403 bp, Zea mays
accgtaccgaaccggagtgtgcggcgcggctcgcccttttttgtttgttttagtaacactgattaattgattcaaatgtgaaatccaagttctgaacctatgaattctacaaattgggcaataataatgcaccagacatcaagaggaaactaaataacgcaagtagaatgttataccacaataatccagaaaggtttagtccactaagctgagcagcaaattaagaacctccttctttacgtcgccttgacggacctccgccttcgcctctgctactctttgcttcttgatcttggattccagaccttctgccttttcatcagcaatgaactcaaatgctcttttcaaagtcttcccacatggatgaagggcctcaatcttcttcacataaaaaggcagggtg

SEQ ID NO: 270512 - DNA, 446 bp, Zea mays
  unsure (1)..(446): unsure at all n locations
gcggccgccctttttttttttttttttttttgctttgacaatattattattatttattattattataaccacgaaagaacatcaatctcgatacaaaaaaaaggttaatctaacccgttagatacaaagaaacacgcccacgacgatgcccaaaacaccaaacgcctctcctatagacatttgtatacgggaagagttcacatgcaccacaaaattaaaacgtctcagcaaccgcgttgcacccttacaagcctcgcaccagaaccacattgggaggatgatctgaaaagcatcagtgcgtttcattgacagcatcacctgttttaggctgtcaccggttcctgcacaagaccagcgattattcctttgctcaactgtttagattaacctttttnttgtatcgagattgatcccctagcgtggttataataataataaataataat

SEQ ID NO: 270513 - DNA, 838 bp, Zea mays
gcggccgcccttttttttttttttttttccctccaatattgatttttatttatatatcatataaaaccccatgctgttcaaaataggaacggaagcgtaggattgcttatgattgcatacgaatgcaaaaccttaggatattcattttcgagcattaaagcaaccagatacacacaagagtgcaacaggatattcagaactctacaggtagttagcgtcaaatgcctttgcagacaaaaggcggcgtcgttttcccgtcgctgcgcatgtcacacgatctaaccactaaggtaaacttaaaactataaattagatacgcactaacattacaaattttcacattacagaacaaagttacatataatgtacataggaatacatttcggcgactagcaagctggcagttgctttcatctagctacagccatagccgaaaacaaaacaacaccatactctaggaacctagcgatcgaccagcatcagatttcactttcacaatagcacctccagtgcgactacaactggccaatgcgatcctggagcatttgcataagttttggattctgctctaaaagttggcagagcttctcacgatcactaagtagactctgaatggcttctggagatgaaaagaactggtttaagttgatccctgagtcttgctgctgttgagagaaactatctgcttgcataccctggttctgaagttgtgattgttcaccaacttgcctcagtgtttgcccagattcctgctggctttgatgatacaattgtacttgaggaatgggtagctggttaggaaactgcaacgtaacttgtggcaagatagaactaaggg

SEQ ID NO: 270514 - DNA, 633 bp, Zea mays
gacaacaacgtcgtgcacatctgattagcctggaacaacaaaagtaaagcatccactgaccggccttcatggccatccactgacgactttacctgccgttaagaaattcgcgaggcgctgtccgagtgagtgtaccgtaccgtacagtttgatgacatgttatcttcacgaaatccaaccaggccatttcatggtacaatgcgcagagcatcttatgctatgtcctctggacccaaaaattcaagcacatgaacgtcccaaaaccaaaagaaaaacactacagatacaacaaattcttttgaggttggtgcgagggagcaccaatacaattattgaccttttcaagtactcccctgatcccctttcttacaatctgttgctcttcatgagctctataaactcgccgaaggctgtgtcggagtcatgcggaccaggggaagactcgggatggtactggagagacataagcttcatcttggagtactggaggccagcgcaactattatcgttgagattgacgtgagttacttttgctccttctgggagtgattctgggtcaactgcgtagttatggttctgtgcacttatgtctacacgtccactacggagatcacagacagggtgattcccgcc

SEQ ID NO: 270515 - DNA, 298 bp, Zea mays
ttttcttcttaactttctcttactgtaccgtgcaatttgataacatgttattctcaagaaattcaaccagttcactacttcaattcatggtacagctgcagagcatcttatgctatgtcctctggacccaaaattcaagtacatgaacatcccaaagaaaaacactaaaatgaaacaaattcttctgagcttgctgcgagagagcaccaagacaattgttgacctttgccagtactcccctccctcacaatctgttgctcttcatgagctctataaactcaccgaaggctgtgtcgga

SEQ ID NO: 270516 - DNA, 381 bp, Zea mays
gcggccgccctttttttttttttttcgtgaaactatatatttaaatagcacaatcactagtacatcgaggacgattagcacgcgcgcgcgacggctagcttatattagagcgcgtcatcagcctagcagtttattttttataaatgcatacatgcagacatggatggcatcatctctggtgcttgtgcttgtgctgactgactgactggctggctgggctctatgactgatgaggtcgacggatgtgtcatatatatatctgatctcatcatggcctgaagaaagccgggtgggggcgtccggtgccctggaaggaggtgttcttgaggtgctccggagctttcttgaacgaagggccgcttgccagcgacaggatctttt

SEQ ID NO: 270517 - DNA, 527 bp, Zea mays
ggcccggaatcacaaagctttgcaaaatcgtgtacatatcttacttggacggcaacttaattgactggtagccctggagaataatatgaaattctgcctgtctgccaactacaaatacctggtatgtcaacagaaactaagataaagaatacacggtgtcacttgccactcttcaagctcctggtgctgagactaattctaatacataataccagccagcagtttactgcagaaatagcaaaatgtgataaaggaagctggggcacaactccctcctttcataggagtcggcttgataggttcctatgcagtaagtccaggttcgtcaggtgtaatttgagcgcggatcggctctcgatcaagacccttcgtcggcgacttgttttctagctcttctgcagatggaacagatggtgcaatgtcaactttggttgtttgctctgaaggcagtttaggtagagatttccgttggggcttcttcactgcatttgcagcaggtgctttcttgacaccattgtgagagaccg

SEQ ID NO: 270518 - DNA, 1007 bp, Zea mays
accggtccgattcccgggcggccgccctttttttttttttttttttttttttttttttttttttttttttttttttaaaggaatgtgcctgcctgggggaataaatccctcatggaagctttgcccatcaggttttttattgtaataccttccactccctcacaaaaagggacagaaaagggttgaatgaaatcagaagatcccgcaactaaaggtttcaattgctactaaaggtttcaattgttgctataatctgcaaaatggccttatctagttatcatttgcaaacttgatacccttttcaatcgaagacttgagctcgctcttgagcttctccaacccttctttctcaaagtccgacagctcacctaatccaagcacttcctcaactccattcttcccaagccttaccttagatgcaaagaatggaagctctgttacagttgattgaacaaaagagcactcaacaatatccggaactccattgagacccttcaagcatgcatctgcaaaaacagcaccagcatacgccatggacaaggttgcagagcccttcccagcctttgcctcgacaacttcagttccaccatcctgtgtcctcttggtgagagccttgatgtcttcatcagacaatgcgttggttgcaggggtggcctgtgagaacaacggcaggatagtgatacccgcatgaccaccaacaacagggacattcacatcggtaactggtaaattagccttcccagcatagaaagtcttagcacgaacaacatcaagggtggtcacgccaaacaacttcttctcatcatatgtcccagccttcttgaaaacctcagcagcaatcggtacagttgaattcacagggttgctgatcatgttgacaagggcattggggcagtacttggcgatggcggtgctgaggttcttaacgatgccagcgttgatattgaataggtcgtccctggtcatgccgggcttcctcgggacgccggccggtatgatcaccactt

SEQ ID NO: 270519 - DNA, 387 bp, Zea mays
gcggccgccctttttttttttttttgattataaaaggcagcagaaagctcataaacgactggttcagtacaaaacttgacataagttttgggcctgcctgctggaataaatccctcatgtaagctttgcccatcaggttttttattggaataccttcccctccctcacaaaaagggacagaaaagggttgaatgaaatcagaagatcccccaactaaaggtttcaattgctactaaagggttcaattggtgctataatctgcaaaagggccttatctagttatcatttgcaaacttgatacccttctcaatcgaagacttgagctcgctcttgagcttctccaacccttctttctcaaagtccgacagctcacctaatccaagcact

SEQ ID NO: 270520 - DNA, 408 bp, Zea mays
  unsure (1)..(408): unsure at all n locations
gcggccgcccttttttttttttttttttttttnggatacaaacaaataataccatattctcaggttccccttgtataacataaaacaggcatgccccatattgttctccagagttgtaaccccatccatactctgcaaaccagagtaagaaaactcgctaacagtacatgcaatttcagttcaagaaaacagcttgttctataaataacagcaaagcacaactaatttggagcggcgttactcttcaacttccttcttgatttcttccatgagttcatccttgtaatcctcaaacgtgccgtcatatttatccacactcccgtccttcacaacccatatctcgctcctttgctcatcatcgcagacacgggatattaaccgcgagtcgtggctgaccaagacgacacc

SEQ ID NO: 270521 - DNA, 546 bp, Zea mays
ggaccgggactgactgggccgggcggccttcctttttttttgtcttttgttagcaggtacggaagcaactgcgaagtgtttataactcatagcagatacaacaagagcacaagattcatgtcgttggccctgatggccacatacattcactccaccagaaaagttgcgtagagcccaaagaactgcttattctagaacaagtcatgactatcatcatagcaactaaatctctactctccctctcgccctggttaccaacgtagctgtgaactagtctatttcctccatctgcacagaggcactgcaatgtgcaatctcaaatgcctgatcatggcaacaaaaataggaaacaaaagtgggcatgctgtcgagatggtcatcccttcgttcactccatcacagcaacaccgccagctgcctttatctttgctatgatcgcttccgcttcctcctttgtgagcgattgcttcagaatgactggccccctctccactagctcctttgcctccttcagccccaaatccgtaaaggtcccggacgcgtggg

SEQ ID NO: 270522 - DNA, 819 bp, Zea mays
tttcctccatttgcacagtggcgtgcaaatgtgcaatctcaaatacctgaacatggcacaaaaatatgagacaaaaaaaaaggcgtaatgtcaaaatgatcatatatcattcactccatcacagcaacaccgccagctgcctttatatttgctatgatcgcttccgcttcctcctttgtgagcgattgcttcatatcgactggggcattctccaccagctccttggcctccttcagccccagatccgtaaacgtcctgatctccttgatgatcttgatcttcgcagcagagtcgaacttctccaacctgacgtcgaagactgtcttctcggctttcttctcagcctttccagaacctgcccaagaaccgacctgggcaccgaaaccgaaaccctggccagataccgcctgtggcggctcctggttcagtctgagcacaagggctggagcaatctgtttgatctcctcgggagggagagcagcgatgcgatcagctagttccacgactttctccgaaggcggcggcataggcccgtaggggtcgtatacatcggggtacttgtacttcttagcacccatgtcctttgcagcctcagtgctgtatagatgagcccaaattgctgaaagacgactgccagaggatggttttgaaagacatagccgtcgtgctattgtacagagactcatcctaatatcagttattcagttatgtgagcgcaatattcttctccggagggatgcacgtcgccggtgaagggcgggcccgacgaagagggcggcggcgctcgcccagtcgccgccaggaagccacgagagagcg

SEQ ID NO: 270523 - DNA, 302 bp, Zea mays
acaacgttctctgacggtagcgacataggcccgtatgggtcgtatacatcagggtacttgtacttcttagcacccgtgtcctttgcagcctcggtgctgtatagatgaggccccaattactgaaagacgattcacagaggatggttttgaaagacatagtcggcgtgctattgtacatagactcatcctaatatcagttagatgagtgtgatgctctcctccagatgaatgctcgtcgccggtgaatggcccgacgccgaggcggcgccgccgccaggaagcaacgaccacgagagagcgtg

SEQ ID NO: 270524 - DNA, 547 bp, Zea mays
gcggccgcccttttttttttttttttttttttttttaacttctcaagatcagatataatgcaaatagtttttttagtacactatcccaagaagaacagacactacttttatttgttattattgatcagatggggtcgcctcctccaggtcagatgggcagagttgccaccgccttcagctttggcttgttctcttccttgacctccagcagcagcatcaccacggaccttattgacgggcgtttggttggaaggtttgagacacagagcagcccgattttcagaaccatgcacatctcgtccttgaactgctcgtcgaggttctggtcaagcacagactctagcccgtactgctcaactttggcagtcacccacgccaccaggtccatctcgccaatctctgctgccagcggcttctttccggtaacgagctcaaggatcaccacaccaaagctatatatgtcactcttttcagtgacatgagagtgtaggcatactctcttgaagcatttacgcagcaaggagacccaatttatgtccatatatat

SEQ ID NO: 270525 - DNA, 288 bp, Zea mays
gccagcggcttctttccggtaacgagctcaaggatcaccacaccaaagctatatatgtcactcttttcagtgacatggagagtgtaggcatactcaggagcaatgtatccacaagaccctgcaatcatggacatggtagccgggccatccccaatagtccttgcaacaccaaaatctgcaatcttggcaccatactccgcgtcgagcaagatgttgttcgacttcacatctcgatggacgatcacgggcttacagtcatggtgcaggtatgagagtccttcagcagcg

SEQ ID NO: 270526 - DNA, 545 bp, Zea mays
taccgtccggattcccgggcggccgcccttttttttttttttttttttttttttaacacaaaagagaccaactctcatgatagagcattagcaaaccagtcacagcgtccacgggtacagagttatgtgctcaaaagtcaagctaaaagtctagcagctgggatttatctatttatcttattggtcgacgaagcgaggttcaaatttgctttcaggcaacgcagtacccagcttccgcttctctagctctgcttgtatgatgcctactcgacatgcgaaaaacctcctccagtctcagattttgttttgtgatcggaaggattgggcatgacttcatatacaattgttgcaactacatcccttttgttctgagtggcttcaccacgtagtccaatgtaataaattttagttgtatcaccaccaaagttgtcagagaaatgcagagttaggttagccacaccttggaaccttgaatatcttgtttggtactcaagagcttcttgcaggttctttgctatttccattcctgactggctggatgtttt

SEQ ID NO: 270527 - DNA, 438 bp, Zea mays
gcggccgcccttttttttttttttttttttttttttttttgtttttttttttaacacaagagaccaactttgatgatagagcattagcaaaccagtcacagcgtccacgggtacagagttatgtgctcaaaagtcaagctaaaagtctagcagctgggaattatctatttatcttattgatcgacgaagcgaggttcaaatttgctttcaggcaacgcagtacccagcttccgcttctctagctctgctggggatccatacccaacttgtatgatgtctactccacatgcgagaaacctcctgcagtctcagattttgttttgtgatcagaaggattgggcatgactttatatacaattgttgcaactacatcccttttgttctgagggggtttaccacgtagtccaatggaataaattttatgtgtgtttacccccc

SEQ ID NO: 270528 - DNA, 269 bp, Zea mays
cgcaggccgcagcactcgagagcgcagcgcgggcggcggcgctccgcctccgactccacaccaggccgctgcgtccatggacccctccccgcagtacgacgccgcccaccggagacgacccggctgcggcggcggatcccgacctaccgaggctcacggtgacgcaggtggagcagatgaaggtggaggccagggttgccgacatttaccgctccctcttgggggccgcgcccaacacgaaatccatcatgctagagctgtcgcgtgct

SEQ ID NO: 270529 - DNA, 337 bp, Zea mays
ctttctccctatctatcagcactgctcgccggggccgcctctgcaaaaggctcgcttttgcctccggaacccagcggaatccgccggcggaccggaaacactcgctcgcccccctcaccccctgtctgcccggccgtcggagcgcgtcgcctccgggcgtgcagcagcagtccgtggaggtggagccgggaggaggaggaggaggaccaggacgaggcataatctgccgagagcgggacagcaggagtgggctgctccgctcgcgctggagccaaagctactgattgtcttgtactgaccagcgaaagagggatctttgggaggcaatcagaggtgt

SEQ ID NO: 270530 - DNA, 356 bp, Zea mays
cggacgcgtgggcggacgcgtggggtcagagctagcaagctcaaagaaaactgagctcgtgtgtggtgagcagcgagtgagtgagggactggtgaccatttcaagaacagcgccgcagcagggagctaattcgttcgttcatcgtcgcatcatcagtttgtgatccttcgcccccgtagcttcctgcaacttcgagctcactaaacaaccatgggaggaggcacgctggagtacctgtcggatctgctaggcggcggcggcggccggcgccggtacaagaagaggaagcagttccagacggtggagctcaaggtgcgcatggactgcgacggctgcgagatgaaagtcaggaacgc

SEQ ID NO: 270531 - DNA, 642 bp, Zea mays
  unsure (1)..(642): unsure at all n locations
gccgtcctgttggtcgtgcctctcttcggccttgttttcttgagcattagcgagagccccttacatggtgcagtgctagcatcgttgctggcgacctcggtgaggtcggatctgcaaaggttgcagctagcgcgcctacactacatcaacatggtgtggcatctcctttcgcagatccccaacatgctacgccgccggctgcctcattggaactcctgtgcaccgcttgcctttcttctcccattcaacccgcaggcgttccctggctcaatagcgcaactaggggatgtccgccgctacctccatataggaaacgacagatttagattttcaggtgatccgtggtcggcaatcccggatcaatcaaaatcagtgtgaaataagtgtgaaatttggagggctgttgaacttccagtcaggtaccaaccataaaagtgaccctttgacggcttttgcgtgggcaaggcatgccagtgcgacaatagagaaactacggtagctcngttcgtctgctgatgctctgattaggtcgaagggtgtagctggaaagctgggactggcagacgcgacaactaccatgtaatagacactttatcatagcgcagacgcacctatgcgcagatctatgaaccaaagctgaga

SEQ ID NO: 270532 - DNA, 460 bp, Zea mays
gaggaagcgagaggcgaggagagagaaagttctcgagctagacgagcgccgtgcgaggagagaagcgagatgagcggtgaggcggcggccgtgggcggaggcgaaggagaggcgaatggcatcccgccgaacgtcaccatctatatcaacaacctcaacgagaagatcaagctcgaagaacttaagaagtccctaacagccgttttttcccagtttgggaaaattcttgatgtgcttgctttcaagactttgaagcataaaggtcaagcttgggttgtcttcgaagatgtcgcatcagctactgaggctctgaagaggatgcagggctttcccttctatgacaaaactatgagaattcaatatgccaagaccaaatcagatattatagcaaaggctgatggcacctttgtacctcgagaaagaagaaagaggactgatgaaaaatctgaaaagaagcaga

SEQ ID NO: 270533 - DNA, 340 bp, Zea mays
gcggccgccctttttttttttttttttttttttttattgaaacattttttaacaaaaaaaatgcatatgttgcagttgtttacagcaaagatgctcagtgcagcattctaactggtaacagcctgagcctcaatagatttttatcaaaacaggggtcaaaacactggctatcccaatcctatccaatggcaatgcctatactagactacaattagtacttaaaacacatcaggttcaccatttgtatggcatatattcatgctttgacctattcagcgttcacccttgtgtcaaggtatcatcgcagtcacaggggggatgccaacttcctggaattgaa

SEQ ID NO: 270534 - DNA, 1225 bp, Zea mays
gggtatccaacctcttagcagatcccgtttaacaagacaagttgcaagaaaacatcacatgttcttttgatgcattacattacataattcttaagcgtatacaatgagatgctcagctattcatgccaaattcacggcataaaggactgttgtttatttcagcttcatgagttccacagggaaaatttagaactgtaaaacgcgcactccaaacaactattagatgctctgtaggaaacatgcaaattcccaaactatgcattctgagcaccatgcactttccagagattgttccattccaccatggcatcggctgctttggtgaagattgcattcttaggtcctagcttctcacggacaactccagcaagctccttaacacaatcgtcaacagtaactgcagtcctcgatagcttgagcgactggaagaatgggagaacatcatccatgacttttaccccttcccactctttcaagctctccagagctttacctgcttctgcatcacttctcatcacataaggcagtccggtcttcacaccatatcccaagctgtcgcagactactttagcacataagccattccatatgtcttcaagggtatcccatctgtgcttcccttcgtttcgtagacgcaggcctgggaacatagcaggccccagcacatcgcggttgaatgcaacatttatcccgctcacaggcagcatggcaccaagcggaaccgtcatcacagcatccacatatgttgtgttccgttgatttctcttcacaacatgagtcatcgggtcgtagtcagcattatgaagccacaaaccacacgagagcatgcactcaaccccctcgcgcaggctgaatgggtaaccacggacaaagtcagcacctttcctgtatggatcatagagtgtgttgaaaaagaaaggtgtagcaggtgttttcagattggccatgtgctgtgcaacaacatcaacagtcgacccagcagtgtccttcgctgggaggcaattgtcatcaattgaaatcacatacttcttgcgtgagacaagatacccaaagtaacggcatgagtgaccagataagtttatggatgaggaggcaccaagcaacccattaatatctgacttggtgtaaaccttgagatcaaaacctgcagggatttgaagatcctctgccatgtctgcggacgcgtgggcggacgcgtgggcggacgcgtgggcggacgcgtggg

SEQ ID NO: 270535 - DNA, 656 bp, Zea mays
aaagtaacggcatgagtgaccagataagtttatggatgaggaggcaccaaccaacccattaatatctgacttggtgtaaaccttgagatcaaaacctgcagggatttgaagatcctctgccatgtctggatctttgacgacaatgatgtggaaacgggagaaaaatggtcgccatgcctcaaagaaagtggtcaggttgggctggagtgccgcaatcactatgtcaacctcactatcttgaatttccaaaggcatcttctcaggtaatcaaaacgatgtgagcggcagcagatctagaatctctcagagcaccttgtgggaaggactggtacgagtggctgcttaatgttgagcaaccgaacagccaatatgatatcctcacagtcggttgctagaaacaacttgagaactttctctgtcagcttaccagcactgagggttctacggaagaggtcgatgaggaggtggtctgggaggtgggagaggtcggcgatattggcgatgcggaggagcgcggcgtcgagggtgagggagagcagcgagggcggtcgcatcggcccagatctggatctcgagcgcctttttatagcccactctttcctggaactggaagcaaagtcgcctctccccctcgggagtgcatcgccacgttgccc

SEQ ID NO: 270536 - DNA, 558 bp, Zea mays
gcggccgccctttttttttttttttttattccaacactttaaattcctttttttgtttcgaaaaaagaagatgaaatggacagctcggtcgatttggcaacaaagcactcctcggctcctcctcacaaacattgtagtcatcactatccatgggtcactaggctgatatttgtagttaaaccctacgattacaaagccgatcgagccagctagaggcgcgcggcggccaaaggctagcttatcttcaactggaacccggcgtcgctgcgggccgcggtcgccagcagctgcacgtgcacatcgtcgaacgcgtcgtcgtcatcatcttcctcctcctgtcgtggctccatcacgggcctgctcgccttcatctgctcctcgaacatcttctgcagcttcttcccctgcacctcgatcctcagctggaggttcctctggatctcgagctgctcgtggaggcgcctctgcacgtcgagctgcacgcgtagtgcttccgtgatcttcatcccagtgctggggtcgagattatgcacgtcgtttccgacggctcgtttctcc

SEQ ID NO: 270537 - DNA, 420 bp, Zea mays
cggccgcccttttttttttttttttttttcagcaaccacagccgtccatatatgtgatgctggaaaccaaacaattattccggcgccgaaatttgatccctcaagggaaagtaataaggttctgtcaggattcagaaatctctgttatgcatcgcggacctagtacaagaaacttccagaaagctggactcctacttttgcatgagctacccgccccggcttgaagaactgaaaactggagcagttgaaggggagcaaccgaacaatagaatgaaaaaactgtcagaagggttacaacaacaactacgacagatggtaggaaaggagcagactggatgcacgagcggcatctcttctttctgaagaaccccgtagggttcccagcttcttttcctgctttattcaggcctgatgcgtgcc

SEQ ID NO: 270538 - DNA, 913 bp, Zea mays
gcggccgcccttttttttttttttttttttagacggaaactgaaacgatctaccactctgctcatggactcattagctcaagtacgagcctccatgtttgattcatgtacagaagtaggtcaaacgaacccaggtgcaccctgtgatttaacaaaaggttctgttcacttcccaaatttcgaaacaatatatacatttttatttggttttattgactaccacgcgattcccaggaaaaaaaattgtattttggaatacatgtatgcaaaaaacccacaaaaatttaccagctgatagcccccgtctctctacctctccattctttcacaaggaagttgatgcagtcatcgtcctctgtgcatttccaaggatgataacaatgacagtcacatcatcgtggtactttctcctactcccaacaggtatcctcatcaattcttcggctgttagagctgcttccttggctgctttgagtataagttgctcaataagatattttgcaggatcccccattggattatcatgcataaattgataaaccaaccgaacaacttcatcattgctgaagaaatcaaataagccatcactaccaagcacaacaaacaaatcatcatctgtaactttgtgactcaatgtgtgtggacttctgtaaacatctggagggctgctcaaatcgcggactcgcagaatgcccatgagtgcgtcgttgaacttcctctgctttagatagccaactccaaaagcacgagtaaccttcagctttccttttattttgttacccctgacaactgaagaatcattgggatgttcagctaaaagtttttggtactccaaaggattttcaagcgagtgggtctctgtcagttgagtagccttcaaagcaccattttctacatatggcatggaagcaagc

SEQ ID NO: 270539 - DNA, 598 bp, Zea mays
gggcaaacggaaaccggaacgatccaccgctctgctcatggattcattggctcaaggacgagcccccatggttttaattcatgtatggacaaaagtaggccaaacaatccatgcccaccttgcgattgaacaaaaggtttttgttcacttcccaaattccaaaacaatatatacattttttattcgggtttactgactaccagacgacaatctcaacaaaaaaggggcttgtaatttggaggacacgtacgcaaaaacccacaaaaattaccagctgatatagcccgtctctctagctctccattctttcacatggatgttgacgcagtcatcgtcctctgtgcatttccaagggtgataacaacgacagtcacatcatcggggtactttctcctactcccaacaggtatcctcatcaattcttcggctgttaaagctgcttccttggctgctttgagtataagttgctcgataagatattttgcaggatcccccattggattatcgtgcataaattgataaaccaacagaacaacttcatcattactgaagaaatcaaataagccatcactaccaagcacaacgaacaaatcatcat

SEQ ID NO: 270540 - DNA, 726 bp, Zea mays
gagagcaaaagcatatataattaattactcgctaagaggtagcactactagtatagaagaaaccaaacaacacttatcaaatccctaaacatagatgaactgcaaaaagaagtttcagagttcagtacaccaagctccggatacagagactatgatggatgatggctgtccccctcttcttaagtttgaaaatcatcatggacgatgatagctactactgacctgccctgacagaacctcccttctaattagcaaaccaacaaattcccctttcatctgcttaaaagcactctccatgctttcttctaattgattgactgactgactgactagctgcaaagtttcctctctagatctgtctccctctgctgctggtttagctctccttctcacctacctagcttgcaagcaactgcaattgcaatgcagcaaccactctgattcatctatttctcctctctttttcactctctatacaaacaaaaaacatccagggggaaccaattaaccaatagacaaaaggatcaaaggtaaaataacactagcccccgatgaggaaaaaaaagacctaatgaactaacaacgtcgggacgcccggcgatggattgggattggatggatgctgacacaaaccaatgcatgtgatgatgggcgggagacgatccatggcggtgaccggtgaagcggtgatgatgaccatgatgggcgacgacgactgatgaagct

SEQ ID NO: 270541 - DNA, 600 bp, Zea mays
tttgaagaaaccaaacaacttgtatcattagggtaaacggggcggaactgcaaaaagaagtttcagagttcagtacaccaagctccggatacagagtacagactatgatggatgatggctgtccccctcttcttaagttttaaaatcatcatggacgatgatagctactactgacctgccctgcataacctcccttctaattagcaaaccaacaaattcccctttcatttgcttaaaagcactctccatgctttcttctaattgattgactgactgactgactagctgcaaagtttcctctctagatctgtctccctctgctgctggtttagctctccttctcacctagtacctaacctgcaagcaactgcaactgcaatgcagcaaccactctgattcatctatttctcctgcctctcctctcaccctcctctctctttctctctctatacaaacaaaaaaacattcagggggaaccaattaaccaatagacagaaaagaagaaaggtaaaataacactagcccccgatgagaaagaagacctaatgaactaaacgcgccgggatgcccggcgatggattgggattggatctcgagccg

SEQ ID NO: 270542 - DNA, 484 bp, Zea mays
agcggccgccctttttttttttttttttttaaaaacacagatatatatattattgttgttgttcacaaacgcagttatatataacagcattgctactatctcacgatgcatgctttattccacatactactatagtactatgcatcacacgctctaacatgcgctagcagctttgccaacattattattgttcgcttcctggccctgcatgggctattgggctggctgcctccttgacgcgcacatgcatctagcacactggaaaacttgcacctatctacaacggccggcgctgctcatggatgatatatactacgcttgctgcatagccatcttgcgccgccgggcatgcatgcatgcggcacgacgtacggcgatacctagacgcgccatctaaatggccggcccgccggccggccggggcacttgccggtggtaaaggtaaggtcgtcgtcgtctttttcttgtctgcttttggattgtg

SEQ ID NO: 270543 - DNA, 470 bp, Zea mays
tccggatttccaggggcggccgcccttttttttttttttttttagtaaaactttgatcgagagctcattccatctcaagaacaaaaatcatcgaatactgcgcaaaacattcaaaaataggaacattttctacggtcttacatagaaccttttgtaacacatcaacatggcttctaagtgttgactttccttttggcatcttaaaagcctttttctggaaagttctcatgactaatacgattagatcgcgtcacctatcatcgtaatcctcattgttgggctctgatattccctgtgggttaaatgggagagttgcacccgcagttactaaaacatattgggttgtgcgcccatttggaattttcatctgtagactttgtgagtacttctcatcaattatagcttcaccggtctttttgaacttaatctgatagttaggtcgtgttagcaccaatgtagccaattcccac

SEQ ID NO: 270544 - DNA, 451 bp, Zea mays
gcagcatcacaccagtaaatattgcagggtgctcatagacaatcaggcaattttgagtattaacagcttgagctacaatgccgaccttaaaacagaaattggtgctcccatatttccaatgaccaggacttcactagtgaccgagtgctgggtacatcactatccccatgtatctgagacactgaaacttcaactcgacaacaactacctcagcaatacataataggacaagagatgcacttaattagtaacacgctgcagcctgcagaacacctacaccagcatacaaccttattatcccacgtacactggcaataaccaccttatttatcaccccgtacatcgggcaatacaaccttattataccttgccgccaaaattgactccctacgaaaatacgcaagcagcacaggcactgggtgccttctctataccaagcacacgaacgcaa

SEQ ID NO: 270545 - DNA, 976 bp, Zea mays
caagtttttataattttataacgtcccagtttttttttttttttttaaaaacacagtggagattaatatacactagtaacacccgcattcgaatacatgctatataaacctcataaccgctaaaaaactacttaggaacttgaatgggttatcaattgtacatctataaagacctcatagccactaaattagcgagatgataccttcgatacctaccctgaaggccttgcccatctctccctcaggctattccctactctaatgaaacttcttcccacaaacacgggaccaaaggaaaagaaaaaaacaagaaattaaacacttcgtggtacatatgctgtatttgagaaaccattagctacttttggtggtagtggtggcttcttgtagtttgctaagctacagtgggggcagatgtattccaaaccgtctgtcttagcgtaatccttgaaagtgcctagcccttgtcgtctgtcgcaaccaaagtgagcccattcgccacataaaccgcagttcacccaatctccaggtgcgctactgtgacaaagcaagcagcattcgccatccacatcatcatgtgctaactcatattccaacaagtatgtctcgtaatgcctttttaatgtgttacctacaccagtcattctgtttgttgcagtatggttacgcatctttgagaagacttgacccttccagtttatgccgttacccacataaaatccacctctagacaccacctctttgtacaggttataaaggtcaaggcgcttggcgttaaggactgcatcaggaaattcagctagtcctccgtgaggtacaagtcgattgtggcccctctggattaaaaactgcatgacatccttcaagaagtcctcctcagagcacacttggataggcaacctatcacatccgtgtttcttcattggcagaggatttaactgaatgactgagggagtatgagacggccctgatgttg

SEQ ID NO: 270546 - DNA, 464 bp, Zea mays
gacaatagtgaatgttgtgccgattactaacttccaatcactgaattacagaaaaattttacagttatgcactattgtcacattaacattctgtgcattggctgttaacgaagccatagataggaaaaaatctaaccataccaaattctgagtctccagtagtttacaggtcatgcctacagccgcaacggaaaaaaaaagctatcaagtcatcccagccatgcccaccctaagtattgctgggcccagatcgacatttagcatggacaataggtcccaaccgtgacctttccagaccatcaatattaccgtctggtgcattcatgtagaccgcacctctatacatccactcatcagtctcatcactgtagaaatcttcaaatggctcttgacataatgcacaggctgtttgctcctcatccgcaggaacagcaatttctctctctcctttctatctgggactg

SEQ ID NO: 270547 - DNA, 1786 bp, Zea mays
gttctagatcgcgagcggccgtcctttttttttttttttgggattcaaggccttcagatttccatacaacagattagggtctgaaattacaggtcttagtaccagggttccacttcacagactcgtacaacagcgaggtccatgtacaaccaaaaaacaagagattgccacacatcttattcagcgcatatttacacaagagaccgcctgacggttccgatacatgtagtgatacctcgactcggtgccgtaatcgcagttaagctcgtaagaagggcgaacatgtgatgatcctggcgcagcagacctctgtccacatgtttcattgctgcctgtctggtcacatcacatactcacatgctgattctcgtgaggacctcggggtggtagtggatcatctcctgccacatcatctccctgatcatgtcgacgccgaggttctcgtcgatgtcgaggtcgatcggcacctgcgcgggagggttcgcgctcgggtcatagagcggagacatgtacgggtgctccagcgcctcggtgacgctgatcctcttggacgggtcgaacacgagcatcttctgcagcaggtcgatggcgagagggtgcgcctgagggtacatgccggtgaagggggcgcccggggcgtacggaagggacttgatgtacttgcgggccttcgggttgtcgatgaacgcgaggtcggcctcgcccatggtgccgaggacgttgacgatgagcttgagctggttcaggcactcggttcctgggaagatcggcttgcggccaagcagctccgcgaatatgcaccccacggaccagacgtcaatggacgtgccgtagttgtcgcagcagagcagcagctcgggtgccctgtaccagcgggtcaccacgtactccgtcatgaactggcccttggtgttgttcgtgcgggcgagcccgaagtcgcatatcttcaggtcacagtttgcgttgaccaggaggttccctggctttaggtctctgtggagtatcccggctgaatggaggtacttcaggcctcggagcagctgaaaaaggaaatactggcagtggtcattggatagtggttgagatgacttaattatttgatgcagatcagtgtccatgagctcataaaccaagtaaacgtccttgaagctccttctatgcgcaggcatcattatgtccttgagagcaataacattctcgtgcctcaggtgccgaaggagtttcagctctctcagcgtccttagcgcatccacacggttgtcaaagacgttgtttatcttttttatcgcgactttttcattggtctcgcggttaacagatgagcaaacgattccgtaagctcctcttccgatgggcttgatcggcacgtacttggtgtcgatctcaaacagtgtctgccacatagtatagtaatgctttccttgacttgccatgccattggggggatccaccatcatcgccattttctgccaaggagcacacgccaatgacctcgggagtaggggccgggggggcgcggtcgtccgccgcccgcttacgctgtcatcgtcgccaggatggcacggccgggcaggatccgccgctcacgtcaccgcctccggcacgcgcggcgcggcgtccaccggccgccgccgtagcagatctggagccgtgcgtggagcggagcggggaggggggatgttggggcaggcgggcgcggtgggaggctgggatgggagctagcgggcgagacaagagagagcgaggcgcgcccacgcgtccgcccacgcgtccgcccacgcgtcag

SEQ ID NO: 270548 - DNA, 636 bp, Zea mays
tagcggccgccctttttttttttttttttttttttttttttttttttttttttttttttttttttttttttttttttttttttttttttttttgaggaccaggggtccactttaaaaacttgtacaacagggggggccatgttcaaccaaaaaacaagggtttgccccacattttttttagggcatttttacacaagagaccgcctgacggttccgattcatgttgggataccccgactcggggccgtaatcgcagttaagctcgtaagaagggcgaacatttttttatcctggggcaacaaacctttgtccacattttttattggtgcctggttgggcacataaaatactcacatgctgatttttggggggacctcggggggggaggggatcatttcctgccacataattttcctgatcatgtcgaccccgaggttctcgtcgatgtcgaggtcgatcggcacctgcgcgggagggttcgcgctcgggtcatagagcggagacatgtacgggtgctccagcgcctcggtgacgctgatcctcttggacgggtcgaacacgagcatcttctgcagcaggtcgacgcacgcgtgggcggacgcgtgcgcggacgcgtgggcggacgcgtgcgccgac

SEQ ID NO: 270549 - DNA, 490 bp, Zea mays
agcggccgccctttttttttttttttttttttttttttttagggagcagtttcagagtcaaaatttaaattgcaaaaaatctggctctagtaccaggactcggtgcgactccttcaattgcattgcatctagtctagtatatcacaccaaaaaaaagacaggcttccttcgattcaagagtaaacaaaccaaggggaattcattcatttagattcatccgatgcttcgccttggcttccagctcctgtacattgtctttgccatgctttgcttccttatcaactctctctgtacatcacaatagcgagcggacccccaccccccaaaagacagacgaaatcacccatatctcttctatcccatcaattatgacactggaacagccttgtacatgtatgacgttccatggaatatagtcaagtgcgccccattaagataagcttccagctcttcgggagagattctagagaagccaaatttgttcatccag

SEQ ID NO: 270550 - DNA, 852 bp, Zea mays
tccaggggcggccgccctttttttttttttttaaagctataatgtcacaatggtgttatcattatcatacgattacttcgtacatataaagagtggcaattcaactgtaatatcaccaaggtaacaacagaaaagttggaattacagagacgggagctcccctagttcaatgagctgccgatccaatatattgacctcacttcttcctggcaacagcagctgcaattccaccaaccagaagtccgaccgcagttgtcgcaattcctattccaatcagaccatctttggcaattttatcttctattgccttcttcagcgatatggcctgccgccaatccgcttgaatctccaaacaacgatctgcaagttgcctgctttttgagtagtcgccaatcctgtagaatccaacagccaacaagtacagcttttccctagtctgcagaggactggcagaattatccaaagaagcttgaagcatgctgattccacggtttacatcgtctgtctgcctggagtgcacaagggcccatgacaacctcataaggctttcattcctctgttcctcatttgcagcattgacaagctctccttcacagccggcgatgaggtcgcggtcgcaccaggggatgtggtcgcctccggtgaagaaattgctcacggactcgaagaagcgtcccatcttagcctccatcaacctgttgtctggggtgggggtggggtggtcgggatccgaggaggtggcggagcaggggagggctattctaggcttcgtgtgcaggatgggtacggatgaaaccgcagaagaaaaaggcctcgggctggattcgagaagaagagctacccacgcgtccg

SEQ ID NO: 270551 - DNA, 411 bp, Zea mays
caaaaagcataaatataaataatgcttaaataggtcttttcctcatgagaatagaaggagcatcacacaagcaacaatagtttacaaaaaacctgccccaatttgttcgatgaaaatccaacaggcaagataaataaccatcggccacctacaaacaagcaaagcacaggcacagcacaaatcaaggttcgcttgctggttcgccgtcgctggttttttggcgtttgtttgagggctcatcctcaacgtctttgatcccctcgggttctgaggctgtactatctggctcagcaccgtttccttctttctggcagtcaccaccgttcacagcacccttgatagcgtcagggcccaacagagagacatgtttgctcgtgatcttccggcctgctctgacttcgaccccagtgc

SEQ ID NO: 270552 - DNA, 457 bp, Zea mays
  unsure (1)..(457): unsure at all n locations
gccgtccttttttttttgcagaaagctatactatatattatgctttaataggncttttccctctgtgactaggaggagcatcacacatgcaacaaatgtttaataaaaacctgccacaatttgttcgatcaaaacccaacaggtggtattaataaccatcgtccacctacaaacaagaaaagcacaggcacaacacaatggagacgcgaaagattgacaaacaaatcaaggttcgcttgctggttcgccgtcgctggttttttggcgtttgtttgagggctcatcctcaacgtctttgatcccctcgggttctgaggctgtactatctggctcagcaccgtttccttctttctggcagtcaccaccgttcacagcacccttgatagcgtcagggcccaacagagagacatgtttgctcgtgatcttccgccctgctctgacttcgaccccagtgccg

SEQ ID NO: 270553 - DNA, 413 bp, Zea mays
  unsure (1)..(413): unsure at all n locations
ttnttttatttttttttttttttttttttttttgggttttttgccggttcgttaccggcccagccatgagctatccttttcatgaacaacgaaagaactgattcattttcaaccggtggaccgacatttggtttctgatgctcatgggcgtccaggatcaacagaactaatctctctcaaattaaaaacgaagataaatttgtttctcatcgccccttggcgcccaacctcttgaggagcttcccaatggcatagcagatctcaaccttatcggtttttatctgggggcggagtgaacagcttttcttaccggctgccaagtatgtgcgtaagagagactcgtatgctttcccgtcaatgcaccctagcgtcctcaggcagttgcagaacctctctgcaccgtcagcatcctt

SEQ ID NO: 270554 - DNA, 340 bp, Zea mays
cccgggcagccgccctttttttttttttttttttttttttttggaggaacagctttttcatttcagaagaaaagtgtatctcagaaaagcctagctagacaagacctcacgttgcacttacaagaatcttattgttccccactgcttcttgtaagaacgcaaaagccggaacgataccagcccagccatgagctatccttttcatgaacaacgaaagaactgatacattttcaaccgttggaccgacatttggtttctgatgctcatggacgtacaggatcaacagatctaatctttctcaaattaaaaactaagatctatatgtatttcattggccctt

SEQ ID NO: 270555 - DNA, 727 bp, Zea mays
aattccctctacaattgccagtacaagtcattttttattgcattctctggcttgactgaaccaatcaagttagagcgttacttgcagcctcattttcgctactacatgcgtgaagtgcgcactgttgtctactcacagtttctggaatcgtacaagagtgtgacaatggaagccatggctgctgcatttggcgtcacagtcgactttatagaccaggaactgtcacgcttcattgccgctgggaagctccactgcaagatagacaaagttgctggcgtcttggaaacgaaccgacctgatgctaggaacgccttctaccaggcaaccatcaagcaaggagactttttgctgaaccgcatccagaagctgtcacgagttatcgacctgtaggggagagcccttcatgcaggagcttgccttggttcctggagtgtacgggcggtgcttgactttcaatgggtctcagttgaagaagcttttagggatatttgtgttctgagaaattgtgttttgcactttttagcctaactacatgaagcccccaaaaaaatttcatggcgttgcttgtagacgtttcttcattgatgaattcatcccttgttttttcttgctggatattgttttgctactaagagcctagcagatggtagacaagcagaatcacttgtgttctgttacgtcaatgctgttctgtttcagccaaaggaacaaaagaacagatcgcaag

SEQ ID NO: 270556 - DNA, 991 bp, Zea mays
tcgacccacgctttcttttaaccatcggaggcaaaaggataggagaataaggaaaaaacaatggcggtgctactccgccgcgccgcggcgctcctcgtcgtcgctgctgtctgcgcggacggcgcctccacgttctactcctccgaccccaacctcggatccgcgcgcgtcgtcttccagacgaattttggtgatattgagtttggtttctttcctcatgttgcacctaagactgtcgagcacattttcaaacttgtgcggcttggatgctacaacacaaatcacttcttccgggttgacaagggtttcgttgcacaagttgctgatgttatgtcaggtcgaaccgcccctatgaatgaggagcagaaaaaagaagcggagaaaacaattgttggtgaatttagtagtgtcaagcatgtcaggggaatcctctccatgggaaggcactctgatccagacagtgctggctcttccttttctattcttctgggcaattcaccgcatcttgatggccagtatgctgtatttgggagggtcactaaaggtgacgatacattgactaaactagagaggcttccaacccggagagaaggcatttttgtaatgccgatcgagcgtatcaacatcctatcaacttactattatgatattgatctagagagctgtgaagcagaaaaatctattctccggaggagactttctgaatcagcatcagaagttgagcgatggagaagaaaatgctttgcttaatggtggaataaggactgcatattccgtttcatgatgctggatggtttcctgaggctggatatggacgacggtgtggaaatgtgtatgccgcgtgttcttatgctatcactgtaatacttgagtagatgttagatgggtcctaaggttccacatggatcttgtttgtaacacatgagcagatgagttgttacaataaaccttcaattcgtttaaaaaaaaaaaaaaaaaaaaaagagaaaaa

SEQ ID NO: 270557 - DNA, 1303 bp, Zea mays
caattcatcacggcatcacccccaattttttctactccaccgaaacataaatccgtagcctggtcttctgcggacttcgcagaaagatcttgcggaaggtggcaggcgcatagatgagggtgagagcatttggcggtagcgcttgacgagcgacgagtaaaccctaatgctttgatcgcggcggcgtcgtttgagacactcccgaatcgatccgcctacatgcctatgaatcctcctcccccgccgcctcctgggtcggcgtcttcggcgccggcgggggccagctacttccctctccctttccacctgcagcagcaccagccgcagccgcagatgccgccgcctatggcggcgagcagctaccagcagtatcagcaacagctgcatcaggcgcatcagctcttccagcgggacgcgcagaccatcacccccgaggcgctgcagagcgtcaaggctgctctcgccaccagcgacgtcctcgaccccgccgccgccgcgaacgccaggcccttcgatccctctaccagcaagaagcccatcccccgccgcgctgccggacaatcctgggaggatcctaccctcactgactggcctgaaaacgactaccggctgttctgtggagatctaggcaacgaagttaatgatgatgttctatccaaagcattctcacggtttccatccttcaacatggcaagggttgttagagataagaggactggcaagactaaaggttatggatttgtgagcttttcaaaccctactgacttggctgcagcaataaaagagatgaatggaaagtatgttgggaatcgccctattaaattgcgtaagagtaactggaaggagaggacagatgttgaggctctgcaaagacaaaagaatcatgtccaaaggaagcctaaaattcccaagaagagtgttcttcacaagtagagatatataggccctaccgagggtgaagggcagctcatggatgcgttgctgccttgggatgatgctacttctggaatgtcttcactctctgcactactagggggcggaaatcacgcaagggctgttgtttcatgcaaattgcaacgagctactgctgccatctgatgcaatttgtgctccgttttactgtttcccatagtttgcgttcatccatttgtggtgttggagtactgtcatggctactgactaaccaagccgagctgaacaagaaccaaatggaattttcagtttgggttttagcaagtaatagcatgacgtgttgtactatctatctcgggaaaaactcaaggatatgttcttgtcccatatc

SEQ ID NO: 270558 - DNA, 602 bp, Zea mays
agataagaggactggcaaaactaaaggctatggatttgtgagcttttcaaaccctactgatctggctgcagcaataaaagagatgaatggaaagtatgttgggaaccgccctattaaattgcgtaagagtaactggaaggagaggacagatgttgaggctctggaaagacaaaagaatcatgtcaagaggaagcctaaaattcccaagaagactattcttcacaagtagagatacaaaggccctaccgagggtgaatgccagctcatgtgctgccttgggatgatgctaccttctggaatctctttactctctgcaatgctcggggtggaatcacgcaatgctcggggtggaatcacacgcaagggctgttgttttttaatgtgtagtttggaaacttaaattcttttgggatacctgtcttttatcaggatgagtaacccagggatataatttaaataagacatttagttatttaggagatggtttctctctctggtttgacttccccttccaaactaggtctaaggccatcttcagcagatcgtgtaaatggacgtgtaaagtactgttttgcattgtatattgtaatatgaccccagat

SEQ ID NO: 270559 - DNA, 411 bp, Zea mays
aatagatccgtagccgtagcctaggcgcgcacattgcagaaagatcgagcggaaggtcggcagcaggcgcatagatgcaggggtgagggcacgggcggctgcgcttgacgggcgacgagtaaaccctaacgctttgattgccggcggcgtcgtctgagccagtcccgagtcgatacgctgtcatgcctgtcaatcctcctccgacacctactgggtagctgtttttggctccggtgggggccagctacttaccgctcccttttcacctgcatgagcaccacgtctcgacaactgaggtgccgtcggctatggcggcgagcagctattagcagcatcaggaacaggttggtcaagggcatcagctcttacagcgggacgcgcagaccataaccccctaagcgctgtaaagcg

SEQ ID NO: 270560 - DNA, 885 bp, Zea mays
tactggacgagcttactctcaaaccatctacactcagtcatgtggaggctagtgcaatcccgtttgctgctttgactgcatggcgcgctttacatggtacggctcgtatttctgaaggacaaagagttcttgtgattggtggaggaggagcggttggattagctgctgttcaacttgcggtggctgctgggtgtgtggtttctgctacctgtggaacacaaagtattgagcgagttatgggagttggtgctggacaagctattgactacactgctgaggatactgaagcagcaattaaaggaaagtttgatgctggtttagacaccataggagtacctgagacagaaagaattggcatcaatgttcttaggagaggtggacactatatgacccttcagggagaagcagctgccctagcagataggtatggattggctgtagggcttcctgctgctactgctgttttactaaagaaacagatgcagtatcgttattctcatggaatagagtattggtggacatacatgagagctgacgccgaacgccttcacgagatccaaaggctatctggagctgggaaactacagatacctgtggagaagacctttcccatcagccatgtaagagaagctcatgcggccaaggagaaaaagttggctcctggcaaggtggttctggaattcgattaatgttattaagattttgtccattgggacctgaagggctgtgcgtttgcaaatcatgatagttttttttgtaaaaaaataaatctgaatctctctgccgacttcaggttccatgttatcgttccgtttcagtagaaagacggtaaataatcatatcaggctatggcctatgggcacgatttgcctgatgaaattctgc

SEQ ID NO: 270561 - DNA, 410 bp, Zea mays
ttccaatcttagccggacccggaggcagcagcgaccagcgagcgacgccggccatgctctccgccgccgcgtccgccatacccaggctccgcttagcgtcgggcccgcggctgaggcggccgtcggctaggacgcactggccgcggccactctcgtcctccagccacgtaacgcccgtggcggctgcgggggctggggagctggagccgccggacctcacccgcttagccaacgccgcgcgcatctcgctctccccgcaggaggccgaggacttcgagcccaagattcgtcaggttgtggattggtttgggcaacttcaggcagtagaccttgagtccattgagccttcacttagagctggtacaacggctgatatttctttgagagaaataggcctgaaacattcgata

SEQ ID NO: 270562 - DNA, 1217 bp, Zea mays
tgctagttcgtgggcaccgacgaccctgccgcgtgcgtcagaagtcagaactcatggccgggtggattagcgtgcaggtgaggagggagaggatcagcgagcggatgcggtacctgcaggagctggtgcccgggtgcggcccgggcccgggcgtccccggcatgctcgacgagatcatcaactacgtccagtccctgcagaagcaagtcagcgttcttgtccatgaagatcgccgcttccaacccggtggtgagcttcgacatcgtcgaggacctcttcggccgccagctgaagcaggcgtgcggcccggcggccggccagctggagccgtcctgccttcagatgagcatgagccccatgcagcaggtagtgcacccgtctgcagcggcgggctccactggctttgggccgctggacatggtcctcagcaacctgtacgcgcccgccgccgcgagctgccctgtgtcggctgccccgtcggtctcggtggccgccggaccgtcgaccatcgagccgtgcctcaacgtgaatggaactgctgctgcctgggatattggctcccagaatttgttcagcggatttgatgcacaatttcagtcggtagaaagtggctgcttgctagacaacctcaaaatggaaatgtgagaagaattaatcctcattgctggagttttaaccacgggaaaaaaaacttgtggctgaagattctttattcatatcaactgtactaatgaagtattctgtcagcaatggcaatacgagtacatttcttgtgttatatgtttgtctgctactctcccggtttctaagcattccttcataaccaagccagacagagggttcagagcttcagattacaagcaaagcaaagcacttaaggacatgttcccacaacaaaccagcaccaatatacaacactttatcacctaaactgacagtacaacgaacaggaacaactctcctactcatcttccttcaaagcacagactgttcaccagcttctttcccaggcacaatgataattggggctgctttacagttgtggaagcaatactcactgacacttccctgcaacacactttgaataaggcctctaccacgtgtaccaagaatgacagcggcaggcttcagtcgatctgcttctcggcaaataacttttccagcgtctccttcaacaattctggccttggtccggaccagtaacgtcttgaatgcca

SEQ ID NO: 270563 - DNA, 833 bp, Zea mays
ctgctttgcctagccacaacataaatttatgacccggctggtgttgatggtcctcacatgaactcgaatccaccacacccaccactcttttggtcaacaatgatggtggccataaaacacaatccataccctaccaagaactcactttgcgacagcagtggcggctgatggtgcccgggcaccacgaccgctggctgcgctagagtggtcgacccgctggtagccgacatcaccacgcgatgagccacccctgccgccacctcggcctccataatcagatcgataactgaactcgccccttccgtaccctctgcctccattgtatgtaccacggcctctaataccttcacctcggaaattaccacctctaactggtggaaaccttcctcccctgctaccaccgccacgagaaccagtagttcttttctcttcaacatagcattgtcgttcaccaatagtaacaggagaagcctctattgcagtttgaactgcactggcatcctcaaattctacaaagccataacaaaacccttggatcttattgcttctaacttggatgccatcatgtttaatggcgccaaatctcttgaactcttcctctagttgttgtggtgtggcatttaatggcagacttcgcacatatatggcatgtgcagcaccttgtggatcttgagactagtcgcactggcaattatgggtcatacctggagcatgatctttgacaactcggttggcagagtatagctttattgttttggggggtgcaggtatggaagcaccccgcaggtgtgcatcacaccatctctcataatgtctgcgcacgcgtgggagaa

SEQ ID NO: 270564 - DNA, 724 bp, Zea mays
ctattgcagtttgaactgcactgacatcctcaaattctacaaagccataacaaaacccttggatcttattgcttctaacttggatgccttcatgtttaatggttccaaatctcttgaactcttcctctaattgttgtggtgtggcatttaatggcagacttcgcacatatatggcatgtgcatcaacttctggatcttgaaagccgccgctctgaggattaggggagaaagctggagcctcagtaactggagtgggggcaggagaggcttgcttctctgttattgggggtgcaggtctggaaggaactgcaggtgctaatggccgatgttctttcatgacttttacaattgaagcatatgacttctttggtgcctccttcaatggtacaggaggggatgaaattggtggagccactgcaacattatttggcacttcatttatgacatcaggaaccggcgtttcctcagcaacaggcttctccacatcacttagcgagttacaaacctccccgttcagaacttcctcctttggattaagtgcaggctcggccacctggcactcaggctgcggcgaagcatcctgaggaacagtcgtggcgtctcctccgacagtgccgttggccaggataggggcagaggtgcgcgcccccgcgcccgcagcaacctcaggtgctggctgcttctcagccccctcgtcccctcccccctccccaacgtagcgcag

SEQ ID NO: 270565 - DNA, 671 bp, Zea mays
actgctaacccaagttgattccattattgcaaatggagtttatgttatacaaagcatgtcgcggaatagatatcccaatacatcatcctcacggtcttcccctaagaaacacttattaggacatattgtttgttatgcctcatgtgcagaatgcatcatgtttgtggattcatcagtcctccaggtattctaactgccgtgaagacaggcagcagccatgtaattaagagatactcctatgaaggaatgtcttccaaacagaatctagcagctgagtgttttctgatatgcaactgaggtggaagtcttcagaagctcccggatagccattgtagcgtagcatgatgttggtaaagtaaatgctaattttaaggccaatttctttggtagtatatctgggctgccaataagcttttcttgggagctattcccattagttggcacagaggtatcaggagccttttccaacttatcctgcgattcctgcttagaaataagctcgtttgcttctttaggcttggttctggacagaacatccaaatcagtttctgctaaagatgaagtatcatctgtgtaagttatgagttcccactcaaaaccaataggccgctggaacactcggcggtaaccacctttcatgcttgtaatcgaaaactccttgacaccatgag

SEQ ID NO: 270566 - DNA, 709 bp, Zea mays
gcggccgccctttttttttttttttgcaacagttctgttttttttaatagctaattcgcttatatgtctcaatgaccgaaaggctgttacacctgaccgaaagatgcactctaaagctttgacaacactcctatgtcaaaaccctcaccatccaagcactgaatcggtgtgcatgtggcagggaaaaatccatatgtaaacctcatacaaggatcgactaatcttcttttttgctgtctgaatcttcaagagcttgcagcctctcgacgagtggtgggtgggagtagtgatatgccgaataccaaggatcggtgttcatcgcagacaagttctcctcctgtagtttaacaagggctgctcggagctgaggggcatatccaaggttcttggcaaaggcatcagcctgaaattcaaatgctctgctgacaaggttcaggcaaaagctcagaaggtgttggatgggtattatggtgtgctggaaaatgatcaatccaattattactggctggtccttgaagccaaaacttccaaatagatctttggagctccttactagagtatatcctccaaattgaagaaacataagcagctggacagctacaaaggaatagacagtatgattgagtttccagtgtccaagcccatgtgctataacagaaactatctcatcctcattgctacactgctgaatcaatgtgtcatagagtac

SEQ ID NO: 270567 - DNA, 420 bp, Zea mays
agatgcaacagttctggttttttttttaatagctaattcgcttatatgtctcaatgaccgaaaggctgttacacctgaccgaaagatgcactctaaagctttgacaacactcctatgtcaaaaccctcaccatccaagcactgaatcggtgtgcatgtggcagggaaaatccatatgtaaacctcatacaaggattaagactttgtcccttcaagaacaatggctgtggcggttcgccgttcggactaatcttcttttttgctgtctgaatcttcaagagcttgcagcctctcgacgagtggtgggtgggagtagtgatatgccgaataccaaggatcggtgttcatcgcagacaagttctcctcctgtagtttaacaagggctgctcggagctgaggggcatatccaaggtatctagac

SEQ ID NO: 270568 - DNA, 629 bp, Zea mays
cgactgacacgagggtcaagtgatacgtactccccaaagaggctcatgcactgcaactcacacgtactaaaaactgaaacgaactacgtttccaccttcgatttctgattctcaagcgagcaggagcaaccgagcgagccttcactatggcacaagtctgctgaatccgttatcgaatatttgtcgcccgctaactcatttttaaaacaagaacggagagagtactatgtgtctgtgttagctagaacatctacgttgctccacacttcactaggtcccaagtcgtctggttacacaaaatcaggacccaaatgctgtcttctcgcccgcttctgcccttcaaggcgaccccaacgagctagggaacctgcaggatccatgacttgggtctttgatagtctgctctgcgaggttgttgaagtagcacgtcgctccagtcttctcgaactgctgccagtacgaattgaaagcatagctggcgtgcgccgccgttgtgtttggcctgtagcacgttttcccgggctgaatggcgtcgcaggtcccgtttccctgcccgcacgcgtacgacagcgcgttccccaccgccgtctcgttcagcttgttgctggcggcggccgagagcacgcacc

SEQ ID NO: 270569 - DNA, 1379 bp, Zea mays
  unsure (1)..(1379): unsure at all n locations
ttnntttttttttttttttttttttttttgggtaataacttcataaagattttgtacaaaattgctaaaaatatgttttgtttccagtaaaacactatctatcaatgttgcccgcacccgcatctcacttcgatcgcgaaaaaagacgcctgccagaatttcgctgccgcagattgcataaaaattgaccatccaagctgatgttagcacttctcttaacgaagatgtcagtaactttcttttcttccttttcttaggaacttatacgccgagcaaaaaatatatatatcatacgtatgacattattattcactatgatgcctgtgttcgtccaaactgggcggcgacaacggtggaacagcagttacattagtatcgctgaaggcaagatcaacggcttgcagtatctttctgcctgatgcctttgaatcagtagatctgaccactcttgtcatgttcccaggtgcggtaacattttggctctgcgcattggtttccttgggtgagagtttggcattcacagcaggttggccagctgcaatggcggaagtgaagacaccggattcgcgcagactctgaacaattgtcattggggtgtatatgcgagtcagcactcctttcctcagaagctttaagttcagctgcttatcggtccacacgactcgttcattgtaccagcgaagcatttcttcttcactagcagttgatgcaattataaaagctgctctgtcaaaatctaacatgaaacatctcttaacatcgtcttttgtaggcttgcatccacagcgatcacgtctagatgtcaaatctgaaaatttagtgtatgtataatgcagaactgcagcctcctccaacttgatctcatttgggctctttgcataattatgccacctgtgcgcgccattaggacggagatggtcttgaattcgtgcagcagattttccattaccataggtgagaaaataatttggatttcctcgtgtcgcttccttatacatgccaaagtaagtatctttaggaagatgatcataattcctcttgaacatagatacttcgctgaatggatcttttatattatcatgctcaacactgctttcatagtttggaaaaataaccatgtcgacatcacgagggacctcagctaacaaacgtctaacagaatactcagcagctccgccaggatagagtaactcatcagtgtctaaatgtatgatccaatccatgccaccatcccgagccattacaatagccatctccatgttgagggattgcttcacaaagagttcatagttgcaaggtttgtagaaaaatcctgaaagccaagtctcattccagattcgacgactcggttccatcatgaacttgatagccgactcggt

SEQ ID NO: 270570 - DNA, 475 bp, Zea mays
  unsure (1)..(475): unsure at all n locations
ngcggccgccctttttttttttttttccaatacaaacaatttcccttcgtgtattattgcagaccgtttgcagtaatgtatgcggttacatccatcagaataccatatcaacagaatcaagaaatgcgagaactccaaaatatacattctccatagagggagtgcactgcaaactgatagacaagaaagcacaaactgatggcggtgttatcgcactgtacatttcttcagatcacatcttccaagaaacatagatgatcaggtgtttatccaatgggcacaaatacttcgcatgcttagagggtgtttgatttctaggaacttatttttagtctatccattttattccattcaagtctctgaattaccaaatactaaaactaaaataaagttttgatttccgtggttgggtatttagggacttaaatagaataaaatggaagaactaaaatttaatccctataaaacctaacac

SEQ ID NO: 270571 - DNA, 286 bp, Zea mays
  unsure (1)..(286): unsure at all n locations
cggccgcccttttttttttttttttnnnnnnattcgaaaataagacatgttgggccctgattacatgggcggcaatatttgctggggctgttacagtgcaatttctttcacatgatatactgaaacaatcctcagtagccaaacacaaactgagctgcctaattttacaacaggggtaacgcgatgaaacctatatgatcagtagtgggtcctgacacgataactcgcaagtaagtttgctagcatcaggcgggcctctcgccaccatctagcgcagcaaccttct

SEQ ID NO: 270572 - DNA, 765 bp, Zea mays
aaactcaaccggagatggcgagctctggccgcctccccggccagctcttcgtctccggcaggttagagagcccgcacctcgcggagctcgacctcgccccccacctcttcggctcccaccctgtggctggctcgtgggacccctgcaaggccctgcctttggagcgggcggccaccgccgtgtgggagttcagctgcgtcgtgccttcgcagcacgaatcgctggatttcaagtttgttttgaagcgaaaaggtgataatcctcaatacattattgaggagggacctaaccgaccattgggttgccagagaaatgaatttgagatggggaatgcgttgtttaaactcaacgaagggaaggaggtacttgagtgcaaggttcaggttgagacagaaatgttatccccatttgacttggcggctagttggagagctcatcaggagtattttcagccttcaagggtgcgggggactcacgatgtcactatcaaccctgggttagaaggcagggccaagaatggcttcgcttctggtttgaagcttgatttagacaagtatgtagttccaacaccaaacatgggctcaggtgttgtttatgcagctagtttgactgaaaatccacgctcattattgcaaactgcgagttcctcatacaatgataccacaaaggacattttgcacaactcaactaaaggcgattcatccttgaatcactatgttaacactatgaagagcacaattggagggcatgcatcgtcactggaag

SEQ ID NO: 270573 - DNA, 451 bp, Zea mays
taacgcattcccctcccccgcgtcgtcatctccccaaatccccccaaaccctaccgccgatccgggcccagatcgccatggccgcccccaacagcaacgacgccgccagcgccagcggcaccggcccggctggcgaggaggacatctccatcgaggcgttggcgcggcgcgtgcaagagcacatgaccctcaactcgaaccccgccgctcgccgccacaagttctgggagacacagtcccgtcggccagttccgtgacgccgccgacgcatcgctaccgaacggccccatcgagccgcccacgccactctccgaggtgcgcgccgacccctacccgctgcccgccgcctttgagtggctcacctgcgacctcgatgacgacgcgctcctcgccgacctctactcgttgctcgcccacaactacgtcgaggatgaccagaacatgttccggt

SEQ ID NO: 270574 - DNA, 507 bp, Zea mays
  unsure (1)..(507): unsure at all n locations
gcgacccacgcgtactttagaagccggacacactaaagggcctggggaaaatactagaggggagcgggaanggcnacaccnnnngcggaagcggcgcaagcgggcgggcgccgacggacggtgctcgacggacgcgcgtcgcgccctacccgcagccgcagcgtgcgcgcaggtgaccggcgagccggtgtacgagcgacgtacgcttcccttttggcgaaagggaccggaccccagcaacggacgggaggctctggaaaagaagaataaaaagtttcacctttctttttagttttaggccatcttcggatggtaatctacgcctcctttcctgtagcagtggtcgattgtgtaagctggggtttggggttgggtggtggtggtggtggataccggctgcgccgctgcaataacttgcggacgcgcggcggggactctgatttttttttatctcggcgacatttcgatttcgtgcccaattgtcactgagatgatcctgacatattc

SEQ ID NO: 270575 - DNA, 558 bp, Zea mays
  unsure (1)..(558): unsure at all n locations
cttttgcgcttctcttctctcttctcccctgtctgcttctgtggactgtggatgtgctcactgcttantttggtgggttctgctcaccaatctcgctcgcagtatacgaagcctccatagtccatcatcctactgcactcggagaccacggacttggaataccaccctcgcccacagtcccacaccaggaaccatgaggaccatcatggcgaagagcccccacgactcctccttctcccggaggaacttcaagtggccggttcttgtcaagagcagcagccatggcgccgcagccggcggcggggaggacagctccggcaagggcgcggaggacgccgacgaggacgaggcgaccatggcgttctcctccagctgcccgtcgttccactcggaggacttcgtatccccgccgcccaatcccaaggcgccacctccaccgaagcagcggggcaagaggtgccgcgcggcggtctcccggctgcgcgcggcgcttgccgcggccatcgccggacggcaccgacaggtcgggctcggagcgcggatcacgggcacgctcta

SEQ ID NO: 270576 - DNA, 527 bp, Zea mays
ccgaaacatcccttcaactgttgacccatcatacggagtcgaaccggacaggatggccgccgctcgcgcacgggtgctgcgcgcgctgccggcaaggtgctggacgaaatgcctccgccgcgcttcccctttcccctccacctcgcccgccgcctcctcgctctccagcctcagccgtgctgccacgtctccctttccgcccgcctctcgctcccggcgccttctacactcgccgccctcggcggcggtgcgcgtgcgggcgcagctgcagatgcgcttcttggcgagcgaggccgcgcggggcggtgtcggcgggcgcggggcagcagcggacagcgaggaggaggcgcaggagtgggcggtggagtgggaggacagcgaggacgacggctacgagcccgagatcggcgacggcggggacggcggcggggtcgcgctgcggggcgtccgttggggcgagcgtgccctcgtggcggccgaggaggttctcgccggccattttggggatgacatcgcaatgttcgcct

SEQ ID NO: 270577 - DNA, 881 bp, Zea mays
ggtggtcacttcataggccctttttactttctggagggcttgattgttccttacagctagttgatgttgttgagggaaaagtaatggaagtattcaaggaggatcaagctgtggaggttatcaagttcaatccaagcaaccccgatctcttcctatctggtgggtccaagggttcccttaaactctgggatattcgatgtggtctggtaacaaaagaatttcagagaagccttggaaccatccttgacattgacttcagtgctgatggaagacaatttatctcttcaactgacacaaccagaagcaatattagtgagaacactataattgtttgggatgtcctgcgacaagttcctttatctaaccaggtttataccgaagcattcacatgcccgtgtgtaaggtaccacccacgtgaagcatcatttgttgcacagtccaatgggaactacattgctattttttcagcaaggccacccttcaagctgaacaagtacacgcgggttgaaggacatggagtgtggggtttccctgtgaagtgcagcttttcccttggcgggagagaactcgcatctggttcatccgatgggtccatttacttctatgattacaggtcggcaaggcttttgaggaaaatagaagccttcaaagaggcgtgcactgatgtcgcgtaccacccagtaatgcctaatgtgatcgctgcttgtagctgggctggtgaaatatctgtctttgagtgacatgattataatgctgtgtggagaagcatcagcagttcagaaccgctagcatatatatgtgtgtgtgtgtgttctgtgactcaaacaccagttaatggtcatagcagattccaaaataaaaataatttgctgtatggagtt

SEQ ID NO: 270578 - DNA, 1657 bp, Zea mays
cggacgcgtgggcggacgcgtgggcggacgcgtgggcggacgcgtggggtaagttttcctgccatgcacaggaagacacaattttcgagaatctggtacaagcacgatacaatgtttttcacacccaaggcttatatcaagatggattttcactgtccactatctcaaagctcacctgagtcggcagttcttactgatgtattcacaaggttgcttatggattatttgaatgattatgcttatgacgcccaagttgctggcctctattatgttgttaagccaaatgacactggttttcaggtaactatggttggcttcaatgacaaaatgagaacccttttggagactgttattggaaaaattgcagaatttgaagttaaggctgaccgtttttctgtgataaaggaagctatgacaaaggagtatgagaatttcaagtttcggcagccataccaacaagtcctatattattgttcgctaatactggaggaccaaacatggccatgggatgaggaattttctgcactttctcaccttgaagctagtgatctgggaatttttttgccccatttgctatcaaaaaccttcatcgagtgttattttgcaggtaatattgaacccaatgaagcaaacaatatcgttcaacatgttgaagatgtcttattcaatgcaccaattagtgcttgcaagccactatccccatcgcagcatcttgccaagaggattgtaaagcttgagaagggtttgagatactattatccagcaatgtgctcaaatcaccaagatgaaaattctgctcttctgcactatattcagactcatcaggataatgttaagcaaaatgttctacttcaactacttgctcttgttggcaagcagccagcttttcatcaattgcgatcagttgagcaacttggctacatagcgcttcttaggcaaagaaatgattcaggtgtccgtgggttgcaatttataatccagtcaacggtgaaggatcctgctaatctggatgccagagttgaaaattttctcaacatgtttgaaagcaatgtctacaatatgtctgatgcagagttcaagagtaatgtaagtgctcttattgatatgaaactggagaaatacaaaaacatacgcgaagaatcagctttcttctatggagagatttctgaaggaaccctcaaatttgatagaaaagaagcagaggttgctgcactgagggagctcaagaaggaagagttggtaggcttcttcaatgatcatgtcaaggtcaatgcaccacaaaagaagattcttagtatacaagtgtacggtggtctccattctgccgagtacgaaaccatagtgcaaaatgctccgccaccgccgtcgtgtgagataactgatatttatggcttcaggaggtcgaggcctttatatggatcattcaggggaggcgttggtcagatgaagctatagttcaacattttctcatcattctgtaaaattctgaaaaagagtcatctttctgttcaactgcatctacgttgattgttttttcattgcgaacactctagtaggccatttatctacggttttttcactatatttattaagatattatgagatttcacattggaaacaagttagctaaaaaaaaaaaaaaaaaaaaaagggcagg

SEQ ID NO: 270579 - DNA, 555 bp, Zea mays
  unsure (1)..(555): unsure at all n locations
ccactaccgagacaagagcccccctatcaattatgttgtaaatatttcttctaacatgcagatttttccaccaaaagattggttgattgcgtcatctgtgccatcaaagttttcaccagatgctattcagaatgttttaaatgaactgactcctgagactgtaagaatattctgggaatcgaaaaagtttgaagggaaaacaaaattagcagagccatggtatggtacatcatattctgtcgaagttgtccctccatcaatcatacagaaatgggtagggaaagcccctgaggaagatctacacctgccaaagcgtaacatcttcattccaagtgatctttcactgagaagtgtagaggaaaaggtaagttttcctgccatgctgaggaagacacaattttcgagactctggtacaagcccgatacaatgtttttcacacccaaggcttatatcaagatggattttcactgtccactatctcaaagctcacctgagtcgcagntcttactgatgtattcacagggtgcttatggattattgaatgatatgctatg

SEQ ID NO: 270580 - DNA, 384 bp, Zea mays
gcgacccacgcgtttttcgtgccgagcgggggaggcggaccacagtagaactagaacgctgggtacggctctactacgctacgccccatcccgcccggaccggaccggacccaccttcctccacctctctgcccgccgccggccgacccgaatgggggcgggaaccaataatggcctgagcaacggcgccgccgcaggggcagcgcgcggacgacgggaccacggtgttccggggcacggcgtactcgccgctacggaccacggtggcgctcgcgctgtggctcggggccatccacttcaacgccttcctcgtcctcgcctcgctcttcctcttcccgcgccgcgtcgccgcactggtgctggcgacgcagctcttcttcatgt

SEQ ID NO: 270581 - DNA, 610 bp, Zea mays
  unsure (1)..(610): unsure at all n locations
tggcgtccgcccaaccctccaaaccaaggcggccaagccccttccatttgccaggcggccacaccatctgatccccaattcgtttccacctatcgagccaaggtgcgacgacggcggtcgcagcgtcccctccctccctccgtaccgctgccgccggtctaccaaacggtgaaatatttacgtaagcgaatcagggtcttgaagatagcttccagatatgtggggttttgcatcaaatgcttgggcatccgggctggggaagaggagtcccccaaattgcacctcttcgagtgctgcttgttccgatgacgaagcatcctcgtgcacgagcagggaagaaggcctggaatgcccaatatgttgggagtctttcaatatagtggagaatgtgccttacgtgctatggtgcggccacaccctttgcaagaactgcgtcctaggacttcaatgggccgtcatcaaagttccaactgtgccgatgcagctacccttcttcgttggctggccctggtgcaacctcctgtcgcttcgcatactttacaaagggaccctcacgttcccacggaagaactatttccttctctggatggttgaggngatgaatggtgag

SEQ ID NO: 270582 - DNA, 2570 bp, Zea mays
atggaggcacgccactgagaagaatgtacaaaataacacccgcactccaaacatctatctcttttccatagctccgtctaaggacttcaggagcaacatagtaagcacttccaacaatgtccctgtacatctttccttcgtcaatgaagacgtaaagcccaaaatcagtggccttgagcattgcattctcctccttggtcgcaagcaagaagttctcgggtttcagatcaccccacgcgtccgcccacgcgtccgcccacgcgtccgcccacgcgtccgagcaaagcaaagcttgagaggcttttctcaaaaacgcgccgtcgccgtttcttccccctttttctttgagaaaattcgcccgcgagatctttagtttcagaccccgtgtggattagtcgctgtcacgatcgaggcggggcgccaattgcggtggccaccacctccaatccactccccgcggtggcctcgccgagctgttcttgctccgtcctccctccaactccaagatttgtttcgcacccgattcctgagcttccgcggcgcttcttgctgaaaagaaagctccgagttcttcagttctggatcgatagagaggcggttcctttgcgggctctgaggttcagctctcgctcttgatttgtctcatcgacgcatcagttgggctgcaggcttagagctggaaggaataatttgactagagaaatggggcagtgttgtagcagagctcccgccccggactctggacggggaggcaccaatggttatggctattctaaccaggcaaagccagcgcaaacaccttcgagttacaaccctcctcagcagccggccgaggtgaggtacacgccgccggcgacgaacccttcggtagtcccacctgtgcctgtgcctaccgaagcccacggcggacacgattcttggcaaacagtacgaggacgtgcgctctgtctactccctcgggaaggagcttggccggggccagttcggggtgacatacctctgcacagaggttgcctctggtaggcagtacgcctgcaagtccatctccaagcgcaagctcgccagcaaggcagacagggaggacattcgaagggagatccagatcatgcagcatctgtctggacagccaaacattgttgagttccggggagcatacgaggacaagagcaatgtccatgtggtgatggagctctgcgcaggtggggagctcttcgatcgcatcattgccaaggggcactacacagagcgtgcagctgctacaatctgcagagcagttgtgaatgttgtcaacatttgccacttcatgggtgtgatgcaccgtgacctgaaacccgagaacttcttgcttgcgaccaaagaggagaatgcaatgctcaaggccactgattttggctttctgtcttcattgcagaaggaaagatgtacagggacattgttggaagtgcttactatgttgctcctgaagtccttagacggagctatggaaaagagatagatgtttggagtgcgggtgttattttgtacattcttctcagtggcgtgcctccattttgggctgaaactgaaaaggggatatttgatgctattctgcatgaggagattgactttgaaagtcaaccttggccatcaatttctgagagtgctaaagacttggttagaaagatgttgacacgagatccaaagaaaagactgacttcagctcaagttcttcaacattcatggctcagagaaggtggaggtgcatctgataagcctatcgacagtgctgttctttctagaatgaagcagttcagagcaatgaataagctgaaaaagatggccctaaaggttattgcctcaaaccttaacgaggaagagatcaaggggctaaagcaaatgttcatgaacatggacacagacaatagtggcacaatcacgtatgaagaactcaaagcaggactagccaaacttggatcaaagctgtcggaagctgaagtaaagcagttgatggaggctgctgatgttgatgggaatggatccatcgactatgttgagttcatcactgccacaatgcatagacacaagctcgaaagagacgagtatttgtttaaggcattccagtacttcgataaagataacagcggtttcatcacaagagatgagctggagtctgctttgatcgagcatgagatgggtgacacgagtacaataaaggagatcatatcagaagtggacacagacaatgatgggaggattaactatgaggagttctgcgcaatgatgagaggagggatgcagcagccaatgaggctcaagtagcctgttcccttagtagaaatggtgtaccgttagttactgttcttcactctttttcccccttcgtatttggtactcttggtagccggattaagcttacaatgggcgtcgctcttttgcattgtcaagagatgattgtgtatatctttttcttttgctcgtgtttgttgcattgtagtatcctgaacgtcccttccttttgtaagtttgtttatacacaagcacatccaatagaaagtgcaatttgtgtctcaataacaaaaaaaagaaaatgg

SEQ ID NO: 270583 - DNA, 410 bp, Zea mays
aagggatgaactggaatctgctttgattgagcatgagatgggcgacacgagtccaataaaggagatcatatcagaagttgacccagataatgatgggaggattaactatgaggagttttgtgcaatgatgagaggagggatgcaccagccaatgaggctcaagtagcctgttcccttaatagaaacggtgtccccctagttactgttcactttttttctttcatgtttgggacttggtagtcggataaagcttacaatgggtgttgcttttgtattgttgaaaaatgattgtctatacctttttttccctgtttgctcgtgcttgttgcattgtagtatcttgaacgtcccttcctttttttaagtttgtttatgcaagtccatctaatacaaagtgcattttgtctctt

SEQ ID NO: 270584 - DNA, 421 bp, Zea mays
cccacgcgtccgaaactcggccccccgcaggatcttttggtccggaccccgtgagtcgctgccacgatcgaggcagggcgccaattgcggtggccaccacttccaatccactccccgcgttcgcctcgccgagctgttcttgctctgtcctctctccaactccacgatttgttccacacccggttcccgagcctccgcagcgcttcttgctgaaaaagggaactccgagttctccagctctggatcggcagagagcggtggttccttttgcggactctgaggtccagttcttgtttttgatttgtctcatcaacccaccagtcgggctgcaggcttagagctggaaggaataatttgactagagaaatggggcagtgttgcagcagagctacggccccggactctggacggggaagtgcca

SEQ ID NO: 270585 - DNA, 368 bp, Zea mays
caccactcaccgtgccggccccaaccccaagcggagccccaacgcatccattcctctctcgtcttccctttcccctccggcgagccccttgttctcgccctccgttctacaaggttcgctcgttcatgttctaggtgctggacaccttttgcttcgcatggctcgggcgctgcacagtccctgtttcgtggctccgctgctgtggctggcgttgttactggttgccgtctcaccgcggggtgcgttctacttgcctggcagctacatgcacacatactcccaaggcgaggtgataacacgccaaggtgaactctctcacgtccatcgagacggagatgcctttcaactactacagactaccatactgc

SEQ ID NO: 270586 - DNA, 1434 bp, Zea mays
gaatccgcgccgcgaccagcgaagaaggttggaggcatccggaacggagacgcgcctcctgcctcgccttcctcccatggcgccgcccctcgccgccgtctcatcgtcgtcgcccctattctctccttcatcgtcccgccccatccgccgctgccacgcacctcctccttctatctccttccagacgcggggacgctcgcccacggcggcggcggcagctgagtcttctgtcagcacgcttctcgaggtgcgcggactcaccgcatccgtgaaggagactgggcagcagatcctcgccggcgtcgacctcaccatccgcgagggcgagattcatgcgattatggggaagaacggctccggcaagagcaccctcacaaaagttctcgttggccatcctcattatgaggtaactggtggtaccattctcttcaagggtgaggacctggttgacatggagccagaggacagatctctagcaggccttttcatgagtttccaagcacctattgagattcctggagtcagcaatttcgattttctgctcatggctgtgaatgctcgcagagaaaggagtggtctaccagcattggggccccttgagttttactcagttgtatcgcccaaagttgatgccttgaagatggacccaaagttccttgatcgcaatgtgaatgaaggttttagcggtggtgaaaggaagcgtaatgagatattgcagctttcagtcattggagcagatttagcccttcttgacgagatagattcagggttagatgttgatgcacttgaagatgttgctaatgcagtgaatgggctgttgacaccccaaaactctgttctgatgattacacattaccaacgtcttttggatctcatttagcccagttacgttcacatcatggaaaatggcaagataatcaagacgggtgacagttctatcgccacacaaattaatgaaggcggcttcaaatctatcgcccttgtatagcgtgaaagcagcaggtcaaataacagaaatggctcgctgggcttgttcaccagccacactaagcctacttgccaggacagaatgcctactgcttggggtttgcactgctgcctactgcattcagaggtgtaccacatacgaatttagtaaaaaaaaaaagagttagtgctctgttcgactaggcatgttgtcttgcctcgtcgagggtggggagctggatacaccacctcctctatgtaagaatgtttggatgaaggtattgatacatgtagtcatacatagggatagcatgccgtgcgtgcatacaaggtccaaattttgtatgtttgaattatgacttattctcccaggcttctggctatcaaggctggtgctgcgtgcaacttttgtaacatttttagcacctcaccgatgttcagacctagaaagcaattcagttgttctct

SEQ ID NO: 270587 - DNA, 462 bp, Zea mays
gacaaaatagaaatagcctaccagtgtcgggccaggcgccgtcccgtacgggggcgggcgtcatccgaatccgcgccgcgaccagcgaagaaggtaggaagcatccggagcggggacccgcctcctgcctcgccttcctcccatggcgccgcccctcgccgccgtctcatcgtcgtcgcccctattctctccttcatcatcccgccccatccgccgctgccatgcacctcctccttctatctaccttcggccgctcgcccacggcggcggcggcggcagcggcagcggcagctgaatcctctgtcagcactcttctcgaggtgcgcggactcaccgcatccgtgaaggagactgggcagcagatcctcgccggcgtcgacctcaccatccgcgagggcgagattcatgcgattatgggaaagaacggctctggcaagagcaccctcacaaaagttctcgtag

SEQ ID NO: 270588 - DNA, 587 bp, Zea mays
gcgttcaggaggccgttgctttcttccagggcgccaacctgccgcagccagtcctcgcccaggtatggatgcacgccgatcggaacaagactggcttcctcggccgcccggaattcttcaacgcgctgcgcctggtcaccgtggcgcagagcgggcgtcagctcacgcccgacatagcgcagtcggcgctgtatggtcccgccgcggctcgaattccagctcccaagatagccgcgggggcggctcctccacagatgggtgctgcgggggcgcctaggcctcaggggagcgctgcgatgacgcccacaccagggcaggttggggcggctcagatgaatccggctgccacaccaaggccccagggaagcggtatggtgccgacatctacccaagttagcgtgccgcaggtgaaccctggtgctgctccaaggccccaagggatcagttctacgatgccagctgcgagtcagggtggtgctctacaagcaactcaatttgctgcaccaagggcaatgcagccacagcctcctaacctgggaattactcaacagcaaccttctagtaccggtttcatgcggccaccacag

SEQ ID NO: 270589 - DNA, 399 bp, Zea mays
tcgatcacacgctgaacgcttccgccccgccgccaccggccccgctctcctccctccgctcgcctccgcttccgttccgcgccctgcccccggaaggcaagcaaagccctcgctacttgcggagcgtcgttggtcaaaccctagcacacgtacgagcaggccagccccgcccgctcccattcccaggccctcatccatggcggcgctctccgtgcccctccacgccgccgccggatcccgcgccgccgcggccgaccccgtcaaggttccgtgcgtgaggagcactggttcagcccattttggccgcgcctccccctccgtcgcggtctcctcttcggctgcgaggcgcatcgagccgatgagagcgatagctacacaggcgcccccctgccgtgccac

SEQ ID NO: 270590 - DNA, 2107 bp, Zea mays
cttatactccccaagcacttcctggtgctttgcaaagtcagttgatgccatgtaacaagctcaatgagccaaaagattacatgcctactgagcaaaatgctttgtcacagcatttacgtggcatgcgtaggcgcacccttttcaatgaaaaggctgggcttagtaataaaggtgtagacaaagcttcagatcatcatcctgtaaattcaactacccccaaatgcaaaaccatttctggtgacaactcaaagactctaagaacccccccatgtgcattgcctggtattggcttgcacttgaatgcccttgccgcaactgcaacacctaaagagaaaatagtccctcaagacattcagtctactataaatgaatcaagtaacttgataggccctgctggatcttctccggcaccttctgagcaaaacattataaatgatgatttcactcaaacaactgatgttgcaaccgctgaagcttctagtcagggtagtcccaagaagaaaaggcataagtttgatagtggtgatggcacttcatgcaagcgttgtagttgtaagaagtccaaatgcctgaaactttactgtgagtgttttgctgctggagtctattgttctgagccttgttcgtgtatcggctgtatgaacaaccagagtcatacggaaactgttctatctacgcggcaacagattgaatctcgcaatccattagcatttgctcctaaagtaattcatacatctgagcctggtctggaactaagggacttctccaataaaactcctgcttcagctcgtcacaaaaggggatgcaattgcaagaagtcgtcatgtctaaaaaaatactgtgaatgttttcagggtggtgtgggatgctccataagttgcagatgcgagggctgtaagaatgcttttggaaaacgggagggggctgccgtgttaagcatagaggaacctaagcagggattggaagaaaaggatgtttgtgtgaaagaagagaaaagtgaaatcgagaaacagcttgttgtctaccaaactcctgatgatgctcctgctgaaaatgtactgaccacaccttccatggtgcagtgcagacccttggcttgtcgtccacccccaagctccaagaaaagctccaaaaaaccacgatcttcaacaaaactcactggacatccttcgcggttgtgcaacttacaagctcctccgaagaccgacactatgctctccccattcgaaaactacgcggaaatggtccttggtgatagcacatcggatatcctcaagggaaattcatctcctcaaacttctgttaaagtggtgtcaccaaacaagaagcgaatctctcccctgcgaatgggtaccgggctatctccaatctgtaggagtggcaggaagctgattttaaagtccattccttctttcccttcccttggcggtgatgtaaacaatgaggatccagaaaccaagttgccagccccttgaatttaccatattttgtcactggtttatttctaccataccatctgatagtggacagccaagcgactttcctttcatcatttctatctctctcgatcaatgattatttatgtactgctataataatctgccgcgtgctggcaaaattctgcctccctagaacaaccaatggcatttggtttgctggtaaattatctcttggctccgtgtgttccctgtggctgtctgtctataatttatgttcattattttgttccggagaccgaagaatctgaggacttgtatgtatctgggatcaagatgtgaatctcgcatgtaccagatgacagaactgttaagacttatatttgtctgaggttaaactgcaagacttttatttaagctagaactttgatcactataggatatggcatgatatagcagggctcttgagatgcattctcttgtgcgtgcttggtaactgtagtcgtgcaactgttgacggcgtttgttcagaacaagtggttgatgaatttgaagatggtttagggagtgggaatgattttgtttgtgtgcgtgcgaacttgtaaaatctccgtgtatgaactggcaatgcttttatggtattgctcacctgcggtgtgttaactgagtgc

SEQ ID NO: 270591 - DNA, 822 bp, Zea mays
ctcagctacgatctgaaagaaacccgccaccagctctcgtccttccttctctccaatccaaccgcaatcctttcagcttcagcttcttctgctccttctctggtgaggaggcgtggtgagagactgcgactgcgcgatggaggcgtcgtcgtcggcgttggcgctcgtggccgccgtgctcctcctctcctccccgctcgctgcgtcagatttctgcgtgtgccgttcggaccagccgacggcggtgctgcagaaggcgatcgacttcgcgtgcggcccgcagggcggcgccgactgcacgcccatcctgcagggcggcgggtgctacagcccggacaccgccgccgcgcactgctcctgggccgccaacacctactaccagaacaacatggccaggggcgccacctgcgacttctgcggcgcagccaccgtctccaccaccgacccgggtttctccgggtgcactttcgcttccagtgccgccagcgccggtgctgggactggaaccgggacggcgggcagcagcaccttcagccccagcgcgggcaccggcttcaacggcaccgggaacgggatgggcggcagcactactaccggcctgggacccacgggcaacgcctttgacgccgacgccgccgtcgcgccgggcctgctccccagcgccgcgtccctcggcctcgcactcgccgtcctctccttcctaacctagccctgccgcgccattaacggcagcctcccctcgtcttatgtctggtcgtgttcagtaccatacctctctgaacatgagccagctgctgctgctacttggctggctccatggcg

SEQ ID NO: 270592 - DNA, 889 bp, Zea mays
acgagttccatagctggttcacatattcgatcgttctcctgtttctgtgtactgctggattttggatggcaagattgaatgaagggttgtcattatttgatgcaatactgattgttccaatgtttcaaattgcttggaccttcttctctatctgtacaggatttgtttactttcaagaatatcaagtatttgatacgctcaggataattatgtttgtgttaggcatgacatttgtctttgttgggatctccttgctagcacccgatgacactaaagctgatacgaaagatggttcaagcaccgccgaggactccataattgacatagacagaaatggaaagatgccgatggaggagacagacacagatgatagcatctcctttgttacttctgtaaaagcaaatgcaaaacgtgtactttcaaaggcaaagtctgcatgctccatgtcccttggccttggggagagcaccataagcgcttcatcggtgcttgccatgccgatggtctcgtcaagaacaaccggcttcagaggaattgaagatgaccgttcaaagtatgttcctttaagaaccacagattggagtaacctatagccgatggtaatatataggtacacaggaaaggtctttgcttttgatgttgcctagcgggtggcagtgaagtttttttgttgctccagaggctattgtttgttgtaatcatagctagctgtaacacgagtgtatagttcaacgtttctcccttcaaaacactgtccatagccagctgcatagtacatttgtaagttttagaatacagatcaaatgattcaattcgcttctgaattgcgcaaccatttcagtggttgcatgttgtaaccatcttatatagaattgcaatttcttttgct

SEQ ID NO: 270593 - DNA, 1269 bp, Zea mays
  unsure (1)..(1269): unsure at all n locations
gaggagcncgncacgcacncggggggcgttttaaaggaccacccccggctccacccccacggcagagacccggactccttcaccgacgacgacgatgacgagtcgtactcgtacgaggaggtgggcgccgaagacgtggagcagatcggcatggccgcgctgcaggtggagcggaacgttcgcgactcgggcagtggcatggaggtgaaagccatggtcgttggcaatgaccgcggggaggacgaggaggatgccgacgccgacgccgacgacgcggaggagccgtcgtcccccgtggagaaggaattcgagtatacggtggatgttacctgcgcgagtacaacgaagccagctacgtctgtggttgcacagtacgtgggggacggcaactcgggggggctgtatgcaagggtcgaggcgctggaggcggacagggcggccctgcggagggagatcttcgctctgcgggcggagagggcacagctggtgatggccagggagatggcgcggcggctctgctgggagatggttgctgagcagagagccattgtgaagaaagcgctagtgcctgcgagcagtttctcagtgatcaggatatgcaagtgggtgctctcaatactattttggagaaacagaagctctacagccaagtacacctttggtttgtcgactacgttccttggcctcctgctgcttcttgacagatccgcattgttgagttcctggcgacgtctgccatggccacaaagatgaatgcaaccttctccataccaacagccaaatgcccttaaattcagagatttgaacagttaagctttattgtgcatgtgtattgattctttggtgtttctttttccttttgccacgtacagtattggagctgtacgttttttttcctgaagctttgagctgccgtatagtgtgtaatttagaccactaggcttgaatagtttgtaatttggggcgacatgctctgtatagagtgtacatcatagtaagttgtggaactccgatttgttttgtatcgtcgtggtgaccttgcttaatgtcagatgtcgaaggccattacgaggccttttttcgacgtttttgaagctgtagataaggtgattttgtatttttattattacagggtcccgacttgtttaaaatctcgcccccttgcgagaaaaatagtgcgggcttgattgtagaatgtccctggtttgttacaagggtacggataccactgggtctgttttacaaatagtatttgcgcaagttgactac

SEQ ID NO: 270594 - DNA, 778 bp, Zea mays
cgggccggactggctggaccgacccagcgctggcagccaccgcgccatcgtctcagtgtcacagcaggaagccgcgctcccgccagccgttagctgctcccaacagcggcgggatcagggcttgcgatttggcagacgcgagtccccccacccccccggccgcttacttcatgcctccatggatccggtcgcggacccgtcgccgtcgcggcggtccctgaagcggaggccgccggcgcggtcgccggagctgtcgcccaagtcgggtccgggggcaggagaggcggcggcggaggggctgatccggcgggtagaggagctggaggcggcggcggcgcggctgcgcggggagaaggaggcggcggaggacgcggcgcggggcctgcggcaggagctcgacgcctagcgggccttcgcggagacggcggccagcgaggccatgctcatgatcgagcgcctgcagcgggagaaggccgccgcgcagatggaggcccgccagttcaagcgctacgccgagggccgcgaggacagggagcgcgaggtccaggaggagctcgcctcgctctccgacctcgccgcctcctaccactcccgcctccagtcccacggcatcgacccggactccttcaccgacgacgacgatgacgagtcgtactcgtacgaggaggtgggcgccgaagacgtggagcagatcggcatggccgcgctgcaagtggagcggaacgttcgcgactcgggcagtggcatggaggtgaaagcccatggccgtggcaatgac

SEQ ID NO: 270595 - DNA, 367 bp, Zea mays
  unsure (1)..(367): unsure at all n locations
gcggccgccctttttttttttttttnttttttttctttttaaactccgcttgagtgggctacgggcatggttcactaaccatagccacacgcccacatccattgggttatttgctcaaccatctacgagatgggccatacaacgcttctacaaacgaagcgacagatcaagattgcggcggcgatcacggccgatcaccaaagagaaaacttatacagcatttttttccctctataggagtctagctagatctttgttcggcttctggaacgaggagtatgtcttcatcctagcttacttagtagcttactggctggcagcactacttggatctgcactggcctggggctgcgacggagttacttaa

SEQ ID NO: 270596 - DNA, 1284 bp, Zea mays
gcaggtagattgctgtttggtgagcttcgagttatgcctagctctcgaggcaaaagtccttaacattgacagaacgaactgtattacaacaagcctacagttcccaaagctacagctaaaaccaagcggcaattggattggcctttttacacggaaggaaaacagcactagtgcacaagtaagaaaaagaatcacaacactagctcagcaccaactatctcaccaataccagtacttactaccagtgtagtttcattgtaacaagaccttgcggtttgctagaagaaacgatgtcctccaacaatcagaatactatgtgcgttccgcatcagatcttcctcacctgaatgttgtgtgttgattgtgatctccagatgggatgtttaccactttgaacaagtgcaacctcctcaccgtccttaaccataccatgtttcagcaaataagacaaagcattgccaaatgtcttctcagcatcatcagaaaattccatttgaaccggacatacaccttggtacaaagccaatcgttgcctaactctctcctcgtctgtgaaggcaaaaatagtgccagatggacggtagtgactaagcagtatagccataaatcccgtcctagtgaaaaccactattgatgttcgaagggtatttgacatcattgtcgcatggtatgcgaacatttcgctcatgtggttcttgaaagcctgaccaaggtctgcaggtgtttccccaccaggaatagttgcctcggttctcagggcaacagtgtgcatgaccttaacagctttcaagggaaatttcccatgtgcagtttctcctgaaagcataactgcatcagcaccctctcggacagctatagcaatgtctgaaacttctgctcgggttggagttggatgaacaatcatactttcgagcatatttgtagcaacaataacagccttcaccatgctcctgcacattctaataatttcttcctgcaacagcggcacctcctcaatgggcagctcagctccaaggtcacccctggcaaccatagccccatcagatgctgtgatgattgaatgtaagttggggatggagtctgcactttctatttttacgataacatgtatgtcagcattgcaactttttagataatccttgagttcgtggacaacttgagcatctttcacaaaagaaacagcatagtaatcaacttgattatccacaccaaacttaatgtcgtccaacagtccttgtctgtacatttgaaacgtgcggacgcctgcctccgcccgggttttcc

SEQ ID NO: 270597 - DNA, 1179 bp, Zea mays
cacattctataatttcttcctgcaacagcggcacctcctcaatgggcagctcggctccaaggtcacccctggcaaccatagccccatcagatgctgtgatgattgaatgtaagttggggatggagtctgcactttctatttttacgataacatgtatgtcagcattgcaactttttagataatccttgagttcgtggacaacttgagcatccttcacaaaagaaacagcatagtaatcaacttgattatccacaccaaacttaatgtcgtcccagtccttgtcagttattgatggcaaggttgcactctttccacgaacattcagatggcgcctagatttcaattcaccaccgtcaataacttcacatttcacagaatcttcagtttttgatttgaccaagaatgacatcattcctccatctacaaggagcatgtcgcccacttcaacatcattaacaaagtcgtcatagttaacgctaacacacgtatcagtcccaactccccttttgattgtaaaagtaaattcttgtccgctttccagaaatatcggttgaggcaaatctccacttcgaacttctggtccctttgtgtcaagcatgatagcaatcacattgtcagcatgtgatgcattgtactcctttaccagatcaataactttctggtgtgatgcatggtctccatgtgacatattaagccgagccacattcatgccagtctcagcgagtttccatatcatgtcccttgtgttggttgaaggaccgattgtacacacaatctttgtcttgcgccttacatttggtttagaccacacgccatttgctgcagttgcaagttgctggatagccttaaggtgctggaagtttgcttcttcctttacggccgcgtcgtcgtcgggcgacaccggcagcatccccggcatcggggcgtggggcgcggcttatgacggataccacctgagactcgcggcgtcctctcgcggccacagcaccggtccttctctcccttggcatcgttgccgctggccggagcgcgtcggccccagatccgccgcccagcggcctggccaccggggtgcccgccgctgccaccacctgcgccgccatcctcaagccgggtgagagatttggaattggtagggggaagggtagctgactgggacggtgactccggacgcgtgga

SEQ ID NO: 270598 - DNA, 616 bp, Zea mays
gcggccgccctttttttttttttttgtttttaattcccttctttgcttgtacgtccttgtttcactctacagtcggcagaagacaaatcactctagaacatgtctagcgtccaggagttcagaccgcacagacaatttgaacgtgtccaatatgcaatctatcagacaccaaaggtccacccgagtgtccagactcaccgccctcctttctgcatcttgaaccttgacacgggccttgaagaagcacaagtaccaggttttgccaacgaactagccacagaaggttcaatggtggaaacattgtcgtcgtgctcaatgatagatcctgtaaaggcctttcgtccacttgatattatctttctgtcacgagatagagcggggtctgaagaattcttgagcacaggatcagactgtatagaatccagtagcaagggaggagactttgacgaactaactacatatttgtcgtcttcaaaagtaacagctttagtgtgaactcggacatcagaatttgttgcagaggtttggccaggaaatgctagatgagatgtatgggatgatggcttatgagaaatgcctatcagcatttcatctcctccaggcttcttcagtgcac

SEQ ID NO: 270599 - DNA, 380 bp, Zea mays
  unsure (1)..(380): unsure at all n locations
ngcggccgcacacgacacgaaccctcgtgattcctgctcgtcgaccgactatggcggtctccggcctcatcgacgtccagaagctgctcaccgacgtcgtcgacaagctgacatcgctcgagaccaagatgacgacggtcgagcgcgagctctgcaccgtcaagctcgatcaacggcgcctccacgatgccgtcgaggctgggaagcaggccgcgttccccggagtactcgagctgcgtttaccggagtacgacggcacggacgaccccgtcatatggcttcaccgcttcgagctgttcttcagcctgcagcggaccgaggacgacgactaggtgtgcctcgcggccttccacatgaccggcgcggcgcagatctggtac

SEQ ID NO: 270600 - DNA, 490 bp, Zea mays
aacaaaccggtttataaaaaatgaggtggttctaaagataccaccagtttatggctcagtttatagaaatttgattcccactttcataaaaacaagaagttggtctctcaaagctaaaagataaaaactggtgtcttaaaaactgttgggttgtttccaaacaggaccttaaataaatggtacaaatatttccgctctcattcctagaaagcattttctgcagaagaaggtaactagtacaccgttattacgcgggaagcacagcacagcacagcacagggcgtcaggtcctggtcacattacagtgaactctccgcagctatagatcgggcataccgatcccagccttttcatcgtaggtcttctcctgcgccagctcgattggtgtgtccttcgggccaggtgacgtgggcctcggtttccttctctccttcagaatttctggccggggtatcacaacgcccgatgcgtacattcctctagcgtacct

SEQ ID NO: 270601 - DNA, 477 bp, Zea mays
  unsure (1)..(477): unsure at all n locations
accgcccggaancccgggcggccgccctttttttttttttttttttttgggcacaatttgcattatttttatttaacagtacaagatcaaccaaacattttacatttacatcgtccaacgaacgaacccaaaggaataatataaagaacgagcatgtagtataacacgtgttcacctctacaggggcactagatctacacagatcacagaacggtaatcctacattccatttcattcatcatcaattcaacgacatcttcaccgtcgatctcacgcacctgtaacctggatcttcttcttcttcttcttctcgcgcctctcagcgctctccatccctggatctggaggagaccggccgcagacggcaccggcaaccgcgagacgctgcctagtgcgccatggcgtggccggtgtggtggaagctctgccgctgcgcgtaggcgaacgacgccgccggcttgcactggacgctgtgcg

SEQ ID NO: 270602 - DNA, 444 bp, Zea mays
gcctgtttttttttttttttttttgttacattcaactaagaacagcatagttaaggaaatatagataagtacaattcaatgtctcataaataagcattgtcaaataaatcatacataagtgtcctctaaatccaaattaaaatactaactgaaaaacttatcatcagtcgtttgcgctaacattgaatctaactaagcatactagaatagaaggcgtgttatcgccgtgctctcgtcagaaagcgttcgttacaaatgtagagctttagctggattcatcagacatccatcatgacacatcatggccaggggacctgtaggtaaacatcttgctagaatggtagctagacgattcgaacaataccattccacatcattaccctgtttgtatcttgtagtccctgttaatcgattgctcgacttcatcagttgacatttgatcta

SEQ ID NO: 270603 - DNA, 765 bp, Zea mays
gcggccgcccttttttttttattttcaccaagcatatttgatatagcatacatgatttaccgccatgatgatctcagcaatttaacatttcaattgtcagctcacgatgagtctatggctccagcagtcccttcttaagcgtttacatagcagctaatatgttccagcaagttaacattacagtagggctaatgaaattgtaatttacttagatactgactcgtctccagtctgcgttgcaggaacaacctcagagttgatgctgctgtcaccttgttgagatggtgaatcaagtgcaggtttcttagcagcaggttcagcagagatcggcttgatgctagctcgtttgacgcctctgcctacaaccccaaggtcagtcacggtgcttccagagcttccggttgtcgctgccgtagacataaccgaggagtcgaatccattgcttgaggttgccatctgggaagaagtaaaagatgcagcttttggcatcacatcagttaccctggacacgattgccttcaccatctcatccatgtcagcgcttgggtttgcttcagacaggtcctcaagcttcttctcaagatcaggcaatatgctagtaagctgctctagctctttttcatcggcagatttttttgagcctccttcagcttcagcagcagatgcatcgccatctataccagcatccaaagcatccatggaactttacaggctctgtatgcgtgacttgcatagcggaattgcttttgcccagtatgaaaatac

SEQ ID NO: 270604 - DNA, 636 bp, Zea mays
gataagggcggttcaatgtctcataaataagcattgtcagataaatcatacataagtgtactctaaatccaaattaaaatactaactgaaaaacttatcatcagtcgtttgcgctaacattgaatctatctaagcatactagaatagaaggcgtgttatcgccgtgcccccgtcagaaagcgttcgtttcaaatgtagagctttagctggattcatcagtctgcgtcgcagggacaacctcagagttgatgctgttgtcaccttggagagatggtgaatcaagtgcaggtttcttagcaacaggtttggcagagatcggcttgatgctagctcgtttgacgcctctgcctacaaccccaaggtcagttcaccgtgcttccagagcttccggttgtcgctgccgtagacataaccgaggagtcgaatccattgcttgaggttgccatctgggaagaagtaaaagatgcagcttttggtatcaatgtagttaccctggacgcaattgccttcaccatctcatccatgtcagcgcttgggtttgcttcagacaggtcctcaagcttcttctcaagatcaggcagcttactagtatattgcctgatcttgagaagaagtgtcagacaggtcctcaagatg

SEQ ID NO: 270605 - DNA, 562 bp, Zea mays
  unsure (1)..(562): unsure at all n locations
ngcggccgccctttttttttttttttaaattaattaatgtttgacaactctaggttagtgcttctgtaactcgtccttccttgagttatataccttctctttgagttactataacattgacttgtaatattacagacccaactagaagaagtccggagggaacgtcacgagatggaggcgaggatgatggcggagcgggaggcggagcgggaggctcgcctggcagatcatcagaggatggcggagatgttccagtacatgcagagccttggcgccgcacagggcttcgctccgccacctccattgttccctccagttgaccctgctctcttccacactcctggcctcccgggggcgacatgcaacaaccctcatgaagggttcagcccaacgcagcaccagtcgaactcgccacctccatgagagttatgtttctagtgtttagacttcagaacttgcgttcaatacttatgttcttgatacttatgagacttatgaacttgtgttgaatagttatgtcagagctcgagacttatgagacttatggtctttatacttatgt

SEQ ID NO: 270606 - DNA, 1172 bp, Zea mays
  unsure (1)..(1172): unsure at all n locations
ataggggcttgtgtttggtagtaatgctgtgatcaccaatggacgggtttttattatgaatgaagggaaatcatttctagccaatgacttaggtctccttgagtctatggagtatgatttgagaacgaaatacatatttgaaataattgaagaggttgagtttgccagtgttgaccctgatgacctaacaaaccaattctacagcgacattgccatgttgatctcatcgtcgatgtctgttcgtgaaaggacatctgaaagagcccattttgagattttacatgcggaacatagtgctatcaaattgaataatgcaaattcaagtattcacattgatgctgtcattgatccgctaagtcccactggacaaaaacttgccccacttctacgcatactccggaaacaaattcagccgagcatgaggattgtacttaatcctattagttccctcgcagatcttcctttaaaaaacttctacagatttgttcttccatccatggatgattttagcagtacagatcattctgtacacggacctaaagctttctttgcaaatatgccactgtcaaaaacacttacaatgaacatagatgttccagaaccatggcttgttgaaccagttattgccatccatgatttagacaacattcttttagagaatcttggcgatgtcagaactttgcaggcagtatttgaacttgaagctctcctcttgacaggtcattgcatggaaaaggaccgggaccctccccgtggtctgcagtttatccttggtactaaacaaagaccacacttagtagacacacttgtcatggccaacttgggttactggcagatgaaagtctcccctggtgtatggtacctacaactggctcctggtcgtagtgccgatctgtatgagctacctccgaaactcattgccattgatagcttgagaggcaaactaatgcatattgaagtgcaaaagaagaaaggcaaggagcatgaggacttgctaaatgctgccgatgactaccacttncaggaaaagacggataacataggctgggataagaaccttttgaatgggcttctagtcttatcactggtgatgcttcaataaaaagtaaagctgataaaaccactgtttgagcgtttccttaaataatgattttgagtttctaaaaagacac

SEQ ID NO: 270607 - DNA, 586 bp, Zea mays
gatctgtatgagctacctccgaaactcattgccattgatagcttgagaggcaaactaatgcatattgaagtgcaaaagaagaaaggcaaggagcatgaggacttgctaaatgctgccgatgactaccacttccaggaaaagacggataacaaaggctggaataagaaccttttgaaatgggcttctagtcttatcactggtgatgcttcatcaaaaagtaaagctgataaaaccactgaccgtaaggatgcaagacaaggggagaccataaatatattctctggtgcttctgggcatctgtatgagcgtttcctcaaaataatgattttgagtgttctaaaaaagacacagaggccagtgaaggtttggttcattaagaattatctatctccacagttcagggatgtcataccgcacatggctcgggaatatgaattcgagtatgagctcgtcacatataaatggccaacatggttacacaagcagaaagagaagcaaaggattatatgggcatataagatcttatttctggatgtcatttttccactttcactgaggaaggtgatttctgctgatgctgatcaaa

SEQ ID NO: 270608 - DNA, 411 bp, Zea mays
gtcagaccaagcaaatggcgatctcgatctcggaggacgccttcgactccatggtccgggagaacatggaggacctcggcatggaccccgatgaggccctcgctgacgccgttgaggcgctcaccctccagggcgccgatctctcaggtatcgttaagcgcgtgccgggagaggccaccgcggcggaggtgagcccggtggtgcgggttctggacgaactgaaggcctctctcagcgccacggtcgggtcggagcaggatctcgacggactcgtctctctgctcgatgagttgcgcaatctgtgctgctccggcgagggttcggagaatgcagcgatcgcggtacggaatggcgtcgtggaggcgctcgtcgccctgtgcgcgtccgttcgggtcgagcaggagaggttgc

SEQ ID NO: 270609 - DNA, 1126 bp, Zea mays
atgggagctgatccatggaaggttcttaaccaggcgcgatccaagctccgtcaccacaatgcagctgtacaagtacccataggattagaagaggagtttgagggccttgttgaccttgtagaaatgaaggcttataagttcgagggatctagtggccagaatgtaactgcttctgatgttccattgaatatggaggatttagtcactgagaagcgtcgtgaacttattgaagttgtttctgaagtagatgaccagcttgctgaagcttttctcaatgatgagccaataacagctaatcagcttaaggcggctattcgaagagctacagtggcacggaagttcataccagtatacatgggaagtgcattcaaaaataagggtgttcaaccacttcttgatggcgtgctggattatctaccgtgcccgttggaggtttatacctacgcccttgatcaaaacaaatctgaagagaaggtattattagctggaactccagctgaaccacttgtggcattagcatttaagctagaggaaggtcgttttggtcagctgacctatctaagaatctatgacggcgttatacggaagggtgacttcatatacaatgtcaatacagggaagaaaatcaaagttcctcgcttggtaaggatgcactctaatgagatggaggatattcaagaagcatatgctggccaaattgttgctgtttttggtgttgattgtgcatcaggcgatacatttacggatggaacagtgaaatatactatgacttcaatgaatgtccctgaacctgtgatgtccttggcagtttcacctatatctaaagactctggaggacagttttcaaaagctctgaatcgcttccaaaaggaggatcctactttccgtgtgggtttggatgctgagagtggccagacaattatttccgggatgggtgagctgcatctggatatatacgttgaacgtattaagagagagtacaaggtggatgcaaaggtaggaaaacctcgtgtttacttcagggaaacaattacccagcgtgctgaatttgattatttgctcaaaaagcaatctggcgtgtcaaggtcaatatggacgagtttgtgggtacattgagcccctacct

SEQ ID NO: 270610 - DNA, 430 bp, Zea mays
cggacgcgtgggcggacgcgtgggcggacgcgtgggcggacgcgtgggctcccaaccgaatctccctccagcgccgcagctagcccgagaagccgacgaggaggaaaccgaccgccgacgccgagcaccctcggttcctggctttcccggcgcccaatctagacagctctttctcgttcgtctgtatccatggccgccgcctcgagcaagaccatcgctgtcctcctcgccgcgctgctcctcgcgctggtcgcgtccgcggtggccagcaggaagctggaggaggaggacgctttcctgggaagcctttcgccggcgcctgcccccgccgagggcggagccgcggggctcgctagcggcacgccgggggcgtgggccgtcgccgctctggtctctctcatcgccttcctcgcgaactgagcgggtcctg

SEQ ID NO: 270611 - DNA, 1095 bp, Zea mays
tggacgcgtgggcggacgcgtgggcggacgcgggggctgtcgcgttgtcggacgcgtttgcgcgctcgcctgggcgcggaagcaagaggaggcgagcgactactcgaccagccctctccgctcttgtctccgatggcggctcgcgtcctcgcggccctcgcccttgccctcgccctcgccctcgtcgccgtacccgctcccacgcgggcgtccaacgacgagggggacgcgctctacgcgctgcggcagcggctgtcggaccccaacggcgtgctgcagagctgggatcccacgctcgtcaccccctgcacctggttccacatctcctgcgaccaggtcggccgcgtcgtccgcctggacttgggcaactccaacgtctccggctccatcggccctgagctcggccgccttgtcaacctcaagtacctggagctgtacaggaacaaccttgacggcgagatccccaaggaattgggcaacctcaagaacctgatcagcttggatctgtatgccaacaagctcacgggaggaatccccaagtcactctccaagctcgactcactcagattcatgcgcttgaacaacaacaagcttacaggatcaattccaagggagtttgccaagctctccaacctgaaagtcatcgatttgtctaacaatgatctctgtggaactattcctgttgatgggcctttctcaacctttcctctccgaagcttcgagaacaacagcaggctcaacggtccagagctacaaggattggttccttatgattttggatgttagatgccgatcaacaatgtaccaccttccccagttgaaagggggaaagccaagatagtattatcaatagaaacctagcttcaagaatgtcgtgactatatatatgtatgatattaagacgagatttgataagggtggcatagcaagtcctgatattctgtgtgcattcagaatagctgcttttatgcccttgtgttgatattttgcaaaccaaaacaaactgttctgaaacgagggcacatattgttcatgaataaacttgagcctccaatacataagaaaaaaaaaaagaaagagagaaggaagaaaggg

SEQ ID NO: 270612 - DNA, 452 bp, Zea mays
caaacatctctaggaggtaggagcatatctaagaataccaagtttcttatttcgttgacttggatcttgttaagaactcgatgattatggcatctggctctgtcccctttctgacaaaatgtttcagggacttgggcaactccaacgtctccggctccatcggccctgagctcggccgccttgtcaacctcaaatacctggagctgtacaggaacaaccttgacggcgagatccccaaggaattgggcaacctcaagaacctgatcagcttggatctgtacgccaacaagctcacgggaggaatccccaagtcactctccaagctcgactcactcagattcatgcgcttgaacaacaacaagcttacaggatcaattccaagggagtttgccaagctctccaacctgaaaggcatcgatttgtctaacaatgatctttggggactattcctg

SEQ ID NO: 270613 - DNA, 520 bp, Zea mays
cgctatactgtagttgcgctgacttgaccacccactggccacagcagctgaaccaagttcaggcagtttcgtgcccttttcttctccaccagctcatagctgaacgcggcatccttcctttcctcccctcttctgcccccatttcgttcctttcacaccggagaccggcgagcagagccgcgcacagcagaacgcggaagcaagaggaggcgatcgactactcgaccagccctctccgctcttgtctccgatggcggctcgcgtcctcgcggccctcgcccttgccctcgccctcgccctcgtcgccgtacccgctcccacgcgggcgtccaacgacgagggggacgcgctctacgcgctgcggcagcggctgtcggaccccaacggcgtgctgcagagctgggatcccacgctcgtcaccccctgcacctggttccacatctcctgcgaccaggtcggccgcgtcgtccgcctggacttgggcaactccaacgtctccggctccatcggccctgagctc

SEQ ID NO: 270614 - DNA, 356 bp, Zea mays
cccacgcgtccgcccacgcgtccgcccacgcgtccgcccacgcgtccgcggacgcgtgggtttacatctgctgttatgttgccaaatgatcaaggattgctatgtgttactgctgatcagcagtttttgttctattgtcccaaaaggactgatgatggggactttgaactgtctctatatagacgactaataggttataatgatgagattcttgacttgaagtttatcggggaggaggaacaataccttgctgtagctaccaacttggagcaggtccgtgtttacgatgttgcgtcgatgtcatgttcttatgtactcgctggcctccccgtgtatatgttttttgtatttactct

SEQ ID NO: 270615 - DNA, 434 bp, Zea mays
cataaatggcatgcattggatagcagcacagcacagcaactgagtaaactacaacttcagtcacattactttgacaatgtcaaaccgggtttcgtgaactctgcaaaacatccctagttgtacaacagcgtagaataataaaacctagagtctatgcatttcctctctctctctctctctctacacgaacaaggatatctctgggggttggacaaaggagaagatggcttccccgaagacctcgtacagagaccccaagagatgaccggtgtcctggtcctccttccaggcttgcctaagcactgcagaaactctctgcgcgagatcactgccctgatccctccggaccgcagctgatgggatgctctccaccgtctgcccagaggacgaggcccgcatcatgccagggttgcctaactggttgggaaagccat

SEQ ID NO: 270616 - DNA, 604 bp, Zea mays
tgcggccgccctttttttttttttttttttaccaaaggtttagtggtaaattatgactccaaccacacatcgtctgtatgcaaacaatgtgtagaatacagcacttgtccacaagtacaaagaattgcacaacaattaccaaacgtgcgttcatcctgcagtgatgcacatcattgactgcccaatttacaaacatggtaccgatggaccaaactatgggaattcattgtacatcacaatctgatggatgaaatgaatactccattccaaattataagttgttctgttttttctaaatatataacttttactatgcatctggaggatacatcgtaaaagctatgcatctagaaaaaactaaaacaacttacgatttagggtaaaaggagtaccaggttagctcctccagctacagggcacaaactgatcttgtttctcacaactaagtcaaggcattgagttgtggtctccctggttcaagctacaactctgctccatccccatgacaagttggtggcgaagtctagatactcctagtttctgccaaatttatgtcctcatcaataaacaacatcacagctgtcattacaagcctgtaaatagt

SEQ ID NO: 270617 - DNA, 583 bp, Zea mays
tgcggccgcccttttttttttttttttttttaaaaaagaacgactcagtttgacacttctaacacggaattgtcatggcatagagatccaattaattaaccctatgaattatggcgaacaatgatgcagttactggctctcttcttcataatcttcctcgtcagactgctcaccgtcacttgcagccgctgcccccgcgttattgttgtcatggtactgctggtaatgtgggcgtggagcatggcggtgcctgtcaacatggctgatccggtaacggctatggtgattgctgctgccaccggcgtcggtaaccagtgacatcctcggaatcctcctcgacgagccaacagctgggacggcggccgtggcaggagacgcgtgattcttggcctgcgtgagctccatctgcgtgtcgaggaagaaccgcacgcgctgcgactccagctcctgcgcgaagtccatgcgccgacgctccatctcggcctcctgttccagcttcgttgcctccacgcgctcgtacgcctcaccgaggcgccgtatcgcctgagccagctcccgaagcctctgcgcgcggtcgccgccc

SEQ ID NO: 270618 - DNA, 1406 bp, Zea mays
gcggccgccctttttttttttttttttttttcatcacaatcaaataaactttatatacagcaatatttaagggcacaatgtaccttcctatcagacactacaattgtcaaacactaacaacgtaccagatctttggcagcgaatgtttgttcacactgttatgcaagtgaatccatacatccatttgagggagaaaacaatacaaactgaacaggtgtattgatcaacaaacaaggaaagctacagccaaatatacgagcaaaaaataatccctactacaaacagggcatggagggaagaacagagatcccagactacaatggaaataagaaacacagaaaattgtctgatctgccctgccccaccctctgttgaagtacaaagtttcagatacttgtgtcacaatatatgcgctttatgatcatgcatgatgccacagattgatctctgtggatagctgctcaatggagaccaatgaatatcatttgtcaataatatcttgatcttgtatggatttgttgctaacaccttatctcatatgatccagcccttgtgatgtagcgaacccactcaacagtgttataaccactcttctcccaaaccttaaggaagcgaacacgtaaaccagaagcagtgaacattggaacctggaattccatctggataggtggtctgttccatgacttcttttcacccatagtagaaatcaactccacctctgcgctcatagttgcctcagtctgcccagggaatttcctgatcttccacaccagtgaatcaatcgaagcattgtattttgctttgcctgatgttgtttggaaactagtcttagctgtctgcttcggaactggaaccttaacaacgacaccaagtgcaaacatcttagcaccgaaaacactcttgactttcacgttgatctccatgcgtgttcggcccaattccttgattgtcggcagaacacggaatggaaggtttacaccctctgtgattcgatacttcatcaactcaaattcaccgtcaggtggcacgaaactgactgtcttttctgagttaaatcttgttaagttgacacactggtggaatgtgacatcatcaagttctatagtcttcccactctttgctggtctggactttagttgggcctctttttcaagtccaatcttgtcatttaatcccagcttcagatcaggcattccagaaaggaagcatttcataagaatctttcccgtcacatcacatcttagaacactccctttcgaagacataagaaggtttacactctcaactatgtccaagaaaacctcattcttcttgtacacaagtccctctcttctccaaccaacagcgccagtgacttgaagagtcgcatttggaacaggcttctctgagggctttgaggaaaatgg

SEQ ID NO: 270619 - DNA, 658 bp, Zea mays
ctgattgcatggctacgtgtgggtttcattgatgtcatgggggcgttgtttatgcacaatcttgctctgcaaatggtcttccaccgcttgtgacacgccgactgcgtgaactattcacatatctcgcttcagctagtccttctgctgtggatcttttgatctattccaatccttcagctagtccaaactgtttgacattacaccacaataaagagacatctcaagaaagttcaatgcacaatatgatgccaccatattcaaaggcttatacacctattatattgcttcttaagcttctaaataaacccttatttctgcggagtcgagtataccttgagaaggtgttgtatttgcttgaagtagttattaacaatgctgcatcccaagttgattgtccacctcactctgtacagataactaacaattcagatattgaattcgttgatgggacaccatatcaaacacaggtggaaccatctactttggaacaaggtcatatcccggataataaccaaagtagagatgttgaggtcccaccatcttgtgctaaactggatgttaatgtgcatgcaatccttacccaacttcctgatgctgaattgcataatctgtgcaatattcttgcacttgagggtcttccagataaagtgtactcact

SEQ ID NO: 270620 - DNA, 694 bp, Zea mays
ccttctcgtccgcccacgcgtccggttttctccctgcccctgcgggctggagagcggcggcgaacgagacaaggtcaccggtgacgctcctcacctactccctgccgcctttcgctttgcggcccggcctgccgcaagctcgcgcgccgcctacatcgacccctccccgcgccgcaggccgcctcccacagacgcggggcagccacgtcgcccggctcggagggattcggttcggcccgtcgtgctcccctccgcactcttctattggcctggagagcagcggagatccaccagcaatttggattgcttctcctttttcttggatatacttggtctcctcggtgttggctaggcaatccagctttccaaagtgtgatcggacaggtttattttggttctgagatggctgatgaggactcatccgacttcaccttctgcagggttagttctgcagaaaatgacggtcaaccagaatctcctaaagccattcctatggcaagtatgacgctcgaggatgttcgtgttaaaagtgcagatacttcaaagaataatggcatgaaaactgttgactcagaaaaagataggtctggtaacaatgtcagtgtttcaacaaaagacgataacatgaaagcaccagttacacatacaggtagtggagcagaatcaaatgtcccattacaggcaaaacgttcat

SEQ ID NO: 270621 - DNA, 360 bp, Zea mays
ggagtttcaccagatttaaagctccgtaagcatatgctgctgattcgccggtgatcccctccctccttcgccgtcgccgtcgccgtcgccgtcgcaccagcttggccgccgcctctggatcgccgctggactcgcttccctgacccagaagctacgatgaattacatcatcggcgcattcaagccgccctgcgacatcttcgtcacattcgccgatgagagaacccggaagcaggtccagatcaagaaggacaacgggaagactgtcatggtgccggcctttcagacccttgagaccatagccggagaggtgtcgatcgctccagtcccaggtaaaaggcttgaacacacgggtgtgaag

SEQ ID NO: 270622 - DNA, 510 bp, Zea mays
  unsure (1)..(510): unsure at all n locations
cccacgcgtccgcgcacgagcacggcgtcatcgacaaccatcgacgattgctccatccccgccagccgccgaccagctgctacatcctgcaacccgaggacaagtgctgcatcctacagtccgttcgagatgccagaaattgattggaaccttgagaatacacagattgtttgtaagttgtttgtcgaacaagttggcaaagggaatcgaccaaacacttacctcaattcagttgggtacgctgaggtggagaaaggattcaaagataggacaggtattgatgttacaaagtcacaactcaagaataaatgggacaaattgaaagaagatttcaaggcatggaggaaaagagctagagcggatataccaggctgtggaaagttcaggaagcttggccttcaaaatgaagatgagctggctaggtgctttggagacatcacaaatattgggtgtgatcactggtctcctcgtgtngcaaatgattctatngcaactaaatgtgagcaaccg

SEQ ID NO: 270623 - DNA, 820 bp, Zea mays
tggagaagttgcttctaaagtcatggtagagtcgcaacaaaataatctcccaagggccttgcccaatcaagggaggacacatttgacaggtcgataccgtgatagcactgatgtgaagactgctcaggatcttaccatgtggtcttcaggaactgagcaacagagaaacaatattgctgcccagacaaaacgatgtctggagggttggacgcaatctagaactcccgaaggttacaatcaactgttctcggcatttcaaccactgaaggatgcacataatccacttcgtccttttcctaataaaatatctgggactcgctcaagtacctgggtcacagccgatgcccgttatccagctcaacaagccaatcacaacatgttacatggcacattgtcttttatgcctcatagcagtggttttaggatgattcaacagaataatctagtgacgcctgaagctgcaaattttactgggaaatcagctttcacttcacttcagggccatgtcactgatcagtgctccacaggctggtttggacctattgagtcaaattcccacacagaccatgcatcgtcaagtttgatcaggtcccagcctttggttattggaaatgatgttcagaaaaccaaaggcacttcattcaaactatttgggattcctcttggcagtccagaaaaatctgaacctctggtatccccaccaagtgtcgcatatgacgggaaacttcaaacgtctccaacagacaacaatgagccttgttcagaagctacccagaatatccagaacaaagtgccaagtagttcaaccagaagctgcaag

SEQ ID NO: 270624 - DNA, 644 bp, Zea mays
ccggtggccacgcctaggagctattctctctagtactgcggcgacttcactccaagcctcccccttcagcgatcagcacacatcacgtaaagcgcaaccaaatgatttccaccaccgtcgctgctcaccccgccaccgtcacagcgctgcggcgaaggtacccgcttcgccctcgccagccactctgtgctccaatcttcacggcggcgacgaggcagtgcatggctacggcgaagccctcggtcacaaacgcgctcgctaacctatccgttgagagcgcccccgcggcgcttcccaagctttcgttcccgatactggtgaatagttgcactgggaaaatggggaaggctgttgctgaagcagctgtctcggctggtcttcagttagttcctgtatcattcagtgccattgaggtccctgatcgaaagattgaaatatgtgatagagaaatttttattcatgacccatctgaaagtgaaaaaattctgcctaccattgttaaagaatacccaaatgtcatagttgtagattacactgtgcctgatgctgttaatgcaaatgctgaactctattgcaaatttggtttgccatttgtaatgggcacaactggtggaaataggcactcttgcacaaaactgtgcatg

SEQ ID NO: 270625 - DNA, 749 bp, Zea mays
tgatgctgctgcgcgtgccggtaccgaaccggagtgttccggctcgagcccacgcgtcctgttaattcaagaaattccattttggaacgaagtctcaaccatgttattaacaatataagggatgccatagcagcttctggcgcttttgaaagtatagtggagcagctgaagaagggaaaactggaagagttaacattggcagatgtgaagaacagcagtgaggacactgaaatgattcctgctgttgatgttgatgtcggtgaagatccgagtgatgaatctgctgtagttcctgcagtgattacaaatgtcggtgctgctccctgtattacaagcgaagcttccttgggtaatatgcatttagaggaccttgtgcctaaaacaaaggactcgggtgcttcatcagggtttactggactgacagacaacaaaaagctcagcaatgaccagcagcaagcagcaaaggctactgttcaagtatcaaagaggcctacagcttttggagctctgtttggaaagccagctgctggaagaaggccagatctttttcttggattttcaaatgatcagggtaagactaaggtggacaagataacgtctttacgggtacttccttttcatgatttactaggtggtgcaaaactttcatcagccgcccttccagcgaaagaatcgttgcattctgaaccagacagcattcaacacagtgatccagcttgccagttggaagaagtgatacagttggacat

SEQ ID NO: 270626 - DNA, 1216 bp, Zea mays
aaatgttcctgataatgagccagttaagccaccggctttagacaacactccttttacatttgttgaagacctgaaaaccttggaggtgctagccacaaagctgaaggatgcaactgagtttgctgtcgatttggaacacaaccattataggtcgtttcagggtttgacatgcttgatgcagatttcaacaagaacagaggactttattgttgacactcttaagcttcgtaaatatcttggtgattatctaagagagtttttcagagatccaaccaagaaaaaggtaatgcatggtgcaggtcgtgatataatatggcttcaacgagacttcagcatatatgtgtgcaacctttttgacacaggccaggcttcaaaggtcttacagatggaccgcaacagcttggaacatcttttgcaccatttctgtggagtgtctgcaaataaagaataccaagctgcagattggagattgaggccccttcctgatgaaatgatcaaatatgctagagaggatacacactatctgctatatatatatgacctgatgagattgagactagtgaatgggtcatcatgtgaaaatgatcttcttttagaggtttgcaagcgcagcaacgaaatttgcttgcaactgtatgagaaggagcagctgactgatacatcatatctacatatacatgggttgaaagaaaacaagctgaatgcaacacagctgtcagttctttccagtctatatcgatggagagatggcattgcccgtgctgaggatgagagcactggctatatattacccaataagactctacttgagatagcaaaggagatgcctgtgacaagtgggaagttgaaaagaatgattaaatcaagaaattcgattttggaacgaaatctcaaccatgttattaacaatataagggatgccatagcagcttctggtgcttttgaaagtatagtggagcagctgaagaagggaaaactggaagagttaacattggcagatgtgaagaacagcagtgaggacactgaaatgattcctgctgttgatgttgataacattgaagatccgagtgatgaatctgctgtagttcctgcagtgattacaaatgtcggtgctgctccctgtattacacgcgaagcttccttgggtaatatgcatttagaggaccttgtgcctaaaacaaaagactcgggtgcttcatcagggtttactggactg

SEQ ID NO: 270627 - DNA, 673 bp, Zea mays
  unsure (1)..(673): unsure at all n locations
cgggcccaancggccgaaccttttggccttaagccccggccccaaacctcgaggcgggggagccgccgaggtcgatgccgcgggcgtgcttgcggatgcagcggaggcggcggcgtcagtgccagcgccgttcccaggggaggtagccgccgcggctgcggactcattcccccctgttgccgcacttcagcacattatcgacgctatccatacctttaccgggctgaactggtgggtgtgcatcgcgctgacaacatttattatccggagcgccacagtcccgttgctcgtgaaccacttgggggccacgacgaagctgagagcgataaatccagagatggaagtcattaaagaccagatgaatagtatggatccaaaatcagtgcaggagggacaagctaaaatgaaagcgctgttcaaaaacttaacttgcaagaaggaatggagggaaatcctatggctggtaaaatgaagtacttttctagaggagtagctgttttgacagtcccatttacaatgaactttgccacggcagttttctgttactggacctcatcaaacatattcaccctgttatatggtcttgttatccggcgaccagctgtgaggaagtggtttgatcttcctgctttggaaaatacgccttcgctcacggcaaagccagtattcaata

SEQ ID NO: 270628 - DNA, 350 bp, Zea mays
aatcagtgcaggagggacaagctaaaatgaaagcgctgttcaaaaaacatggtgttagtccacttactccaatgaaaggactcctgatccaagggccaatattcatgagctttttctttgccatatcaaacatggttgagaaagtaccttcattcaaaggaggtggaacattgtggtttactgacctgacgactccagattctctttacatcttgcctatgttaacaggactgaccttcttggccacagtggagcttaacttgcaagaaggaatggagggaaatcctatggctggtaaaatgaagtacttttctagaggagaacctgttttgacagtcccatttacaatg

SEQ ID NO: 270629 - DNA, 514 bp, Zea mays
actagttctagatcgcgagcggccgcccgcgatctagaactagggctgaatggaagctatggataccgttttgccttcagtgtgctccaagaagcaacaaacaatttcgacgagaactgggtcattggagttggaggctttggaaaggtctacaagggggtgatgagggatgagagcaaggttgcagtgaagcgtggaaacccaaagtctcagcaaggtctcaacgagttccgtacagagattgagctcctctcacgtctgcgccaccgccatttggtgtctctgattgggtactgtgatgaaaggaacgaaatgatcctggtctacgagtacatggagaaaggcactctcaagagccatctctatggctccgataacccctcgctcaattggaagcagaggctggaggtttgcatcggagcagcaagggggttgcactaccttcacactggatctgtgaaggccatcatccatcgtgatgtcaagtcccgaaacatcttgcttgtctagaacc

SEQ ID NO: 270630 - DNA, 453 bp, Zea mays
cagcaaacttagcatcagcattggcccatcggtcttgaacaatgtattgcccgacgggattctgaatgggcttgaggttatgaagataagtaccggaggttctgctttcactgtcgggtctggcagtggaaacaaaaaatggggtgtgattcttggcgcagcctcggaggtgttggactgtttataattgttgtggtccttgtacttctttgccggaggaaaaagaccctggaaaagcagcattcaaagacctggatgcctttctctatcaatgggctcacctctctcagcacaggatgcagaacgtcttatggtactactctcacatcagggctgaatggaagctatggataccgttttgccttcagtgtgctccaagaagcaactaacaatttcgaccagaactgggtcattggaagtggaggctttggaaaggtctacaagggggtgatg

SEQ ID NO: 270631 - DNA, 779 bp, Zea mays
ccttagggacattcactgtgttatcctacaatattcttgctgatgcatatgctacaactgatgcatatagctactgcccaacatgggcacttacctggaattatagaagacaaaatttgctgcgtgaaattattggttatcatgctgatatcatctgtctacaggaggtacaagtaaaccatttcgaagattttttttcacctgagcttgacaaacatggatatcaggcgctttacaagaaaaggacaacagaggtgtattctggaaatcctatggccatagatggatgtgctactttttttcgtagagacaagttttcacatgttaaaaaatacgaggttgagttcaataaggctgcacagtccttaacagatgcgattattccttctgctcagaaaagactggctttaaatcgtttgattaaagacaacattgcactaattgcggttttagaagccaaatttggtaatcatggagctgaaaatcctggtaaaagacagctcctttgtgtggcaaatacacatataaatgtccatcaagacctaaaagatgtgaagctatgggaggttcataccctcctaaaaggattggagaagatagctgtcagtgcagacattcctatgttggtctgtggagatttcaactcaacccctgggagttctccacatgcgcttctggcaatgggcaaagttgatcagcatcatccagatctggcaatagaccccctgggaattttaccccctccaagcaggttgaatcaccagcttcctttggtcagt

SEQ ID NO: 270632 - DNA, 1458 bp, Zea mays
cgcggccgcccttttttttttttttttttttttttaatcaataaaactctcttattaaattcttgccatattatcatattttcttatgtggcaacacatttaatcgagattgaaactcggacgaaatccccgctggaaatagcctaacaatgtccatgttcccagaaaacgtattactgctacttgtacatccacaatctttagcgagttattataaaactcatacaacatcctgaactctggaggaccaaaccatttatctgagtgtgacacgtcctatagtccatccataaacggatggcgctccacacacacaacctggtacagggagcctcctccagccgcaatcagtagtcatcgcctctggaaatgacctctttgcaagttggccggagtaagattgtgtgctcaaactgcgagacgtagctccctctcacatcgcacaggggagggtacggctgaacgatgccattgtcacaaagattcttcagagccatgaggtacttggtctcaccaagccggtccaagtaccgccggcaaaaggcgagcgttccgaagttgtggttgatggtcccaagcagttgcttggcctttgctaaccttaaaggcacatgtccgacatcaaagttcttcatgtaatgactgcattccaagtcctccctgacaaatccctttcccgtagatccaaaagtttcaatggcataaaactccccttcatccatttttgtttgctctccacctttcactattggaactgatttcccagcatggatttgatatggcccgatgctgtgtccattgaggttccgaacacttttaacttggaaaactttcccattgatttcaacctcataggattccataacttcttggattgcagcaccgacatcaccaagccgtgcatctatcccagcttccttgattccagtatttgtggcatctctcgttgcttgaagcaatggatcaaacataggattgaatgcaacagtaaatgcacaatcaacaatgtaaccatctatatgtgttccaaaatcaagcttcatcacatcatcatattgtagcacagttttgtcgcccgcatttggagtccagtgagctgcaacccaattcaaggagcatccagtcggaaaagcaatgccagcttgcagtccattctccttgataagtttccggaccatgttttccaatgtctcacatagatcaaccattaacattccaggttttatgatgctcctcatatatttccgcacctgtctatgaacttctgctgcttggcgaacagagttgtatattggcttttgcagtcgttccaggtccctcttttcctcactagttgttctccacagattgtcatccttgtattgttggatttcgccctctggaaattctcctgaggggaaaagctcatcaacaggtattgatggaggatctgtctgttgaagggggcccttcttcttt

SEQ ID NO: 270633 - DNA, 434 bp, Zea mays
ccaataaaactcactctcttattaaattattgccatattatcatattttcttatggggcaacacatttaatcgagattgaaactcggacgaaatccccgctggaaatagcctaacaatgtccatgttcccagaaaacgtattactgctacttgtacatccacaatctctagcgagttatgataaaactcatacaacatcctgaactctggaggaccaaaccatttatccgagtgtgatccataaacggatggcgctccacacacacaacctggtacaaggagcctcctccagccgcaatcagtagtcatcgcctctggaaatgacctctttgcaagttggccggagtaagattgtgtgctcaaactgtgagacgtagctccctctcacatcgcacaggggagggtacggctgaacgatgccattgtcacaaaga

SEQ ID NO: 270634 - DNA, 510 bp, Zea mays
accgtcccgattcccgtgcggccgccctttttttttttttttttttttttttttttttttttttttttttttttttttttttttgggaaaacggggggccaactttttttttatttgggaaaaaattacatcaggggcgtttacaatgcaggattaggtctgatcaaatagataagatgacgggatcatattggcccttaactctggtcctccattggtattcttgagcatcatgattcgttccaattccatcaaggcagaacaaatgcatgcatccatccatccagccatggagtcaaatcaaggccgcaaacaagtcagtcagttccattgtattttcctgtggattgtccactccgacgggttcacggtggcgtcaccgctggaggagacaagatcgaagggggagtcctcggcgaactccgtcggcattgccttccagtgcagggatggctcccactctgcctctttcaacaccttcaggatctcttccaccacaatgttgctccc

SEQ ID NO: 270635 - DNA, 838 bp, Zea mays
acatggcaaaaaacaactgtcattcgtccattttttttactgaaatagcatcatccacagtgaatcacaaggggtcaagaggcaatgggatacagagtatctatttacagcacgaacgaatgcccattttcatgcctctgcaaatctgcgctgcctatactacaacagtacaacttgtgcacctctcccttgagagagaaaaaaagttcatacggcaatcaaagttacagcatgatcaggcccatctacttggacaacccacccggtgcatggtgatggtcacacaaaccatatcaagcaaagagccgccgccttctccgcctgcctgccgccttcatctccgggccgtcggcagactccccatgcaccacctcgtccaccagctccttgaataccgacctctcgatctccagcaccatcccagggagctccctgctgaagctcgtccatccctgcagcctctgcaggatctctgcgtcaggtatcacgccgccgtccttctggctggtggacgatcgctccgtatccagttcttcaattcccgaagatatgaacttcggcagctgttgcccgctaaaagtctttgcaggtggatccttcgctctggtgaaggaactgagcgcataaacggcggtttccttctcaaacttctgaaggagaagctcattcacagtgtcaaacatcagcttccggtgcgctctcctgggatcagattttgtgccgcttctgctctgatggatgccatcaggtgtactgacccatccagccttcctttgctccaacacgtggaacaagtcagggttgatcgggtagccagaggagtggagctggagacctg

SEQ ID NO: 270636 - DNA, 538 bp, Zea mays
ggtctactcatcatcgtatgtaatttggcttttacatggcaaaaaacaactgtcattcgtccattttttttactgaaatagcatcatccacagtaaatcacaaggagtcaagaaacaatggtatacatagtatctatatatagcacgaacgaatgcccattttcgggtctctcaccaaatctgcgctaccccctctctctccctcttctcttgagatgaaatagggtctcactctcatggcaagacaaacaaagttacagcttcacaaatcaggcccatccaaatggtggatggcgatggtcaaacaaaccgtatcaagcaaagagccgccttctccgtctgccagcagccttcatctccgggccgtcagcagactccccatgcaccacctcgtccaccagctccttgaatatcgacctttcgatctccagcaccatccccgggagctccttgctgaagctcgtccatccctgcagcctccgcaggatctctgcatcaggtatcacgctgctgtccttctggctgatggacgatcgct

SEQ ID NO: 270637 - DNA, 867 bp, Zea mays
agactctgtgcatacttctagaattattatattagttttttttcttttttttttttcgacaagtgtcactggttaattgcctacaacatttctacaagagttcgacggcatagcactatgtcctgcataagagctgacgctctccaagatatacaagaaaccagggataccatgccatagcttaatgggcaacaggtgcccgcatctaataacattacaaacaaatcctattccactgttgtatactaacgtgttgctatccaaacaaacattttctacagtacaactgtcaaattgcaaagggtcaatcaatgagatatccacatctccgaacgtttgcctgcctgtgaaatctgcaaatcctactatgaatggtcagctgagaaagcaagactatgttgcttttgctgtacgttttttccacacgctaagagtatcgttgtctgattcctcgttgctcaaagtatggccatccagcttttccacatctttgggctcctttcctgccatcccttccatttccacatcttttgggtccttgactgccttttctttcacttccgcgtctttcgactctttgcctgccgcattctctttcgtttttacatcttttgagtccttccctggcttcttcgttcgccatgtttggattctttccctgcctcccctttcacttccaggtctttggactctttccctgccttctctttcgtttttacatcttttgagtccttcccgggcttctctttcatttccacatctttggattctttcactgacttatctttcatttttacatctttggactccttccctatcttctctttcatttccgagtctttggactccttccctgccttctctttc

SEQ ID NO: 270638 - DNA, 608 bp, Zea mays
cgcggccgccctttttttttttttttggacaacattggtttctgattagagtgagtatttagtttctgatccaccaaatgatcagctacagtactactccttggcgtaggattctacatgattcctgacgcttactagccacaggaaagcagacaaatttcatgctgcagcgtacgccagggattaaattcagactaaactacttgcatcttgggtgcaagactaatcttcagttacttctgctgccgctgcggatatcagtgatgctgactggatctttccggcatgctccagcctcatcagaatcactcccctcgagcgtcgagactggatggatatatctttaactttgattctgtttacagtgccactctggctaaccaaaacaacctgctcgtcactttcaccgtcttcagtgagcgaaagaccagcaacaaatacagcggccaaacgacaatctgctggaagcttgtagccttgcaagcctacagcattgaaatttgattgccggaaagcatttaagggcacccgtttcccaataccgctttcagctatgaaaagcaaccatggaggactcgaatctctgagcctgctgttgcatctttcgg

SEQ ID NO: 270639 - DNA, 321 bp, Zea mays
gggttaaccggcaatcaggagaccaggggtttctgattagagggagggtttagttacagggaatatgctcaaaactaaaagcagacaagccatccaaaattatcacccaacaatttgaaagccataggggcattttacattcaccactctagacaccaaaaaatacatgtcaagcctcctaattacgctgagttcagcgggtacaacaacctgactactcctgacgcttactagccacaggaaagcagacaaatttcatgctgctgcgtacgccagggattaaattcagactaaactacttgcattttgggggcaagacta

SEQ ID NO: 270640 - DNA, 916 bp, Zea mays
aaatttcctcgtcaaaatgccatgacatgatggaatgaatcatccaagatttcagaattgttagtaaaccagcgaaaccacatcacctattataatgaaaacacatcgttgcttctgcacaaagggaaatacatatttcgaattcttcaaagtgtaatgtccatgacaaacgccaaatgcacatctagaagactaggatggccttcacaagctacaaagataatgtaaaaaaaagtaacaccagcatgttttggtgacaatgcaatgtcagccagatgatgatcatgcccctgaaactccacctaataaagatgatagatgatgatcatgtcccagatactccaccaaatgaagatgatgatgccacatgagagagcgtgcattcagcagaagtatgcagatcataaataagatgtggtagtatgaaatccatgatggcatgctaaagttcaagatacatcccctcaggctgcaatcaatttgcaggagccccatttagaacgctcgcaaggccagcagctgaatccttccttcgcccaaagggattctttgaaaattgaattcgcattccaccacgaccagaactaggaataacagcaccctgcagagtttggtgcacagatgtagcagcattcacatcctcaaattcaataaagcaaacagtgttcctatcttgacgtaacactttcatttgcttgaatccaggttgcacactgaagagacttcgcaattcctcttcgactacagtatcaccgagattaccaatgaaaagggtattgcagggaggattatcctttgtgttctgcacaggagcataggcagttggtcctgtaacaggagcaggtgaagtcatcgctacaggggggactggatacgcacccacgcgtccgcccacgcgttaatacgacgtcagttt

SEQ ID NO: 270641 - DNA, 464 bp, Zea mays
aattaaactttcttttattagagaaaaacagcaattatataaactgacagacagaataatatctgcatcgcattaccaccacgagagatcggaatcggaacacatcgtgcgcacaaacgaccacaccatgtaatgcgcgcctactttgcgcccaacattctcactagcgcgcgcttaagatggaagatatttccacgtcacaaatatgcccatcacgagtgcagatgcacaaggccatgttatggtgtgtaatcttaaaaagaaaagaaaaaaaaaagatcgatgcagatgcccacggtcccgaacctaaccggcagcgttaggtgatatagaaacatggccaccacaactgggaagtgatcggaacatggcacgctgcattattgttgtatcccaacccaatcataatgaaccagcaacgcaccaccgactgcgactgatcagatgagccagcaaggcacgac

SEQ ID NO: 270642 - DNA, 796 bp, Zea mays
aacagaaacagaagaccacattcgcttgcatgataatggaccatccaccgagttcagtctaaaactaccaaacttaatcaccaccaattctcttaatagttctcacatacaatacaactcagatacatataagcctgggtatgccttaaacatgtggcaaatccccaagacattgacaatggctactacttggtagcacccaatcgcacggtataccatgcagactgttctggtagtaagctcttaacacatcaagaaaatttgcaccaacatgactgatgccctaaataaatagctatgaatcaccaccattcaacctaccaatggtacacaaattctgaagaaagcagttgcagagtcgactagtttccatagacagcaccatttgagttcagagaggctccgttctggggaacttcagctccctctacctccgacaagaatccattctcaaagaacgctgaatggagggcttgtacgcactgttttgcctcactgtcattgactaccaaggatatgttcaccttggacgccccttgtgagatcatctggacattaacaccatttcttcgcagaacgttgaatgccttttcaagaatcaatgacgatcgctgtacattccctatcagtgagatgatcgatctacgttgcagcagatgaacaactgcaaattttttaagctcttcaacgacatgatcaagttcctgctggatcaattcacgactccatagttttgatggatctagagtcaacgagatgctgacttcactagtagccacacagtcaacagagatgc

SEQ ID NO: 270643 - DNA, 435 bp, Zea mays
ggtaacgaagagcgaacaccaccattcgaaacagcaattgaatccagtttcaccagaaatacagaaaaaagcttgacatttcacacgcccacaaccaatattagacatcgtgatggtaattacaaggaagattgctaatatctgcaagcaatagcatcaagatcgctgaactgcatgaaggctgtatgcaaaccatgatgaacacaccacgcccagctgcgcgaatcaaccaatgcggacataggtgggcaacatgggcccggcggcgctcatgccagctgccaacaggccgtccccggcggcctcctgctccgtgaggaagaggtcgtcgcgtggtcctgagcgccggcgtgcgcgctgaccagcgcaccccagatcatgacggagcccaccacgttccagccgacgctggtgaagagcatggcgatgacgaaa

SEQ ID NO: 270644 - DNA, 368 bp, Zea mays
cgatatcaggaagcatcacataagagttttcactacacagctggcttatctcaaaaagcacattcgtcctagatagtaaaggtgcggagggaagtaatagatctgagcacgttattttgtgctatgaagctacagtgtcgtaaatcgaaaagggaataaccccaattttttttgattgtgtcggaaaacatatatctgctagcacttgcagctcaaaaccaagcatggcaatcgacaactacaggctatggctttgcaacgatgtggaaccagacaatgcaattctcagggctgcaaccgttgcactttagaaaccgtgctgatccgcaccgggaaatttcttgaaacaagctgaaagactcattttc

SEQ ID NO: 270645 - DNA, 197 bp, Zea mays
gcggccgccgcgggtggtgatggcggcgtagcaggggcagacgtcgtggttcccggcggtgcccggcggcacgcagttgcagcgggcgcagcaggacccgcggcgccctccggcacaggttccaccgcgacgacagcgcgcaccgcgccccgcacgcgctcccgcagtctatgaagctcacgggggacggtgcgggg

SEQ ID NO: 270646 - DNA, 461 bp, Zea mays
gaagaaacagctcctgtcctgccatcatcggtgattgcaagtactacagctaggagcaaaccccatacttcccgatttgagtatgtagaaaatgcacctgctcctaagactgggagcagctcagaaggcaatctcatgagtggacatgttgcacccccaaagtcatcgaacttctttgttgaatttgggatggacagtggatatcacaaaaaatctacatccagttcatccaaagtgcagattgaggaaagcagtgaagcaagacagaaattctcgaatgcaaaatcaatttcatcctctcagttttttggtgatcaggccagtttcgaaaaggacactcaagtctctctccaaaagttttctggttcctctgccatatcaagtgctgatctatttggccatccagcaaacaattctagcgtggatctcagtgcttcagatttgatcaacagaatatcatt

SEQ ID NO: 270647 - DNA, 420 bp, Zea mays
tcgtcccacgcttctttccttgcccagttgcccccaaacccgagccaccagctaccaatggcggcggcccctatggaccatgacagcggagacgacgtggtcactccaggggagcttctcggaaactcattaaccctcgcggccggacgtggcgcctacgccgacggtcgctctgtgcgcgcgtcggtcaccgggcgccgccgcatcgtgccgcccgcacctggctccgacgaccagagatccacggtggaggtggtggggcacaaggcccatggagctgtgccgcagccgggaagcgtcgtcatcgcccgagtaacaaaggttatggctagaatggcctctgcggacatcatgtgtgttgactcaaaggctatcagagaaaagttcactggcatgataaggcagcaagatgttcgtgca

SEQ ID NO: 270648 - DNA, 425 bp, Zea mays
  unsure (1)..(425): unsure at all n locations
ctcgcccggtcattccattttcaccaccacatgcgtcctcttccgccgccgccgatggcccgccttctcacacaaaccctcaccctagcccgtcccgccgcctcctcctcccccaccgccgcattcgcctccctccgttgcctcgctaccaaggtcgagatcgtcgagatcgacctcaccgaggaagacgctggctcctcggcccacggctcctccccctcgtccccatcgatcgaggtggttgggatccggcgcctggaggaggccatccacggcgtcatggtgcgccgcgccgctcccgattggctgcccttcgtgcctggagggtcctactgggtgcccccgctgcgccttccgcacgaggtcaccgcgtttgtcggccggatcgcggcctcaggaggcgcctncggggtcgccaagttcat

SEQ ID NO: 270649 - DNA, 844 bp, Zea mays
gaagaagtatgtcttcggcttgggctctgctcaggtgctagctactactgcagctgttggtgtgatagctcatcgttttgctgtgctaccaggaccagcagcaattgttgttgggagtggcttggctctgtcatccacggctgttgtcttgcaagtattgcacgagagtggtgaaagtacgtcgcgtcatggacgtgccacattttctgtgttattgttccaggatttggctgtggtggtcctgttgatattaatacctctcatatcacctaattcttcaaaaggaggggttggtttccaagcaatagcagaagccatgggaatggctgcagtcaaagcagtagctgctataactgccataattgctggaggtcgtctgttgcttcggcctatttacaagcaaattgctgaaaatcagaatgctgagatattttcagcaaatacactccttgttatttttggcacaagtcttcttacagcccgggctgggttatcgatggcacttggagcttttttggctggtctgttactagcagaaacagagttctcattgcaggttgagtcagatatagctcccttctcgtggtcttctgttaggacttttctttatgacggttggaatgtctattgacccaaagctgcttctgtcaaacttcccaatgatctctatgatattgggtctcttgataattggaaagacattgttggttacatttgtcggcagggtgtttggggtttctgctatagctgccattcgtgttggcctcttgcttgcgcctggtggcgagtttgcttttgttgcctttggagaagctgtcaaccagggtcttctatcaccttaatt

SEQ ID NO: 270650 - DNA, 1030 bp, Zea mays
cccacgcgtccgcccacgcgtccggccacctccccggaattcggcaggcagctcgtcctgctctactgcttccttccttctcctcctccactctcctctgtcaccggcttccccccatcctgcccctcgtgctccagctcctccgggtccgggccaaccacgcgatggcggcgtccgccgggacggtgtacgaggcggacgcggaggccgtcgtgcgccggatcacgccggcactcgaccgcgccagacacaagggccaggcagggaagatagcagtaatcggaggatgtcgtgagtacactggagctccttattttgccgctatctctgccttgaaagttggtgcagatctttcacatgttttctgcacgaaagatgctgctacagtaattaagagctatagccctgaactaattgtacatccaatattagaagaatcttacagtgtaagggttgatgaacgagcatctgtttcttctaagattcttacggaagttgcaaagtggatggagcgctttgattgcattgttgttggtcccggccttggaagggacccctttcttctggaatgtgtgagtaatatcatgaggcacgcacgacaggctaatattccaactgttgtggatggggatggcctatttcttgtaaacaataaccttaatcttgttgaaggaaaccctcttgccattttaacaccaaatgtctatgagtacaagcgtcttgttcagaaggttcttaactgtgacgtagatgaggaaagtgcttctgagcagctaatcgcactttgccaaaaaattggtgatgtaacaataatgcagaaaggaaaagctgatgtcatcagtgacggtaaaacagttacacaagtgagtacttttggttccccaagacggtgtggtggtcaaggtgacatcctttctggaagtgtggcagtatttgcatcatgggcacgacactttgtcttgacaaacgaagaacctacagagaaaagagttaatcctatgacccttgggtgcatactgcctcccttcta

SEQ ID NO: 270651 - DNA, 489 bp, Zea mays
tcttgccgacgctgcaacttccgctccctccccgactcgcgctcggcacgcaggcaggcgactgcggtggcgctcaggctcgggctctcagcaacggcggggcagtcccagactcagcggctccctctctccaatcgccttgcgccctcgctccgttcctctgctcaccggccgattctgcggtgcattattttccagcatagcttgctcacctacttctcaatttagaagacttcaatttctggatctgagcatcaaatcaagaccataccactttagtcagtcctgtctgatggcactggctgcagctccagccagtggtgattcacagagtggtcctcagaggaactatcaggttgttgtggctgccactcgtgacatgggcattggcaagggtggggtcatgccatggaagcttcttggtgatcttaaattcttcaaagaacttacactaactacaactgatcctgccaaaatgaatgcagttat

SEQ ID NO: 270652 - DNA, 426 bp, Zea mays
gacttcaatacctgtgaatttaattcattttgaaacggaaagagtaataattaatcagctcaagccctgtcaaggctccgtacttggaagcaacagatcatctggagaaggaattttcaacgttctaactatggcctacacaccttgttatctacactcgttacaaattgattgtacggctagaaattacataataatgtacagggaaagaaagaattcacgttatcatggcggcggaccgagtctcctcaggcgtcaatcattggatttgctctagtgaagagcagagccgacccgttaacaccacgaagaatcatcaacctcgcatcaatgtatgtcccacaaacaatctttgacaaatcgaacatttccggcggggtttgtgtacggatctctttccccacgagtccgcccacgcgtccgcga

SEQ ID NO: 270653 - DNA, 522 bp, Zea mays
cggaattccgggcgggcggccgccctttttttttttttttttgacagaacagagtatctcaaccatctggcatacttcactatccaatagcaaacataatttttcaaagcagtacatatcgcatgcaggggcctcctgcaaactaacatataacaaaaattccttgtttgaaacaaaagcaccttttcatctggttgcaagtgcaagcattggtgaaatcatcccttgaatgccctgcagcatgtgctgtatctgaatctcctctgcaaccattctcttaagattcctcatatgcaccttcagcttctcatctgatcggatatcagcctcgcgcatctccacaaccttggttgccaaacacaacaacaacttagcattcccttggcaaaagttgcattccggtgaagggaccctcaaaaggagaccacagttcctcatttttccaaattcccgaggcatcttatgagctttcttcttgaaaccagctcctccataacagccacaacactcctcgggttgtac

SEQ ID NO: 270654 - DNA, 1132 bp, Zea mays
cggccgaattcccgggcggccgccctttttttttttataatttaagggcaaatgttaattccaacaacacactgtcacacacacacacacacacacacacaatgcagtttggtcatctacagattttgacaatgctgtgaaagagcacgcaaaactttattgttgtgtgacccagacttggaaccacaggattgattaccttgtccgtcatcactccatgatctcaaccacagctcgtcctacgatcttgccctgattgagatcctcataggcgccattcgcctcctcaaatttgcatttccttgatatggtgttttggagattgaaggcaccactctccgcgagcttcactatctgaggaaggtcttgcctggcccttgcgccatatgagccaatgattttcacctgtcgtcggacaagacgggttatatcaacctctcccattacgttcgttgcagcaagcccgatcataacagctttgcctccatcacgcacgctcttggcgcactgggaaaatgttaacgccttaccaagtgcctctatagccacatctacacccctaccatcagtaatttcctttatcctttcaactgcatcatcttttgctgcatttacagtgtgggttgctccaagtgttgtagcgttctgaagcttctcatcaaggacatccactgcaatgacttgggaagctccaaaggcttttgctatctgtaaacagcttgacccaacccctccaactccgatcacagctactgaatcaccaggccgcatttcagcagcatgcctcagggcaccatacgcggtaaacactgcacatcctaaaattgctgattctgtgtatggcagtgagtcagggagaactgctagcgcattggctgggacaacacaatactctgcaagccctcccatactatacatgtacaccggtttcccattgccccttagaaacagccgtgtctcgccatcatagagtgtccccttggcacgattatacgcgaagaaagactcacacagatcttcttggcccttaacgcagtagaagcagttcccacatggcattatgaaggcgccgacgacgtgacttccgactgggaacctgttgatgatctcaacaggagtgtgcgtgccatgg

SEQ ID NO: 270655 - DNA, 446 bp, Zea mays
cacacatcggggaatggcgacctacgaccatgccgccaccccgacaccgcagtctccgggcgtcggcggcgtacccttctcgtcctgcatcggcgacctcctccgcttcgtcctctcctcccacgccgccgcctaccccggtgacgacacggtcgctttccccctctcgccctcctactgcgcccgcctcctcaacgacggcgaactgttcgagaagctggaggcctgtattcagcagtgcctcgaggaggggcggctcccggggccgcccgcggtggttgggattccggctgaggaggaggggccggaggagagagggtggaagctgctgctgccggagaaaggcgctgagttgaagcggatgtacgatgctgttgagtttgagctgcatgttcaggaaccctacttcactcaactcagagccggagtcaagaaggttgaaggga

SEQ ID NO: 270656 - DNA, 1363 bp, Zea mays
gcatctcttctcctggacgcgacgccgtccccaacctctccgtcccgcgccgccgccgcgcgtcactgtgctcgcgatctcgccggcggccccagaggacttgtcgcgtgctcggccatggcatcgccaccgccggccctcgagatcctagttcgcgagcccgacggagtcacggtgtggtccggacccccctacccgccgggcaccaccagcccgccgcagagactccccaagacggcgtgcagcgccacctctttctccaccgacggtgcccgcctgctcgcgacggtggcatcggcctcggccaccgtctacgactgccgcacactcgctgtagtcaagtgcttcgagctcccgggtctcctcgccgctgcgctatcgcccacgggggcgtatctgcagaccttccagaagtcatcctcgccgcaggagaagaatgtcacggtctggcacgtcgacacagctgccgctctttaccaacactatcagaagagcatgtctaaacccacctggccaatggttcagttttctgcggatgaatcggtcgcttgccggatgatgcctaatgagatacaattctttgatccaaaagattttgcaaaaggaattttgtataggataagaatgcctggcatagctacgatgaagctagcaactgcaccaggatctcatgttgctggattcgtcccagaggctaagggtgttccagctagcgttcagatattttcttgcaacaaggatgcacaaaatcaagttgttgctcgcaggagcttttttcgctgttccaccgttcaattacagtggaacaaagggtccactggccttctaattcttgctcaagctgacgtggataaaaccaatcagagttactatggtgaaaccaagttgaactacttgacaactgacagggccttcgaaggaattgttccactcaaaaaggacgggccagtccacgatgtgcagtggtcttcctctggctctgaatttgctgtggtttatggtgttatgccgcccaaggcaacaatattcaacaagaagtgcaaccctcttgttgagtttggtgaaggaccctacaatacgataagatggaaccccaaaggacgatttgttgtattagcaggttttggcaatttgcctggtgatatggcattctgggattattcagaaaaaaaattggtagcgaaaacaaaggcagaatgttctgtcacaagtgaatggtcccctgatggtcgtcattttatgactgctacaacagctccgaggcttcaaatagacaattgtataaaaatatttgaccacaacggatctctgcagtttaagaagatgtttgaaaggctgtatcaggctgattggaaacctgaag

SEQ ID NO: 270657 - DNA, 538 bp, Zea mays
ctggaatttcccctgcctggggaagatgagcgattcaagctcctgaagctatatctggacaagtacataatcaaagctggtgacaaacatgagaagagctggctccagttcttccgtcgccagccccagaagattgaggtgaaaggcatcactgatgacctgatccgggaggcggcatccaggacccagggcttctctggaagagagatagcgaagatgatggcaagcgtccaggccgctgtctatgggagcaaggactgcgagctcaccccaggcctgttccgtgaggttgtggactacaaggtcgctgagcacaagcagcggagaagattagccggtgaggagccaaagcaggatgcctagtttaccaatttttttgattcacccccgtcttgccgtgggatgtaccgtgtttcccccccccgggatagattgcttcatcgggcaggcgttttgcatgccccgtgttattcttttgttccatttgccttaccagatttgtctttcggtggtaggcgatggaaactttttttataag

SEQ ID NO: 270658 - DNA, 1391 bp, Zea mays
gaccggccggaattcttggtcgaccacgcgtcgttccggcacatgctttcttcaagcagcatggatggtctcatggtggcaaggttgaggcccaatacacatcaagagctgctgaactgtacaggcagatgctcaacaaggaggtcgctaagagtgccattaccgataatgccctgccgtcctcacctgtcactgcgtctgacgcttccaagccatctgatgactttcctgaattcaagctctcagacgcaccagcaccgccggcggagaatctgaatgggaagcatgaacccaagtcccccgaagctgctccacgttcaccaaaagctgctactcatcccacctttgccacttccgtgaagaagcccattggcgcaaagaaggttggaggcaaaactggagggcttggtgttcgtaaactcacaacaaagccaaatgaaagcctgtatgagcagaaaccagaagagccaaaacctgctatacctgccttgactgctccaactgcaaaaggtggtccatccttgcattcacgttttgaatacgtggagaacgagccatcatctgtttcaagaaccgggggatctggatctcgtgtaaccggtcatgtagcaccaccaaaatcatctgacttcttccaagagtatgggatgggtaatggattccaaaagaaatcaagcaacgcctcaaaagctcaggttgaggaaactgatgaagcaaggaaaaaattctctaatgctaaggcaatttcgtcatctcagttttttggtactcaaaacagagaagagaaagaggctcaactatcccttcagaaatttgcgggctcttcatccatttcaagcgcggatctttttggccgcaccaatgtggacgattctaacctggacctaagcgctgcagatctcatcaacagaatatctttccaggcgtcacaggatctgtcttcactcaaggacatagctggagagactggaaagaagctgacatctttcgcctccaatttcatcagcgacctggacagaatcctttgagcaggcgaggccatgccagcaaagcatttttcctaccttgcaccagaatttcccttctagcttggattgggtcgcggactcgcgggtgcatcaccgacagttgaaagtagttcttgcacagctacagctctgtagaggattcctattacgcgtttgtattttgatctttgttgtgagaattgaaggtatttttattcgtgaatacttcacaacggtgaagcatacactacagtttacatacgttgaggttgcttgtatcttggaaggaaggttcatactatgtcctgtgcgtgtggtaaatgaaagatactcttgtcaaggttgactgtcatgataatgcaattcttatctggtcgttttcgt

SEQ ID NO: 270659 - DNA, 2281 bp, Zea mays
caattggtatgttcagaggatggtgatcagctcgcgatgcgtcttatttctgcactcatggagtactatattggcccagagggcagaggaactgttgaagaaatcagtactaaattgagggagggttgccctagttacttcaatgagtcagactacaaatattacttggcagtggagtgccttgagagagcagcatctatgactaataaccctgacgagagagatattcttgctagagatgctttcaaccttttgactaaaattccagaatctgctgatttgagtgccatatgcaagagatttgagaacctaagattttatgaggctgtagtccggctgcctctgcagaaagctcaagcacttgactccaatgctgatattaccaatggtcaaattgatccaaggcatcatgataccataaagttgcagcgtgaacaatgctatgagattgttatggatgcgctgcgcactctcaagggcgtcgggcatagtcgaatgcaaagtgcagacaagtcatctgctctagcaactgctgctgatccagcttctcgaaccaagtatatcaaacaaatcatccaacttagtgtccaatggccggacacagttttccatgagcatctatacaggacacttattgagcttggtctagaaaatgagcttttagagtatggtggatctgatttggcttcttttctgcagagtgctggccgtaagcatcaagaagaggttcgggcagtttcttcagttacacctggagctgctaagatgcatgatttaggtgcacctatctcgactagtcaaacaaagtatctcgagctcctagctaggtactatgtccgcaagggggaacatattgctgctgccaggatgttgctaatattggcagagagacagtgctctaattctgaagaagctccagctcttgacaagcggtatgaatatctcagagatgcagtgcttcaggccaaaagcgcaggcatcgctgctgatttgtccaaaaatcctgttgatagcagcacagtggatttgcttgaaggaaaacttgtcgtgctacgcttccaaattcaaattaaagaagaattggagctcatggttgcacggctcgaaaatattccaagcagttctgaattccctagtggtctgttccctcgtgacaacattcttgctgtgctgatgcagaggctgctaaggctgctaaggataaggcaaaagaactatcattgaatctcaagagtatcactcaactgtataacgattatgctgttccatttgatctctgggaggtttgcttggaaatgctgagcttcgctaattactctggagacgctgatagcaaaattgttcgagaagtttgggctagactccttgatcaggcacttactaaagggggtgttgcagaagcttgttctgttgtgaaaagagtaggctcgaaacttgatcctgcagatggagcctgcttacctttagatatcatatgccttcaccttgagaaggctgcagtggatagattaagttcaggagaagaattagccggtgatgatgatgttgcaagagctcttcttggtgcctgtaaaggtcttcctggacctgtactttctgtgtatgatcacctgttatcgaacggtgcaatcataccctcactaaatctgaagttgcgcttgctgcgatcagttcttgcgatcctccgtgagtgggggatatctgtcattgcacataggcttggcaccacaagtgctggggcttcattctttcttgatggaacattctcattgaaccaaacagggactgcgaatcaaggtgctcgagataaaataattagtttggcgaacaggtacatgactgaggtgaggcgattaaaccttccacagaaccaaacggagaatgtctaccgtggtttccgtgaacttgaggagaaattactatcttcttattaagcagattgcagtcattcctcaagatagtgaagaatgatcttgcatctgttgtaccacaaaaccaaggaatagagtcgagggcttctggattcacctcagcatgatctgtattgttccttacacttatctgcaagaacccggggctgctgcaggactctagctgaggtggttagatggctctagtaccactcatgtacctggctgagttggttagatggctctaatagcacttctgatgtcctgggtttgacttctaggtgagagcaaatttcagacgggttgaaaaaggtcatttgttggttcctctgtttgtgtgcacacaacggactgaccaatggatcctcgtg

SEQ ID NO: 270660 - DNA, 553 bp, Zea mays
gtttccgtgaacttgaggagaaattactatctccttattaggcaattttcagttgttcttcaagattgtaaaagaagagtcgaaggctctggattcactgcagcatgatctctattgttctgtacatatatctgcaagaacccaaggcttctttaatcattattaattagaggttattcatgacggtgtgcagccttcttttatttgacttagagccagtatggattacagagctgttgttgtggaaattgtctagctgtcttcattacttcttaataatcttttggtagatgctgttgatcctgttttacctgaattcaggaaacagctggagaactcaggcaggactttccaccagaaatacaagttggttttcatgttggaaatcgaaatttagtatgtaccatgacattgtacagttcgatagtagattatttagagtgttgtaagccttgtagcttatgtttttgttggcatcaaggtatcattcctgtagctgaaaaataaacgttatattgtcacaaatatggaattctaggttgtttttgatacc

SEQ ID NO: 270661 - DNA, 841 bp, Zea mays
tttcccacgcgtccgatttaatttaatagtttattgactaacattctatttgccaagacttacattctaaagggggtgttgcagaagcttgttctgttgtaaaaagagtaggctcgaaacttgatcctgtagatggagcttgtttacctttagatatcatatgccttcaccttgagaaggctgcaatggatagattaagttcaggagaagaattagttggtgatgatgatgttgcaagagctcttcttggtgtctgtaaaggtcttcctggacctgtacttgctgtgtatgatcagctgttatcggacggtgcaatcataccctcactaaatctggagttgcgcctgctgcgatcaagttctagcaatcctccgtgagtgggggatatctgtcattgcacataggctaggcaccacaagtgctggtgcttcattctttcttgatggaacattctcattgaaccaaacaggggctgcgaatcaagattgaggaaactgatgaagcaaggaaaaaattctctaatgctaaggcaatttcgtcatctcagttttttggtactcaaaacaggagaaagaggctcagctatcccttcataaatccgcgatgggttactgggtttactctttaatcaccatgtcattgatattcaaactgaatctattgttgaagggcatccatttcatctgtttgaataatccattttcagaagtttgcttccttcttatatttcatctgttttgaacagggttcttcatccatttcaagctctgatctttttggccgtaccaatgtggacgattctaacctggatctaagcgatgcagatctcatcaacagaata

SEQ ID NO: 270662 - DNA, 429 bp, Zea mays
cctcccactcgacttggacaggatcctttgagcagggcagggcgagaggccagcagcagtcttgctgtcctaccggcaccgcatcaccgacagttcttgcacagctacagctctgtagagggatagtagaggattcttatcatgcgttttgtattctgacctttgcttgttgtgagacccagtccacatgaagatgttttttttatttgttattgatactttcacgacgttgaagcatacaattatatgcatcaaggttgtcaaagaaaggtccagcatgagaaagctgaccaaatgttgcgccaaaaaaaaatatatataacaaaaataagaaaaaaaaattaataaatagaaaatgctatatacaaatgcctaaaaccaactcatcaatattgaggaatattaaaaaaaaaagggctgcctttttag

SEQ ID NO: 270663 - DNA, 645 bp, Zea mays
ttttttttttttttttttttttttttttttttttttttttttttttttttgttggacaggggggaacacacaggggacacaaattgctccataggttacaaaagtgtagcggcagccggcaggtatcctgatccatcgccatctgcttacacacagacaaaacaaatagtaacgacacttggcatgaagtcgctggcagcataactattgctagcaaaaaaaaaaaagagacagtacaggcatccgggcgcagttgaaacccagcacagattattcaacaatcaccagccacaaacatgtaatccccccttcattcatttcctcctgagttcgccttcaacctctcgaccgcggcccgcagcgtgccttcgtccttgctgaaggtgaacctcaccaatttctttccctcttcggggtcgaggtagaacacgctgggcggtatagcgcagacgccgacttcgcggatcaagtactcgcagaactctacgtcgctgtcgaaaccgaacggggtgtggtcgaccatgatgtagtatgtcccactcgatgggtagacgatgaaccctgcggcttcgagtccttccagcaggatagccttcttcgcgctgtagtccctcttcagctcgtcgtagtagctgtccggtgccc

SEQ ID NO: 270664 - DNA, 452 bp, Zea mays
cttccgtcgccacccagcgtgctctctctccctctttctctctctctcgtggcggcgcctgggcagccgtcgctgccgcctgcgctaggtgccaggtcttcttcgggcccttcgccggcgacgagtaccaccaggttgtacatgtatacacccatgtgctttactgggtcggaccctactcatcctccacactaaggccatctccatagactgcactgtttagactccactgtttagagagtggagatagggagtgagatagagagtggaatagggaggatgctggagatagcctaaggttgccactgagtgtgtgcatgattcacaggccatgtcatcacaaactggaggcggcaaagagagtgacgccggccctgggcaacacatgcagatgcaaagtttggcaagacatgggtttttatacaaccttaccctcgatgaggtgcataacc

SEQ ID NO: 270665 - DNA, 412 bp, Zea mays
cgtgtttgaggagcgtggtgacatctgatacatagctagcaacgtatgtagttaactaactagcttgacctttgacttgcacctttgtcgagcttctatgctgctctgcagcagccatcaggagctgaggtgatggcctgccgtctagtaggcactatatccaattactttacactagttggacctatttcaccatcaagctgctacggaagcctgatttctgtatccagttgaggcgatgcatgtttagggatgggttagaccttgatattaatacggtggggtactgggctcactttgacaaacccagtaacaaactggtgtaagcttcggtccatggaccctcttgtgaggcccgttttggtgcttaaggctgtccttatcagtggggcctaaaatggctttataaaaa

SEQ ID NO: 270666 - DNA, 340 bp, Zea mays
ggcctgttcccttctatttctcgccccctactgattaaattttcttcgcacgaggaaaaaaaaatcaagtggcaagggcttgatctggtgggcgacccatggtgaaagggatggtagtggccgtgccgaatggggtgaaggcggatggcgccgccgccaccgccgccgccgctaaggcagattctcctaaatccgttctggaggacgagaaaatttctgaatccaagaatgggaacgcctccttagccacggagccagttaagcaaggggacgagacctcggacgtttttgtggatgcaatgatgtcccttcctgttgaccatgaaatcgccagtgccga

SEQ ID NO: 270667 - DNA, 1787 bp, Zea mays
ggaaaaagaaataaagaaattggtccagtagccctggaagaactgttctcctggattgaattcacaaaacaactgtttgttattttcttctcccgttcacttctctttggcccgaaaccgagagctagtgcttgattcggtcgtttttgggcaccgaacacgttcttgggaccgccgccgccgccctacttccagtcccagctgctcaggtctccatcggcctcgagccctttgccggcgacgagcactcacaacaccagggtgtaacaatgtcttcttcaatggaatcgtcataccttcctgctacaactgagtcattagcccaagctcaagaggctaaggatgcttcagagtccatttcaatcctttaccgtgtcattcaggacccatcttcttctgctgatgcactgagaacaaaagaagttgcaattacaaatcttacaaactacctcactaaagaaaacagagctgaggagctgcgtaatcttttgacccagctcagaccattttttgcagttattcctaaggcaaagactgcaaaaattgtccgtggaataattgatgctgtcgccaagatacctggaacatcagatcttcagatttcactctgcaaggaaatggtagaatggacccgggcagagaagcgtactttcctccggcagcgtgtggaggcaaggttggcagctctcctgttagagaatcaggagtatactgaagcccttaccctgcttactagtcttatcaaggaagtcaggagacttgatgacaagttacttcttgtggacattgaccttttggaaagcaaacttcacttctccctgagaaatctgccaaaggccaaagcctccttaactgctgctagaacagcagcaaatgccatttatgttccacctgctcagcaaggcactattgatctccagagtggaatcctccatgctgaagaaaaggattacaagactgcttacagctacttctttgaagcatttgaagctttcagtgcactggaggacccgaaggccatctttagcctgaagtacatgctcttgtgtaagataatggttaaccaagctgacgatgttgcaggaataatctcgtctaaggctggcctaaaatatctgggtcctgatgttgatgctatgaaggctgttgctgatgcatactctaaaagatctctcaagtattttgaaactgcccttcgtgattataagtcccagctggaggaggaccctattgtccacaggcatctttcttctctgtatgatacactgctggagcagaatctctgcaggttgattgagccctactcaagggtggagattgcacatatagcagagatgattgaattgccgattgaccatgttgagaagaagctgtcgcagatgatccttgacaagaaatttgctgggacactagatcaaggtgctggctgcctcattatctttgaggattctaagacggaggaaatcttccctgccactctcgaaaccatttcgaatgtcgggaaggttgtggacagcctttatgtgaggtcggccaagatcatggcttgaaagcagctagtcttacctgtttgctctgatttcatttccagtctgtcgatgtcctcagacatttattccttcaatattgacagtttattgtgaccgctacaggttcatgtgaccaaaggctagctatttttacgactgaatgagttatgcatgtattggtcttttaatatcagcgtgcagagtcggacggatgttattgtgtgttaattaatcaaccgtgtgttgtcttcacgagtt

SEQ ID NO: 270668 - DNA, 485 bp, Zea mays
  unsure (1)..(485): unsure at all n locations
agagatgattgagctgccaataaaccatgttgagaagaagctgtcccagatgatcctcgacaagaaattcgcagggacacttgatcaaggcgctggctgcctcatcatcttcgaggacagcaagactgaggagatcttccctgccacacttgaaacgatcacgaatgttggcaaggttgtggacagcctgtacatgagatcggccaagatcatggcctgaaagatgcagtgggaggcctaggtgtcgtcagcttcttttcttggtctattgtcagttcagttaaccaaactttagctgtccaagagacatcttattgtggatttttttttatttgtggttttgggtggcagactgtttgcgttacaatttgctcatgttgctcatgaatactcatgtttctgtttgatggaagtactgttaaggctatgatgtttttatactttatgttnaaaaaaaaaaaaaaaaaataaataaaaaataataa

SEQ ID NO: 270669 - DNA, 453 bp, Zea mays
  unsure (1)..(453): unsure at all n locations
acgttgacttttggggttcttgggaccgccggcgccgccctacttgcagtcccagctgctcaggtctccatcggcctcgagccctttgccggcgacgagcactcacaacaccagttttgtaagaggggatctgtaccagtcaggctgagcagcagcagcagtggtgtgttctggcttgtgtgggacctagaggaagcttacacaacagggaagagtattgtgttagggtgtgacaatgtcttcttcaatggaatcgtcataccttcctgctgcaactgagtcattagcccaagctcaagaggctcaagatgcttgagagttcatttcaattctttaccgtgtcattcacgacccatcttcttgtgctgatgcactgagaacaaaagaangtgcaattacaaatcttacaaactacctcactaaagaaaacagagctgaggagctgcgtaatct

SEQ ID NO: 270670 - DNA, 1389 bp, Zea mays
cccactcgtgttcccttttcgtccttgttcctcaacgtcgccggtgcgcccgcctcctgcctctctccccctgcgagcgatcgtgaggggatcgggatggcctcccaccattccgagcccctcgaccccgccgacgctgacgacccctcagataacaacccagaattaccatgcccctcctatcatatcgttaccaaacctggtcaactcccagtcgagtttcttgaaccctcagctgcccagaagttggtaattggatttgactgtgaaggtgttgatctctgccgcaatggtgctctctgtattatgcagcttgcattccctgatgctgtttacctagttgatgctattgagggtggaaaagaacttattcaagcttgtaagcccgcacttgagtctgatcatatcaccaaagttattcatgattgtaaaagggacagtgaggctttgtattttcagtttggcataaaactgcataatgtgatggatacacagattgcttattctctgatagaagagcaggagcaggaaggaaaaaagaagacatctgatgattacaattacatatcttttgtcagccttcttgctgataaacgatactgtggcatactatatcctgaaaaggaagaagttcgtatccttctaaggcaggaccctaacttttggacaattaggcccttgtctgatatgatggttcgagctgccacagatgatgtccgcttccttctcagtatatatgcgaaaatgatggaaaagttaagcaaagtatctttatggcgtctggcagttcgcagtgagctgtactgtaggtgcttttgcttaagcgacaaccagtttgcagattggtcacctcttcctcctgtccctgatgacattgaggctgatgtttatgttcctgaagccgatatcctgtcagtcttagatgtgcctcctgggaaaatgggacgagttattggcagaaaggggtcaacgataatggctgtgaaagaatgttgcaaggttgaaatacatattggtggtgctaaggggcctccagacagggtgttcatcattggaccagagaaggaggtcaggaaagctgaggccatctttcgaggccgaatgctggagttctagagatgttaccctttgcgatacaggtttcaactgctttatattttgaacgtaaaaaaggggggaatacccaaaaggtgtatgcggggccgtggatcccttgcccgtccgtgaatcatgaaaacaaaataaatgatttcaacttggcctatgtcagtgttgcgcttcctgtctccactactcgccatctggttatacactctcgtttctggcctgtttcaggatgcggaagtatgctttagatttgactcaaaaaaaaaaaaaaagggcggccgc

SEQ ID NO: 270671 - DNA, 603 bp, Zea mays
  unsure (1)..(603): unsure at all n locations
cccacttttccgcccacgcgtccgcctcgtcctcgtgggtctttttgtccttgttcttctccgtcgccggtgcgctcgcctcctgcctccctccccctttgcgagcgatcgtgaggggatcgagatggcctcagcctcacaccaatccgagcccctcgactccgctgccaccagcgacaccgacgccccctcagataacatcccagatttaccatgccccccctatcatatcgttaccaaacctggtcaactcccggtcgagtttcttgaaccctcagctgcccagaagttggtaattggatttgactgtgaaggtgttgatctctgtcgcaatggtgctctctgtattatgcagcttgcattccctgacgctgtttacctagttgatgctattgagggtggaaaagaacttattcaagcttgtaagcccgcacttgagtctgatcatatcaccaaagttattcatgattgtaaaagggacagcgaggctttgtattttcagtttggcatcaaactgcacattgtgatggatacacagatcgcttattctctgatacangagcaggagcaggaaggaaaaaagagacatctgatgattacaat

SEQ ID NO: 270672 - DNA, 549 bp, Zea mays
tttgtgctttccccaaaaaatccttcgcttttcgggaaagaaccccagcgccgagaggaagaggagggatctcgtcgacacgccgtcgggaacgcgtcccccgttccctcgccgctgccccgacacggtgccgttctcgcccgaatcggcgaatccctcccaccgcttcgcctataaatctccccctctgtggccctgatcctcccgtacaacagtgcccagtgcccaccgcggcagatcttcgacgcctccgagggcgatggaggaggacggcggctccggcagcgatagcatggagttcgtcgcgggagcggagactagcgctggcgcaggcacaaacgccggcaggaaccgcggcgtgggtgcagggaccagcgtaggcggtggcggcggcacgaagctgccgcatgtgctgcaaaagagtttcggcgaggtgcaagggattctggagcacaaccgcgtcctgattcaggagatcagccagaaccaggagacgcgcgacgcggacggcctcagccgcaacgtggcgctaatccgggagctcaacac

SEQ ID NO: 270673 - DNA, 558 bp, Zea mays
gggcaagacattgcgcacgagttcaaccatacatatggtctgtctctcattccaagggcccatcagctggtaatggaaggattaattggtgccaggataagaatgtagtcacagtcttcagtgcgcctaattattgttaccgctgtggtaacatggctgctattcttgaaatcggggaaaacatggaccagaacttccttcaattcgacccggcacctcggcaaattgagccagacacaactcggaaaaccccagactactttttgtaattgtggtggtgaccttaacttactggtgttgatgctcctcttttccgcagcatcagggtctgtagatcatctgtccttagatatgggttccatgagcccgacctgtacgtctcccaattcttttgtttggagattttgttgccgcttaacgatctttatacaatatgttaaaaagttaaatgccattggatttttcttcgttctgttgtacgtcgactttgtattatttgtagacggtgaatggaagtcgcagcaggaaagccaagctcctgctatggtttttgtttgc

SEQ ID NO: 270674 - DNA, 467 bp, Zea mays
gtgtacctggcggcgaagagcgaagctgagcactacaaccgggagctgcgagcgcgagcaggacgagatcgacaccgtccccgacgtcgaggccgccgagatcgccgacatcctgtcgcagtacgggctgggcccggaggagtacggccccgtggtgacctccctccgcaacaaccccaaggcgtggctggagttcatgatgaagttcgagctcgggctggagaggcccgagccccggcgcgcgctggtgagcgccgccaccatcgcgctgtcctacgtcgcgggcgggctggtgccgctgctcccctacatgttcgtgccggaggccgcgcgcgccatggccgtgtccgtcgccgtgacgctcgcggcgctgctcttcttcggcttcgtcaagggccgcttcacgggcgaccgcccctttttcagcgccgttcagaccaccgtcgttggcgctttcgctttcgacg

SEQ ID NO: 270675 - DNA, 1389 bp, Zea mays
aagttggaaaggatggagtcattactattgttgatggcaaaacattggacaatgagcttgaagcagtacagggaatgaagctgtccagaggatacatatctccttactttgtgactgatcaaaagactcagaaatgtgagatggagaaccctcttattcttatccatgacaagaaaatctcaaacatggattctctccttccagcattagaaatttctatcaagaatcgcaagcctcttctcattgttgctgaggatgttgaaggagatgctctgtcaatgcttgtactgaacaagcatcgtgctggactcaaggtatgtgctgtcaaagctcctggatttggtgaaaatagaaggcacaatctagatgacatggctgtgatgactggaggagaggttattagcgaggaacgcggtcttgatcttggcaaagttcaattacaaatgcttggcactgctaaaaaggtaactgtatcccttgatgatactatcatcctagatggtggaggtgacaaacagcagatagatgagaggtgccaacagcttagagaatcaattgacacaagcactgctgtattcgacaaagaaaaggcccaagagcgtttatctaagttatctggaggtgttgctgtactcaagattggtggagctagtgaagctgaagttggtgagaaaaaagatagggtgacagatgctctaaatgctgcaagggctgctgtggaggagggcattgtgccaggtggtggagttgcccttctttatgccaccaaggagcttgacaagattagcacagcaaacgaggacgaaaagattggagttcaaattatcaagaattctttgaaggctcccttgatgaccatagctgcaaatgctggcattgatggagctatagtcatagggaagctgattgaacaagaggacctcagtttgggctatgatgcagcaaaaggggagtacgtagacatgatcaaggccggcatcatcgatcccgtgaaggtgatccgcaccgcacttcaagacgctgcaagtgtttccctgctgatggcaaccacggaggccgctgtctccgagctcccggcaaccaagtccagaatagccagccgtatgccgcagatgagcgggatggtcttctgagggcccgtttgggagggctccggcttctggaaatatggctctcgctcctactcctttacaagagcagcttatccataggagccggtgctttttctaaatcgtttggcaaaaatagctccttgtgtattcttctcatggcgccatggtcctggcaaccatgtccaactcgatgtgctaacacagcatctcaagaacttcagcatcttgagcttggactgatgcgccgctgcgaccagatcctagctcattgcggcgg

SEQ ID NO: 270676 - DNA, 493 bp, Zea mays
tcgcgggtcgatgcaagcgtctacactcgtctcgctctatctctctcctgccccaaccaaccaatggaggctctcgcgggcgccgcatcctcctccgttctccccgcgcgccacccgccctcccgcgtggccgcgcagtccctcgcgctccgccctagccgctgcggtccactccgcgcggttggcgcctgcggtgtcagtggcaaggacgacgcccacgccgccaacgggtctcccgtcctcaagctgaagagcgattccagtctaaatggagtcctaccgattgcagctgacaagtcacagaaggcttcatcaactaacgttagtactgactctagtggatctagagctggcctgtttagaacacccatatcacgtggtgtgcagagtgcaactttcgctcacggtctacctccgccggctttggctgttcgcaatttgatggaacaggcgcggtttgctcacctgtgctctgtcatgtctggcatgcacc

SEQ ID NO: 270677 - DNA, 632 bp, Zea mays
gcgcccactcttccgaatcggtgtatcttcgcccccggcgaaggcgctatcctcccgaccacccggcggtgccggtacgccggtaaggcaggttgccagaccccgcgaccccgatcccgatcggtcgctggcgaggcggcgtgacctaccccggctcatcctctcaagccagacggtctggctgctgtgcatccccgttttggcggctaccttacctctggcaaggcaatcccccctcacccctggcaagcacgggagaacatggagagtgcttcagatgtacaaatgcaacatcgtgctgaagattccgagactacaattgagatcaaaatcaagacattggattcccagacatacaatttgcgtgtgaataaatgtgtgccagttcctctgttgaaagagaaaattgctactgtaactggaatattgtctgaacagcaacgcttgatttgtcgtgggagagtcttgaaggatgatgaactcttgtctgcttatcatgtcgaagatgggcatacattacatcctggtgttagacatccaggccagtcagctacatttggaaatgcagcaaccgaagcttacacatctaattctggccgtcgtcatgggcccacagtggcaagaagtgtatt

SEQ ID NO: 270678 - DNA, 485 bp, Zea mays
caccacgcgtccggccgccgataaaacggccagccgggcagcggagacgcggagtggggcgcgacggcgcgtaacctgtggggtttcaggttttgtccctgcgtggcagcgacccagccccatcgagcatcgaggcatggaaccgggagccaaatcggaagcaaagcaaggtgaggcaggatctggcgcgggggaaagcggcagcggcaaggtgtatcatgagaggcagaggctgcaattctgtctcctccatgctctcaacaaccttatgcaggaaaaggaatgtttcacccgtgctgagttggacggcattcgctggaaatcttgttctcaatgatccaaacaagggccagtggactcctctaccattcatttttacacctcaccacaatgttataactgggaactatgatgtgaatgttctcatcacagcattagaagctagaaacaagaaggtggtttggcatgatcgtcgtaaaggggca

SEQ ID NO: 270679 - DNA, 1359 bp, Zea mays
cacacagttacacagaggaggtttcctccctgcgaatctgcgatactgactctgccttcttcgttccagcgccgaaagagagggagagccaagccgccttccgccgcgacgcacgatggatcgcgcgcagttgctcctcgtcggactcccggccttgctcttcttctccgacctcactcacatcttcgcgccgccgcctccccacctccgccacccccatcaccaccctcctcaccaccaacatccgcatccgccgcatcatccccactcgcctcatccccatccgcacccgccgcatcatccccacccgcacccgccgcaccaccaccagcaccccgacccctccacggcaatcatacaggagccacgtgtggatgaggctggattcggcagcacagtggagctgcaattctgtgcctcctgctcgtacaagggaactgcagtgaccatgaagcgcatgctggaaacctcatttcctggcattcatgttatcttgcataattatcctcctccattccccaagcgtgtactcagcaaagttatcccaattgttcaagttggagccgttgcaacaataatggctggtgaccagattttccccagaattggcatggttgctcctccatggtactactcgcttcgtgccaatagattcggaaccatggcaacaatctggctatttggcaactttgctcaatcctttctacaaagctctggtgcctttgaagtttactgcaatggagatttggtattctcaaaacttgctgagcagaggttccctagcgagttcgagttgcgggaccttgttggcagcagattgcctgggtctccatttgggaggaatccggggaaaaccctgacttgatgatgaccccggaaatcagagctcagaatgccacaatttattatgttgcttttaaggtattagtagatagtaactatttggtattgatctatcgaggctgcagcttgtctgtaaacacaactttccagcttgtataatggatcaacggatcacctgatatgtgacggtggccgaagtactacgaactctaatgacgttggaacggtaaggatattgtgatggcctgttagtttatgggaggtgtactgtttggcattgatctcgatgtaaacaaacaatgttagccttgccccatggggaagattaagcgagcaggatgttaaagataccatattaaatcagagctcagaatgccacaatttaatatgttgcttttaaggtattagtagatagtaactatttggtattgatctatcgaggctgcagcttgtctgtaaacacaactttccagcttgtataatgtatcagcggaccacctgacatgtgacggtggc

SEQ ID NO: 270680 - DNA, 903 bp, Zea mays
cggatcgtgaatcttaaatcgagcaagaactggtttcggatcaatcaaggtagcttccagcgtgctcaaacaagggttccaaggttttgcaagacaagcgtgtgtgtgagagagagacctgcattgtttggtcgccactactaccatgcgcgatggccgcgtcgctgtcctcggcgctgagctccatggaggtgatgctggacgcgctcatgcagcgagggataggcaagccggaagaagccagcagcaagcccaaagaagaggagccgccaccggcgctgcccagccgcccgacggggcgaggcagactcccggcgctgcataggcccggcggcacagcagcggctccgtggatccaccggccatccccggtaccgcagccaacgcaggaagacgatcaggagacatgtctggtcggtcgggagctggaaagacgggcggccaaggcagaggaggaagtgaagcagaaagacgaggagatgaggcagaaagagcagctcatcgccacgctgcaacggcaggtgcagcactacgaatcccggctctcggaatgcgaggtcaggatgaaatctgtggagaggcagatcacttcgttacagatggctcacagtcacagccagaccgctggcgtaagcgtaaggagagatggatcgacgaggcacatccagggatcatctcgtggaggccttccgccgtcgtctcagccatcgtcagtgaggcgccagcagcgcggttccgagcccgccgctgccgacgagagccagaggacgacactggcggagccggtagtgaaccagctggccagggagttccacacggggacggaggcgttcgagcacaacgcgcccgccgtggcggaggccagcaggctgccgacgtcgtcgtccactcctggcaacgcca

SEQ ID NO: 270681 - DNA, 794 bp, Zea mays
cagactcatacccgctcagtgcccaagaggttgttctctcggatgatcttgatctacgacattcaccagcgcccagataaagttttggagatattcgcggatatggaggagttaggtgtgcgtccggacgaggatacagcgagacggatcggaaaggcattcgtggcttctggccaagaagaaaaggagaagcatgtcctcgagaaatacttgaagaagtggaagtacatccatttcaacggcgagcgcgttcgcgtgcggagggacggaccattggcgtagtgcccgttttctgaaaaatgctcgaacctatcagagtatcgtgccggtaggcggtagggcaggggagatgctgttactgccgctgtgacagtcaggcacatggatatcggcactagtccctatcctatgtatgtggaatggaacggaaactggagattggttccatggctctagcctgtggaggagacgagcggatggggggtggctggctactaccggcgagatagtgatttaataggcactacataggcgtccagtgattgcgatggctttaacttgcgtatgtgtctgcggaatggtcccgtgctatttcggtgacttgtgcttgtggaattgtgaacacccactggaaagtgtatatcatgagagggccgatacctgacgtctgggcccatggcttgctgatttcacgcaacgaaccattttctgtttgttgcggtgccccggggttcacgtacttgttctgttcttgtgatctggcacagagctgttggcttatccatttctatgcc

SEQ ID NO: 270682 - DNA, 526 bp, Zea mays
  unsure (1)..(526): unsure at all n locations
ctcggctggccacccaatcgtctcgttcgtcatctacctctccctcctccaacccaagctaagctaaacagcttacacagcttgctccgccatcaccgtatcgagagagacagagacaggctagcgagggaatggagaggatgctggccaggctgatgcggcggcggagctccgtccccctgtccggcctcctccaccacggaggagcgcccgccccgctgcaggccgccggcgccactggggcctccccgctgatcttgtcgcaccagcagcagcagcagcacacggccgcctccgccgtcctgccggggctcaagatcagggactccgcgtcccagctgatcgggaggaccccgatggtgtacctgaacaaggtgaccgatgggtgcggcgcccgggtggctgccaagctcgagttcctgcagccgtccttcagcgtcaaagacagaccggcgatctcgatgctggaagacgctgaatagagggggctcatcactccaggaaagaccacgtngatcgagcccac

SEQ ID NO: 270683 - DNA, 654 bp, Zea mays
gcggccgcccttttttttttttttttaacaacatctcaacaagcagactttgagatctacactacaacatccagcaaaatgacgtttagctttggaaaactaggtcattttaatgttcattttttttgcagaaatcagtttatttgagacgtttattttgcatagagttgtcatgtcttctttgatgagtaatataaaaatctgacagcaaattccgagcctatattatatatacaaaactctagcacaaaattaagaactgggatactctttttttggctttcaagtgagttaaacgtaatttaagcacttaccaatcaagacaatagttttattcagaatatacatattgtactattgttggcaatatagagaaaataatttatactattgttggcaatatagaagaaatactgaagacatgcttggatgttatatgctaaactttaacaagtactaaaggttagcacactttggagctaaagttctattagatgctaaaatttagcacttcacttgtagcaccttttaacactcatatttaaatctaagtgttaaaaatgtagtgctaaagtttaacaccaagaaccacataggcccttagttggagcgttattataaattgtagtataaaaatatagaaaccaaatttta

SEQ ID NO: 270684 - DNA, 612 bp, Zea mays
  unsure (1)..(612): unsure at all n locations
aatgntntttttttttttttaaaacgggcactggaaattttttggtctaaactttgatgtctgactgaactcaactgagctgaaacttctctatacacccagatatatgatatatccctgcacctacaatacaatcccctcctctgctgtccctctcaaactcttctttattcacagccaattttaaccaccaatcccaagcctaaaacgctccgaagagacccagcagaccacccgtcaccttcaatccaatccctttcagcaccaacgaccgacaccgacagaccatgatttcacaaaattctgtggagattgccacgcgctcttgaggcatgcagccatcaaccaacagtatttgctaagcatgacaatgaccacgtacactggtgaatctggcaagtggtagccatggccggaggggcaagagcagaaccaactatccttccgttccgtgcgtctgagatcctttctatcaatgcagcggagggggcggcggcgatccatattgaactgggtatactgatggccatggacggtgccgctgtgggggagcaggtgatgcgtatcggacagggtctgtgggtgggaatgggccggggtaatatggtggcg

SEQ ID NO: 270685 - DNA, 664 bp, Zea mays
gcggccgcccttttttttttttttttttttaatcagtaggacctcttagatctgcttcagtattttctgaactgagagactcatatagtgccgcatgggtcgtgaagcaaaccccagcggcagttcaatacagaattacaaaatactctcaatcaaaatactttatcttcagatctgcctactctgtctgaagttcaggttttgcctaaccatcttgtctgatgtttcgactcagcaacagctctaggtaagtttcattcttcttgcctacattgtttcaaaacaaagaaaactacacatatatctagaacataccctaatctgaggagcatttcctctcccaactataaaagccaagacgtctacagcatcctgcatctgcttaccctttccgtggcgataattctgtagatggctggacactggttgctttttgcagctataattctcatctcgaatttccgtgatcaggtcactcaaattggtcgtagaacccgatggaagggttaccagggttctggtcgcggcgaggcttccaggcattcccaccatctgagctgctgcaagcctggttggagaggacattgttccccaaatcaccatctaagctcatctgctgcacttcttggggggataggatcctaatgcacttcacacaattcat

SEQ ID NO: 270686 - DNA, 636 bp, Zea mays
actcagcaatcatcagctccatcgatgggagatttgtgaaccaacataagggctgatctcacaaaaatgcaagccacgctccagaaggttgagcaagggttgctgcaaatcaaggcagcagtgcaacatgagcaataccagctggcgctgtccgcacggctccgaacgtcggcggctatgggcatacaagctgctactcgtggcttccttgcacgacagaaagtgcggaagatgcgccggcagatgctcgaggcagccttggtgacggttaacctcggcacacgttggcgcgacctcaccctgtcggacggccatcagcagtggcaccaggccgctatctcgaagtgcgagcatggtacgtgtcccgcgggcgacgatcttcaactctacggcagcggcggtaaggaaggcactccccttgtcatcggcaagggcgcactatttagcgccaccacattccgctaccggccaccacgagggcgcctccgctggttattgttgcgacctattccaggtgcccgtccttgtgctcccctttagtctacatggcgtccatgggatccaggtggctgcacacgtgcaagtccaatgcgagaagggtgtccgccttatcttatgaggtcaaaaaaatcagat

SEQ ID NO: 270687 - DNA, 1577 bp, Zea mays
cgcgaggtcgacgcggattttcttctttataccgcgggcaggcggactgggcggctgacggagccgcggagggaaccgagtggccccggcgacgcgaggccgaggcgagctaatctgacggcggcagtgacgactccaacgaccaggcgcggaggctgcactgctccagcgaaggcaccatgtcattcatgtctccattcccggggatggatctaagtaaaatggatcccgggactctgaccctccttggggcagctggttgtgtaatgctgactatgcatttcactgtgcaattggtgtcacaacatctcttctattggaaaaaccccaaggagcagaaagccatacttattattgtgctgatggctccactatacgctatctcttccttcgtgggtcttcttgatatccagggtagcaagacatttttcacattcttagatgctgttaaagaatgctatgaggcactggtgattgctaagtttatggcattgatgtacagctacttgaatatatctatcagcaagaacatagtccctgatgaaatcaaagggagggtgcttcatcattccttccctgtttctcttttcctgccccgcaatgtccgattggagcacaagacattgaagcttctgaagtattggacctggcaatttgttattgttaggccagtatgttccattctgattattgcactccagcttcttgggctgtaccccagctgggtcagctggacgtttagtattatactgaacttttcagtctccatggccttatatgcattggttctcttctaccacttgtttgctaaagagctggcacctcacaagcctcttgcaaagttcttgtgcatcaaagggattgtcttcttctctttctggcagggttttgcgctcgatgttttaacccaagcaggcgtgatcaaatcccaccatttctggctggacgtggagcacatccaggaggcgatccagaacgtcctggtgatccttgagatggtggtgttctccgtcatccagcagtacgcataccacgtcgccccctacagcggcgctgacagggccaagtttgagaagaagaacgaatgaaccaggtttccaaaaagaatgaaagaaggaaaaaaactctctgctttctggtcgctcggagatggagcaccagtatttcctcacggatggacgacatacacaagttcatcgagtctcgcgagtagcgtatttggtagcgagttgtcgcgctgtaaaattacactgtccttgcgcgctgaataattttgctggctttgtcgttttggttttttgaacgttgtcgccgaggctatgtagccaggactgttcgtcttgtacgcgcgcgctctctctctctctctgcggactttgggaatccttttatatgaataaaagctacagtcctgttctacagaggcaaaaataaaaactacaaaacctataaggagtgaaaagctgaaccaaaaaggggggcggccgctttaaaggagccaagcttacttacgcgtgcatgcaacaagatagctctactatggggtgccctaaatataatacagtggccgggggtag

SEQ ID NO: 270688 - DNA, 466 bp, Zea mays
aatcccaccatttctggctggacgtttatttcatccaggaggcgatccagaacgggctggtgatccttgagatggtggtgttctccgtcatccagcagtacgcataccacgtcgccccctacagcggggctgacagggccaagttcgagaagaagaacgaatgaaccaggtttccaaaaggaatgaaaggaaaaaaaaactctctgctttctggtctctcggagatggagcaccagttcatcgagtctcgcgagtagcgtatttggtagcgagttatcgcgctgtaaaattacactgtgcttgcgcgctgaataattttgctggctttgtcgttttggttttttgaacgttgtcgccgaggctatgtagccaggactgttcgtcttgtacgcgcgcgctctctctctctctctgcggactttgggaatccttttatatgaataaaagctacagtcctgttctacag

SEQ ID NO: 270689 - DNA, 664 bp, Zea mays
cccacgcgtccgcccacgcgtccgggcgcactccgcctctcctctctccgtcgctgggcagctgggcttctctcccgactcccgagtcccgagcagccgagctccccctgctcggcctcgcctccgccgcgaaccgcgcctccggctccgcctgctcgggcgggcggcacccagctccctgcatcttcgctgcggcgagggtacacgatggagggagctggaagagatgccaaccctttgggcggttaccgaattggcaaaaccctaggaatcgggtcgttcggtaaagtgaagatcgcggaacatatattgactggccataaggtggcaatcaagatcctcaatcgccgtaagatcagaagcatggaaatggaagagaaagtgaagagagaaatcaagatactgagattatttatgcatcctcatatcatacgcctttatgaggtgatagatacacctgctgatatttatgttgttatggagtatgttaaatctggagagttgtttgattacattgttgagaagggaagactacatgaagaagaagcccggcgcttttttcagcagatcatatctggtgttgaatattgccataggaacatggttgctcaccgtgatttaaagccagagaatcttcttttggattcgaaatgcaacattaaga

SEQ ID NO: 270690 - DNA, 428 bp, Zea mays
cgcagctgggcttctctcccgactcccgagccgccgagctctcctgctcggcctcgcctccgccgcctgctccggcgggcgggacccagctcgcagcgtctcccctgcggcgaggtacacgatggagggagcgggaagagatgccaaccctttgagcggttacagaattggcaaaaccctgggaattgggtcgttcggtaaagtgaagatcgcggaacatatattgactggtcataaggtggcgatcaagattctcaatcgcaagaagatcagaagcatggatatggaagagaaagttaagagagaaatcaagatactgagattatttatgcatcctcatatcatacgcctttatgaggtgatagatacacctgctgatatctgtgttgttatggagtatgttaaatctggagagttgtttgattaca

SEQ ID NO: 270691 - DNA, 1620 bp, Zea mays
  unsure (1)..(1620): unsure at all n locations
tcgacccacgccgtccgttgtgcaattcggcagaggctgactgtgactcggggacgcggagtagtagaaggaagcgctagcactagcnagaaatnagtaggcagtagcagggnttgactcggaggggctagtggtgaacccaaccaacctccctcatccccctccccttctttcttattgccaccactccacgtctccaccaaacaaggcaacaagggagaagtagatctgcatctgcgagaggaggcagcgggggtggtgatgatggagagccagccgctgcaggccccgacggccacggctccggcccccggatctgcggagccagccggagctccgccggccgtcacccccggcaaggagttcacgcgcacctgcaagggcctcgtcgtcgtgctcatcggaggatacgtgctgctccagctcctcccttcgtcactcaactacctcgccatcatcccctccaagacaatcccctatgtatggaccgtctttaccgctggttacatcgagcaagtcctcccaggggccattggcagttctcttggtcttctcttttgtggaaaggacattgaaccagcatggggccgcaaggaattcttgaagttcattattttgatcaactccatctgtggcattcttgcattttgctttgctattggactctactacgtcactggaaaggagagcttccttgtcacaccactttctggtttccacggttgccttgctggctttcttgtggccttgaagcagctcttaccaaaccttgagcttcctatgtgctttttctggaaaataaaggcaaagtggatgccattctttgttgtatgtttctcaagtatcatggccttcatcgtgcctgattccattaacttcctgccaactttggtgtccgggatgtacgttagctggctttacctgagatacttccaaaggaacccactgactggacttaagggtgatcccagtgatgacttctccttccccagtttattcccagctgccatgagaccagttacagaccctgtggccaacctgtttgataggctgttgtgtgcaaggtccaggcctttggaagtcgccctcccgatatcagatcctaccaaggcttcaagaagaagggagcgtggcgagagggttcttgaggaaagattggcggccgacaatgctggtgacacagaggcctcgcctcgtggccatggcaccgcggaagactgagaactttcttgtgaccatcagctcctcttataggagccatggctttgctccctccagcgtttatagctctgcacttttgtcttctggagatggagctattcagttcacagcgaacgaataatacgatgttcttagtttcttttttttttcccgcttctttgtctgcgaggatttattggttaaattgtgtactagtcaattgttatggtacagcgaaaaagagagaagaggatgatggcattcgcagcgaggtgttgagattccgttgtagccatgcatttgcagccgattgtttggtactggtcaaagttctgtagtagtcataatactctgctcaaaatatagaaagaagaatggcttcgtcaatatcagatgttgagatatatatatttttctttt

SEQ ID NO: 270692 - DNA, 406 bp, Zea mays
cgacaatgctggtgacacagaggcctcgcctcgaggccatggcaccgcggaagactgagaactttctcgcgacccatcagcgcctcttataggagccatggccgcccatggctttgctccctccagcgtttatagctctgcacttttgtcttctggagatggaactattcagttcacagcgaaccaataatatgatgttcttagtttctcttttattttatttttcgcttctttgtccgcgaagatttattggttaaattgtgtactagtagtcaattgttataatacagtgaaaaggagaggagagggtggtggcatttgcagccgattatttgttactggtcaaaattctgtactagtcatatactctactcatatatagaaacaagaatggctttgtcagtcc

SEQ ID NO: 270693 - DNA, 561 bp, Zea mays
acttctccgcacgtcgcgccgtccgcgtttgcgaccaacccggcggtgggggcggcgtcaccgccactcctcgagccgctcccgctcctccgcgacgtcgccgccgcagaccgtccgggcctcatcctccgcaagctccgcctcgtcgcggcgctcttcgacctctcggactcgctcaagcacccgcgagagaaggaggccaaacgccaggcgctcctcgagctcgtagattacgtgcaggctccagctcaggccgcgggcgccaacgcgcccacgcgcctcccggaccacgtccaggaggcgctagtccttgccatctctgccaacatcttccgcccgctgccacccgcgctgcacgagtccgccgccgcgatcgaccccggcgccgcgcccgacgacgacgaggagccatacctggacccctcctggccacacctccagctcgtctatgagctccttctccgctacgttgtttcgcctgacacggacaccaaggtcgccaagcggtatgtggaccatgctttcgtcctccgcatcctcgacctctttgactccgaggat

SEQ ID NO: 270694 - DNA, 857 bp, Zea mays
acgcttcaaaagccatggccggtccgccgctcttgagcttccccttcttcttccttctctgcgtcgccctcgcctggagcgaggcgtatggagcaagcggtggctacgggctcggcgtcaactacggccgggtggcggacgacatcccttcgccgtggcgctccgtggagctgctccgcgcggcgggggccgggtcggtcaagatctacgacgccaacccgggcgtgctccgcgcgctggctgggacgcgctggcccgtctccatcatggtgccaaaccaaatcataccggacctcgccgcctctgctgccgcggcggaccggtgggtcgccgagaacctggtcccctactacccggcgacacgggtcaagttccttctcgtggggaacgagatcctctccgacttgtccatcgcgaactccacctggccacaccttgtcccggcgatggagaacatccaccggagcctccgcaagaggggcatcagcagcgtcaagatcggcaccacgctcgccatggacgcgctcgccgacgggccttcccgcgcccaccgtcggccgccgcgttccgcgccgacatcgccgagacagtcgtgcgcccgctgctgcacttcttgaacgggaccaactcgtactacttcgtcgacgcgtacccctacttcgtctgggccgacaacaacctcaccgtctcgctcgactacgcgctcttccagggcggacgcacccgctacgtcgacccgggcaccgggctcacgtacaccaacctgctcgacgaaatgctcgacgcggtggtcatcgcgatggcgaagcttgggtacgggcacgtgaagctggccatcgcggagaccgggtggccca

SEQ ID NO: 270695 - DNA, 562 bp, Zea mays
cgacccacgcgtccgggcattttttctttactgcgatgctgtttacctacgggcgcttccttagccatcagcttgttaacacgatgactgcagataagttgttgtacaagctggtgagcaggctcatcaagtaccagatgtttatttgctactttctttacatagcaggttcatcctcccagcttcgttaattgctatcaatgatgttgctgcatatttctttgggttcttctttgggaaaacaccactgatcaagctctctccaaagaaaacatgggaaggctttataggtgcatcagtgacaacattgctttctgcatttgtggttgctaatttcatgggccatttccagtggtttacatgcccaagaaaggatctatcaactggatggctttattgtgacccatgtcccatgtttacaccagaaggttatgatctaccgggatggataccacaatggtttccatggcgagaaattgcaattatgcccgttcaatggcatgcattagctcttggcttgtttgcttcaataatagccccatttggtggcttttttgcaagt

SEQ ID NO: 270696 - DNA, 1470 bp, Zea mays
cgtgttcgcgcgccgggtgttttctgccgcggtgcccgccgtggtcccgacgaagaagactgcgacggtccccgccccatcttcagccaaagcccccgtgtacgctggcctggcgttttctaccgcagcgcctgagcccagctccctcccgatgccctccttcgtactccttcccgcggagtccgaggccactcgtggccttcggtgcctcctccgcatcggcgacctcgcctgacacggctgccgtctctcagtcggcctctcttcaccattcggcctggtctctgctcccctctcttttctggttgttccctatggatggttggcgcctgaagggcggatggatccgatggaaagctagcttctccggatccggtcagatcatatctcccggtaacccgttccgatcaacctcttccggtattttttcagaggaaaggttggccaacggcgttccggtggttggatttgtatttggtggcggtggactccggttatgtccactgattgcttgctgttcggttcgcttaagtggtaaagctgatgtctttaggttagaaggataactaaggccgcgtttggttacaccagattatcagaatctgcatcattcacgtaatccaaaaaaatccaactcaagcttgatttttatggatagtctctggcagcacattatccaaggtaaaaaatctgctacgtttggttgagcctatagattctactagccagattctgactatccataggcaccaaacgctccctaagattgggtaggaaggaaggatggtggattgggtagctagctgctggctgcttggttcaggagttggggttaaattagcgtctgaaatacttgtttggtttaggtattcctatgtagacgacctgattatgattcagggtggtttatcgtagcagtaatctgaagtttggtgtggtgtttgatctgtgtgagtcttgtgttaggtgagtcatgaacaaatttatgtggtctttattagtaggtcaaggtgaagttcttctctttatgtatcgtcatgaacaaagttatgtggtctttattagtaggtcaaggtgaagttcttctctttatgtatctatatcagcttagctgtgatatgcgtgtgagtcgtaaatttcgatatatgaaagtctgttcttgcatccgatcaggaattgtgaacatctcctttcttcatatgcctctctttcgtgaaattggggatatgtctttcgtctagatttacttctgttcggctgctccgctggcggctgctgctgttcatgctcatgcacttggatgtcatgaattataaaccaaagatttgggaattatttaactatggaagccatgaattctatcctcattagggacacatgtttatattagaattcatggatcaaaagaataactaactagctgatagatagctgatagatatatggattaaatgatagatttaataaaac

SEQ ID NO: 270697 - DNA, 595 bp, Zea mays
cgatggaaagctagcttctccggatcctgtcagatcatatctcccggtaacacgttccgatcaacctcttccggtattttttcagaggaaaggttggccaacggcgttccggtggttggatttgtatttggtggcggtggactccggttatgtccactgattgcttgctgttcggttcgcttaagtggtaaagctgatgtctttaggttagaagaataactaagattgggtaggaaggaaggaaggatggtggattgggtagctagctgctggctgcttggttcaggagttggggttaaattagcgtctgaaatacttgtttggtttaggtattcctatgtagacgacctgattatgattcagggtggtttatcgtagcagtaatcttaagtttggtgtggtgtttgatctgtgtgagtcttgtgttaggtgagtcatgagcaagtttatgtggtctttattagtaggtcaaggtgaagttcttctctttatgtatctagatcagcttagctgtgatacgcgtgtgactcgtaaatttcgatatatgaaagtctgttcttgcgtccgatcaggaattgtgaacatctcttactac

SEQ ID NO: 270698 - DNA, 1272 bp, Zea mays
tctccccgcgtttcttcccaccactggctcacttcaatagggattttttttcgagggttgctttgcttgctcctggaatcttcggaaccgaaggccaccgcgccaaccgcccaattaccgaaccaaaccctaccggtcgcggctcctccatagtccatactctcgcgcgcctaaaccctagccatcctcctcgccgccggcgaccgccgccatgagccgctacgacggccgcgctgcggacgcgggctcctaccgcgaccgccgcagcgagggggcgttcggaggcgggtcgagggcgttctcggcgccgagcaaggcggacgcttccgcggcggcctcggagctagatgggctgccgcgcttcgagaagaacttctacgtggagtcacccgcggtggccggcatgacggaggaagaggtggaggcgtacccccgccgccgggagatcaccgtcgacggccgcgacgtgcccaagccggtgcgtgagttccgtgatgtgggcttcccagaatatgtgttgcaagagatcacaaaagctggttttgtggaacctacccctatccaatcgcaaggttggccgatggcattgagaggccgcgaccttattggcattgcagagacaggatcagggaaaactcttgcttaccttttacctgccattgttcatgtgaatgcgcagcctattctttcccctggcgatggtccaattgtcttggtgttagctcctacacgtgaacttgctgttcagatacagcaagaagcaaccaagtttggtgcatcatcaaagataaaaagtacttgcatatatggtggtgtgccaaaaggtccacaagttcgtgatcttcaaaaaggtgttgaaattgttatagctacaccaggacgactaattgatatgattgaatcacatcatacaaacttgcgaagggtcacatatcttgttttagatgaagcagaccggatgctagacatgggatttgaacctcagattaagaaaattgtttctcagattcgtccagatcgcctaacactttactggagtgctacctggccgaaggaaagttgagcagctagcaaggaattctctttttgacccatacaatgtcactattgtttctgaagacttgaaggctaatcatgccattgatcaacatgtagagatattatctgaaactcacaaacattacaagctgattaatctactggatgatataatataaggtccgccaaattttattatttatggacaccaagaagggatgcgatcagactact

SEQ ID NO: 270699 - DNA, 369 bp, Zea mays
ggggcggccgcccttttttttttgttttttaaaaaagggcgccagcctgcttgttttactttctccccgcgtcgaacgcgcccaaaagttttctgcattcattcatgtttctcacactctaaacagaagcggcattcaatcctccttgactacaccacggctaactttagtccctcgctgttttctcctccggcttctctgcctcttcagttgcatgcgcacctccctccgtggcagtgacgccgacttcggcagggcggaggacgcgatcgtgtaacatgtagcccacctttacaacagaagcaacggtccccggtggttttgaaggatcatgattttgaaaaactgcacaatgcctgtttggtatca

SEQ ID NO: 270700 - DNA, 526 bp, Zea mays
gtcagtgcgtgttttttttttagagtccactatactatcacactattcttctttgagccaccgaaccgtgtcccaatggatgggcagtgagatatttatttacacaaatgaagatctttttcgtttccatgtgagaatagacagaagagactaaatcgccagcacatataggtagtcttcgattatggacatagctgatgaacggtagccagagccaaagagattgtagtgattcaggtagtggtagaggagatagaggtccctcctcttctcaaaccctggctgtttcggcatcacctgaaaataggcgttgtagaagtccccaccaaatccagcacaccaggacatcccaaactctgcctcgttgtgtccatagtagcaagcaggatccaatattacaggatccccattgctatcagagcttatggttccgctccacagatcaccattgaagcaagcacggctcaataaccgctctcatcataaagtgggcggattattcttgatcaaccgctgacctttttcg

SEQ ID NO: 270701 - DNA, 813 bp, Zea mays
  unsure (1)..(813): unsure at all n locations
ggcggccgccctttttttttttttttcttttttggtgttcgcctctttgaaatggactttcgcttcaccggattctttacagttacctttctggcacgggcaggaaccagttcctcttcctcctcgtcttgatactcatcctcctcgtcaccatcgacatcgggatcaaaatcaatatcctcatctatctcgacctcctcgtcatccaactctgggtcaaaatccatatcctcatcatcctcctgcttccgctgatgagatcgcttcgctgccagagacagcttcacattccggccacgggcaccgcatttcacaatgctcttcggccgctgtggtgccacttcttcctcctcctcgacctcctcaaggtcatcatggtactcctcctccacctcgtcgtcttcgtcaacctcctcctcgtagtcctcgtcctcctcatacttccggcgtcgagatcgtgcggcggccagatccacttttcctttccgtactctgttgctgccctttgcccgtcgctccgggcgcggcgtctccatctcgtcntcntctgcctcctggtattcggcgtctgaatccaacccatcctcacccgcgctcgatgtgctgccattggccggtcgcttcaggcgcggcggctcgatctcgtcgtcctcctctgcctcctggtattcggcgtctgaatccaatcccctctcgccggcgctcgatgtgatgcccttcgctggtcgcgttgggcgcggcgtctcgatctcgtcctcctcctctgcctcctggtactcggcgtctgaatcccacgcgtccgccacgcgtccg

SEQ ID NO: 270702 - DNA, 337 bp, Zea mays
cagctacaaaccccaactgacaggctgccctgtttgaaaaacaggctcggactccaatattcgacgcccaatatagtttaggaaaaagagaagaaaaaaaaactttttgttgcagatgttaatcaaagggataaaacttcaacaaacgatgtgacatcgcaacattgttttggataagcctacacaatatcccgtttccatacaatacaggtttaaagacacaggaacaggcagttggtttgttttatggccatgggaaaaccggtggggccattttttttggtttggtaacagggaacaaaacttactcactcctggtgtttttgcgatggggggg

SEQ ID NO: 270703 - DNA, 562 bp, Zea mays
agctccgctgagatgctgaatgcaacacgcacgtcaggggaaggaaaacagacaagatttcagagttttaaccacctcgacttccaattttacagccgtatatgttctaacccaaaggtaaccatcggaatctgtatccttgactgcacaagtctttccacagcttttacaaccatgcgttgcctgaacaaacaccaagagcagctacaaacattgcaacctgacctacctttgagaccatatataaagatcaccaaccagagagaggcaactgactcacaacacaatttgcagctacaaaaccattgtatatgtacggaggtgctattccttgacgtcttcaaagagttcgtcttcgtcctcgtcgttttctttggcttcatcagaatcgtagctgtcgtactgtaggaggctgccaaagtcgctggattgtgccttgatgagcctctcctggatcctctccttgatggccgtccccattgagtggcacccttcgtcaaacttctctaagaaaccagccacccagcggtctgcattttccacccactcttcctggagtttt

SEQ ID NO: 270704 - DNA, 622 bp, Zea mays
taccgggccgtaacgggggcggccgcccttttttttttttttttttttttgcacaagagtctttccacagtttttacaaccatgcgttgcctgaacaaacaccaagagcagctacaaacattgcaacctgacctacctttgagaccatatataaagatcaccaaccagagagaggcaactgactcacaacacaatttgcagctacaaaaccattgtatatgtacggaggtgctattccttgacgtcttcaaagagttcatcttcgtcttcgtcctcgtcgttttctttggcttcatcagaatcgtagctgtcgtactgtaggaggctgccaaagtcgctggattgtgccttgatgagcctctcctggatcctctccttgatggccgtcccctgaggaagttttggaaacaagaatacataaatgagcagtggactcctaatcgaaagcagtggactctctgcgaagggtggtcagagggtaactgaccattgagtggcacccttcctcaaacttctctaagaaaccagccacccagcggtctgcattttccacccactcttcctggagttttgcaaccgtgctccacttctcccctactttttcttggtgcttggacgcgtg

SEQ ID NO: 270705 - DNA, 383 bp, Zea mays
cgtccggattcccgtgcggccgccctttttttttttttttttttttttttttttttttttttttttttttttttttttttttttttttttttggtttttttttttttttttggggcaaccgccccaaacaaatttattggtaattaatactaaacaggtgggggcttaaaacgctttaaaaattccgggtccagaatggaaccacagaaaatgcaaacccggggcaacacccagggacccctgcacttgtgtttgccataacaaaagccagctcaagccaaatggtggtttttgtagcaatccttgaaacactttttttttcgatttagggtttgagaaaccgtattccaagggagggaagtttcttggggccaaaatttctt

SEQ ID NO: 270706 - DNA, 461 bp, Zea mays
cggccgcccttttttttttttttttttttttttttttttttgatcaaaatatcgccccatccatccatagtttatattggttaattaactacaggccgttatccatctccacagaaacaaaagaatgaaagaaagaaatttattgatcattcatttggttacaatcggacacagcgaggccctcagtcgtcggcaagctggccgcagtcctcgatgcgtacgctctcggccgtggcacctgactgagaaccgacagcctccccgttgtccacgacggcgtagccatcgacgaccttgccgaagacgacgtgcttgccgtcaagccagggcgtctgcgcggtgcagatgaagaactgggagccgttggtgtcgggccccgcgttggccatggagagcacgccgggtcccgtgtggcgcagcttgaagttttcgtcggcgaacctggcgccgtagatggactc

SEQ ID NO: 270707 - DNA, 947 bp, Zea mays
cggccgcccttttttttttttttttttttttttttttttttttttttgttggcagcttatgtatggactgtaacttgtacagcgtaaagtttgcaataccaactgtaacgtacccatctccatgcaacttcgttgcgcctacatgctggatgtctactgccaaccacgtacagcttttgtctacgctactttacaggtggaggaggttattacaagcaatcgtggcgactcagaaaatcgctcgtcacgtgcctgctaggcgaagtttccatgcgtagggtactgcccagggaggggtggtcctgctgccggcacgggaggcccgaagttgaaggggtggttgaacatgcaggctggcccatacttgcagaagccatagcgtccatagtaagtgcacacaggttgatcaggtttgataggcaagccgatggggctaagacctgctggtggtggtgcagactggcgcgaccttggatggtgatatctgcatttcatcctgtatttacagaaaccgctcttaacgaaatgctggcattcaggttggccaggtctctcgggatactcatcagatggtggtggttgatgtcctggtatatctgcagccttgtacatcgggtgattcatatgggcagctggaaaatgcgggaaaggaacaccgggagggtaatatggattcaaaggtacctgatgatacccactccaatcagaagatggatacattccttgaggtggaaccatccctccactgtatgacggtgctggagcaagaaaaggaacatgctgttcattcaatgctctctggtcaggccacatctgaaggctaggctgagaggatccttggacattttgcagtggtacatcgccattctcatgttccaaccctggttcttttgaaggcgcattagtaggatctgggtggtgaagcttgcagttagtcgcaaatctgc

SEQ ID NO: 270708 - DNA, 459 bp, Zea mays
  unsure (1)..(459): unsure at all n locations
ccgtccgnattcccgggcggccgccctttttttttttttttttcagaaccgaacaagggggcattgtcagtgttgttattgcgcccatcggggggcatcacattattacacttatgaaatattggcctgattgatctcacgtgaaataatacatccgcaaggctgccattgcaacacgaaactacattctcctgacggtagtcgcacccattcatcattacaagatttttttctccatggcaaatataaatctcatgttgtatattcagcatttatttcaacatatttgtagctcagatcacagccccatgcctttccatttcctcctccactcccaactgatatatcaatgtttactgtaccatgggcatctccagcatctttgagatacttgctagcggccaatctgtcaaaggggagtggttgcccattattctatagcggaattactcccagaga

SEQ ID NO: 270709 - DNA, 455 bp, Zea mays
gcggccgcccttttttttttttttttttttttacacaatccatattcaatttcattgttcagttaaaaaacgattcacagcagcgggtggatcatcttggattcggcgtttaaacttaataaacaatgctacatccgtaacaaaaggaactcaagtaattgtggctgacacaaagtcggccatataaaatttgaagttctccgtactttggagataggcatccaatgttacatctcttagtttgtatctttgctgcaactctcccattggagcaatgaagttccatagcccacatcggcacataattgcttgacctcaggtatgcctcagctggtgttgaaagcagtcttagagctgttgtgcttagatgcctgagtttagtttcgatcatttggtggtcccgtgtttctttacacaaagccacttttggaccatattctttctatagttgggca

SEQ ID NO: 270710 - DNA, 541 bp, Zea mays
gcggccgccctttttttttttttttttttattcatgaattttgttttatttttcaacttcatggcactcagcatgatgaggactggcattatcctgaagaacataaacccaagcatgagggctagtccttgtaattttccaactagctattttctatagtactgaaccatgccatttctagagaatctttactgaattgcaatcagaaagtctcactacaataacagaaactaagggaaattgcataaggtaaaaggaataatgatgcatcatcaaaatcccagcaaaacaacaagctaacttagctcagttgcagagaaacttggaagcttcacagtgttggagatgtgctggaatgttttctctcatcactttgccactaggatccacctgctcgcagttttctcgattatagccagtatcatgatgttcgggaagttgaacactcggaagcaattcatcatggcagtctatgagtatattgtgaagcagacagcaaacaagaattatacttggcaacttgttcttgcggacgcgtggg

SEQ ID NO: 270711 - DNA, 747 bp, Zea mays
gcggccgccctttttttttttttttgaaactaataattattaattaattaactaaagagagagaaagagagaggggggggtgtgaattggagctgcactgcaggagaaaagggtggagcagtgcggagtggatggatctacgcatccaccagatccaatgcaggtagccatccctgtcctcctcataatttgtgcctcacctaccaataatactgcaccacctcacgctcactgacacctcctcttctctctcctctgtttccttgctcgtctcatcgggatccatggatggtcacaggaccggggccggccgtacgacgggcctcgtgtctcatcagctagcaggagtagtgtagtaagtaggtaggtggctttgctactgaccttgctctgcctcccaatcggccgccgggctgcagggaacctcgtacacgtactacgcacgccgccggccgtgcgccttcacttttgcttgtcggctggagcacgcgcgcgtacgtacgtacgtactacgcgtgggttcagaaggagaaagggaaggaggaggaggcgagctcgccgtcgccgtcgccgtcgccgtctccggcgctgaggccggggaggaggaaggcgcggcagagcgggcaggtggcctggcccttgtcgacccacttgtcgatgcaggccttgtggaaggcgtgcgcgcagttgccgagctcgcggacgcggtgccgcgcctggagcgcgccgaggcaccggacgcgtggg

SEQ ID NO: 270712 - DNA, 430 bp, Zea mays
  unsure (1)..(430): unsure at all n locations
cggccgccctttttttttttttttttttttacatanttccggaacaaactccgatctgtattgtgttattgcgacgaaaaaaatggtccaaatgacggtctcgaaaagtttcaaaaggtcggcatgcagcacaacaccctactacgttacaactctgggtacacaggagtggtcgcaggcagcccggcactctggcgcgagagcagataaaattaccggtaccctcggtggaatcagtgcctaaactggagtacagagtccgagtccgtaacgctgacgtttacggcgagcactcgagccgcatgagcctgcggaatccccaggccacatgcatgtgctgtggcgtatttgccggaccggcttcatcatcagcttacggcggcgacgtctgtcgccggactggagtccaggagctgccggagcctgggac

SEQ ID NO: 270713 - DNA, 1074 bp, Zea mays
gtaaaattcaaaattgtaacgtgaacatcagatcccagataaataatcaactccgattacacaggtgaggagaaaacgtttggctatgaaatagtacgtatatacataaagaatattgaatttggaatgattggtgaagcacttggctccttattactacctccattcttaaatatttgtcatccactagtttaattttgaactaaaatacaacagcttcaacttatgctggcaatggcctcccagaatctgggaggcaatgcgaactattcccaatcggtaggaagctagtcgggtcaaccaagaatgttttgtttcatgcactcaagctatggtttcctggctccgtgtagttcacctctagctgctcaatcttctccaacttaaatccgcggatcctgatctcttccttctccgaggtgtccttgtagtcgacatgctggatagtccagcctttattctgtatatgaccggtaagtttaacctctgcttcatccgcggcgttgacaacaagagtgccgtccaacgagaggccttcaaggaagacgttctgaccattgatgaccaaagctgacctctgagaaactgaagagttcccgtgcactttctccttgacactcttgaaggtgagaccccaccgtgggctccaggttacgcgtggccaaacctctacctcttgtccgttgaaggtgtgaacaacaggatcagctatctgagcaccagcctttctcaaaataaggctgttcgccctgtaaattgccatctctccggatgttgcactatgataagggttgccctttggaactttagctgcgtcttcgggattattcttcacaggagcgtaagcaagccatgtatccatcaccgtgaatccaacttttgctgagggaggcaacgtctttggatagtcttgcatcatgcattctagacgagtggatgatttaaatgctgtcttggtcgaatcagtatacttgggatttacaaattcagacatggcgccatgtgttttcttgagctcctcaatatatggtccaagctccagtatcaactggtttatatttccaggatatggag

SEQ ID NO: 270714 - DNA, 571 bp, Zea mays
  unsure (1)..(571): unsure at all n locations
tcccgggcggccgcccttttttttttttttttttttttacacaggtaagtcctttttttaccttcttctgttgaataggaaaattcagagggcgacatgaaaaaagtcccgagtccaggaaagggtgaagaaacataaataagtgaatcttgaccacccctaaatgtaatcaccatcacaaaggctaggacttggccctaacgcaacctgcaacacagcacacgtttaacaaggaatcgttgctatctatgaagcaatggtgcaacagcccggagcaccaaggaaactatgggaagccccagggaaactgttgacgaatcctgtcatttgcagagtcgcaaacaagcgttcttcccttccgcccgctctcagatgctcgctttccttgccactacttccttttcccgccgcctccgagggggcggaagctccaggctgcggtggagtggctcgtcgagagcgcctctcgngtctgggtgcagtgaccggcaggtagccattaaaccccctggggatgggttgtccctctgggtaatatatgaagcgggcgggtgggtaggccagggaattc

SEQ ID NO: 270715 - DNA, 1453 bp, Zea mays
cctgttttttactttatctttatctctatttggttttttttttttttttttggaggcaaatacgattttccatctttatatagtacgtaaacatccttttcatacatcaggccgatcggatccataccaaatacacacagacagtacatctcacacttcagcagacagtacacgtacacagcgctgtcgtttcgtacacgcttaactgctcaagatcaaccggccgcgtagctagaccaggcacgcggccgtacgtgctttcgtctatagctaaacgcctaaaccaggcaccgtcgtccttagttccttacacacaccacgatcgggaagcacgccggcgagggagagcagagcagagtatagaaaaccataccggccggctcactcactccactccaggtcctggcagcccgcgagcggggtccctttgcggcactggttgtgcgcgtacggcttgcacccgtgcttgatgacgccgtgtcccttggggagcgggccgcacaggcggttgtagctcaggtccagcttctgcagcgtggacagccgctccagcgacagcggcacggtgccccggatgaggttgtgggacaggtccaggtacgtcatctccggcgggaacaccagctggctcaggtcgaagtcgaggtagttccacgacaggtccaccttgccgatgggccggccggcggcgaacaggtgggaggggtcgcccgtcagcttgttgtgggagaggtccacggtgttgatctcgtcgcgcgcgtcgtcgcgcgggatcgggcccgtcagctggttgtacgacaggaccagcgaccggaactgcccctgcaccagccccgccgggatgctgcccgtcagctggttgtgcccgaggtccagcgaccggaggctgggcaggtcggcgaacgacgccgggatgccgcccgtcagctggttgctggagaggtccaccgagtcgaggccgcgcagccgcgccagggactccgggatggcgccggacacgttggtgtgggagacggtcaggaactgcaggttggacagcgcggccaggcaggccgggatggggcccgtcagccccgccagccggaacagggtcagcgacatgagctccgtcagcccgcccaccgccgacgggatttgcccgcgcacgtcgtccgcgccgtcgatgaacacgttgttcacgcgtccggcgtcgttacaccggaggtggtcccacgagcagcagtcgggcgacgctggggtccacgtcgacagcgttgacgggttccctagcgcctgcttcacgctcaacagcgcctgcaggtcgcgaggtgagcaagaccgcgccggcgctgcggacgcagccacgagcagcaagacagcgaggagggtggtggacgccatgtgctcgtgtgctgggagagctggctctcgtctcgagcgtggcggaggcggggggcgagggcggacgcgaggg

SEQ ID NO: 270716 - DNA, 774 bp, Zea mays
cccactcgtccggccactcgtccgcccacgcgtccgtgatctggtcgcgcgcgtagtcgcgcggcatcgggcccgtcagctggatgtacgacaggaccagctaccggaactgcccctgcaccagcctctccgggatgctgaccgtcagctggttgtgccccatgtccatcgaccgcacgctgggcaggtcggcgaacgactcctggatgccgtgcgtgagctggctgctggagaggtccaccgagtcgaggccgaacatcctctccagggacttctggatcgcgccggacacgttggtgtgggagacggtgaggaactgaaggttcgacagcgccgtgaggcaggccgggatggcgcccgtcagccccggcaagccggaacagccgtcagcgacatgagctccgtcagcccgcccaccgccgacgggatctggccgcgcacgtcgtccgcgccgtcgatgaagacgttgttcacgcgcccggcgtcgttgcatcggaggtggtcccacgcgcagcagttgggcgacgccggcgtccacgtcgacagcgacgccgggttgcccagcgcctgcttcacgctcagcagcgcgtggatgtcgcgcggtgagcaggaccgtgccggcgccgcggacgcggccacgtccagcgagacggcgagagaaggtggtggtggcggtagcggcgcgagctcgcggcaggcgaggagctcgagcgctgggcacggcggcggcggcgcgagcccacgcgtccgcggacgcgtgggcggacgcgtggg

SEQ ID NO: 270717 - DNA, 488 bp, Zea mays
gactccgggatggcgccggacacgttggtgtgggagacggtgaggaactggaggttcgacagcgccgtgaggcaggccgggatggcgcccgtcagccccggcagccggaacagcgtcagcgacatgagctccgtcagcccgcccaccgccgacgggatctggccgcgcacgtcgtccgcgccgtcgatgaagacgttgttcacgcgcccggcgtcgttgcatcggaggtggtcccacgcgcagcagttgggcgacgccggcgtccacgtcgacagcgacgccgggttgcccagcgcctgcttcacgctcagcagcgcgtggatgtcgcgcggtgagcaggaccgtgccggcgccgccgacgctgccacgaccagcaagatggcgaggaaggtggtggtggtggtggaagccatcgcgctcgtgtgctgggagatggctctcgagtgtgttggcggacgcggggccggacgcgtgggcgaaagaaaggg

SEQ ID NO: 270718 - DNA, 701 bp, Zea mays
accgtccgaattcccgggcggccgccctttttttttttttttttttttttttttttttttttttttttttttttttgggaaaaaatgattttccatttagtacgtaaacatcctttttttttcatacattaggccgatcggatcgagaccagatacacagcacactccaccagacagtacacgtacacagctgtcatttcgtacacgcttaactgctcaaagatcaaccgcgcgtgggcgtggctaagcatattagcaccgccaccacgcggccgtacctttttttgtctatagctaaaccaggcaccgtaccgtcgtccttcaagattgggacacgaaaagaacgccggcgagggagagcagagcagagtatagaaaaccatggccaccggctcactcactccaggtcctggcatcccgcgagcggggtccctttgctgcactggttgtgcgcgtacggcttgcacccgtgcttgatgacgccgtggcccttggggagcgggccgcacaggcggttgtagctgaggtccagcttctgcagcgtggacaggcgctccagcgacagcggcacggtgccgcggatgaggttgtgggacaggtccaggtacgtgagctccggcgggaacaccagcctgctgagctcgaagtcgaggtagttccacgacaggtccaccttgccgatgggccggccggcggcgaac

SEQ ID NO: 270719 - DNA, 384 bp, Zea mays
cataaatattctattagtataggtacattattttatttttaaataataaaaagtagaggaggcattttcttttttccatctttatatagtacgtaaacatccttttcatacatcaggccgatcggatccataccaaatacacacagacagttcatctcacgcttcagcagacagtacacgtacacagcgctgtcgtttcgtacacgcttaactgctcaagatcaaccggccgcgtagctagaccaggcacgcggccgtacgtgctttcgtctatagctaaacgcctaaaccaggcaccgtcgtccttagttccttacacacaccacgatcgggaagaacgccggcgagggagagcagagccggacgcgtgggcgaaagcgtgga

SEQ ID NO: 270720 - DNA, 426 bp, Zea mays
accgtccgtattcccgggcggccgcccttttttttggttcctgaaaataatactgacagatcatgagtcctctgcgacaggtcacacaacaaaccaccatggttttgcaatactatgcatcacatagcatgttttcatccaagcggcttcatcttaattttttttataaagattccggtatccaaacatccgggcaatcatctaagaggtgaatcataagacatgctctggaacaagaggcgcaatctaagcttgtgcggaatcagttcccctttggtgcacccttctttgcagcctcggcagcggctttctctgcttcaatttcggcaacatactcatcaatcttagccccttctagttcatgaaggccggcctcgtgtgtcatcacttgaatttttatgttcttgccaccactcttaacaacct

SEQ ID NO: 270721 - DNA, 501 bp, Zea mays
aaacaaaaatacacggcgttccctatttctccatttgcggctccagctttccatacaggtataaagccaaaaaccacagaagaaaagcaatccagtaaaccaaactccagcacatgattgtcgaccaaaggaagcatcacagaaacaatatcaataatgtgatgagcacaacactaggatgcccatgtaaagacagaacgtaaattttagggcaagtcactgggatcggccagtgccacaacgtagaagtttgtccaccgattcagcagaattaacttgacgatacaactagtttagatcatgtcggaagcatcttcaactgctctgagccgactcagtcttggcttccgccgactcagtcttctcggcctcagcagcatgtccggcagcttgaggtttcgatacttcttcttcatcactatcatcctcaaaatcatccattcccataccacccattccaccaagaccacccaagccagccatatcacccggacgcgtggg

SEQ ID NO: 270722 - DNA, 391 bp, Zea mays
tgcggccgccctttttttttttttttttttttttttttttttgggcagtttttatagacctcgccaaccctgtgattgaacgacgaagcgttaacagcgattgcacaggtctgaccctgcgaaatccatgtgttgctgtatgcattgctataatgagacatcttgcaggtgttacccctggagtgggaccaactctccctgtacccaccaaaccagctctaatcagaaagtcatcttctgcctcatccatttcgtcgcggaccatttctctcctttcagaacagggcacccgctgtggatactgtttgggtctgtgttaccatccaatcccatgctccaaaagagaacagcgtcccctttgtttggcttaacacacaatcctttgaccacg

SEQ ID NO: 270723 - DNA, 664 bp, Zea mays
cctctaatcaaaccataatttctgactgcttgcaggatgtgttctcgcattcacagatatgttagcaacaccttcgcagcgagtaatcagcatagcaagcattatatgctatttagtcgttcttaaaatatactggatctcaaaacttagtttacagttgctgcgatctcatgagtgctgaatagatggtgcccaaggtacaaaatctcataacataatgtcttcactcttttaagtgggagaaactagctaacatattcgaccttgaatttgctagctccacattcaagtcaagtgctgtttcaaatgaaagttgggcggttcttagttttggggataccaatcccccaaagactgataatgcttttgatctcgctctttgaacatgattgctagcatcagcacctgtagacagtgttgtggtgtttgcactttcatggtttcccttttctggggtagtaactgatcctcgatgcctcatctttggctcagtaaaatccctctcactgagatcataggtggagtgacattcttcttgcaaagaccattttgatattgcaaagtgtggttgtgactatgatgatttcaggccatcatgatcaacaatttgaagcttagtggcagcagactgctccttgtgatcaaacagtgtactcgaaacgct

SEQ ID NO: 270724 - DNA, 419 bp, Zea mays
  unsure (1)..(419): unsure at all n locations
gcggccgcccttttttttttttttttgcattgtaatcacttaccatatttttctttaccgntaataattngatgtagtagttgtaatgtaatcatgttaatagaaaaaaaatcggattcttactagctactatcgctttcacacctctgctgtaacatctccagtttatcgttatctgacagtggtactccctcaaaccttctataatggggaagcttagacagtctgctctttgataaacccctcaaaaaacatttaattcatgtaacacagaaacattggggtttcttttgctcccggaccaggtagtatgctgcgctaatcaattcaaccgaaaatgtggcccaagctgttggcccacctgatggcccagggctgcatcatgcttccacctctcactactaggcggctaggcccta

SEQ ID NO: 270725 - DNA, 443 bp, Zea mays
gcggccgcccttttttttttttttttttacgaacatttttttgggtttttttggatgggccatgggatcttacaactaaagcagctcttctcataattcaatagtcaatacactagtcataacacaaattacacgatacttatgcctccaaatacaaatacatgtaaccaaatggcagccaaaagaccaatcgttaaggtatctcaatatacatacagtagcggcgctaaccaacaatcgttcccaggaaaagcgatttactcctaccaagcggcctcatcagttcttgcagataaaaattgacctacccagggtgattggttactctttaatggtcaccgcaaggtgtcttacttagtaaataactgcgaccaaaaacccgcctcggggaagagcagctgttgcagaaaaggtccatgtcttcattagttcgagatatctcc

SEQ ID NO: 270726 - DNA, 1421 bp, Zea mays
cttatcggtcaactcgggtgcgtcggttgaagggggagagacggttacttcactgggagtaacagcaggtgcatccgagctactggtatcagctgcaggagcaagagcagccgcagccgcagcatcagggctgcctggtgcatctgaaactgcaactgctgtggcttcctcgttgattggatgcgatgtgcctccctcactcccaggtgctgctttagcttcctcactgctgggagctgctgtgccttctgcagctgcgggagctgcagtgccttctgaagtggtgggagctgcatcaaccactgtagcttccaatggctttgcctcgtcgctgccctgtgatggagtaacttgattcatggggattccttgtgccccaggagtaccttgagccatgggagcaccctgaaccatcggagcacctataggcccatttgaggcttttactgcattggggaggccaggttttgctccagcctttttaatcacgatcggaggtgcagataggggaggcatcccgggaggaagtatttcgatgggaggctttttctcagtttcccccaagcttgtgagctttggatcctcgagagaagccaagaatgcggcggcggcatcggtttttacagttggtgtgtgatccagttccttctgtagcatcttgttccacgttataaccaagttccttaatgatggacgaccatgggcttgagcatgtaaaacagcctcagccaacattcctgtgtcctgccatgctttctccattagagcattatctcccaaaactgcagcagcaaaggctgcttcgcgtccatggccagctgtgatcaaattgcttaccaaacccgacaatctagtaagctccccatggtttgcaagacggagtgctaggcctcgcagcatctgtccatggagggctccctttacagaagctgcagccgctaatctctttagaacctcacgagcaatgtcagattgcccagtggcgtcagctgcatcaataaggtcaaagaactccttgacaaatttcactattccctgcacggcatctgcaagactttcctgcttagcttgcttagctaccgccaaattaagaatctgtgtaacatcagtggcatcagcggcagctgtttcttgtcccacatctcggctattgctcattgtcaatagacaagcaagtgctcttttcaggtcattgctctgcattgcaaggtcgaactccagcctcttagatattccaggcaaatggagagcttcagtggcatagcccatacccagcataaactgagccaggtcatcgtgatgctctcggccaagtctagtagcccatttcacagcactatcagggtccccatatgctgcaaggcaacgacatcttataccaggatggctgagtggcaaggcatgcgcacacatatacctgt

SEQ ID NO: 270727 - DNA, 1047 bp, Zea mays
  unsure (1)..(1047): unsure at all n locations
tctttttttttttaatatttttttttttttttttttttttttttggggggccagcaccccagggggcctcacaaatcatcactaccagcaagctcaatgtttcttacacatcaaaaatagtagcacaccatgaacatgatacctttttcacgggtacaacaaaataacatggagcagagcttaactaacaccaatcacgcattgcagttcaaacaaggaacatgccattccgggctctcattttttccctgacactaggatggaactaacagtttaaagtttataaaacgattatatttttgccaaaaagaatcgagatgatcagatggataaaaaatcctgctgaaacttttggagaacagttccaacgaacacggattttactgctgggcacattgcacccttggttgagcatcctcctcctcgtcttcatcgtaggcttcctgcttcttctgctgctgcctgcgcctcatctcctcttcaatgttgacatcgtgaagggtggtctcctcgcactggtccagctccatgtccgacagttggctccctggtttcggcggaaggatcttctccaacgatcggcactgggcaggggagagcgcaccaggctcgggaaacaccacgttgaattcaacaaacagacggcccttcatgaaaggacggccatgctgaggcataccttcatcgttaatggccttgtgttgacctggtttaataacctccccggggtcagatttgatcagaagctgtcgcccatcaacgatgagtaagcacacactggaagccacacaatgcttcggtgagagagattgtgtgctcaacatataagtcatcgtacatcctcttcaattctggatggtctttaagttgtaacaccaacacaatgtctcctgtaaccgtatcaggagcttcatcagcttgaccctggaatacactcttntggttatgttgcatccctctctccacatgaacctctaacaccttcttctcctggactacgttgtttcctatacagcttgggcatttgtcgttgtcacttatgatctt

SEQ ID NO: 270728 - DNA, 482 bp, Zea mays
atgaatggcgctcggtatgacacctacaaatagttgggggtcattcatacatacatcagtcatggaagcaatgaataaaaacccaggcctgcaaaacaacaaggaagcagcgaccaagcatgctatgctgctgcgaaggccttccatggtacaaaatctcatacgaactgaaccagcagcggtcaagcgaccattcattcatcatctaaatatataagtcagcccagccagtcgtatatccagatacaacaaccccggcaacggcagggcgctcctccacgcatgcatgcatccgcgagcgacgtcggtgcgcctcaggccatggcgatgcagacagcaacacagctagctgccttacagccttagctactagccactctctctaacgcagttgcccgggagaaggtacctgtaccgctcgttgggctccagcagataggccgggagatggacagcggaaaacgtgctcgggataggcccca

SEQ ID NO: 270729 - DNA, 843 bp, Zea mays
cccacgcgtccgaacgaattgtttgtccaggagaaggcccccgacgggattattctttctccccgcgtgctctctatctctcccctctttctctccctctgcccgacgactaggccgccgccgccaccgccccgccgccgccgccgccgccgtgcccaggtctttgtcggtccttgtccggcaacgagcaccctacagatggctgggaggcacaccattattctgatgcagccatctcaaaatagggcttctagaacatttatggattacaattcgattaatcatgcattggatggaatctgtgggctttatgaaaggaaaattagggatatcaacccaatgatcccaaacataacttatgacatcagcgacctctataacttcattgatggcctagccgacattagtgcgctggtttatgatcactcgattcaggcattcctgccatatgatcgacagtggataaagcaaaagttgtttcaacacctgaagaaattggctcagcggtagcacaactgttgtttgttctgatgccttttatccaacaagcaagcatgcgtgacaataggtgtccaatcagtggtattgggagttgtttcttgtaaactttgtaatgttacatgacagatttgctcccttgtattctggatgtttgactcggatttcattggtggcttgcttgtggttgtggtatgctaaacttgttttgtttcgcagtgctgggaatcagataacccttttgcctgttgtaaaaaaaattttttcctgtagatggtttctatgtattattgttctttagaaacatgccctacggccataaagtctttaggacaaggttttgtc

SEQ ID NO: 270730 - DNA, 1178 bp, Zea mays
ttatttcccttttttagatctgaatttttcgatcatgaattgggtgaagagaagaacggaactgatacgggggatgaaatcaaagagatcgttattgatgacatggatcctgtagtgttcaaggctgtgcttcattttatctacagggacaatcttgttaatgatgacgagttgtctgcatcaagctctgactgctctatctttgatagtttgtccgggaagttaatggctgcagcagacaaatatgagttgccaaggttaagattgttgtgtgaatcttacttgtgcaagcatatttctgtaaattccgtggcaactactctagcattggctgatcggtaccatgctatggagcttaaatccgtttgcctcaaatttgctgccgaaaacctgtcagctgtgatccggactgagggtttcgactatctcaaagacaactgcccatctctgcagtcagagatactgcggacagttgccgggtgtgaggagccatgtagcagcggcttgaaaagccagagcgtgtgggcgcagctctctgacggcggcgacaccagcgggcgcagggtgaggccaagggtctgagacgcgatcctgcaagcactaacctttgtaatcaaactgtggtagtgtaaaatggatacagctatttgaattttaatctgggacgactcttgcaaattgcaatagcatgattggcatctgcttgtttcgtttttcttgttacggttccgttcacagactggttacttttttacttttcaggatgttttttcttaaccaagcaaaaactactagtcgttcacaacttctgatcgtgtcgtcatcaacgaccacgtgcaggcggacgcgatgaactcacagaagggcgacccgagttgacggtggtttaaacagacacaatgaagctaatcgttcacaacttcagtacaaaactacacaggcaagacactgcctgatacagtgcgatagccgctgccatcctctcttcgcttcgcgggtggcaacccaatgccttgaggttttgctcaaccaaatgtcgccaccaggaactccttgtaaacgctcatgaacttggccacgaaagcttctagatgaaaaatagcctttgatccgaggcgcatcttgtgttcataatgtgcggccccgtgacagatctcatgtttcagcccacgcgtccg

SEQ ID NO: 270731 - DNA, 1747 bp, Zea mays
cccactcgtccggccggccctgccttctttttttcccccgcgaagcagggcgaggcaggcagcgtgtataaactgagcgaacgtgagcggtcttcgccttgtcctccgactcttccattccattctattcccgcttccacacgtcggtcggcgcccttcgcgatcgtgtcgtttcttcccgcagcctgcctgcgtgtggggtgatggctaggcacttcaagtacgtcatcctcggcggcggtgtcgcggcggggtacgcggcgagggagttcgccaagcagggcgtcaaccccggcgagctcgccatcatctccaaggaaccagtggccccttatgagcgccctgcactcagcaagggatacctcttccctcagaacgctgcaagactgccaggcttccacacgtgtgtgggcagcggtggagagagactacttcctgaatggtactctgagaaaggcattgaactgatcctgagtactgagattgtgaaggccgaccttgcttcaaagactctgaccagtgcagctgcggaaaccttcacatatgagaccttgctcattgctacgggctcctcggtcataaagctcactgattttggtgttcaaggagcagaatccaacaacatattgtatctaagggacattgcggatgccgacaagttggttgcagctatgcaggcaaagaagggtggaaaggctgtgattgttggaggtggttacatagggcttgagcttagcgctgccttgaaaatcaacaacttcgatgtgaccatggtgtaccctgaacccggtggtgcatgcccccgtctctttcactgctggtattgctcatttctatgagggctactatgctaacaaaggaatcaaggttgtaaagggcacggttgctgttggtttcgacgctgatgccaacggagatgtcactacagtgaagttgaagaatggaagtgttctcgaagctgatattgttattgttggcgtcggcggcaggccattgacgcgtctcttcataggccaagctgctgacgagaaaggtggactcaagaccgatgcattcttcgaaacaagtgtagccggggtatacgcgatcggcgacgtggccaccttccctctgaagctctacaacgagcagaggagagttgagcacgtggaccacgcccggaagtccgccgagcaggccgtgagggcaatcaaggccaaggagtccggcgaatcggtggccgaatacgactacctgccctacttctactcccggtcgttcgacttggcgtggcagttctacggcgacaacgtcggcgacgacgtgctgttcggcgacaacgacccggcctcggccaagcccaagttcggcagctactgggtgaaggacggcaaggtcgtcggcgtgtttctcgagggcgggtcggccgaggagaaccaggccatcgccagggtcgccagggcgcagccgccggtggccgacgtccaggcgctgaagcaggaggggatcgagttcgcttccaaaatctgagctcttggaaaggtgtaaaaaaaagaaacattggtaccagttttagctgatttctttggcaattctactttgagccttttcagaccacttgggtgctttgttacacagtagttcagattagttgttagcccctccctaataatttggccttcgatgtgatgttgaaagaaccaccgtgggatgacgatcctattaataatgcatgtgatttgtagcgtcaaaaaactaaaaaatataa

SEQ ID NO: 270732 - DNA, 975 bp, Zea mays
gaggcactacccactcttgtatcccaggcctgcggcatcgtcgccggctgggcaccacttctcctccgctagacggtccaccaagaaatctgccccaaaggcgccaatgggctcttccattcctgccgcaaaggcgctaatagactcttccagagagcccttctatgtcatccgcaagggggatgtcattggcgtctataagaacctcagtgattgccaagcccaagccagcaaatcggtactccatccttcagtcactgtctacaaaggctattctctgcgtaaagaaactgaggaatatcttgctgcacgtgggttaaggaacgctgtctattccattggtgcagcggatgcaagtgacgaattgtttggcgatctggttccctgcccttttcagcaacctgatgagaacacacaatctattttgaaaatgtcacagggacaggagatggaaacaagatcatcagagcatcccaaagttgctgatctggaaccattaccagatagcgaactctcttgtattcttgaatttgatggagcttgtaaaggaaatcctgggaaatcaggtgctggagtcattattcggcggttagatggatctgtgattgctgtactacgtgagggtttgggtattatgaccaacaacgctgctgaatatcgtgcattgatcctggggctaaattatgcttccaagaagggattcaagtatattcgttgtcaaggtgattctaagcttgtctgtaaccaggttcatggtgcctggcgtgctatgagcgataatatgtctatcttgtgcgatatagccaaggaacttaaggaaacattccttacatttcaaatcaatcatgttttgagggaattcaactccgatgctgacgttcaagctaactttggatgccaacttgctgttgatgaagttcaagagctgtccgtttgaattgccattggcagagaaaacaagacacggtgcttgag

SEQ ID NO: 270733 - DNA, 694 bp, Zea mays
tcgactctcatcctctcgtgttggctgttgctctgccaatgccacctatggacgcatccgctacactccacctcctccctctcgtcccagtcccagcggccagcgctcatccatccacccccatcctataataaaacctccgaatgcgcctcgcgtgccccgtcctcctcgtcgccggcggagccgcctactatcgcctggagaaggagcgccgcggggagcttttcccacggccggctgccgtctgaccctccgagatcggaagcggcgccggcgccggccggcgatggcgatcccgctcgtgctcgtcgtgctcccgctcggcctgctcttcctcctgtccggcctcatcgtcaacgccatccaggccgtcctatttgtgacgataaggcccttttcgaagagcttctaccgtcggatcaacagattcttggccgagctgctgtggcttcagcttgtctgggtggtggactggtgggcaggtgttaaggtacaactgcatgcagatgaggaaacttacagatcaatgggtaaagagcatgcactcatcatatcaaatcatcggagtgatattgattggctcattggatggatattggcccagcgttcagggtgccttggaagtacacttgctgtcatgaagaagtcatccaagttccttccagttattggctggtcaatgtggtttgcagag

SEQ ID NO: 270734 - DNA, 376 bp, Zea mays
caattacggagtataataataataataaaaaaccccgaatccgccgcgcgcgccccgtcctcgtcgccggcggaggcgcccgccaccgcccacagcagcctatcgccggagaaggaacgccgcggggagcttttccactgccatctcccgtctgacccctccgagatcggaagcggcggccatggcgatcccgctcgtgctcgtcgtgctcccgctcggcctcctcttcctcctgtccggcctcatcgtcaacaccatccaggccatcctatttgtgacaataaggcccttttccaagagcttgtttcgccggatcaacaagttcttggccgagctgctgtgggttcagcttgtctgggtggtggactggtgggca

SEQ ID NO: 270735 - DNA, 1755 bp, Zea mays
gcggattgggctttcccctccgcctccctcccctcacaaaaaggcggcagcacagcgccacccctcctgtcccgccgagttcggagcgcagcgcaaggcggggggaggagcaagaagccgccggcctccctcctccggctcaccaccaggcttactccgcaccgcgctgccacgggtaggagcggcgtcaaattcgggattcccaagcggcttcagcccggaggttcagccaaagctattttctaagaaaaatggcggcaatgatggtggcgatgactgcgaggagcaagaacagcatattacccgtggagaagaagcagggctggtctattcagctaccagagctccggttcccttgggattcacatgaagacaagggtttctctctgagtctgcaaggctctggaccttctcatggcggcctgtttgctagcgggggtcttaaagtgtcgacaggtgcgccagcagtggcgcccggaccgggtgacaaggatattaagattccattcactgatcattgtatgaagtacgtgtccgaggcagttgggtaccacgttattagcactgaagcggagccagtggaggaggtggtggatgctaaggcaaagaaggcagccaagaaacgtgggctgcagctgaaaattaagattgggaacccacatttgaggaggctggttagtggagctattgcaggtgctgtttccaggacttgtgtggcaccactggagacgatcaggactcacttgatggttgggagcaacggtgactccatgacagaggtgttccagtcaatcatgaacactgaggggtggactgggcttttccgtgggaattttgtcaatgttatccgagttgcgccaagcaaagcaattgagctttttgcttttgatactgccaagaaattcttgactccaaaggctgatgagtctccaaagaccttcctacctccatcacttattgctggagcacttgcaggagtcagctcaaccctgtgcacatatcctttggagttgattaagaccagattgacgatagagaaagatgtctataacaacttcctccatgctttcgtcaagattttacgagaagaaggtccatcagagctctaccgtggtctgacaccaagtctgataggagtggtgccatatgccgcgactaattactacgcctatgacaccctaaagaagctctataggaagacgttcaagcaggaggagatcagcaacatcgcaactctcctaattggttcagccgctggtgccatctccagcactgccaccttccctcttgaggtggcccgcaagcaaatgcaggtaggagcagtaggagggaggcaggtctacaagaatgtgttccatgcgctctactgcataatggagaaggaaggggttggcggcctgtacaaggggctcggaccgagctgcatcaagttgatgcctgcagcaggcatctcgttcatgtgctacgaggcctgtaagaagatcctggtcgaagacaatgaggatagtgagtgaagctgaagcatgtatgcccctgaggaggggtatgactgatgtgccaggctagaagaggtttgggttgggttggggagtataccctagtattatcaactgatgaaaatgtagatccaagatatttgaacgccctttagatcataatttggttcagttttgtgttgaaatccataaacaatacacttacttgatggtgcatgttgcaagggggcaattttgtcatgtggacaggactggttct

SEQ ID NO: 270736 - DNA, 494 bp, Zea mays
gcggccgcccttttttttttttttttttttttaaaattcggagcattaccaactccaaaaatatacatgatccattgaattatctcttctctccttcttgaaaaattgagtatagaaatacattaattattatccggttacatggaataagcaaataaaaaataaagaagctacaggcaagtaaacaaactgaacactattttaggaaacaggctacacgaggcagttcctcagccttctctacaagattttgcttcgccttgaaatcaagctctgactcccaagactacaagcaataaactcaatttccactaaggtgcttggtggtcctcactatgtcgccgagaagttcagcgatgcaatcattcttccatgtcatgtccaagatctgctcgtgctcttgctcgagtctgataaacttttcttcctccgctgctgctgccgctgctgcaactactgttgtagctgttgtgatgctcattaaatcgctcaag

SEQ ID NO: 270737 - DNA, 854 bp, Zea mays
tcttgttctagatcgcgacggccgccctttttttttttttttttttttttgccgtcctttttttttttttttaatcaacacaaagacatccatcgttttgcattttagtttaaacaacttgggtcaaacaaggtccacattacatctcatagatttatcttgcaaaagaaaccaaaggcaataattaaactgcaaagctactaccatcaggttctatcctggcttccaacggtgtacaagaagccattgcctacagtaacttgtacagcggctggggccgatttgagtgcttgcatctggatgatcaatatgctggtgggccagcaaaggaataacgggtggacacaggcacacttgggccactaacccttgtcaaagctggcctctgaatgccctcaccataaacactactcggcggctcataagttgtctggtaggatgctcccggattgaggtccatcccgcgtgtacagactttgtaagaacggtacagctcatccacgcgtatcagaccgtgcagcaagctctcctggcagtgcttggtgatctcttacagttacctcagctgcagttctttcgtgcataatatccatatgaggttgatggtatggagacctagtagccacttggtgatagtaattaagaggaacatgttgaggctcttgcatatgataaggatttagcaccaaaccacgtcgaggctcatcaaaaagtggcggatgtaatgaccgtgtcatcttgtaccgatcttcaagaggatgtgcgtggacattaataggtgcagccctttccggacgcgtgggcggacgcgtgggcggacgcgtgggcggacgcgtgggcggacgcgtaacgaa

SEQ ID NO: 270738 - DNA, 529 bp, Zea mays
gggcaaacaagcgtgtaattcttaattatcattgtattattatttttcctttacaacacagatatttatctagtcaagaaaaaaaaacaatgattcttcccaggcttcattagcctgcagagatatgtaacacgatcatgtaccactgcctagaagatgtagcaagtgtttgccacaattttactctcgcatttgccgatgcagccgaagagggagttgttgacctagagtctgcctcatggagatggaacgagactagttagatgttcaccggagaaatgacaagccgccagggttgccctaggctacgctacgctatgcatgtatgacccagctatatatatgtacagagttccagcttcagtccacatgtatgtatcacgacagtatcgggtccggttggtacttgaattcaggcacatggtcgagcctttgcctgactttgagaataccggtaccgagctgcatgggaatgcccatgataatgcggtcgcgtgcgccctctatctgatcctgacgaccactgttt

SEQ ID NO: 270739 - DNA, 1143 bp, Zea mays
actggcaagtaacttggttctagttaaaataatctcatctgtaccagcacttatttttccttggtgcaaaaagaaaaaacaggcctgaattgccacgcagcaattctcgtttcattactacgtacttgacaacaactacaacagcaactggtcacatccttcaaaaactcttctcccctcccctgcgtcgcacactcgcatcgcatcggagtggaggaagagaggccatcaccatgttattcgtacgtcgtcctgccctactaccactagcagcaccggtagtctgtctctgacccatcctattcctatgcatgctcccgtgcggcacctcagggatcagcctgtcgtcgtcgtcagggctgcgccgctttgcacgcccccgccgcgacggcctccgctacgctgaagaagaggcggcccgacccgaagctctcgcccaccgccgagttgaacatcctctccgccaccgaccccaccgggttggcaagcaccagctcgatgtttcttttgtccaggactttcttgagctcggacagcgcgtctagaccgctcgtgtcgatcgccgcgacggcgcccatgtcgaggacgacgcatcggatggaggggtggttggacttgagcgcgcgctcctcctcgtcgcggaggtagcgcatgacccgctccaccaggtacatggagttggcgaagtagacggcggactcgacgccgacgacgaggaagcccggcacgcggacggcctcgcggtactgcgccacgctgcggtagctctgcgtccccgggacgaggccctccaccacgacgttggggcgggtgacctgcagcaggaccttgaagagcgagatgccgacggcgacgcccaggcccgtctgcacggacaccagcagcacgccgaggaacgccgccacgcacgccaggaagtccagcttgtccaccttccacagcctggcggcgccgcgcacgtccaccagccccaccaccgccgtgatgatgatcgccgccaggatcacgttcggggtgtagtggaacagcggcatgaggaacagctgcgtcaccagcaccgccgccgccatcacgacgttggacagcgccgtcctgcagcccgcccgcgtcccggcgcgtggtcgacccggattccgaccgtac

SEQ ID NO: 270740 - DNA, 634 bp, Zea mays
  unsure (1)..(634): unsure at all n locations
tgcgggcgccctttttttttttttttttttaagcaggtgcaacgggcaaaatgatttatatttctctttttttaggcatatatgtacgctgtgctcaaacaggttcggcaagacatcagagcagctggctgtcgtctgatgaggccaggaggaattcagcaatggaatcgagggctggtgcactaacaaacagtgcaatctaagactacgatccggtgatagaagacaccctacacccctacaactcagctctgngtgtggtcgcgcagtctaaacccctactagggtacaaacagcagttcaggcagcccgaccgccgtagaatccatgagatacatctgtacaaggaggcaggtaccagctcccactttcctggagtgctccacctccgtgggtgccttcaacctgaagcagagacaccagacagactctcccacaggttaagcccccacagaccaaggaaagcatcagagcaccgcttcgataccgaaaaagttatctaggtctccatccaccatgacctccagctgtatgtgaaactggaggctccacagaatgtctcgagggagaatagttatcagatatcctaggcggcctagaccagcctgcacaaggccttggcggaggatctgat

SEQ ID NO: 270741 - DNA, 568 bp, Zea mays
cggccgccctttttttttttttttttttttttttttttttttttttttttaaagggggccattagcattgactattattgaatattaatttgggccaagcccacattaatccaacatgcagatcatcaaaacgcaccaccacccatggtcacagtacacacctgaacctatcccagcagcttcaaccgaagcgcagcaacatcaccgcactctgcaagccgggacaacaggcgtgcacttggggttggggatggccctgaagtggacgacgctgttgccggtcagcctgcggcggcctctgcagtcaggaaggccggaggacgcgtcgctgccgccgccgccgccctgctgcaacggcgcgagggtctcgacgacgtcgctcatgagcggcctggccttggggttctggctcaggcagtagaacgcgaggctgcaggccttgtgggcggctctggccgagtactgcccctccagtctcgggtcgatgatctggagaagccgcctcttgtcgttcagcttggggagggcccagtcaaccaggctctgctccctgctgggccgcgacttg

SEQ ID NO: 270742 - DNA, 425 bp, Zea mays
tgacgatgtactcctcgtggaccagagctcaaaggcacagggaggtcagctgtgtggcagacccaatttaagggaaatagtttaagacctcttctttttcaactcggatctgccaccgtctgttcctttccttttcgatttgcctgtttccttgtgcttatctttcttgtctgtcttgggcccggtggactgcacgctgataatgccgcttgcggacgccttggtgttctgcagggccttgtcgatctcattgtcgtcaccaattgcatacttctgcagaatctttgggtccacaggagcttcatttgcgggtcttttctgttcctctacttccttggctggttttgcaagggccccatccatcgatttgctaagagggggcattttaatcttttttaggcgagggaagggtggtttgatttttt

SEQ ID NO: 270743 - DNA, 1023 bp, Zea mays
tcccggggcggccgccctttttttttttttttgagaatgtgagatagaaagactaatgttataggctaaagctgctcatcggtattttttttcctgtttcaagctactcttgtcattacaaatttgttgaggcttataagttggattaaataatgcactttcaccaagttgctatcagtatacgctgctacaagctaactctgcgagaagatgcatcaaatcagccaaaaataaaaaagaaagaatatcaacgttcttgcatgctcgttgaacagctagctatatgagagctttgatgccagcttgttgcatctcacgcagccgccagactgggtaataggattcttcttctggcacctcgtcgctgtccatgagttgcatagcccacgaaaagaagacggtttggatggtatcctgtcctccttctgtgacttgtccttctcgatctcgaacacagtatatctgctgtgtttggaagcgtaagataattatgggtgaagatccaaacatctttgtttccaatacatcagcttctgaaatgtgcaggattttgtgatcaaaaaatattccctgtgatgcataagcttctctctctcctttgcagcgctcaatcacttccttggtgcagtagttttttagagtctccgcatcaccctttgaatatgcagttaaaactggcttgatcatttcgtggacatcagcaacaaaatcagaaagagaaaaggacgggtctcgttgccgaatttccctgaatgtcaccgcagctgaggtttcttcaagcaaagattcattcaagtcttgaattttctgaaccactggattgtcacttgtctcccatctttccctgacatcttcagctacctcttgtcccttggttacaacaggcttggtgtattcatccactcttctgtagaccgggtgacctcggatcttattcttaaattcttcccatttttcacccaatactgtcttttttgttggcgtaagaactaaatcggttcttgtactcttttctactttagc

SEQ ID NO: 270744 - DNA, 394 bp, Zea mays
aaaacaatatacatgcatattacagcgcttggaaaggattataccccaggtatatataaacaaccacatggtttgatagggacaatgcagtaatttcatcaggtgttgtaattcacctcgcactgtaatggcataccagtattagactgattttttctcatcgtcataacaattccgttttctttttgaaacagaatttaattgttgtactcccgttgtgatacaaacatttagattctttaattcgtcgactgaggtgcctgccctacaaacagtccgggtgtgataaaatgccatgagacctggatatctacgcggtgggatcaaggaatccgacaaggcacttcttcaggaggaactctgcatttacccaagcatggtatttattgaacaa

SEQ ID NO: 270745 - DNA, 414 bp, Zea mays
cggccgcccttttttttttttttttttttttactcagaaaatctataatttttctcaataagaaaaacacctctttgagggggtcttaaacttagcccgggtgaatgcgttgtgtgggataaggactactatatgagagcacctgtataatctaatctcaatacattctcggctcaacaatagcgttacccaatcctgtgccttccagaagtacaaaaatgtaatgaacaccattgtggtgaacattttaaaagagttaagggtaaaaggcatgtttctcattctgaactccgcgaccttttctttcgtggtctcaactttggtttcttctcaccaccagctctccctgttgccatgtgcttccgctttgctgttgttgcatcagcatccccaaccattaagtgctcataatca

SEQ ID NO: 270746 - DNA, 374 bp, Zea mays
cggacgcgtgggcaagcctgtcgtcgtcgttaacacagagagagggagctcgtccatgtcctcctgattcctcttggcgatcgagggagtggccaaccggtgataatctagctagccagcctcgccatgcctcgccagaggaccctcgcctccgcggcggcgggcgggcggctgctgctcgtggtggcggcggtcctgctgtgcctgtccgtgcctccggggcgcgcggcacccccgggcgcggaggtcgcggagttccctgggttcacgggcaaactcccctccaagcactacgccgggtacgtaacagttggtcgacatgagcaacgaaagaaacacctgtactactaccttgccgtctctgaaaggaaccc

SEQ ID NO: 270747 - DNA, 565 bp, Zea mays
cttggttctagttcaaatcaactggctccaaatcatataggcttccataatggtatagcatctcagactggagcacaatatgttgatctgaaccatgaagccagatctagttcatccagacatatctcaccagcaaatttcaatcataccggaactgttgatgcacaacctatctcaaaacaatacatggtgggtattcttcattttgatggtgcttcaaaagggaacccaggtaaagcaggtgctggagctgtgcttatgactgaagatggaagagtgatatctcggcttcgtgagggtcttggtgtcgctactaataatgttgctgagtatcgaggcctgatcttaggactgaaatatgcgattcggcatggattcaagagaattaaagtacatggggactctcaacttgtctgcaatcaggtgaatggtgtttggcaaacgaagcagccgaatatgatggagctgtgcactgaagcgagaaagctaaaagagaacttccattcctttgagatcatccatgttcgacgggagtggaatgctgaggcggatcgtcaggcgaaca

SEQ ID NO: 270748 - DNA, 416 bp, Zea mays
ggccgacgcgtgggcgaacacgtgggcacagacagcagccacagcggagcttaattagcaatcattgactatgggtgcgctcttgccatggctggcatggttgctcgtctccctcgtcggcgtctacctcctcggccatctcgtgcaggcccgtcgtcgtcgtggtctaccgccgggaccccacccgctgcccatcatcggcagcctccacctgctcggtaaccaaccgcaccgctccctcgccaggctcgccatgacccacggcccgctcgtgtcgctccgcctgggctcggtgaccacggtggtcgccttcttcccgaccgtctgccgggagatcctgcagcggcacgaccccgccttcagcaacaggttcgtgccggaccccccgggcgcccacgccaggaacttcacggtgt

SEQ ID NO: 270749 - DNA, 590 bp, Zea mays
gcggccgcggccatgtcgtcgtcagcggcggcgcaggggacggagcacgaggctgacgcgtggtacgcggtaccgggcctcagcctccgcgaccaccggttcgccgtcccgcttgaccactccagtcccgagcgcggggacaccatcaccgtcttcgcgcgcgaggtcgtcgccgctgggaaagaatacatatctctgccttatttattgtacctacaaggagggcctggatttgagagtccccgtcccacggaagcaggtgggtggttaaagaaagcttgtgaagaccaccgcgttgtcctgctagatcagcggggaacaggattatccacaccgttgactccatcatctctttcgcaaattaaatctcctgcaaatcaggtggagtacctgaagcatttcagggcagataatatagttaaggatgcagaatttattcgtgtacgtcttgtaccagatgctaagccttggacagtcctaggacagagttatggtggattttgtgccgttacatatttgagttttgctccaaaaggcctgaaatctgttcttttgactggagggctcccaccacttggaaaaccttgcac

SEQ ID NO: 270750 - DNA, 1204 bp, Zea mays
  unsure (1)..(1204): unsure at all n locations
ngcggccgcccttttttttttttttttttttccattacgcacaataaatttaatttacttgtcgagcaagattcgaaacaccaagaagtagattctcacaaaaccatagtatcatctacgataaatttcttcatgtttgaacagtatcaggcgcacatttcaatttgtaatatggcgctcgaaaactacacttaacctgtccaaaaacattgggttaatcctcatctttcctgggagacttgaaattagcaacaagacgacgacgaccggcatcatgagctcacggtcgtatccatcttggaggcgtcttcgatgcccttgaaggccacacggagcttcctcaacgaggacacttttttcccgttgttctctgccatgcccgtggcatggacagtggtgtatgggacctctttgagaagctcaaacatggggatgctcaggtttggccgtgtcatctgctccagcacctccggtgactgcatgtacaggttgttaccttcgtgcgtcacgctggctttcgacatccgcaacttggggtgctcttcaagcatcttgatgaaatctgaaagagtagatgacgtatccagctcaacaagggtaccaggcccacatacaaggcaatctttgtctctgacaaactcagttactttaatgtgcgttccttccagaccgttgtacgtgagatagtttgacacacttttgctgcacccagaaataagctttaaggcttccaatgcacaagcagccgatataattgcattcgttgatgcaatggctgggattatatttttgacaacaccctgtgtcaaagaatatgtaacaccagaaataccgaaaagctctgctctctttaaagcctctgaataaatccactgcatatgctctgcatcatcgccatcaaaaggttttccaggatgaacctcatcccatttgatcaagtgagcatactcaatgcagtgagctgcagttcttggtgtctcggcgagagtacataaagggaacttaacctgtggaggaaaaagccatatgttgcattcaaagcaaggtgttgttccaggtataatgactctagcgtgtcccttgaagccctcagttccaccatctaccataggtttaaccgtctcttggagtggattgtcacttgagtcataatctaagaaaccacaagccacagaattgatgtagcttcgagcttcaattgaat

SEQ ID NO: 270751 - DNA, 466 bp, Zea mays
aaccatcagggaggccaatattataagccacaatgactgaaagtaagaacgttctgtccgaactagtataaatcttacattctccaccgggtacacgctccaaaactcagaatacgcacaataaatttaatttacttgtcgagcaagattcgaaacaccaagaagtagattctcacaaaaccatagtatcatctacgataaatttcttcatgtttgaacagtatcaggcgcacatttcaatttgtaatatggcgctcgaaaactacacttaacctgtccaaaaacattgggttaatcctcatctttcctggaatcctgggagacttgaaattagcaacaagacgacgacgaccggcatcatgagctcacggtcgtatccatcttggaggcgtcttcgatgcccttgaaggccacacggagcttcctcaacgaggacactttcttcccgttgttctctgccatgccc

SEQ ID NO: 270752 - DNA, 631 bp, Zea mays
  unsure (1)..(631): unsure at all n locations
ngcggccgcccttttttttttttttttttttttttttttttttgggaaataatggatttcttcatttccttataatttaatttcttttgcatcaaaagaaacgacagggaaatatctttctgcttttgcatctgaattattgggccccagattgcgattggaccagctacccgaatcagctatcagccaatctacaaatgtctgtctgcctctacatcttccttttcttggctcagtcattaagttgacacgagatacaaatcaactagttgatacaagatataaatgtttccataaaccaaccatgcatttcatgacacaacatgacattttcagactttggtttagtacaagtgatacttagtcctctgccatttcccagcagcctggccttcaatatcggttaagttgcccttgtaggggaattcatcaattgtggagtatagacgccccgagtccatattgtaatcaatagcatccgtgatctgcttcttcggcaaaagtttgaaccgcttgagtacttcatcaacgtgcaccccatgctcactctcgaggttcgctgggttcatttaaaaaaattcaggacctgcgtgtgcagatcagtatcggatgacccgctggtcaccggtgc

SEQ ID NO: 270753 - DNA, 494 bp, Zea mays
aattcccgggcggccgccctttttttttttttttttttgcatacacattaccatgccatcttcttcaattgcttctctttccaaaccgtcatttccccataaaatgtacagaaaattatcatcacgcaagagaatacagtaattacaagttgcacaagtgacgactgcaggcacagctaacagctttctacatgctagctaatatgctactattctctacctctaatatttgctaccaagcacctgcagcttaatccgcttgtgctaccaccagttcttgcagcttaagaccaccaaatccatagcaagtccgcatctgcaacgtcacggccaaatggtccggccctgtcactgattcacgaataactccatgttgtaggcatccttgtggactgaattggaggcgcattccgaacattcacatcaagtggcagcatccgatacttcaatctcgaggtccttcaggactttgatcatctcctggagcactagct

SEQ ID NO: 270754 - DNA, 760 bp, Zea mays
gcggccgcccttttttttttctttttttttgggaccaaccaaacacattcttataccaatcacaactgcagagctagttactattaaattcacgatgactacacactacatgtgccgcccccatagccacaatggactgtaatgcaaaaacacactacatcgattaaaaaacaaaaaatgttttacatccagttgttacaagccattggtgaaacccttgacgaaagagaaagagctattctcgatgagaaaccagagaacaccataacatgccttatcttgtcccatctggatggcatcatgctctgtcactgattagcgctgctcttgtctgttctagtcttcctccttggcaatcctcaccaagcagtgctgcaggcgtcgaagttctatccagatgatcagcaatcttcctctacatatcagctgggagggagggatactgctcgcagagatcaccatttatcacatcctcttgttgtctcctgcttgatctggccttcccacctcgctgtagtcctgtgctgcgcccttctgtcctccaatctccgtgtctccactggtaaaacaaaactgggaaggaagacaacccaaaacccgtgataaatatgttagtccaggatccattaagtctgtgcatcctaggagtaagtgggacgatcatcaatagatcttaataacatgggcagtaaagttgaggtaaattacttagctttcggactcttctttcttctaaccgattctccctttctatccatcc

SEQ ID NO: 270755 - DNA, 508 bp, Zea mays
cggccgcccttttttttttttttttttttttttgggtattttaatctagttgtttcaccattacattgcaaccatcagtatcatgcagacttcgatatatgccacgatttgtatggtctcatcattggagagcatgttccacacatgccggaaaaaattccctcatacatcgttagtcatcagacacacaccatcatacgctcttgcttaaaaaaggtaagtgtgtgtttgcgaagagaattaaaggcaggccggcataaaagctaccctgacggtggtgaggatgacgaactggtcactgttgtcgatcctcctctgcgtcacctccggcgccaagatgacgccacaatcctcgatatagtagtcgtcgaacgcgcgcgacatgacgagtaccgatgactcttggttgggctgccaaacgaagtgcaccccgggctcatcagcgaggtagtacccctggccgttgcaccaccggatacgctactccactacatacatcatgttcgag

SEQ ID NO: 270756 - DNA, 915 bp, Zea mays
ggtcaggagctgcatcgacagcgccagctccttcttgtagatccggttgtgcttctccttcttcttcgcggcggcgtccttcctcgacgccgccagctgctgctgctgttgctcctccttggcgacggcgtcgaggttcggcgcggagcccgtcctcgtcgcgtgcttcacaggctccttgggcggggccagcgcgatgaggtcgccctccgacgagcggcccgacttcttggtcaccacccactcgtacgcgctccccagctggaacagcccggagatcatcgcgttgaacttggtcacggacatggtgttctcgaagagcaggtacgggatgatgaaggggaacgacttgggggacggcaggatgttcagcagggacatcagggccgggacgtagcacaccacccagtcggggagctcggcctccggcacgaacatcgtcatcgggaggatgatgcagaacagcgtgaaggagtagaaaggcagtatgagcttccggagcaggaagaaaaggaatatcaggttcgccttcttccaaaatgcaatcttgcatttgatgatgtccggtaaacaaagcctgaatagctgcattggacccgaatgccaccgatgctgctgcttcctgtaagcctcatgagactcgggcaattcgcactggcactcagcgtcattcaggaatatgaacttccagccatggagatgtgccctagcagcaatgtccatatcctccgcggttgtccgttccacccatcctcctgagtcctccaatgccttgatcctccgcgccgcaccagtgccattgcactctcaggtgtttagtttcactccattcgcctgctggtccacctctaagtgggatctcaggttaatatattgccgccgagtcagctgtaggcgtgggcggaagcgaggcaa

SEQ ID NO: 270757 - DNA, 556 bp, Zea mays
  unsure (1)..(556): unsure at all n locations
cggccgcccttttttttttttttttttttttggagtatattcatgctcgatagaaaactgccaatacattgacactcgatgcaacagatatatgttcccttgcacaggccgatagaagctaaactaaagcaaatgtgtgcgctattcatctatacctgtgccccacctgttcaacatctgatccaccacaacaatcatagaggcatggccaaagcttccgtgaaagacctgacgaattcgcagtacttatctacgcccggacgccctttgcaagtcataggcaccccaagaaccatgcgttgcaccagttccatactgagaaccagaatcagtggcagcagttgcttgattcatgccatatccagagttataagggtttgcagcataattggccttggggttcccatagcttccattataacctgcaggatagtcgctgcattatgagtagcacacatgccacataaacagagcagggattaccttttcgttttactgtagcgaaatttcattntgactaaaaaatattgacttcatttttttaatttagaatccg

SEQ ID NO: 270758 - DNA, 484 bp, Zea mays
cggccgccctttttttttttttttttttttttttttttttttttttttttttttcgtgtggatgaaaattggggaacctgcattgccaatagcctcggttcaaaattacaatgcttaaggcatggaagctctccgttctaaaggctgagagatcacatctcagcaaattctagatggagcctcaattctcataaaatgatcaatgctaccaaatgctggaacttaacttacaaaaccagcaaaataatgatggcggcgaagatgaaaactgcgacaattgacattattgatcagctaccctggtttgccagattcagggtagtggacgtcaactggtgcagccaccacaaccatttcagccatgactacttcatcgttgaaggaagatgatgagccagccgagctgaaggacacagctggacatgttgtcttcctgctcagcaaggacttcctgattcctccagttcccacggcagaatgccct

SEQ ID NO: 270759 - DNA, 579 bp, Zea mays
aagcagcataaacagttgattaaacatacacaatccaatgtacaccagttacacggcatgtaaataggcgaaacggctgtgtagctaaacagtgattctgacgcaataataacaggctggtacaattcatatcttgttagcagcaatcacattcagcaccaaaaaacaccaattcttgcgatatactccagaatgttatctctactgtatataaacacgctagaacaaactatctgctgggagcacttgaagcattaggcattttcatgtctatatttgcaatcgattgttgcgcttgccacctgaatatgtacagttaatggtgactactaatggatctacaactcaactgtacacagagctgcagtcctgaaatcaatgggtgcatcaacaggtggatacgtggtgagcactctccatttctttgccccagggttgtacacctgaaactccatagccagcttcttcttcagctgcctccacggaccagaggattcaacacgaacttttgcagatctgagcacgtacagttccccgttcattggtacgaagccgcaagattcagtgtttgggatcttt

SEQ ID NO: 270760 - DNA, 464 bp, Zea mays
gcggccgccctttttttttttttttctcgtttaaccatgatttccattgaccactgaattcaggcccaacaatggtttcaccgaacgcaacaaaatctccatcgctgcaagttcacggggatgatgtttagaggaaaaactgctgcattgcaggggcagttcttaaatcataatcatgctcttgcaattatgtgacattcctttgggcactcatgacgaggcataatctttgaaatgctaactacgtggttctccgtcgtgtatctccccctcttcaaacagatcatcatatgcaacaggagcgcgaattctgtccgccagtggtttgcgttgagctttattgtctgatacgtgtacctccacatcatccaattgctcagggtcatccaatgtttccttttggtctcgcgcttcaatttcatcatcaattaaagcactgccctgtgaacttgcatcttcgtttc

SEQ ID NO: 270761 - DNA, 546 bp, Zea mays
cggccgccctttttttttttttttttttttttttttaaagtgtactccgattccatagcattaacaaacagctatagattacaaaacagagtcaggacctgatacttatgtggaagcagcccttggtaacttggtacacgttccaaccgcctgacttgcaaaaggttggaacaaacataagcatccagacgaaccatacaatacagaaggcgagaggatggagctacaaaacgaacaaaaaagtaccagggctgccccttttttttttatttcagctgcctatcttaaaagctcattttgctatcactactgcataggtacagttggtctagggagcaacgagttgacgagctcctcgtttatcttcacaggtagagggggcatctgcttcatgatatctggagcatcgtttatctctttcaagaccctgagtatattatcgcgagtttggcagagcagagagatattgtcctgtatctgcatgttgctaaggtttgacgaaatttgacccaaaacatgggcattagtttcaagtatttcacccgt

SEQ ID NO: 270762 - DNA, 599 bp, Zea mays
agaaataataaagccatgcaagttgcattctgtaagaatgctatccattatccatggttacaaagatagggttcgggccaatacaacccgtggaggcacagattccggacaccgatgagcaagataaaaaacacacacggcaattcctgcaccggtgaccaatctaatcagcgaacagtgcgtgaacaggcaatatgccggtaccaagtcttctctggagactaacacaagcaggcactgcaaaattcaagccgtcccccccgaaatgtgctcgctccaagacctgtgaagcagatcaattcactagatgactttcgagctggcaactacattctcttcgagacttccacgacaggtgatccaaatctaggtgatgtatctttcttgttgctcctggagcagccgagccgaggatttggcatccaaatagagcccactgacttcctcgagatcagccttgcagattttctctcttccattagtctttgagaccacgctggcaggtgatatcaattgaatagcatgtctcaaagatgtctgctgtccgatctcgcctaaataagcaagactttcttcatccatatcaatctcctccactt

SEQ ID NO: 270763 - DNA, 622 bp, Zea mays
ccggccgccctttttttttttttttttcatgaaaccctgctccagacagtgggattacgatggccatggacagagatccaggtgccatccatcagcgttaaaaaagaaatcatgtgcatggttacaaagctagggtcaatacaacacccgtgggcacacagattctggacatcgattagcgagggggtgaaaacacacccggcaattcctgcacggctgggccaatcttaatcggtgttaacggtgcgtgaacaagcaatatgccggaatcaagtcttcgctggaggctaacaaaaaacaggcactacaaaattcaaacagttttcctcccccgcagaaacgtgctctctccaagacttgtagactacgacatactgaagcagatcgacgcactttgcagaatgcatttctcttcgaggcttttccttccacagcaggagatgcaagtctaggtgatgtatctttcttggtgctcctggagcaggcgagccgaggatttggcatccaaatagagcccgctgacttcctcgaggtcagccttgcacatcttttctctcccgttggtctttgcgaccacgctggcaggtgatagcaactgaatagcatgtctcaaagatgtctc

SEQ ID NO: 270764 - DNA, 424 bp, Zea mays
aataaagccatgcaagttgcatgctgtatgaatcctatccattatccatggttacaaagatagggttcgggccaatacaacccgtggaggcagactccggacaccgatgagcaagataaaaacacacacggcaattcctgcaccggtgaccaatctaatcagcgaacagtgcgtgaacgagcaatatgccggaaccaagtcttctctggagactaacacaagcaggcactgcaaaattcaagccgttccccccgaaatgtgctcgctccaagaccagtagactatgaacctgtgaagcagatcaatgcactagatgactttcgagctggcaactacattctcttcgagacttccacgacaggagatccaaatctaggtgatgtatctttcttgttgctcctggagcagccgagccgaggatttg

SEQ ID NO: 270765 - DNA, 629 bp, Zea mays
gcggccgcccttttttttttttttttttttttttttttttttttttttttttacaatataagacacattatatatataagttatcatgatattgggtgtttccggtgcaacgcacggggcactacatatattataatattatgttatcaaagatgcaatacaagcctcaagtttcttttccagagcagacgataattttacgcgaaagaagcaaactgagcagcagtcaccagatcaaccgtgaatcgctaagcaagagtcttggcttgcttagctatgcttcgacaaaatggcctccgcaacacttcgagctattgggtggtagaactcttgagcctccgagaatatcctctgggccagcatcttctcctcgctggagcacttggccagcgagctgtagagcgggcggaggtacttcatccttcccacctgcttcaagcatttctcaacctcgttgaagtagcacttgcacccggtggggatcgccagctggaggaacgccactttgacctcgtagtcacggctttcagatagcttgtaccgctcgtcgagagcagtgacctgcatgcagaagaagatataggcatgcatgtggtcagtcgatctttaaatcactcattgagttattg

SEQ ID NO: 270766 - DNA, 580 bp, Zea mays
aagtagcacttgcacccggtggggatcgccagctggaggaacgccactttgacctcgtagtcacggctttcagatagcttgtaccgctcgtcgagagcagtgacctgtgaggcttcaacatctgctggtagatgttctaagtaaagttcccattcttgcccactccactttgctacctcatcttcacttggaagttttccagatttgaattctgcagctaaggagcagatctttctgtaagtagctgaatctggttccatggcatcaggagggataccagtcccctcaacccacaggtgaaggtcaattttgttttctatcccaggtacattggttttgaggaattcaagaaatgtctctgtatctatcgattggaacttgaaggttgcaatgtacttctttaaaaactcgtcgaaagcaggcctgccaatctcacgctcaattctccaaaggaactggaaacctttctcatagggcacttcagagtaaacatcatcagggtcaatccctgccatcttcggcttcaacttggtgaactccatgttatccttaaacctctccatcatcctgttcaatcccc

SEQ ID NO: 270767 - DNA, 509 bp, Zea mays
gcggccgcccttttttttttttttttttccgaaccattgattcagggccttcagatacataatcaggacagtacaccattagactgccccaaaaaaagaaacttcagcctcgaaacaaaatcctcagccaaaccaaacagacgaatcctccacaaagctaatgttgttttccttatgggctggtttggtgaccaggaatcacaagggaatccatggggaggaatccccttgctattcaatttgaatagcaatggattcatctcccatggattcctcgtgatctctgatcaccaaatcaaccctacatgttttggcatccaagggtcccacggcacaaccaacatcctgccactaaataaataaggatgacaccagaaaatcttgacagacagacaactccaagagactcatctttcgaccagacccatttgacaacaagcaaatgccttcccaatgcaattggctcctagacaatgttggcactgtaggctgcacaaagttgaagaagc

SEQ ID NO: 270768 - DNA, 1336 bp, Zea mays
gatcataaaatatactccgtatatgcagcagatagtagcttaacaatacaatcagttttaataacaaagaaaaatttaacaatacaatcagttttaataacaaaagggaaatttacaaacacttggaagaagaaacataatacagccaaacatcctcctaatacaaccttattattaccatgaaccaggatacgcccgccccttctctacaaaatgcaataacaatatatagtagcagtaatgtaaatgaatcgaggtaacaaatacacagtgcatgcctccaccatgccggaaattcacacgttttcagtttcactcaccaccaccgcctctgcaacaactccaataagagatttttcacatcctcctaccatagatgattagattaagcagctgcgatcggctcagttgctgctggtggtgctgccgctggcactggtgcctccgcagcagccttttccatctcagggacactgccgttggcaacggttgctggtttagctccatccttcccggcggcagctggtgttccatcctttccggtggctgcggcaggtggcggaggtggcttcatgtgtggtgggggagtgtgcttcagcttcagcaatatctgccgcatccgtgccatgtccgttggcttcccaggcttcggtccctggatcaccacgatcccaggcttcttctccttgtctttccttgcccctctcttctcgatgttagcaatctcatgtgggataagttcagatatcgccttccagtattgcttatctgcaccagcatggaacttttcctggtttgctaggaaaagcttctccctgtcacggttttggcccttgcttgtctcagcattgagctttctcttctcaacaaaagctttcttaaactcttcagcatcaacgatgatttggctcctcagctccttctccttcttctctttttcctcaaggtgaatagcattttgtcggcgccactcgcggagcaggaatccctcctcgcggcccatctcggtgggcggcggaaggatgggcccaccgttggagtcagcagatgcggcgaaagggtcgtcgtggaggtcgccgttggagtggggcatgccgaagggggagggcgcgtaggcgtccggggaggccgggaagccgtcggcggcggcgggggccgagccgtcgaaatggaggaaagggtcgtcgtggaagggcgcggcggcgggggaggaggtcggggagtcaaaggcggtggccatggctggggtggtggatctgggagggaggtggtgggtgtcaggtgcgctcccacgcgtccgcccacgcgtccgcccacgcgtccgcccacgcgtccg

SEQ ID NO: 270769 - DNA, 591 bp, Zea mays
gcggccgcccttttttttttttttttttttttttttttttttttaaatcgaaaaattgtgaatctcatgtagattaggccaaagaatcaagcatgatcaggccaagtgcgcttctgccccaagtctgttataagcttaagctaccatccgccattcaggatccatgcttcctgagatgtttctgtgtacaccaggtcgaacctgtgctcccatatctgggatcgtgcatttctcaagtattggccagtcactaaaaaccaagaaaatctgttgtcatctggcctcagttgcttacgagctctgaactttcagtgcatcatgttcagatgactcaacccagaagggtgacaaggataccactttcccaataattattagagttggagaaactagatcggctgacttgacttcatccacaagatccttcaacgaggcgaacaccgttcgttgttggggtgtagtcccgcgctctactgcaacagcaggggtatctggtggcaggccgtgcttcattaactttggagcaagtgatggaagtgttgacaaacccatatacacaaccaaagcccacgcgtccgcggacgcgtgggt

SEQ ID NO: 270770 - DNA, 1663 bp, Zea mays
cggaccgaattcccgggcggccgccctttttttttttttttttttttttaacatgccaaagaaccagattttcagtagcattgtcacagcacagggatactgaatagtccacaaatatttcatcccaacaaatcctctttgccatcaaacaaccattgttttgtttggcaagatgtttttgattggcgggtgaggtgatggtggggataggaatgccatcatcatatcatataaaggatgtacaccccagcagaacataaatacatctagtcttcgaggctcctaactagcctacctagtcatctgcagtgcgtccacgagcaagatggcgtcattactagtttggcctgttctccagaccctgaagtcgccggggaagaagccattgctccaccagatgctcagatgctgcattgtaaatggcccttgctcatcaccctgaggatcaatgtaataccaaatgcgctccttcaccttcacgtgtttatggcctcgactatttgcctcaagctgcacgggatggttatccccagcataatcagcttcaagatcaactactgctgtttgttcttctttataacaacgatgactgttgtcctcgtcatcgtcgtcaatggtaataacatcagcagctttagcacactgcttttgaaaaaatgctccaggtgcatcaccagcagcgttggctttagtagcttcaatgctcccgtgctggacatctgttccagttgtatcaacatccgtgctagctttaacaccttcaccatccagctcctgaacagatgaaatatcaccagcattattggcttcagtggcagcatggcgatgcaaatactttggtagcgcagcaatagcagctgtagtgctccgattttgattgtgtattacagctgtaccaccatcggtgtgggccttattaacttcaggtttttcttccgataaactttccaaggaaagatctctctccccatcagtacctttggattttttccctgtgtggctcttcaaaaaagaagcccttgtcacatatgtacatttttcttctgagccttttttcaaagaaacaatgctctctccattggtacatgattcactatcgccctacgtaaacttcttgctttctcctctagatccccaacagtaggccttttaaaggattcgttcttggccagcagccgaaggtcttggcattcttcctcttcgtattcttcatctgacaaacttgaaattttgatgtcaggtatgctggaaatacataaaagaatatctgttgatacatcatttatcttgtattcttcaggggatttactggtgcctgttactagtccaagctgatacaactttctatgttggtgcacctttttatgcatgtagaaactataatcgttgagatcaatctttattctcacaaaacagccaataactttgctgccaaatgtatccggctcccttagtagatccacaaccaaagatttcttcaagtagattaaatcaatgttatggcgaacaagagcagcaaaacatctcttgtttatttctggagtacactttggagtactggaactgtagttcccaatacgagctttctttctcacaaatgtttcattgttatcatcagagttagcaaaagtttcatcctctgatgtcatattcacagcaatat

SEQ ID NO: 270771 - DNA, 620 bp, Zea mays
ttttccttgtgtggctcttcaaaaaagaagcccttgtcacatatgtacatttttcttctgagccttttttcaaagaaacaatgctctctccattggtaccttgtaaagcgacagtactcttttgaataggtttgtcttgtcctgtaacttgaaattcagtatctttattatcttctgtctctggaataacttgaggcacctcttcaagtaaacgttgttgttcagatggcttgcgcaagagttgtttcttatcaaggtattcaaacttttccttgcgccaacctttctcactcgccctgtcaattaatctttctagcctctggagttctttactgatccaatgattcactatctccctacgtaaacttcttgctttctcctctagcccccccgcccgcccccttttaaaggattcattcttggccagcagccgaaggtcttgacattcttcctcttcgtattcttcatctgacaaacttgaaattttgatgtcaggtatgctggaaatacataaaagaatatctgttgatacatcatttatcttgtattcttcaggggatttactgctgcctgttactagtccaagctgatacaaccggacgcgtgggcggacgcgtggg

SEQ ID NO: 270772 - DNA, 1002 bp, Zea mays
cggccgcccttttttttttttttttttttttttttttttaaacttttctcatgcacttggctttttcattagaagaattgcattggctcaaactgtcaaaacctgacatacaatcgtgtcgtaacggtcccggagaaattacaacccttgcggacgacggtacaaggatcgtcctgctggggcaaaactcgttccttattcgcaagttacgtgttgctgcagcgtttacacaccgcaggaatcaaatccgccagaaataactacacctccagcctactccacaatgctgttgtgatccagaattctacatctacatttggtcccagtcaatagaattgttgttctcaaaattataagaaggttgctgcagacggttgcggcccaatctgctcattgtggcgaggccttcgatcactttgtaaagtgaagaccaccatcgatcagctgggacctgatactgagttagagattcatcgatttcagtattgtgcttcccttccagtacgctttgcagagtgattacagcatcctttgttctcctcagaatattatttccctcggcagcttctaatgcaaggaggtcactatgtgatgatgtgaggcttctagcaagcgcaaactgggcagcttcagcccatcggttagatgcaacccatctcctttggatatcttgcagcttgatttcttccctccgggacctctcttctccacttgcaaatacaagactcttgaggtattctgcgttgctaggtcctgtactttgcaccatcttggagaaagcactcccctcgttgcttagaagattctcaggagagtcgaattccagaacctgcccagaacttagaataagcaacctgtcacagtcaatgaccgtgttcaaacggtgggcaattatgagcattgtgcaactcttgaattcttctcggattgttttctgaataagagcatcagtccgcacgtcaactgctgctgttgcctcatcaaggacaagtatctttgctc

SEQ ID NO: 270773 - DNA, 1165 bp, Zea mays
agcggccgcccttttttttttttttttttagagaacaaaattctgatattttttttttttaaaaaaaatctacaactagcaatacttagaaagttacacaaatctggaccagtttagacctcggaccacaagttagggctaagtgctacagttgaccaaatcttcggaaccttgtctgttcgagggtttgagcttatagaagcatcaccgcagatggccgtcaagacatcaaactctcctcacgttgtctccatggataaccaccgcgccttcagtcatcagggtgccaagagcaccgcggagttcgtgcatatgaatttccattgagctctgcttcctcagttcctccagcaactcaatcatgcgcatcgaggggcctccaagctgcattttctccgcaatcaggttacgggttgcggcaacgaggttctcccgcctctgcctttcgcttgcggatatccccgtcatgatcagatccatatcaatcgtaccagttgcatgatccgtcgcagactgctgcatggcgacttcaagaagcctgaatgcctccacaacatcccgcacctcgaccacttcagagaaccgcattcgggctaatgcttcgctgagacggatcaaactctctatttgtctagcggttgctgttatgaccttctttctgctcccagggctattccctctttttctcatctcgacatagccacgagttaactcttctgcagcttcatcagataactgtggctgaatatacttccttgcatagcttatgtaggaaactagtgtctgcaagtccaagacctcgagctcctctaaatttggattctcaaaatgcaacgaaacaatatgctttgccaggcgcctatcagtttgctcatccgccttgtccaagataagataaatcaggtcgaatcttgaaagtagcgttggcgctaagtggatgttgtcaattacagagagccttggattgtaacgtgattcagtaggattggcacatgccaggacagatgtcctagcgtttaaagatgcaattattccagccttcgcaatggatactgtctgctgttccatcacctcgtgtaacatgcttcgggcattatcagacatcttatcaaactcatctatgcaacaaacacctttgtcactcaaaacaagtgctccactttct

SEQ ID NO: 270774 - DNA, 746 bp, Zea mays
cggccgccctttttttttttttttttttttttacataaaaatatttcgtagtattccctaaaacataatccgcattttgtaactgagtttttcgcatcaaacaacacatcgcatatttttcctatcaagatataaaaacatccgagttcttttctacttctttttctttcgccacaaacttcaatccataccaatacaatttttaaacatgcaccacatcgaccaaaacataactagacaactaccaatcgcatacatcacataaccttttgttctccattcgcaaacgcgatcctaccaacgtgtatagccaaaaacatattacacacatccacatatatacatgcactgcccgacatcaaccaaagcatatgtattataaactataaatcaatcaacctgaacgagtcgtgactagacgcatgggctgtccacatggctcggtatttcatcgaacgagcaaggcgcgagctgctgcgcagggaggaaggggtcgagctgctcgcctgcagggagcgagcgctagggggaagaagctgctgctgagtgtggcgccatggatgggagagggggagaggagccttgagcgctggattagagagggggctcgggttcagctccctggcgtcggtcgacattggaggaaggaagcaggggtgagctcaaggcgctcctggcttgggcgtccatggcggctggaggatgaagacaccgggaaaaactgctcgcagggggaaaggcaaaaa

SEQ ID NO: 270775 - DNA, 516 bp, Zea mays
cgccagcacgtaccgtccgtattcccgggcggccgccctttttttttttttttttttccaaaacattggttttttttttatagactatatgtcaacagattcgtcctaataatgcgagcggcatcatataacaacgcaattatcttattggggtttcttctgaacctacacacacgcgtcaacgcctccgtttcttccccggatgcccagaacccagctgttctggacgagaacgaacgacgcactccgaacagtctttaccaatactcgagacagccagccacctatagtactacaatgaacggctacgggctacggctaaaatatctctcagtgtatctgcctatctatacataagttttgcataaaagcgcactttctaacagctggagggagggcgcaaggccagcgtcattggtcctcatgtacgtctgtctcgtcgtatatctcctcctgcaggagctcctctatgacatcctccagggttatgataccaacagcctcttcatcttgtcg

SEQ ID NO: 270776 - DNA, 523 bp, Zea mays
gtcgtaacatcttaaaactatattattctaaaactatagttttaaaatactttgtttccaaatacgccctaagccccagcccacctttgctctgcggtctctgaattacatgatcataaaggcaatgatgaagtgaacataagtcgaaatgacaaaaaaatttacaactccatatgataagttcaagttcccaaggaataatacacgaatcatattccatcagtacaggtatcttgtttcctctgtagcagtcgtagtattaaatattttccatctgtgataactgcgtctttgccagaaaagatatggaaaaggaacacttcagagccactcattaacaacataaatggagttgaactaaaatagaaacatgcactgctgacaattaacgaagtccatcatacatttcactgaattttgtgcttttgtgttttcttggaattttggacatttgctgaacttccagttacttcttgctttctcttcttctcatgtttcttggaatgatcaccacctgaatcat

SEQ ID NO: 270777 - DNA, 395 bp, Zea mays
aactacggggcaaaacgtggcacgggtttctcggtaagcataacagaagtccaattcaaagaccacatactggaattagttcattatttagtgcaaactccaaagtagttacacaaacatgacgaatcaaccaggagcacactgcctaaagattacggtaccagcatactaataacccatggactgaaccattgtcttcatatcatagactaataaaacaaactgcaactgctggataacacggaattgaaggatcaacctggcaaatgtaaatactagtgcatagctgaaatacacagatatctctgttctgcctcaaggaaacattcttcagtaacgatcatcataagcacgagctgcccctcccctgctgggacgatcgtatggagcaggcc

SEQ ID NO: 270778 - DNA, 942 bp, Zea mays
gccagccgtaccgtccggattcccgagcggccgccctttttttttttttttttttttttttttttttttttctattgtgctggcaccatcatacaactatcccggaagaatttaaacatctcccttacaaaacaactcctagatgattcaacttctcttgtttcttgcagatctcatattgtaccccagccaaccacataataggcctaccctaaacactcaaacaaacacaaccccgaactaccctggactttccatttccaccaccaaatgcagtagaatccgcaattcagcaagacatagcgaagcccaagccttaggacctcaccccactggccatttgtacaaggcaagagctttcgaacccgcagtggcagcagagcagcggcctagaactggaacctgctcggatgggacttggtcatccgcgccatgccgatcgcctcgccgttgtcgatcctcttcgcgttgcggaacgcagcgcagcccgcgacgtagacgatcacaaggataatcagcaccacgatgttcaggacggccaccttgcgccagctcttcttgatgcccgcgaggacgccagccttgcacgagtcgcactggaagcacagcgtctgctggtcgttgctccaccttttgcagtctgggtcgttggtcaccgtcgggacgctggggttttgtgtccagtacgtctcgttcatgtagctgaacgcacatgacgtcggtggcttgcagcatccagactggatcggggagaggttgcggccgtagaacatggcgggcgtctcccccacgagcatgcccgtgttggggtcccgcgcgaggcgcctcatgccggcgcaggcgtggccgtcgcggaggcaggcgctgatggtggtccagtactgtgggtcggcgacgcggtcgcggagccagcctccgtagtcgcagagctggtactcgggg

SEQ ID NO: 270779 - DNA, 976 bp, Zea mays
agcggccgcccttttttttttttttttttaaaatacacgctgcatccatatattttcaagatcacaagttaggaacaaccgaacaacatgaacgccaagaaccacaatggacatgccgaaatttagaaccgcggcatgtaagcattcagaaccgggcaagtccttggctctacgacactacctggtaaaggagtcttgctaccaaaccaagctccttagcttagcctctgctaagtagctgagtctgcagaatctggttgtcttccagcaaccggtcgtactccaggagcagctcctccgactgcttctgcagcgcgtcgacatgggcctctgccaccgacgccttcctctcgtgctcttcggtctcagatttcagcttcttcatgccctcattcagcctcgcaatctctcgctgaagcctcttcgtctcactggaggatttctcctccttttcgcggagcgaccggttctccatctgaagtttctccacctcctctctggatgtgctggatgttttcctcagtgtcatcagctttcgcaggtagtggtgcagccggtcgattacaaatgcaaggaatagcgtgtatccgatgagggatgcctcgaggaggtgcgtcctccagagcacctggtccatggggctgacggtgccgagcttgagcccccggccctggatcttgaggatgctggcgacgttggacatgaggatgaccgagagcgtgcatgccagcgtcttgacggttgccgggcccttgcccgtcttcacctggtccacgacgcgcatcgccagctcccgcagcggcccgaccttcaccatgaggagcagcgctaccgcgccctccgcgaacagcacgaggaacagcaggtgaatcatactgaccgaccggccgccgccgctcctccctcccctaatctgctacggttcttcaatcaggtccagaaaagaaaaggaaaaaaaggcggcggggtttcagct

SEQ ID NO: 270780 - DNA, 572 bp, Zea mays
aaggctgaccttctataattaaatcacaattcattggctcttacatcatgtacctacaatccatccattggctcttacatcatgtacctacctacatccatccagaaaggaagaaacatgaaagtctaaagtacacgctgcatccagacatcaacaagatcataattaagtcaggaacgccaagaaccgctctgcatgtcatcactcagaaccatctggtaagaaccttgctaacaaacaactgaagctgcagcatgtaccagctcatagcttagcctctgctaagaacctgcgtctgcaggatctggttgtcttccagcagccggtcgtactccaggagcagctcctccgactgcttctgcagcgcattgacatgggcctccgctatcgatgccttccgctcgtgatccttggccgcggacgtcagcttcttcatgctctcgttcagcctcacaacctctcgctgaagcctcttcgtttcaccggaggatttctccttttcacggagcgaccggttctccatctgaagtttctccacctcctccctggacgtgctggatgttttccacaac

SEQ ID NO: 270781 - DNA, 457 bp, Zea mays
tttctttttttttttttttttttttttttttttttttcttagcaagcaagcacctttggcatcatatcatatatatattatccatgagagggtaagagtcatatctcaaagcaagcaaaataaagtccttgtttcagagaagaaaatgatgtagctattgtgtcttcgatatggtagcaaaaaatagcaatacgattgcccattgcattgagaagcaccaccacaatctgggaccgccagcgctcagggtgacttgcttccagtgggggagccactgcgggcagcagcatcagcatcgacatcagcagcagcatcattgttaccattgccattggggcttgggctacggtcagccctaggactcgggctccgctcacctctaggactcgggctccgctcacctccaggactcgggctccgctcacctccaggactccggctacgtccattggccgca

SEQ ID NO: 270782 - DNA, 798 bp, Zea mays
tcccgggcggccgcccttttttttttttttttttttttttcttttacatttgctttttcccataaactatcttaaagattgctcacagcatgatgataggaataaaggttcttaacacaaagggttcacaacatgacaaacgatgctcaacacaaataaaatttaactgaaacatgcttcaaccagtccagtccctgcaccacttcttcaaccaagccattctccctgcatttgtagtcattttgatgaagacataacggttgtatctttctgcaaagatcctagtggctacatagaactcctctgtctcctcagttgctccacattctttggccagttcgaaacatttatctatctccttattctctttttcctgttctaacttcttatttttagctatgtggtcttcttgatatctgtttggccacatccaagtctttggagtttaaagattgtagggtgtctatcaaagcttcgcattcagtcattggacttgtatgcttcctaggaggtctactggctgtatcagttctgcggccactcctcttcttactactgctgctcaatggactcctaatatctacttcatcctcctcctcacccatgtccaaattaccatatgttggttcctcactttctccagcaacatatgaagtccaaacatcaactgttgttacaccgaacatctctgctagttggtcaatgtaagaaggcatgccatatttgaattttttacactcagagtactttccctgtgtatagttttcccaccaaccatcatctgctattatgcttcca

SEQ ID NO: 270783 - DNA, 470 bp, Zea mays
gcggccgccctttttttttttttttttttcatccaaaaaaaagggtcattgctttatattcgtttttttatcttatacagcatttttttccatacaaacaactaaatagtagttcttttctcagactggtcgagtagacataggcaagcaaacataatatccatagagaagagaagaaaattgacagagagtagtgtccgtgtttaacggcaccaggcataaccgatttcacaggcctctagagtgtcaaaattatccataccacaagcagcaaaattacgacgaccagcggagctgggagcaggaaagagcccacaagcaaccttgcaatcacactgaacatgcaaagtagtagaaggccaagcatcacgagcaactttttaacaagggcggcgatctccttctctttcttcgggaccacaggctcgcttttgaagtgatctaataggtttgctctgggaagggaatcc

SEQ ID NO: 270784 - DNA, 806 bp, Zea mays
tacttttttttttttttttttttttttttgtgggagtggatatacaaaacgggtggattactgctaaagaacgaggtcgggcgtaggtacaaaaacaggtgcggcactcttttaagagaaacagttggggcgtagacattggggcggattctagcgtttcggctagagacatatcctaacgacaactaacacgtacagggctgtcaaattgccgactgatgtccaaaaactttcacatccaaagcacatcaacggttccaaaagtagctgccatataaaaatcatttatataaagtagagaaataatacttcagctcttctggccgttgcttccgtccagctcttccttaagctgcagcgagaaatcatcgttcacgtcatcgtcatcccaatcatcctcccactgctggacggcttcgttgccttcttcctggtcatcccattcttggtcgatctcgaactcttcgaactcgtcatcgtcctcgaggaggtccatcttggcggcctccgccttagcgtccgccggtgccgccgccatcaacgctgcgccctacgcgtgccgggagagaggactagatcaagcggcgtacacgaaaccctagctagtccgggaagcagctttgcgggttgcgggcggctggtgcagtggtgcaggtgctggtgcgatcggagttggctgggcctatttgctagctggtcaggtctgccaaggcaccactctgggaccacaatgtcagcgttactagatctgctacggtgaagaaggcaacactgatgaatctaaagaagattgaagaaggaatcgt

SEQ ID NO: 270785 - DNA, 676 bp, Zea mays
cgtccggattcccgggcggccgcccttttttttttttttttttttttttttttttttttttaagtttagaactgtggcatattctaaccacaactgagatattttttaaatagccgactgatgtccgtcaacttcctgccgttcatacttagaaatcactggtatggttactttcttactccagagttcgattgctcccagcagcacaaatcacataaaggttccgatttccagaagtagctggcatagaaggatcatttgtaaactggagaaataatacttcagctcttctgggcgttgcttccctccagttctttcctcagctgcagcgagaaatcatcgttcacatcatcgtcatcccaatcatcctcccactgctggacagcttcattgccttcttccttctcatcccattcttggtcgatctcgaactcttcgaactcgtcgtcgtcctcgaggaggtccatcttggcggcctccgccttcgcggccgccggtgccgccgccatcaacgctgcgccctcccgtgtcgcgtgccgggagagaggactagatcaagcggcgtagacgaaaccctagctagtccgggaagcagctttgcgggttgcgggcgactggtgccggtgggatcggagttggctgggcctatttgcttgctggtcaggtcagccaaggc

SEQ ID NO: 270786 - DNA, 385 bp, Zea mays
gtagtagaagatcagcagccgctgtagtatatgaaagatgattaccgacggcaggctgcgtcataattgttctattgtggcgccaaaaaaaaataaactggtggccgttgtacaacatcgtgactgctgaaacaacggtggcaccacacaaaataatcttgtagcacatcatccttttgtcagctggtggcataataacgaggagggcagcgatggtcgttcttaacagcagctgagcatgcatggtggatggtgcgacccgtgctgcagcgcatcattcaccgcggctgttgtggtgactacccgcaggacgactgctatagtcagcagcgtagtagcggctgctcctgctgctttctcttccttttttgtcgcgatggtcggc

SEQ ID NO: 270787 - DNA, 365 bp, Zea mays
  unsure (1)..(365): unsure at all n locations
ngcggccgccctttnttttttnntttttttttttttttttttttttttttttttgtaaaaaaaccagaatatatcaaaatcgggtcacaatctcagcctacaatacaacctacagttaactacattcaaaggtaccacagaatggtaaaagggattttggtttgctttcaacaaggcagggcaatgcccacaacaaacctacaatccttgagccttcaccagtgcagaactcggtgcctcggtggcaggtggtgaatactggagccagtctttcgcgcaaacaagtgcttccacaatctcaggccgcagagagcttctgtagtcatcgagcatgtgacttcctgttccagcacagaatatagagc

SEQ ID NO: 270788 - DNA, 373 bp, Zea mays
cacggtataaaacaaatttaatacaaaaacaagatacatcccacggcttgtacaagcacatagggaagcgtgcaaactgcaaagggtcagacgacatcagaacagccacgagttcagcagagttcaacacatgttacacctttacgtgataaataccagaatatatcaaaatcggttcacaatctcagcctacaatacacctacagttaactacactcagagatacgacagatgggtaaatggattcttgctttgcttccacatggcaggcagggaccacgacaaacctacgatccttgaaccttcaccagggcagaactcggtgcctcggtggcagggggtgaatactggagccagtctttcgcgcaaacaa

SEQ ID NO: 270789 - DNA, 1492 bp, Zea mays
gttcatgaagtttatcattggatgaacaatttaaagcacaattacaccaccgttttgcaaccacaaaggcctttcattaaattctgaaaatgaaactcagaaaggcacttcccagtcataaatacgataactcaaaaaagttttattgcgagtccaaaacgaacaaggggatatcaaactcacagcacccaaactcaaaactttatgcccatttaccgcacgggctgctggttgtaatgactcttttctttcttcttggccgccgcaagccttgcactccttgctgcagcctcggcagcggcaattttggcagctgtgtccgtctctctgctcgatttcttcttcttcattgatgccatcttcttcaagcgctccttcacatccacagcagaagtatcttcatcaggtcctgcactggcagtctcctctgacccatcaagtgcttcttgtgtttcttttccctcctttgaactcttgtccttctttttcttcttcttggaggccttgctctcgggaggagcaggagcatcttcctttttctctgcatcaccaatttggttggtacctttcttctcagcatcctgtgcagtgctgctagaatttgcagagagtcccagctcagccaatactgcatcaagttctgctagttccttctttttcaactcctttttagacagctgcctttctgtgtccttgggtggcgcagccggggccgcagctgtcctgatagcaggttcggctggggcatcttccgcatcatgttcaggttcatcctcaggtccatcatcaacctcatcatcaaggtcctcatcatcactctcaatgtcctcctgaagggcggcacgcacagcatcatcgacgtcttcctcttccttggcgggctcaccggcagtgccccagacggggcgcggcggcgcggtggtggcgaagtagtcgtcatcgtcgtcgtcctcgacgtccgcccaggacttggtggtaagtggcgcgggcgcccagaacagctccttctgcggtggctcttgccgctgcgcggccccctcgccgtgcttcttcctggaggaagacccggccgccttgcctttgtcgcccttcttcttcttcttgagggactcgagcgccgcgaacacgttgccggtgttgagcttgacctcctccgccgctccaccccgcctcccgccgcccaccatgctccctgaccgccgcggtggaccccggcgaggcgacccgagcggaccccgaacccgaatctgaatctgtcctgcccgccgatctgcggggacgaatcggcgccgggtgtcctcgccgccgggggatcggacctggattgggattcgggtaggggtggaggcgcggttgctagggttttgagatgggcggagactggaggcggaggaggggacgcgtgccgcagccttcacctgacgtttgtttaaagcagcggcgcaacgcaaagacgagagagaggctgaggcctctgcctgaggcacggtga

SEQ ID NO: 270790 - DNA, 620 bp, Zea mays
agagcgcccgccctttttctcttatcttttttaggttactgatgtcagcgttatatatacaacgaataccagatcggttaatgcaacaattttacccaattttctgcctgacatcaacagattcacatacgagcgtaccgaaagtctagctagaaatagcagtgacaagcaaggcacagcacagacacaactccagcagattcacatacatgaaggcacccagcgatgcttcaacctgcttcttctcggacatctatctcaagacggccatggcctactacactacggtctggaattctttgtagattgcagcatgaggtacctgcaagtgtagaacccagcagcataccatgaatttaagagagcagcaagatcactgtcaagatttgggttcatgcccatatttgtgctttcctcctttccagtatcagatttgcttccttgtgtgctaggctgtccagatatcgtacttctcataaaattaaaggcagcttcagcagtcatcattgcagccttatcaacttgatcatcattggtagataccatcgttgggacctgcatgaagtttgaaacactagggtatgcagtagttgcacctgggcattgatcacaagtcaatg

SEQ ID NO: 270791 - DNA, 462 bp, Zea mays
cggccgcccttttttttttttttttttgataggtcaatgcgacagtttttacttttatacgcaatttttctgcctggcatcaacagattcacattcgagcaataccgaaagtctagtgtagcttgaaatagcagtgacaagcagcaagcagacagtagacaaactccagcagaatattcgtacttgaaggcacacacgcgcacccagtgatttgctttttttttccccagacatctaaaactcaagacggccaaagcactctacggtctggaatttctcgtagattgcagcgtgaggtacctgcaagtgtagaacccagcagcataccatgaatttaagagagcagcaagatcactatcaagattcaggtttgtgcccatatcagtgctttcctccttcccagtatcagattcatttctttgggcgccaggctgtccagatatcgtacttctcataaaattg

SEQ ID NO: 270792 - DNA, 787 bp, Zea mays
gccggccgccctttttttttttttttttttttttttttttttttttttttttataagggccagaaataaatactggagtagatggggcgagacgtgcatgaaattcactctcatgatacatcagcgacttagggaagatattcgttttactcatccttcatggattttggcaacccgtacacagaatttctaacctatgtggtgacccagaaagaaaggtccgattgatcaaaacataccatggcctttgtgagtaaggcattccctggaaagtttaaagtgtttcaggatgatcaacatctagtatgatcggctaatcctgtcaacttctgaatccacattccctttctggttgtttgaggaagcaaggagcgaatccctagagttggcgagcaatactctcaaattgctaaatggacagctgtactagaaacttgattctgcgactttcttttctagcaagctcaactttgtggctgcgatgtggattcactggcattaaatgcttcaggagcagctgcagcaccaggattagcatcagcattaacattatcaacctgatcaggcttgtcctcctgcatctctatgtcgtggctaccagatgattcctcagcttctgcttcagccatctctccgtcaacatcacctgctacatgctctgttccatttggtactgctgttgtatgctcaggtgtgctcacagactctacatcagcaggcccaaaaatttgattctgcgactttctttcccacgcgtgggcggacgcgtgggcggacgcgatgataa

SEQ ID NO: 270793 - DNA, 1068 bp, Zea mays
tccggggcggccgccctttttttttttttttgcaatgaaactgaagtatataaaacatgagcagttgctttacagcatacaacgatggggatacagttggctgcatatacttggtaccaaccggccagtttagctgatcaggggctacaacaaaaaggccaaactaacagtagccttaggagctaactgtgggattgctagagctagacccattcagtcctcccacaagccttctctttgctgttttgctgcgatagcaccacacctcgaatgcctcggtgagatcaggatacctgaactgctctgcgttcttcatccactccgacaggatatcggcctggtcatcagacggcagcgctagcaccatcgagactattgcgctctccacattctgccacatgtctgaatccatctgcagagacatttcgcccttgctatttccatccagcgaacgttttgtcgtttggatataaggaagccatgtcttcaggagatggaatctagatggtgccgggagaaccactgtgccgtagccaacagcgtccagggcctttccagtcacttcgataagctttgccttgacagcccacaagcctgagctatacttgctgtcctgaaccactgaaagaatatggcacgagatttctgaccagccagaaacaaaggcatgcgtcatctcaatcttggtcggcagattagctacccagtcgatgtcagctaagctacacagaatccctttctctgcttgatcaggtgattgatcaaactcggttgccaacagatcaagcccggtcctaagtccagataacagttttgttataccttcctgcaccacagatctgacatcttcatccatcataaccagagcagtttcatcgtcttcatggatcataaagtcagtttgctcctgagcagaagtcttgaggtcatccagaaaacgagggaacagcgtttccatgcacgtagcaaatcgtatggcagagatgaagacattcttaacagcgtctgcacttggggcatgcagacgagctaatagagacactgcatctgagccaaggctaaaagcga

SEQ ID NO: 270794 - DNA, 1452 bp, Zea mays
  unsure (1)..(1452): unsure at all n locations
ttcccgggcggccgcccttttttttttttttttccagggggaaaggcacgaattggaatanatcggatgggaaaacccatatatggatcattaacagccatgaccaaactatggtcgcacaaaagggttcagtttccaaaatgcgaaacaatgatcaagttcacagcatttccagcacaggtcccagatctgaacccggacattccagccaccgtctacttcatctgaactatccctgcgctgacgagcttctggatcttctgcatcactccggggttcttgaggtgcgcctgcgcagcccgagggttctcctgcagatccgtcaaaacctgctgcatgatcggatcagtcaggatgttctggatctcagggtcttgcatggctttgttctgtctctctttcagttcctcctcactgagttcgcctctgctcgccttgttgatctgttcaacacacctccttacaccatcaagtaactcctggtttttcgggtcatgctttaggccaccttgataagtttccagcgctttgtcatattctttcatgaaaaactggatagcacctttccttgtgtatcccttggagaatgtgggatctagctcaatgcacttctcagcatctttcagaccttcaggaagggcccctagcttggtgtaacaggcagccctgttgctgtataccctggggtccttggggtttctcctgagagcttcggtgtaatgtttcactgcttctggatatttctgctgcttaaagaactcattacctttttctcgctcctcgtcagcaattcttgggtcatagtactcttgttgctccagctccttctttgctcgttctgcatcatttagttttttcagtgtatctgggttccggtgctcagttaacgccttctggaaaatctcaatggcagcatcatagtcctgcgatgatttagcaagttggccaagagcagttccttttctggtaagtgcccttgagatcatcttgaaatcagcatgcagttcccttcctctctcgacagccttatcacagtccttaatgcattcatcatactttcccatctcaaggtaaacagcagcacgattggtgatgtaggagatatcctcgtcatcgagctccatggcttctgtgtagtgctggatcgcggtatcaaaatccttccttttgtaagcggcgttgcctgcttccttctccttctgcgccgacgctttcctctccttctgctccttatcctcctctgtcacctccataggctcgggctccgggtccggctctggttctcttgccttcgcctctggctgctgctttggtggcggcgggttcgattgtgctgctgccgggtcaggcgccccactgctctggttctggaacttgatgttcagcatgagggtgagcacctgaaccattcgttggtcagaaaggtagctgttcagtctgccggggattcgc

SEQ ID NO: 270795 - DNA, 353 bp, Zea mays
ttttgttgccacattttattttagtttaatcttttctttttttttgtttttgtgtactatgtttgtatttttttttagtgtatctcaatatttttttttgggaaaacccatatatggatcattaacagccatgaccaaactatggtcgcacaaaagggttcagtttccgtaatgcgaaacaatgatcaagttctcagcatttccagcacaggtcccagatctgaacccggacattccagccaccgtctacttcatctgaactatccctgcgctgacgagcttctggatcttctgcatcactccggggttcttgaggtgcgcctgcgcagcccgagggttctcctgcagatccg

SEQ ID NO: 270796 - DNA, 383 bp, Zea mays
ttgagcgccgccttgggcgcgtactgcggcagcgcgtgggtactgcagcagcgcgacgaggtcggcgctggtgagcttgctcagatcgggcaggtccttggccttgaacgcgtcgtcgttgggcgcgaacagggtgagcgccttgtccatggcggcctggtacagtcttgaccaccccggtcgactcgttgaggcgcccgcactgcttgcacccggccttctcgaggaggtccgtgatgttggcggacgacgccgacggggcgccgaagaggccggggaaggtgatggggtcggatacctcgaggacggagaggttggacgggaagtcggcgacgcgcttggtgtaggtggactggaacttggcgccgggcgcggcggacgcg

SEQ ID NO: 270797 - DNA, 439 bp, Zea mays
  unsure (1)..(439): unsure at all n locations
accgtttcgnattccggcgcggccgccgctgcggccgttgaggaggttgcggctgatcaggggagtgaagtcgctgaaccagtcgcacgaggtcagcggggaactgctgatcttctgctctaggagatcgaacttggtgaggagcagaaggaagtctgcttgctcgaatgtcggatggagggtgatgctctcgaacagctgcctgctctctaccatcttgttgacaatggtaccgtttgcatcttcgtagaactcatcgtagtcgctagcagcaacacagaagataacaagccttacgtcatcaaacatttgcagccatttgcagttcccatgcaaacctctactgtttatcctgatcaattggtaccttagcaaagtggcttgtgcatcgggctcatcaacacccagtccacccaaagacaggtgtaggaaagagaat

SEQ ID NO: 270798 - DNA, 550 bp, Zea mays
gccgtccggaatggcgcgggcggccgccctttttttttttttttttttttttttttttttagagattttttatgacatggatccaataataaaaacggccaaacctatttggagcacacattgcggcactataatcaagaccatcattaatctgttaaccgaaactttacaggatcatttacattctgtacatgaaaaccaaaagaaagggggtgcagttttccagtacgctggccagaaaacagagagcgagcacacacgcacggttataaactcgatctctgaagagagcgctagattactcccgtaaaaacttctggagcagtccacttaaatccagtgtgatgccaaagagagggaattccataagctggcatcaaccaaacctcgatattgatttgtcagtgtcccgttcaagggtgtacctggatcacggccatattatctacgtttcacagagtttgctcctctgacggccttaatttgctgtgattctttaaagcagacaaaatgcaccaaagcctgtccatttggatatattgcaaaagca

SEQ ID NO: 270799 - DNA, 813 bp, Zea mays
  unsure (1)..(813): unsure at all n locations
accgtccgtattcccgggcggccgccctttttttttttttttatgataattggagtcccgatttnttaatatcaatggcaactcgcgaatgcagcaggacatggcacacagaatatggcagcggtactatttgaacgcaatgcatagctacatccaaagcccaaagtaaacacaacgctaaccaggccacacaaaaacacagccaaagcacacgatgaaaggcagctaaccctcggtatgcacacatgctagggctgctcttgctgcacttgtacctggtagtatttgctaagtgtcaaagccagagtacacgccgctgcccctcaggagccgcttctcctcctcgacgtagttcttccccctgctggcttggccccggtccctcttccgcttctctttctgcgagaaggaagcgtccttctccttcctgtctttctctagcaacagctggttcggcggcgcgttctgcagcccgatgaacttatccccttcggttactgcggccctggtacgctcgcgttcctcgtaggactcgggtgcgtgtgcgtcctctttgccgtcgcggtctttcccagtggaccaggaccagttcggttcctccgctgccggacgaactgtcaagacggatgggccgccgcggtatccgtgccggctcagagcactgaaatccacaccggttttcttcttcttctttgacctggcttctgccgtcgaagcagctttggaggaattgggcagcccaaaggcattccaagcattccccttcccagcatcatcatcagaatccgagctcaggtcatcatcagaagatac

SEQ ID NO: 270800 - DNA, 481 bp, Zea mays
  unsure (1)..(481): unsure at all n locations
ttccttttttttttttttttatttgaagttccaattttttttatatcaatggcaactcgcgaatgcagcaagacatggcacacagaatatggcagcggtactatttgaacgcaatgcatagctacatccaaagcccaaataaacacagccaaagcacacgatgaaaggcagctaaccctcggtatgcacacatgctagagctcttggtatttgctaagtgtcaaagccagagtacacgccgctgcccctcaggagccgcttctcctcctcgacgtagttcttccccctgctggcttggcnccggtccctcttccgcttctctttctgcgagaaggaagcgtccttctccttcctgtctttctccagcaacagctggttcggcggcgcgttctgcagcccgatgaacttctccccttcggttactgcggccctggtacgctcgcgttcctcgtaggactcgggtgcgtcctctctgccgtcg

SEQ ID NO: 270801 - DNA, 444 bp, Zea mays
aaggggcgggcgggcgcaccatcttgccgccgtcctcttcccctcgcaggaacatggagtacccggcgtacccgccgccctgcggcgggggcggctgctggtggtggtggtgcatgaactccggccctccgatgccgcccttcttggcgcgccggatgccgacgcagaggtccccgttctccgtccgcatgaacacgatggagtcccccgcgacgagcttcttctggttcacgaaggtgctccagccggtggtgagcaagtggcgccggggcgtgccgcggtagatgtggcggaactttcagaccacgccgtgcacgtccttggcgagcacggtctgcactggggggtggtctagtagtctagccgcgggaagaaggtctcggcgcaatatcgcggcacggataagccccctcccttgttggccatagactgcattagcgtttt

SEQ ID NO: 270802 - DNA, 371 bp, Zea mays
  unsure (1)..(371): unsure at all n locations
gcggccgcccttttttttttttttttttttccgcacccgaatttgtcagttcttgtttatcagcactggaccctggagagctattaagaaaacatggaggctacggcgctgatgtgctgagcgagatggaaggtgaagcggcgagtctatgtgcattgctaggccgatgtcatattctgtggtcgtcttcttggtcgaagccaccgcccgggtactggtcgaacggatcgacgcccaagtcgaagccgccgcagccagcgccagtgtcggggaagaggctgccccagtcggcgtccatgatgccatccatgccgagcaggtacatgggctccggccactcacgccggacaccgncgaggaggagcaggacg

SEQ ID NO: 270803 - DNA, 606 bp, Zea mays
gtccttccggtgaagaagaaaaaaaaaggagcatagctcttgacagggatcattcggtaaataggtagataatcaaaagaaaatggaaacaaaacacccgcactaaccacgagacggtgccactcgaaacacaacacgctcattgcatagcacagtgacagcatcaaatcttccgagtctgcgtctgccagcgtagccgattccactggttacacaaatgtatgtcgggcgagctctttcctcctcccaggtcccagggagaacatccagcaagcgctgtgcaggatcaggaatccatggacagtcctccattattgggcttaagctgcctccttgaatatacgggggagcacttcatggatgccgatgtccaaggcctcagggctcctgcacaatgtccgtcccttctcttttgtgcttggcacaaaccatatcttcctcagcgccggtgcctcgaattgcacgaagaacccgtcgctctggtcaagcttccacttcctcgacccttgccctttccagacctgtgggtaggagatgatgctcttaggtgccaccatacaagcagccttcgcagaacaattctccgcgtattgccgcagatatgtg

SEQ ID NO: 270804 - DNA, 457 bp, Zea mays
aaaagaaacagttactttttattgactcccatgctttatttcacccaactaggtacaatcatttcacagtcaccaacacacttccaagaggcacactgggttgtttgcagatctagagagttcacggggtcatatgcagatctagagttcactgttcatgcagatctccgcgtcagctgatccttcgatgtactttcgaatatcttgtccgcattgcccacctcaaaaccatcacgcctgtggtattctttcacctcttcatcttgtaaatctttgaactgtggtaacaggagacgttcagcaaattcaatgtatgatcgaggaatagattcagttattccatcagcaaacgtaaagctatgatgagtcagctactgttgaactttgttgaaggagaccatcaggactcactttcagaatccctccttctgaatttaacttgaagccattgtcctct

SEQ ID NO: 270805 - DNA, 753 bp, Zea mays
gcggccgcccttttttttttttttttttttttttttttttttttttttttttcttttaatcctgggaagatttcataggccaaaacgatgtaaatcccatgaaacaaacaaatcgaggttattaatgtacaaaacgaacaaggtagacaagactcagaaacgaagaagagaaaaaaaaaacctttcgcacagactaggggagagcactcctactagaaccatggttgatgactactatcaagttaccgaactacatacagcacagctaagggacgatgaaggggatcaccattgacaagaaaccatcgtatgtaagagtagccgagccggtgtagcgcgtatccttctccttgaatttctcggttaaacccttcacaatcatcccacattccacaaagttgtcaaagtctagcgcgccattgctgggcacaccattgctgtaattcgctataagaagctcgatgacagaaggtggaacagcatatccaaggctccggagagcctcggtcagctcacgggagtcgattttgccgctccggcccctgtcgtacctgtcaaaacccccccggccgcccccacggggaagatcaagaagcggatcaccagttctgaatcacgcagcatatagatggtactccaggttccaaaaataaacaagtgaacaagaataatgctatttcgacttttgacttctttcatcattacactacacatgatctgaacgacagttgtgccatacaaagaaacatggcc

SEQ ID NO: 270806 - DNA, 699 bp, Zea mays
  unsure (1)..(699): unsure at all n locations
gcggccgcccttttttttttttttttttttttttcgggtaactctcaattttgctatttctgatgacaaaaattgtgaagggagaataatcataactactcgtaaatgggaacttgccaaagatgctagctgccagcactttttcctgatagctcaaggaaattattctatacaagaatatatggtgataaaaacttcagtcttggagaaatttgaagtgtccaacggtccaaggcgagtgacaggcagggcgactcgggcggcctttcatccgccggaccggcgccggcggcttccaacctcgccgtcaccggagtggccgcagatggaagcttggcagcaacttcaagcttgcttgaagggcggatagtggatagccgccaggcgctcaccgccgccggctcccgccttcccgagccgcacgccgccagatcccaccctcaggtgccgcccagcgccggatcccgcttcaccgagctcccggtcgccggatcccatcgtcccgagtaggcgccgccggatcctgccgtcccagagcaggcgctgccggatccgtcttccccgaccagcccgctgcaggctcactcctctgccgaccaggacctcgccagtgtgcttctgggacaagccttcgcctcagagagcatcngagaggtggaggcagcccggatctgctacgtnctgctgccgtcgcgggag

SEQ ID NO: 270807 - DNA, 428 bp, Zea mays
aaaacttgacgcatcaaatcatgaacactccttgattcataagagcacttgacttattccactaagatcgaacattgcgcatatataaacacatgacatgtaaacaaccaattcgcccccgagacactatattgaactagtacgtacgttaacgtttaagcacccaaactgtggcaaaacaagtcgacagacaggcagacagctaaccacacatagaaatcactcaatttccgccatctctcgcccatcagtgctctgtaccgtgctcccctttggcgccagggtaatcatcggccgtcttcttgtacttgtaccagctggcgatgacgaggtaggcaacggaagttgaggaggctgagcactgcgagcagccagaagaagtagtcgaggtggccgcggtttgaggttctccgggatccacccgatgc

SEQ ID NO: 270808 - DNA, 476 bp, Zea mays
gcggccgcccttttttttttttttttttggtaactcttccatttcacatttttaggctcttacagaaggtctcaaaactcgcaataacatgtgcacttgtcaaatagatacggagtacgtctcagctttcttctctacaaggagtcaaaaagaaaaacgattggaaatgaggcaaaaaaaagtccaccgtgctggacgatgctagaaaaatgtctgtcctaacaattactttattattggtaccggatccaacctctgtctcaatccatttatgcaagggatggtgatttctagttcccaggtatcatcatccttcaatgctgaggggttggagacttggaggacatacatcatcaagccttgtttacttgtcagacgccttggcgcctatcggatagcttgtggagatggagtttaacagatataattgttgcacaaaagaaccagcctgccttgtatttacgagagctgcaatt

SEQ ID NO: 270809 - DNA, 1044 bp, Zea mays
  unsure (1)..(1044): unsure at all n locations
tttnttttttttttttttttttttttttttttttttttgttttttttttaaaggggagattacttgttactagcaaatattccgaactgtatgcagcaggacgtctatcactctatcctaactcctacacatggtacatgtagaaatcttttacagaacttagctcttgcaagacacatatatggccctcgttaagggtcagaaataggcttttttatttgatacaggcaaaataagaggctcctaaaccagttctgtctgaatcttcaagctttttcatgcatcatctattgcagatacagcattgcgaaatgcttcccaggctttttcatttgacacgggcataagaagaggctcttaaaaccagttcagtctgaatcttcaagctttttgatggcatcctctattgcaggtacagcattgcaaaatgcttcccactgctccaaagtcatactgatacctttggcggagggcatctccttgccgtccttcacgtagaactcgcggatggacaccaacgacctgcccttaaactccgataaagtcaccctcctcttgctcgaaaggcggcacaggataaggtcaccttggtcatcgtactctctcttcccgccacccttaccttcatcctcctcctcatcgtcatcctcttcgtcctcctcttcgtgttccttgcccttgctctccctgccagtgacgccctcctcctccgccttcgcctcctccttggaggagagtgaaagtaggtattcctcaacgacgccgcggacgaagagcttgcggtcgggtatggagaggtcgatgccgaggcggtcgctggcagcggcgcggaccttgtactccgtcacggactccatatcggagccccggaggatctccagcaccgtagcctccacattcttcttcgttgcctcgtccatgccgacgccacccaaccaacacgccaacgtttctgctcccttcgccggagttggggaggggagagtccacaggccacagcgcacttcgactctgtaattctgtatgtctgagcggacgcgtggg

SEQ ID NO: 270810 - DNA, 885 bp, Zea mays
taccgtccggattcccgggcggccgccctttttttttttttttttttttttaaatggaaaatttatcttgaatacacacatggagtttcagcgcatcacgacataagtagctcaatacgcaaagcgcaaagcactttcaagtaagataacctaaaagattctccaaatttacaccttaacaaaaatgggacccaatccacagcttctcggtaacgttacaacctgtgttactatgcacccaatccactgcttctcggtaatgttacaaaatgacaagtatccatgcttcaaggtcacggatcattcctcccaagatgcaccaagaatggcaacacaactacagaacaccatgctgatgagaaagcagaacctgaaagctacatgccatgatcttagttgtgtgatggaattggtagcctgcgcttccaagatttaacaaagaaatagcagccaaacattaacagttcagccccaaaatttgcgcacaattgaataacagatatccccctaaggatcaatcagaacacaaatggagtcgaccgttgatgactgctgaggttgttgccttgaaactgcagggcgcccccaccaacctccctccccaattttccagcaaagcaaaaatgtttgcccaacaagataactgacaaatattgaatcagatctgcacagtaaaacttttcagtagcctttgatgttactgaatctgctgtgagcctacaacgccctcaacagggtagccaccaaatttacaatccttccgcttcacaaccataatcatccatgtccaaccaaattcatgcagcaagacgccattcagaatcgagcctcaagtgattcgtcccacacatcaccacttccatttgaagcatcctcaccatcttc

SEQ ID NO: 270811 - DNA, 262 bp, Zea mays
cgattcccgggcggccgcccttttttttttttttttttttgttagcatcatatattatttctttagcgtgacagaaacacccttacagaaggtgtagagctgataccaaaggttccctaatctgctcatggattcaaacttgcatcgctagcatatggccctttttaagctgttgattgatgcaacctactctgggtcctgaccgtatgaactagaagaacgttgacggttttcaagttggtgtgcgataccgatacgcacg

SEQ ID NO: 270812 - DNA, 506 bp, Zea mays
  unsure (1)..(506): unsure at all n locations
gccgcgtaccgtccgnattcccgggcggccgcccttttttttttttttttttttttttcttttcaatttttgacaatatccaacatgcatatagttcccaaatgaggcttagatgtttacaaagcgcagtactggaagttgaatgctgtgccacacaatattccatcattgtcaccatgtagattcagtaaccaagcagacattgttgtttttgccaaagctcggtctactcatcctggactaaaacaaaggccatcttagtaagaaaatacaaatgatgagaactgtttagatgcctcaagctgtccaggagaaactgtgtgatattcagccacagctcagggtcaagggcttccagaacatgcagcgcggccatttttgggcttgctaggtattccttcatgaggggccctacgaggcgaacgacttttgctatgactggggcgtttaagtacaggagagccactgtgtctgttacggttcctgtcataatcaggactgatact

SEQ ID NO: 270813 - DNA, 578 bp, Zea mays
  unsure (1)..(578): unsure at all n locations
attcccgggcggccgncctttttttttnttttttttttnnntttnnttttttntttttttttcacttccaataaaagggggttattagcctctttgtagtttgtagactccaacaagctacaaacagaaccacgatacagaaggggcaaaatttatgtgtaaataaggcctggttcagaaaccggcgataacttgggggatggatgttcagcccccatgtagcaattagaaacaaacagcaaccatctggaacatcttcctacatgccgacaacaaaaaactctaggctgcaaaacttaaaagccattcaagacgattgttccttctgtttcacttgcttcgcctcaaacagatgcagcagcttcccgctgtttgttcacgaaagcaatacccttctcaatgcttgccttcaactcggccttcagcgcctcaagtgccttggcctcatactcagtcattccctggaggtcggcagaaatgacggactcaacaccattcttgcccaacttgactcttgatgcgaagaatggcaggtcagttatctcagactgaacaaatgtgcactcataaacatccgg

SEQ ID NO: 270814 - DNA, 417 bp, Zea mays
gaccgaccggattcccgggcggccgcccttttttttttttttctttagttctgttgaaacattaattagcagacttcccttacacgttgacaccttcaggaatcagatgacagccccggatacagagttccggaggtggaaatgtccggccagtactctcaaaagagcgagctcctgactggccggaaagcgttcgacaggtgagcaagtacagcgctgcgacacttgaccctgcaacaaacaaagacgatgactgttgcagctctcaagcaaggtcccagctatcgttggtccagtgggcgtcgccccagctgcacgacatcgaccagatgacgctggaggggctgtgccacgcgaagtcctctgcgtccaggtaaagctgtgacggggttaagtgctgttcccgtttcagccatt

SEQ ID NO: 270815 - DNA, 540 bp, Zea mays
tcggcacaggggtcaggtcagtcgcctaccaaattcaatagcacagcgagagccaagggagaagaagaagcaagcggagcgccatggcggcgtccaacggcgagggccacggccggttcgacgtgatcgtggtgggcgcgggcatcatgggcagctgcgccgcctacgcggcgtcctctcgtggcgcgcgcgtgctgctcctggagcggttcgacctgctccaccaccggggctcctcgcacggcgagtcgcgcaccatccgcgccacctacccgcaggcgcactacccgcccatggtgcgcctgtcccggcgcctctgggacgaggcccaggccgacgccgggtacaccgtgctcacgcccaccccgcaccttgacctgggcccgcgggacgactcggcgctcgtcgcctccatgaggaacggcggtgccaccgaagtcgtcgccggggatgagtcgtcgtcctggcccggggcaggcgtgttcagggtccccgaccggttgaccggcggcccgaaccagcttggccgggtattaaagg

SEQ ID NO: 270816 - DNA, 501 bp, Zea mays
gtcgagcgcaacatccccgaggacgaccctcgcaaccccgcggtgatcgccgacaacgtgggggacaacgtcggcgacatcgccgggatggggtcggacctgttcgggtcgtacgcggagtcgtcctgcgcggcgctcttcgtggcttccatctcctccttcggggcggagcacaacctcacggcgatgatgtacccgctgctcatcagcgccgtgggcctgctcgtgtgcgcgatcaccactgtcgtcgccaccgacgtcaccgaggtgaagggttccgacgaggttgggccggcgctcaagcggcagatcctcatcttcaccgtgcttatgaccgccggcatcgacgccgtcaccttcctcggcctgccgcccagcttcaccctcttcgacttcggcaacgacaagcacgtcaagaactggcacctattcatctgcgtgtcggccggtctgtgggcggggctcgtgatcggctacgtcaccgagtacttcacgagcaac

SEQ ID NO: 270817 - DNA, 549 bp, Zea mays
cccatgcttccggtctccccacttcgctctcacccgacgccgcgtaccgctattaataccaccaccagtaccaccacctctgccagttcgccaccatcgtgctccgtacacgctccgctccggccatggccgccgccgcggcctccttttcggccctgccgttccttctacttttgctgctggtgccgtcgctcgacggcgcctccaatgtgacgtacgaccaccgctccctcatcatctccggccgccgccgcctcgtcatctccacctccatccactacccccgcagcgtccccgagatgtggcccaagctggtggctgaagccaaggacggcggcgccgactgcatcgagacctacgtcttctggaacggccatgaaatcgccccaggccagtactacttcgaggaccggtttgacctggtgcggtttgtgaaggtcgttagagacgctgggctgctcttgatcctgcgcatcgggccctatgtggccgccgagtggaattatggaggcgtgccagtgtggttgactacgtgccaagaacggtttc

SEQ ID NO: 270818 - DNA, 477 bp, Zea mays
ttgcataccaaaatcaaaccaagcaaagcgcaccgcaggcggcgccagccagcggcagtagcgtgcttacctggtccccgcccccacacctcttcccttcccttctccctcccatcacacaactccatctccaccccgtgaccgacccacccatccatggcggcggcgcccaagtccatcgagcggctgccggcgcgccgggtggtcccggccgagcccacgccagccggcccgctccgcctctcctggctggaccggtaccccacgcagatggcgctgatcgagtcgctccacgtcttcaaggcggcccccgaccggccggccgccgccggagccagcccggccgggaccatcgagcgcgccctcgcccgcgcattggtccactactaccctctggcgggccgcctggtcctgtcggagtccggcgcgcagcaggccgtggactgcagcaacgccggcgtgtggttcacggaggcc

SEQ ID NO: 270819 - DNA, 593 bp, Zea mays
gaagaagaagatggcgacactggaggaggagggggggcagatccagatccagatgccgggggcgctgatctggcggcggcggcagcggctgacccacaggccgacacgaagagcaagctggtgaagctggtggtcatggtgtgcgaggggctgcggttcaacaccgtgtcccgcacggtggacgcggggttcaacagccagcacggggtgaccttgaccgtgacgcaggggaagcaggtgcagaagtgggacaggatctccaaggcggccttcgagtgggctgaccaccccaccgctgtgatccccgacatgcagaagcttggcatcaaggataagaacgaagcagcgaggatcgttgcgctcgttaagaatcaaactactgccgctgccgctactgctgccagtgctgacaacgacgacgacgaggcctgatcaatgcaacgacacatcatgatctgctgctgcacttaattactatgttcgtatacaaataaatacacccggcgtacgcggtgttccttatatggtctaaaatgtagccagtaaattttaaactactttatttcttgaggctctaacaatagatttaagtg

SEQ ID NO: 270820 - DNA, 1295 bp, Zea mays
cgggacgcactcagaccacgcattccgccgatcgatcgccacagccaacaccacccgccgaggcgacgcgacagccgccaggaggaaggaataaactcactgccagccagtgaagggggagaagtgtactgctccgtcgaccagtgcgcgcaccgcccggcagggctgctcatctcgtcgacgaccagtggattaatcggcatggcggctctggccacgtcgcagctcgtcgcaacgcccgccggcctgggcgtcccggacgcgtccacgttccgccgcggcgccgcgcagggcctgaggggggcccgggcgtcggcggcggcggacacgctcagcatgcggaccagcgcgcgcgcggcgcccaggcaccagcagcaggcgcgccgcgggggcaggttcccgtcgctcgtcgtgtgcgccagcgccggcatgaacgtcgtcttcgtcggcgccgagatggcgccgtggagcaagaccggcggcctcggcgacgtcctcggcggcctgccgccggccatggccgcgaacgggcaccgtgtcatggtcgtctctccccgctacgaccagtacaaggacgcctgggacaccagcgtcgtgtccgagatcaagatgggagacgggtacgagacggtcaggttcttccactgctacaagcgcggagtggaccgcgtgttcgttgaccacccactgttcctggagagggtttggggaaagaccgaggagaagatctacgggcctgtcgctggaacggactacagggacaaccagctgcggttcagcctgctatgccaggcagcacttgaagctccaaggatcctgagcctcaacaacaacccatacttctccggaccatacggggaggacgtcgtgttcgtctgcaacgactggcacaccggccctctctcgtgctacctcaagagcaactaccagtcccacggcatctacagggacgcaaagaccgctttctgcatccacaacatctcctaccagggccggttcgccttctccgactacccggagctgaacctcccggagagattcaagtcgtccttcgatttcatcgacggctacgagaagcccgtggaaggccggaagatcaactggatgaaggccgggatcctcgaggccgacagggtcctcaccgtcagcccctactacgccgaggagctcatctccggcatcgccaggggctgcgagctcgacatcatcatgcgcctcaccggcatcaccggcatctgtcaacggcatggacgtcagcgagtgggaccccagcagggacaagtacatcgccgtga

SEQ ID NO: 270821 - DNA, 279 bp, Zea mays
gaccgatcgatcgccacagccaacaccacccgccgaggcgacgcgacagccgccaggaggaaggaataaactcactgccagccagtgaagggggagaagtgtactgctccgtcgaccagtgcgcgcaccgcccggcagggctgctcatctcgtcgacgaccagctcgtcgcaacgccatcaagatgggagacgggtacgagacggtcaggttcttccactgctacaagcgcggagtggaccgcgtgttcgttgaccacccactgttcctggagagggtt

SEQ ID NO: 270822 - DNA, 382 bp, Zea mays
gccaccatttcaaaacgaggacgagcccgctgctggtgctgtcccttcccgcgcgccgccggcgcctggccacctgctccgcgtcggatctagagcgagcgagcgtcacccgcggctctcgtcgccgtcagcgtcacccacccgtcgtcttcttgcctccgaagtcaaatcttccaccccatatcaccacagagaattccaacccatccacttccgcggcctgctgccgtccgctttatttaaaccgtccgccacggcgaccccgacgactccccccgcggcctctcccgccagctccccctcacccccgaccatccacgcctccaagcgccgccgccgcgagaccgaagccacggggaacacgccgctgaggggtggcagg

SEQ ID NO: 270823 - DNA, 381 bp, Zea mays
gtgatcccgtctccaactcaggagccagccacagcccacagctattcatcagcttgacctccccgtccgcccgcttctcgcgtcgaggtcggccgcgcgccactctgaatccccagggcaccacaccgccggacaacctcgagaagaagcaccggcaacgacgacgagctagcactagcagtcagtcacagccgggcaagattgattcggacgagcagccgatgatgatgcacgggaacgggcacgggcacggccgtgtccacccggcgtcctccagctccgacttctccggcgagatgaaccagtcggccgtgtccgacccttcttccagccggttctacagtttcaacttcaagaagccggtccggccgccgccgcccg

SEQ ID NO: 270824 - DNA, 243 bp, Zea mays
cacaagaacgcttagttgaaggtacttcttgaaatggatatggatctaataccataggaccttaggccagtctatgtcgccaagagaacaggtcttgcggagtacttaatcaacaattcagtgtgaggtcttgtatcttttcaaaagctattgtccagctgctgaggtcgtttgcttttgtattaccgaacacgtagagatgttggcgttttctagacaaggtcaaatggaatttttgttaat

SEQ ID NO: 270825 - DNA, 461 bp, Zea mays
cacaaccggacccgacccgacgccccgaggcgagggcgagggcgagcggtcagccggccggggcggggaccaggggggatcccctcggcggcgtcggcgtcggcggccatgggcgcggcctccgcggcgatgtgggccgggctggtcctggtggtgttattggccgcatcgggcccggcggcggcggggctgccgaggttcgccgaggcgcccgaggacaggaacggggacgggtgcccggccccggtgacgggcgcgggggtctgcgacccgggcctggtgcacagcgccatgacgctcgacgcgcacgacctcaggggctccatggcggccatcgactcgctgcgcaagcacgcctcctgcccggagtccatctgcttccacttcctcgccgcggagggcggcggcgcgccgtccgtcgccgagcgccgtgtcgtcgtggtcgcctccttcccgtccct

SEQ ID NO: 270826 - DNA, 418 bp, Zea mays
tcctctcgtccggggggaagcaaccccccgcacggcgaggccgcaaaagcaatcgcgaaagcgagcgcgaggcgagtcggccggcgaagggggcggatggcgcgcgggctgcgcggcgtccgcgacgacctatccgagctggggcgccacctgctcgacatcgcctgcttcctgcacccgctcctcaacccggcccacaccgactccccgccacccacccccacgggccgccgccgcccgcgccgctccccgtccccgcaccccgccgcgccgccgtcaccgtcgctcctcgcgggcatcctctcccacctcgccgagatcggcggctccttccgcggcggcttcctccgctcctcgccggcgccccgaccaccccgcccccgacgcgctcgagtcacagcatgccgcctcgtccccg

SEQ ID NO: 270827 - DNA, 356 bp, Zea mays
  unsure (1)..(356): unsure at all n locations
annnngagcanncagaaacacaccaagcgaagcacgggagcaacaacccaacaacaanggcnaccaaganangagcccnccgggcgccccnagcgccccnagcgagcgcaacaaaagcgnncaaaannccacaaggcncacnngcnccaagnnccaaaannacacagnnccncccaccagnnacnncaaagggcnncgaacacccagcngngcaagccnanaggcnacaacaagcaanngcggcgagcgncnaacaacaaccaannncccagnngcaacaacaanccnnggcacaacnaacaanacaaaccancgcaacgcaacagcaacaacaannccnaccagcacngagccac

SEQ ID NO: 270828 - DNA, 462 bp, Zea mays
ggttgctcaggcactgatttttcaccatcttggaagatcttggagaaagccatcagagaagccatacgacccagattatataccgggtcttacaccggatttggtgactctgaagctggtgctttctctattcacaatttacttcaagctggaaggaattatggtctggctgctggatcatgggtgggtccatatgctatgtgccgggcatggcagacccttatccgcacaaatagagagcaagctgatgctgtcgatgggaaggaaaatttccctatggcgctatatgtcgtttcgggtgatgaagatggcgaaagaggtggagctccagttttttgtattgatgttgctgctcagctttgctccaatttcaataaaggacaatgtacatggtcacctattcttttgttgattcctctggttcctggccttgacaaaattaatccaaggtacatcccatta

SEQ ID NO: 270829 - DNA, 718 bp, Zea mays
ctagcggtttagttccaccaaataattctgtgatgagatcacttgttacttctgaatgtggaaagtcaaaagtgtcagaggatgacaatgatggtaccatccaacctcgtcagccagactgggcggcggtattggatgcagctactaaaagaaggtcagaggttcttgcccctgagaatcttgagaacatgtgggcaattggaagaaattatcaaaagaaaatggttaaattagaccactcatcaagacagaaaggctctgaaggctcagataatagtacaagtgcaggggcagttggtaaagagctatcctctaacttcaacgagagaattgcatctgtcgatgataaatacatggtcaatctgatgcacagtaaaaataggaatgctcaatctaccttcgtcacaggtagtcatccacttgctctacaaaatatgaatgaagtgaaaccaaaagaggggagtcaagttaatttcaccagcaaggaaaaaccacatgaaaccagcaacagagtaaaagcccaactaaaacggtgtaatagtactcctgatattgagaaaagatatttggcaaaaagtaaccagcccatggtttccagtgaaaggctaaatgtgaggataaatcaggatgagagaggtgttggtcctgcctcacatgttgaggtgctaatgcatgttccgaagataagatgtcgggttggtggtgcatattttgagaa

SEQ ID NO: 270830 - DNA, 522 bp, Zea mays
cagaacccgtgcatatttcagtcgtcgctcgcggagccgtggcgcatcgcgactcaggcactcaccgaccgcggatatggccccgtcgccatggcctctccttgcgacttccctcctcctcatcctattccaccactcgcctcgcgccgcggcggcgtttccgccgtctcttggcgacggcctcctgggcgccgcccgcgcgccgggtttcgcggcgtggctgcgcggcttgcggcgccgcatccacgagcgccccgagctcgccttccaggagcaccgcaccagcgagctcgtccgcgacgagctcgacgcgatcggggtgccgtacgcgtggcccgtcgcgcagacgggcgtcgtggcgaccatcgccggcggcagcgatggccccgtcgtcgcgctccgagccgacatggacgcgctacccttgcaggaattggtagactgggaacacaagagcatggagaatgggaagatgcatgcttgtggacatgatgctcacacaacgatgcttgttggggcagc

SEQ ID NO: 270831 - DNA, 525 bp, Zea mays
ccctggaacggcaacgagacgtgggagctgggacgggcaagtagtagaaaccttctctccttccccagccaggacgccatacagaatccgacgcgatccagaagaagccaaggcctcttcagatcctcccgcctccctctgcgaggttcccagaccgagccatcgccggcgctaggctcggggatcttgtcgggtcccgtcccgtcctaccacttcgccggcgctgcgtcgccgtcactcgtcagtcaggactcaggatccccaagatggcttcttcaaacggtgaggctgagcaacaatggatagagaatatcaagtcaggaggaacagttccctgtctagcacctgaaaactgtcctaatggctgggctactcctcccggtgattcatttatggtcagaggcccagaatatcttacaaacaaggtaaaaataccaggtggagagtatcttctgaagcctctcggctttgattggatcaaaggaccagtaaaaaatagttggatttttttaagacagttaccat

SEQ ID NO: 270832 - DNA, 429 bp, Zea mays
aggcaccttcgctccgcccccggcgccacacatgtccgcgacagcgctcctgcagaaggcaacagaggctggagcgacgcaatcgagctcatcgttcttgaaggagtttgggctcgcttcttcgtcatcatcacctcgaccaaagcagcagcaaccccatggaagggttgctgaaaccagcacggacccatggcagtacaggaacagtaatcagcaaatggagatggagcgccaccagacccatcaacggagggagatggagtccagttcgcaaccgtggcagcacccccgcattacccagcagatggagatggagcgccaccaccagcggagtcatcatcagagggagatggagtccagttcgcaaccgtggcagcacccccgcagtacccagcagatggagatggagcgccaccaccagcggagtca

SEQ ID NO: 270833 - DNA, 1059 bp, Zea mays
cggatgcccagccacgccaccttggccgccgctccgtgcgcacccagttgctgaggttgcaacgctgcagccggcgaggatcggatgaaccaccaacccctcctataaatcctaaccgagtcctctgcttctgctctcatccatctgtagagtgcaacatgcagtgccccatggacactgctgctagtggaacctcgccagtgatgcaattccatagcaatgctgatgagtctatcgcccattcatctccattggcaacattaatacaacgttcacagcgccattgctatggggatggatccccaggcgaatttccccttgctgtgagcccctccattgttctccatgtgctctcatcttgtgatctaggtccgaaagatctcgccaatctggaggctacatgcgtatttttcggcaaacctgcaagttttgcaccagactttgcattgtcacttccggagcttgcggcatttgatatgtgccacaaaaggaccatgtttacgcagatgaagcaagaagatcaggagtgtctgaaacaacggtgtggaggctcttggaagcatgttcttgggtacattctggttagggagaagaatggttctcgggtgattgccgggccaggccacagcatcattatcacctcaaatggagatgtatattcgtttggagcaaactgctccggtcagcttggccttggggattcagaagaccggttcaagccatgtgttattaggtctctacaaggcatcagaatcacacaagctgcagttggttcgagatgcacaatgcttgtgagtgacacaggaagcgtctactcatttgggaaggaggatttcagggtcgcagaactagttgacggtgctcattttcagatcacaactcctaggattgaggagtcactgaagggtgtgtttgtagttcaagcagccatagggggttacttctctgcagttctgtccagagagggtcgagtgtacaccttctcatggggcaaagccgagaggcttggccacagttcggatccttcagatgtcgagcctcgtcttctccctggactcg

SEQ ID NO: 270834 - DNA, 453 bp, Zea mays
ctaaatcccgtcccccaattccattctcggaagagaccatttccttcctcctgatctctcacggagttcctctccatggcgacgccccgctctccgagcccccgcgccggggcgcccctcgattccgcgccgctgctgggcggcgcctccggcggcgggtcccgtcgccgaggcggagcgctccgccggccctccctccgcggcgcggcgcggctgctgcgccgcggcgggcggcgggccatgcgggagccctcggtgctggtgcgggaggccgccgcagagcacctcgaggagcggcaggcggactgggcctactcccgccccgtcgtggcgctcgacctgctctggaacctcgccttcatcaccgtcgctgcggtcgtgctcgtgctcagccgcgacgaggactcgcccatgccgctccggacttgggtcgccggctacgcccttcagtgc

SEQ ID NO: 270835 - DNA, 642 bp, Zea mays
ttcgaaaccaaaccaaacgaagcgacactgcacgtgtacgaacctacgacagctctctacttccctcgcgtcctctccatcgagagctgctcctgctcgtctcctcccacaccgcgcaattcgtcgggattcgggaaccctagcgccggatctccgcggcagcggcggaaatggcgaatcccctagcggggctgcaggaccacctcaagctcgcgcgggactacgcgctcgagggcctctacgacacctccatcatcttcttcgacggcgccatcgcccagatcaacaagcatctaactactttggacgatgctctgattcgtacgaaatggatgaactgcaagaaagcaatctctgaagaagtggaaattgtgaaacagttggatgctcaattaaagtcccttaaagaagctcctgggacaaggcggtcatcatcacctcctattcggtctaataaatcatttgttttccaaccgttggatgagtatccaacatcttcaccagcaccctttgatgatcctgatgtgtgggctccaccaagggatacaccgacccgaagaccaacaagaggtcaatctagtgcaagaaaatcctcccaagatggagcctgggcacgtggttcatcaaggactggaacaccta

SEQ ID NO: 270836 - DNA, 2123 bp, Zea mays
ttgacgcgtgggctgaggcaaagtttggatcatgatattgcgccagctattgctcatttcttgaactgtttcgtggggaaagttttaggtgcttccacggagggtagtcttagcgacgcgcagtccaagactctgaagggccatgaaaatagccaaactcaaaagtctactaaaggccctaaactgagccatgctgccgcttcaagaaaaagcttatcaacttattctcatctaacctctgatggaatttggtttagcattaaggaatttgcaaaatcaaaatatcagtttgaagtgccagatgaagctaggctttcagccaaaagggtagctgttctccgcaacctttgccgaaaggtaggaataacaattgctgcacgtaaatatgatctggatgcttcaactccatttgaagcctcagatattttaaatctccaaccagtcgtcaagcattctgttccaacctgtacggaagcaaagaatcttatggaagcagggaaagtcaggatggctgagggaacattgaatgaggcatatgcattgttttctgaagccttttcactgcttcaacagattactggtcccatgcacaaggatgctgcaaattgttgccggtaccttgctatggttttgtaccatgctggtgatacagccggtgcaattgtgcagcagcatagggaactcatcataaacgagagatgtcttggtcttgatcatccggacacagcccacagttatggtaacatggccttgttctatcatgggctcaatcaaactgaattggcactgcggcacatgtcccgtacactgctgctgctaagtttggcgtcaggacctgatcatccagatgttgcagcaactctcataaatgttgcaatgatgtaccaggatgccagtaatatgaatactgctcttaggtatcttcaagaagcccttatgaagaatgagcgacttcttggccctgaccatgttcaaacagccgtatgctatcatgctcttgccattgcattcagttgtatgagcttatataagctttcaattcagcatgaaaagaagacctatgatatactggtaaaacaattaggggaaaatgactcacggactaaagattcagaaaattggttgaatacatttaagcttcgagaagaacaggtcaacgcccagaagcagaaggaccagggagctaatgcatctgataacgctgttaaattcttgaaggcaaaccctgcatttttacaagcaatgaaggctgctgcgctccaatcaggtggtgtgtcagcaaatgtcaacaggtcgctcaatgctgcagtcgttggagaaggtgtaccacgactgagaggagtggatgagcgagctgctcgagcgactgcagaagcacggaagaaagctgctgcaagaggccttaatgtccgtaatggccctgtggcaaaccatgcgtctgatgagctagctcagattctcaaactcatcaacgctgtttcggggtcttccactcctggctctgcaaaaaccgaggaatctgcctctgaagggcaggcaacaaatggatctgttcaaaacggagctgcaaccgatgcgaagtctgcagatatcaacgtgccacctgcacctgccaaccaaccagttggattgggggcaacattggagttgaagaagcagaaatcaaagcaaaagtcgtagaaaacccgtgcctggaatttcttttatgactgcagttttggactttagggtgatttgtttttttacatttatagaaattccacgttcacgtggtggaagagttcatttgtttctgttggaggttcttaggagagttcaataatcattacgagaaagaagacaattgtttggaatcatcattgatagaccactgatgagataatggctaatccttaagctaataaatctgtagccggtacaacctgtttaatttttttttgtgcaagattagtatgctaaattaataaaaaaaagagatgttgcgcttatttctgttaatttttttagttcttctggtggggcgtgactttgtgtgcagaacgattttttagtgatgcgcgtgccggcgtttgtgcagggttgtgttcgatatttcattttcagcatcgcgctgcccatgtgcc

SEQ ID NO: 270837 - DNA, 395 bp, Zea mays
cccacgcgtccgaccacgcgtccgcccacgcgtccgcggacgcgtgggtgatgaactagctcagattctcaaactcatcaacgctgtttcggggtcttccactcctggctctgcaaagactgaggtatctgcctctgaagggcaggcaacgaatggatgtattcaaaatggaactgacactgaaccgaaggctgcggataccaacgggctatctgcatcggttaagtccactgtcaacgcaccatttggactggggacaacattggagtccacgaagcagaaatcgaagcaaaagtcgtagaaaacctgtgcttggaatttcctttagcaacagttttggactgtagagtgatttgggtttttgacctttataggattgccacgttcacgtggtg

SEQ ID NO: 270838 - DNA, 461 bp, Zea mays
gttttccgtccatccgcccaccggttcgcagcccgcgcctcaaaaccctagccccgggcggatcgcggggcgcctccgcggtgccagcgacgcggctcgtttgatccgattgttggtcgagccccgccctcgctgccgcgcttcgctccggctgtgcagcggcgtgagcaccgagcacactcgcgaatggggaactgctggggtgcgcggatcaaggatgggagccctcaccctggcgcctcaggaatgttctcaaagagtagtggtaaggatgggagtaggcttagcggctgtagtagtcgagcctcttcagcttctatgccaccaagtgcgaagactgaatgtgaaatcctgcgatcagccaatgttaagatcttcaaccttcaataatctcaaggcagccacaaggaatttccgtcctgatagtgttctaagtgaaaggagggttggatctgtctata

SEQ ID NO: 270839 - DNA, 316 bp, Zea mays
gccagtcaagctcgctataagcagccagatattcaggaccaccgatcacgatcccaaaaacagcggctctgtgtcgcgacgtcgacagcgatggacgctccggccatgttcgcgcgcaagcacagtccccgatgacgtcggcctccggaacatcggcgaactgaggacgaaggagccgggggccaggcccagctgcaccgcgacgagaagcagcacaagccggccgtgctgaagaaggtgaaggagaaggtgaagaagatcaagaacaccctcgccggccacggccacggccacgacggtgagcacggcggcggcg

SEQ ID NO: 270840 - DNA, 497 bp, Zea mays
tcgttcacgcgtccgctcgcggagccccatccttccctcccggtctctccttgcgagctagtaccctacttgctgcacagtgccacaccgctcgcgctggagtatgggttcgagcccgatgtggtggtcaggaccaccaccgtcgccgtggagccgcggtttagggaaatggtgggcgctggtagggccattcgtggtgaaggccgtcgggttcctgctgctcgcgggcctcttgttccgggtgctctggtcctttccgtcctctccggcgccggcgttgcagatcacaaaaggaaaatgcagtcttttcaatggggaatggataccaaacccctctggtccagcctatacaaatgcaagctgtcgatttattgacgatcaccagaactgcatgatgaatggtagacctgataaggaatatctacattggaagtggaaaccttatggatgtgatcttccaccatttgatgcaagtaagatttctagattctatgaga

SEQ ID NO: 270841 - DNA, 539 bp, Zea mays
ctcgagccgcacccatccatcattttagctgttgatacaaagagaagggaatggccgagataaccctagagccgagtgatcttatggcgcaaacaaacaaaagaatagtgccaaagttcactgaaatcttccccgtggaggacgcgaactacccttacagcgccttcatcgcgtcggtccggaaagacgtgatcaaacactgcaccgaccataaagggatcttccagcccgtgctgccaccggagaagaaggtcccggagctatggttctacacagagctcaaaactaggaccagctccatcacgctcgccatacgcatggacaacctgtacctcgtgggcttcaggaccccgggcggagttggtcatgcccgtgccaacagccgcatccaagcccgtgccagctgcagggaacctgcggcgttggcagcaccccgatcctgggccagtgcgtcgagtttctgaggcatcagtgcagcccgacggcgacgccctactgctcgcctcagtgccagtcgttgcggcagcagtgttgccagc

SEQ ID NO: 270842 - DNA, 619 bp, Zea mays
catgcatcattttagctgttgatacaaatagaagggaatggccgagataaccctagagccgagtgatcttatggcgcaaacaaacaaaagaatagtgccaaagttcactgaaatcttccccgtggaggacgcgaactacccttacagcgccttcatcgcgtcggtccggaaagacgtgatcaaacactgcaccgaccataaagggatcttccagcccgtgctgccaccggagaagaaggtcccggagctatggttctacacagagctcaaaactaggaccagctccatcacgctcgccatacgcatggacaacctgtacctcgtgggcttcaggaccccgggcggggtgtggtgggagttcggcaaggacggcgacacccacctcctcggcgacaaccccaggtggctcggcttcggcggcaggtaccaggacctcatcggcaacaagggtctggagaccgtcaccatgggccgcgccgaaatgaccagggccgtcaacgacctggcgaagaagaagaagatggcgacactggaggaggaggaggtgcagatgcagatgcagatgccggaggccgttgatctggcggcggcggcagcggttgacccacaggccgacacg

SEQ ID NO: 270843 - DNA, 509 bp, Zea mays
tctatcagtggtcctttcgataatggaggtaccagcaccaccagcatgggcggcccccctcgcgacgacgacgacgagcctgctggtcacggccgccctcgtcctcgtgacgacgaccgtcctccgccggcgtgcccaccgccaccggaaacgacaacgacaagcgccgccgggccctcggccctggccggtgatcggcaacctgaacctgctaggcgcgctgccgcaccgctccatccacgagctctcggcgcggtacggcccgctcatgtcgctccgcttcggctccttccccgtcgtcgtgggctcctccgtcgaggtggccgaggtcgtcctcaggacccaggacctggcgtacctcgaccggccccgcatggcctgcggcaagtacaccgtgtacaactactccggcatgctgtggtcgcactacgggccctactggcgtcagctccgcaagttgtgggtcacggagctgctcagcgcgcgccagctccgccttacggagcgcg

SEQ ID NO: 270844 - DNA, 596 bp, Zea mays
gttctagatcgcgagcggccgccctttttttttttttttttttttgttcaaacaaagtcgccattagcgtggttgcccaggggcattgctggcaaagacagggtccttcgctctggcaggggcaggacgccaggaccccgcgcaaagacagggtcctacggttcttttttttttacatgacatttgagtgacaactacatgacggagcaggcgttggggttctcgtcgctgaagatctgcggcgccatgggctgctgctggtgcaggtggtggtgcggcggcgcgtagaacggcggcgggtaggccggctggtaggcgtacgggtaccccggaggcggcgggtaggccggcggctggtagtaccctccagcgaacgggaaccgcgggtagtgcatgtacaggctggcggccgggtccttgtccttgtcgccggcctcgtccttcttgtcgccgtctccgtcgccgccgtccttcttctcctcattcttctcgccgccgtccttcttctcttcctcctccttgccgtccttcttctcctcgcttccggctccgcctgcatccttgggcatatcgaccttcttattctcctctgccgc

SEQ ID NO: 270845 - DNA, 476 bp, Zea mays
aaatccaaacaaccagactaataatagttcttctttatatacaaagtccgaagcgcagtaccagccagaatattctacacaaagatactcctccatattgcacccataaactgacgagtccaggcttacttttataccagtccagaaaggtgaaaaaagggttacaattacaaaagaaaaagagagagagagagaaatcgaaccccgcaaaaaagtctgctactttttgttcaaacaaagtcgccattagcttggttgcccaggggcatttctggcaaagacagggtccctcgctctggcagcggcaggacgccaggaccccgcgcaaacacagggtcctacggttctttttttttacatgacatttgagtgacaactacatgacggagcaggcgttggggttctcgtcgctgaagatctgcggcgccatgggctgctgctggtgcaggtggtgcggcggcacgtagaacggcggc

SEQ ID NO: 270846 - DNA, 392 bp, Zea mays
tcctaaacaactaccaacatagaaagcacaatcctgtacctacaatggcacccaaaatattccgcttccgtatgctcctgggtctggctgcaagctgttgctaccgcaaccattttcccacaatgctcacaagctcctatagctgcccttcttaccccatacctctcaccaacggtgtcttcaatgtgtgaaaacccaattgttcaaccctacatggatccaacatgcaatcgcaacaggcatcttaccattatcacccttgttcctccaacaaccgtctgccctattacagcagttacctctggtccatttggtggctatccaatacatcagggcacaacaactacaacaacttgtgctagcaaaccttactgcatactctcagcaacatc

SEQ ID NO: 270847 - DNA, 490 bp, Zea mays
accgcgtccgcctcccctaccatctagggtttctagggttttcgaggaggaggaaatggcgtctgatagggtgctcgggactgtgaagtggttcaacggaaccaagggcttcggtttcatcacccccgacgacggtagcgaggacctattcgtccaccagtcctccatcaagtccgacggctaccgcagtcttaacgacggcgatgccgtcgaatacaccgtcggcagcggcaacgacggccgcgccaaggccctcgatgtcaccgcgcccggcggcggcccgcttgccggcggggaacgtcccgacggcggcaacggcggtgggcgaggcggatacggcggcggcgaccgcggttacggcggcggcggtgaccgcggctaccggggaggaggcgaccgtggctacggcggcggcaccgtggtttctgggaaggtggcgaccgcggctacggcggcgaccgtggctacggggaggcggcggcttggcggt

SEQ ID NO: 270848 - DNA, 1232 bp, Zea mays
tcgttcgcgtgggatcgaacatgaagatgacatggtgggcacaaatcatgtggactgggtacagactattgaagagagagccatcgatcaggcacagaaaagccaatcaggctcttttgatcagatacatggtaatctggaaagcactttcagtcagttacagttgagccaagcagaccctgctaatggaatgcaggttatacaggcaaacactaccattcattcacaaccaagccaattggatactctgagtcctacacagaaaaaacaggaaaacagttccaaacagttacaatctgtggtcacagattcttcgattccaaaacgaaccacacagaaatgcactatagatcagccaagccagccagacataaatcatatacgcacagatcaggaattcactgggaatcagttcccctcgagcctaccagttgacactgttatttcattaggggatactgaagaattcacagcgggtccctcacagccaagaaatagtgacactgcaggacaaattcaggccaatgaggacaatactgccgatcaagtacagttgagcctggcagagacagtcattctggtaccggctattcaagaatatgctgctggttattcactgctgagcaaagctgacactactgatcaaacacaggccaatcaggaatacattgctgatcaagtacaatcgtgcctaacagacccactcattccagtaaaagctattgaggaatacacaactgattattcacatattagtaaagctgacattacaaatcaaatacaggtcaatcaggaaagcactgatgatcacttatatttacgtcaagtagactgtctcgctgaaatgcagataattgagcaaaatcttgggtccaagcaacctcagctgagccaaccagacactggggatcaaatacgaattgatctggaaagcactaccaatcacttgcaaccaaactacgatgaaaattctatgctgcaatctggtttctcttgggctcctgaacagaacagaggagcccctactacagatttctggaaaaatgttgaaagtcaggcgtcatcggtttccatgccaataaatggagcgcctctttcaagctttccagcaaatgtcagattccaaaatgcagcagcagcagcagcagcagcagaacctgctttgccaccacaggttgctccaaccgaaacaggttccgatcagtctgggttggccttcaatcccttttcgg

SEQ ID NO: 270849 - DNA, 733 bp, Zea mays
gggtaaaagattgatggaaattgccaaaaaggaaggtattcaagctcaagagaatgcaatggaagagcttgctgaaagagtgcacggagatattcgcatggcactcaaccatttgcagtatatgagcctctcccagtctgtggtcaaatatgatgatataaaggagcgacttaatagcagttcaaaggatgaagatatttctccttttactgctgttgacaaactttttggtttcaatggcgggaggttaaggatggatgagagaatggattttggcatgagcgatcctgatttagttcccttgatcatccaggaaaattatatcaattatcggcctaacaccatcggcaaggatgaaagtggagttaaaagaatgaatgctttagcccgggctgctgaatctatagcggacggtgatcttgttaatgtacagataagaagatatcgacagtggcagctgtcacaagctgcttgttttgcttcatctatagtacctgccgctttgatgcatgggaacagagaaatccttgaagcaggtgagcgaaactttaataggtttggtggatggttgggtaagtactcgactactaacaaaaacagaaggctactggaagatgtccacagtcatattcttgcctcccagcaagcaaacttggacagggatgcattgaggttggattatcttactcttatcttgagagagctgactgacccactgaaaaaaatgtcaaaa

SEQ ID NO: 270850 - DNA, 485 bp, Zea mays
caaagctataagtaaccctcatatgtatttgcactcatgcatcacaaaacatccttctatcagtaccatcaatcatcattcatcttagtagtataggcaccaaatcaaatctgcaacatcaattatctaactccaaaaaccatgaagctggtgcttgtggttcttgctttcattgctttagtatcaagtgtttcttgtacacagacaggcggctgcagctgtggtcaacaacaaagccatgagcagcaacatcatccacaacaacatcatccacaaaaacaacaacatcaaccaccaccacaacatcaccagcagcagcaacaccaacaacaacaagttcacatgcaaccacaaaaacatcagcaacaacaagaagttcatgttcaacaacaacaacaacaaccgcagcaccaacaacaacaacaacaacagcaccaacaacaacattaatgtgaaggccaacaacaacatcaccaacaattaca

SEQ ID NO: 270851 - DNA, 472 bp, Zea mays
  unsure (1)..(472): unsure at all n locations
ggtcgacnacgcgtccgcttgtttttatagcagcagtcctcgcgcggttttgaattcccgtaggatttgagagcggtgcggagcggtgaggagaggagaagaaggcggttggcggggaagatggagatgccggcagggagcggggccccagcgctggcgcggcagggctcggtctactcgctcacggtcgacgaggtctggcgcgagatcgtgagcctcaccagcggcgaggacgcgcagcaggttgcggctcccgctcccgctcccgcgcccgagcccgagcccgagcccgcgcccgcgcccgcgccgctgccggcgcaggcgcaggcgcagcagacgctggggtccatgactctggaggagttcctggtacgcgccggcgtggttcgtgaggacatgggggggcaccagaccctcctgcttgagccgcacgcgcaggggcttttctcccaggggaatgcggtcgcgccgc

SEQ ID NO: 270852 - DNA, 415 bp, Zea mays
atccgtggacgcgcacgttcttcagcagcagcagcagcagcacggggcgcccatccagcgccagggctccttcacgctgccccgcacactcagccagaagacggtcgacgaggtctggcgcgagatcgtgagcctcaccagcggcgaggacgcgcagcaggttgcggctcccgctcccgctcccgcgcccgagcccgagcccgcgcccgcgcccgcgccgctgccggcgcacgcgcaggcgcagcagacgctggggtccatgactctggaggagttcctggtacgcgccggcgtggttcgtgaggacatgggggggcaccagaccctcctgctgcagccgcacgcgcaggggcttttctcccaggggaatgccgtcgcgccgcagaccctgcagctgggaaacgggatggtggcc

SEQ ID NO: 270853 - DNA, 438 bp, Zea mays
  unsure (1)..(438): unsure at all n locations
cggacgcgtggcggacgcgtgggatctccacccttccttccttcctcgcctggcgttcccaccccttgccacctcgcccgctcccggctcctcccccctcgcccgtcctgctctggtcgcggcggagccgtcagatctgggccacgggtgccagcccagccggcgggcggcgggacggagggctgcgggatgaagtcgtcgttgaggagccggcaggagccgcggcgggtcagcaacggcgtcatcatcggcgccatgctgctatccctctgcgtcctcagcatcgtcaaggccagatactgcgccacccccttcggcaaggccgagggccagctccaggagcagatgaactccagcatccggatggagccggaggagtcgtcgccggccaggacgcccggagaggaggaggaggaagacgactganagaatggggcg

SEQ ID NO: 270854 - DNA, 443 bp, Zea mays
  unsure (1)..(443): unsure at all n locations
gcggcgagcagatatcccacgagaaagccctcgaccccttcaattctccagcaaactagtcaccggcgtgtgcactggtgcagtgcacgcacgccgccggcagcatggcgggcagggccagggcccggcggctcgtgctcgccggcgctctgatgatcgcctggctcctcctctgtcttctcccacgggccacggcggcggcggcggccgtccgcaggagcgacttcccgccgtcgttcctcttcggcaccgccacctcctcgtaccagatcgaaggcgcgtacctcgagggcaacaagagcttgagcaactgggatgtcttcagccacgtaccangaagaatcgaagacggaagcaccggagatatcgcggatgatcactatcatcgttacgaggatgacattgagctcatgcactctctcggcaccaacgcctacagattt

SEQ ID NO: 270855 - DNA, 470 bp, Zea mays
  unsure (1)..(470): unsure at all n locations
cgatgatacctagntttggttgaacctctgtcttcttattntgcaacatacaacatactaccagtgtcagccatgctatcctgcnttgcctacccccagcaactttcttccattcaaccaactagcagcattgaacctctcctgcttatttacagcagcaacaactactaccattcagccagctagctggtgtgagccctgctaccttcttgacacaaccacagttgttgccgttctaccagcacgttgcgcctaacgctggcaccctcttacaactgcaacaattgctgccattcaaccaacttgctttgacaaacccagcagtgttctaccaacaacccatcattggtggtgccctcttttagatttcttatgagttatagttcaataataaagttttttatctgatgtttgtggcttcccagaaataagaaagtacatttctaatagagctacctgtgatcaagggc

SEQ ID NO: 270856 - DNA, 300 bp, Zea mays
  unsure (1)..(300): unsure at all n locations
ctggacgtcagcctagcaattagctcatcgactccagattggagaactcgacaccatgaaggtgctgatcgttgcccttgctctcctggcgctcgctgcgagcgccgcctccagtacaagcggcggctgtggctgccagacaccaccgtttcatctaccgcctccgttctatatgccgcctccgttctatctgcacgccgcagctcctgccgcagccatggcaataccccactcaaccgccgcaactaagcccgtgccagcagttcggatcctgcggcgtcngcagcgtctgcagccccg

SEQ ID NO: 270857 - DNA, 433 bp, Zea mays
gcctaagcaccagcaccagcaccatcaccagtgatccggccaaggtccgtaccgaccaaagacggccggggaggagatggccgcctccgggaccgggaacaacaggttcgcccatacatgcgctcgcgtgcggcagttcatgatggagcagaacaggcaggtgcggatggatgacctcatcggctcctcctcgtccccgaggccactgcaactgacgccagtccctgtagcgacggggccgccgccggcggctgcctgggagaccgacgccggcgctaggactttgccgctgttccccgtccgcaatagcagtagcacggagatcatcaggccagagcaggaggccaaggccaccctaaccatcttctaccagggccaggtggcaacgttccacaacttcccggcagacagagccaaagaccttatacaaaat

SEQ ID NO: 270858 - DNA, 475 bp, Zea mays
gtcgaggatcgataagcttactaaattacacataataattcaattaataaaatttattttcattgtttccgacaataaagtcctcaacgggattcctggagataaggtttttaatagacttcttgccaattagagcttacaataggtgagtaatgctcaaatcaatagtacaaatcaatttccacatttcaacaacagtcagtaatcattaaagataatgcctaatgaacgttatacggatacgagtacacagttaaccatccaacacactagatgctcataagagccaataccatccaacacaccagatgctcataagaactagttccatccaacacaccagatgcttagaagagctagtaccatctagcacaccaaataacattgtaaaataacatgatagtccacaacaaatataggaccttggtatatccagtgaacagagaatatacaaaaaaaatcatctttatttctc

SEQ ID NO: 270859 - DNA, 492 bp, Zea mays
aggtggagggatcgataagcttatatgtactttggctatgtgagttaggtgttaagtaacctaattatcttgatatgcatatgacaagggatagatgagttgtgttctgggtgcataactatgtttggttaataatatgaatgtaaagagttgcgaattagtatattgtaataaatctgcttaagacagcagctgtaatgtgattttggaaaatcaccataaattgagggaaaggagttagaagctgaataaattatgtaattaaatattaatgagtctagtttctaataaaagaaaccgcgtaagcaaaagagtttccaataatgtgatatttgaaatgatgtgggacacggtcaaaatgacttctagatcctctattctgtgtctatagaataattataaattgtacacaaatgtttataatgatgaactttacatgcttagactccttaatgaatctagtttcaaatgaaataaacgagaacatatttt

SEQ ID NO: 270860 - DNA, 1312 bp, Zea mays
ggggccacgcacgcgtccgcaaacgacgtccgcccacgcgtccgcagagaggagcttcatcagctcattcaattctcgttccatccctcgtctcttgtgtcccgcctccgttccataattcaccagcgtcgtcctacccatatctcccatcgtcttctccctcgcgccatcagcttccccaagccagcggcgaccatgatctccccggacaccatccgcacggccatcggcgtcatcggcaatggaactgcactcgtgctcttcctctccccagtgcctacgttcatccgcatctggaagaaagggtcggtggagcagtactcgccgatcccgtacgtggcgacgctgctgaactgcatgatgtgggtgctgtacgggctgccggcggtgcacccgcacagcatgctggtgatcaccatcaacggcaccggcatggcgatccagctgacctacgtggcgctcttcctcctctactccgcgggggctgcgcggcgcaaggtggtcctgctgctggccgccgaggtgggcttcgtcggcgccgtcgccgcgctggtgctcagcctggcgcacacgcacgagcgcaggtccatggtggtcggcatcctctgcgtcctcttcggcaccggcatgtacgccgccccgctctccgtcatgaaaatggtgatccagacaaagagcgtggagtacatgcccctgttcctgtcgctggcttccctcgtgaatggcatctgctggactgcttacgcgctcatccgcttcgacctctacattactatccccaacgggctgggcgtgctgttcgcggtggcgcactggtgctgtacgccatctactacaagtccacccaggagatcatcgaggcgcgcaagcgcaaggccgaccagatcgccatgaccggggtggtcgtcgacggcggcaagaccaacaaccaagccggcgcgggccaatactgaccgacgatcaagtgacgatcgacaccaatatgctcaagcaagaagccagcggcaaatcaattatgtcgccgctgggttttatgtattttgtgattctatatgcacgctagctgcttgtccgtcccggccaatggacaaaaaagggggaagaaaaaatgtctgtcggtatatgtgttctcgccgaataactctcgcgcatagctagctggtggggctgagtcactgccttcgctatatgtatacgtgcaaaaattagaggtggagggttgttttagctaatcccaccttaattccaaggcacagtgacctttttttttcaaaaaaaaaaaaaataaaaataaaaaaaaaaaaaaaagaaa

SEQ ID NO: 270861 - DNA, 594 bp, Zea mays
cccacgcgtccggggacggagagcagagagcttcagcgcaactgtgctcaatcgtttcttcgtctttagttggtgcttggtctccctccgtcctctgtttcccaaacagaggtgtctcagctgactcttttgcttgctagcaaaatagcacactctctctctagagctgagcaccaccttgctgaaggcagctagctagcgacgaccatggtctcctcggacaccatccgcacggccatcggcgtcatcggcaatgggaccgccctggtgctcttcctctccccggtgcctacgttcatccgcatctggaagaaggggtcggtggagcagtactcgccgatcccgtacgtggcgacgctgctgaactgcatgatgtgggttgttgtacgggctgccgctggtgcacccgcacagcatgctgtgtgatcaccatcaacggcaccggcatgctcatccagctgacctacgtggcgctcttcctcgtctacccgcgggggcggcgcgccgcaaggtgtccctcctgctggccgcgaggtcgccttcgtcggcgccggtgccgagctggtgctcgccctggcgcacacccacgagcgc

SEQ ID NO: 270862 - DNA, 357 bp, Zea mays
gtagccctgcaagtactagtccggaattcccaggcacgcgtccatgcacgctagctgcttgtccgtcccggccaatggaaaaaaaagggggaagaaaaaatgtctgtcggtatatgtgttctcgccgaataactctcgcgcatagctagctggtggggctgagtcactgccttcgctatatgtatacgtgcaaaaattagaggtggagggttgttttagctaatcccaccttaattccaaggcacagtgaccttttttttttctccttctgtttcggctaggattttgctataattgagcaatttagcgcgacttgttattggtgttggtgtgtctcaatcaaatagtaaaatgttc

SEQ ID NO: 270863 - DNA, 498 bp, Zea mays
cccactcgtttgtgtaaacattcaacactcaagagccaagagggagagacgatgaaggttgatgtggtggggacgacgcttgtggcgccgagcgaggacacgccgcacccggagctgtggctgtcgaacctggacctggcagtccccaagacgcacacgccgctcgtgtactactacccggcgccggcggccggaggcgacaccgacggagaagcggccttcttcgcgccggagcggctcgaggcggcgctggccaaggcgctggtgccgttctacccgctggcggggaggctgggcgtgggcgagggcgggcgcctgcagatcgactgcaccggcgagggcgcgctcttcgtcgtcgccagggccgacttcgccggcgaggacgtgttcagtgactacgagccgtcgccggaggtcaggcggctgttcgtgccgttcgcggcgtccggagacccgccctgcgtcatgtccatgttccaggtgacgttcctcaagtgc

SEQ ID NO: 270864 - DNA, 464 bp, Zea mays
  unsure (1)..(464): unsure at all n locations
acccacgcggccgcagaaacacaccaagcgaagcgcactagcaacgacctaacaacaagggcnaccaagacgagagcccgccnggcgcaacaggcccgnnnggggagcgcaacaaangcgnncaanaanccacagngcncacnngcnccnagngccannannccacagnnccncccaccagnnaccccaangggcnncgaacacccagccgngcaagccaacaggcaacaacaagcgcnngcggcgagcgncnaacaacaaccaanngcccaanngcaacaacaanccgggccacaacgaacccgacaagccagcacaacgcaacagcaacaacacggccgaccagcacngagccaccnagccanggngaacccngccgccaacnngcaagagcagcngcnngcanccaacccacnngcncnggcgaacgnagnngcaaaccagcaacaacaacagcnacaaca

SEQ ID NO: 270865 - DNA, 966 bp, Zea mays
ggagttcttctgctggtccgctctggggtacggcctcgacgccatcgacgccaacctcaccggcggcgggccggcctccatcggcggccagtccgcgtccctcaccccgttcatccgcgacgtggccacccagttctgttaccaagaagtcgggcacctcagggcgatcaagcagacggtgaggggcttcccgaggccgttgctggacatcagcgcggccaacttcggcaggatcatcgagcaagcgctgaacgcgacgctggacccgcccttcgacccctacgagaacagcctcaacttcctcgtcgcctcctacatcatcccctacgtcggcctcaccggctacgtcggcgccaaccccaggctcctcacccctcaggccagaaagctgctggcggggctgctggcggtggagtcggcgcaggacgcggtgatcaggacgctgctgtacgagcgcgggatggcgcgtgtgccgagctacgccggcggggtggcggagatcacggcgcgcatctcggacctccggaactcgctggggaggaggggcgtgaaggacgagggcctggtggtggcgcccgagctggggcccgaggggctgaccgtggggaacatcatcgccggcgaccacctgtcgctcgcctacgaccggacgccggaggagatcctcggcatcgtgtacggcaccggtaactccgcccagcacggcggcttctttccccagggcgcagacggccgcatcgccagggggctcctcgcgtagcgcatgggtgagttgtgaccgtgcgctgagcagtatgaactatgaaattatccgtgcgcggcgcagactgtagactagctagcagtactatacttgtttgtcagttggtatggtgtggccttgagtgccttgtgtaaactggatgatatacatgaatgtaggtggaaccaaataaagtaaaaaaaaaaaaaagtaagggcggccgc

SEQ ID NO: 270866 - DNA, 464 bp, Zea mays
cccgacccgaccgccgatagctacctagctcccaccccgcacccctgactccaccttctccattcttgatcccttcgccgcgcggagatccaagaacaggggcagcctgacaggggaacgggcggctatgggaggaagcagcgcgatgctcgccgtgttggcggtggtggttcttgcggcggtcggcggcgctgacgccgcggcggaatcgagtgaggcgtcggccaaggggaggtaccacgcgctcttcaatttcggggactcgctagccgacgctggcaacctcatccagaacggcaccccggacatcctggccaccgcgcgcctgccctacggccagacctacttcggcagggccaccggccgctgctccgacggacgcctcgtcatcgaccacctcgcacaagagtttggcctgccgctgctgccgccgtccaaggccacgaacgccagcttcgcgtacg

SEQ ID NO: 270867 - DNA, 455 bp, Zea mays
gagtgaaccacgccaccacacgcagcgagcgagcgcccaaagaaacgccgtagcagccaccaccaccaccaaccccttcctccctttccctctccgccgcccgcctctctacaagaaccctcacccgaccgccgataactacctagctcccacctcgctcctcgactccgtcttctctattcttccattcagcggagatcctagaacctaggggcagccagccagggggaacgggccgcgatgggaggaaggggcgcgatgctcgctgtggtgttggtggttcttgcggcggttggcgccgcggcggaatcgatggaggcggcaccaaggggaggtaccacgcgctcttcaactttggggactcgctagccgacgctggcaacctcatccagaacggcaccccggagatcctggccaccgcgcgcctgccctacggccagacctacttcggaaag

SEQ ID NO: 270868 - DNA, 400 bp, Zea mays
ctagctctctctctttcatcgccaccaccgccgtgaagtccgcacgcgtgcttcctgtcgatttttgagctgtgactgtgaccgccatggccgtggaggctgtgtccggaaatggcaccgaggcggtggccgcggcgccggcgaaggaggtgagcaccaagcaggcgtctttccgggaggagagcaacttcctggacgatctcaaggagagcgagcgtaaggcgctcgccgagactccgcgacaaggtcgaggcggccatcgtggagggcaagctgttcgacgacggtaagccggaggtgaaggggaaggaggaggccaagaagaaggccgcggagaagaaagatgagcagcccgaagccgaagagaagggagaggaggatggcaagaaggaggccgacg

SEQ ID NO: 270869 - DNA, 388 bp, Zea mays
gcagcagcagcccttctttttggagcatcaccacaggggagatcgatcaatcaatcaggaagcaaagcgcgcacggcacaggtgggtagctagcaatggcgacgccgccgaaccctcctcctccgagcactcccatagctgcggcggcgcccttattgccagcagagttcaccagattcaccttccgggccttgtacgtccgccggaccggcccaagcagcagggagatgattcagccggggagaccttacgatgagctgggcagaagactcaccagtgactacccggtgtacgatggccgtggctccgacgccgcccttgtcgctcgcatgcaggggatcaccgtcctcgtcggtaacgcgcaccagctgttcaccatcgtgttcga

SEQ ID NO: 270870 - DNA, 542 bp, Zea mays
atccgttgcaaggtgaagagactcatctatactagttcacctagtgtcgtgtttgatggagttcatggaatttttaatgcagatgaatcaatgccttacccagataagtttaatgattcatattcagaaacgaaagcggatgcagaaaagcttgtgatgagagctaatggtagggaagggcttcttacatgctgtatacgcccaagtagcatttttggccctggtgataagctaatggttccatctttggttgctgctgcaagggcagggaagtccaaatacattcttggtgatgggaacaactactatgatttcacctacgtggaaaatgtggcatatggccatgtttgtgcagagaaaactctatcatctgaagatggtgcaaagatagccgctggaaaaacctatttcataacaaatatggagcctataaaattctgggagttcatgtcattgattttagaaggtcttggatatgaaaagccttcagtaaaaataccagtctcttgtatgatgccagtggctcatgttgtaaaatggac

SEQ ID NO: 270871 - DNA, 626 bp, Zea mays
gcatctcgcaagagatcgacaggttcaaggccaccgatgccaataggcttcgtgctgaatacaacagactggtggatggactggcacagcgaggaaatctaccaatatcggatgcttggctcgcgaatccgtctttgcctgatgacatcttgaaggaagctgttcctggaaacataaggagggctgaacattttcttgctgtcttgcggaggcttgtgagattccttgatggccggcttgaaacagaaaatgttgagaatgaaatgccagtttcctttgttgcctcaatccattcccaggctggaatcgaccaaaaaatgctgaggttttgttatgaccggctacactccctaatgatgacattagagataactgatacagatgagttcatgcacatacagaccatatgtgactttgccacactgattggaacttatctgtatcagttatctctaatgtcatcattagggataactgatacagatgagttcatgcacatacagaccatatgtgactttgccacactgattggaacttatacacggggcttttctattataatagagccgtatgatgatagaatgcctgatattcgtgatcctgttattcagctgagttgccatgat

SEQ ID NO: 270872 - DNA, 331 bp, Zea mays
cccacgcgtccgggacgccggcgacggcgagaagcagggggtcaaaggcgcgagccccaacgaggaggagagagagaaagaggaggggaagaagcaacacgcggtggagaaagagaaagagaaggggaagaagcagcaggtggagtcggtgctgctcaagatccgcctgcactgcgacggctgcgcctaccgcatcaggcaacgcatcggcaagatcaaaggcgtcaaggatgtggtgctggaggccaatgccaaggacgaggtggaggtcacggtcaccatggacataccgaacatggtctcctacctcaaggagaagctcaaccgctac

SEQ ID NO: 270873 - DNA, 664 bp, Zea mays
cccacgcgtccgcccacgcgtccgcccacgcgtccgagaagtttcagatcctcgcatcgtccgcaccttatcctctcgactttacagtacctgctctcagctcctccctatctcaatggcatccgcgaatgccatctccaccgcctcccccttccggcccctctctcagggcagggcgacgaggtcacagcggttcgtggtgcgtgcgaacgccaaagacattgcctttgaccagaaatccagggcagcgctgcaggccggcgtcgagaagctggcaaacgccgtcggtgtcaccctcgggccacgagggaggaatgtggtgctcgatgagtacggcaaccccaaagttgtgaatgatggagtcactattgcccgtgctattgagctgtatgatccaatggaaaatgctggtgcagcattgattcgtgaggttgctagcaagaccaatgattcagctggtgatgggactacaactgcatccgtccttgctcgtgaaatcatcaagctaggccttctgagtgtaacatctggtgcaaatcctgtatcactaaagaaaggaatagacaaaactgtgcagggcctaattcaggagcttgagaataagtctagaccagtcaagggtggtggtgatatcaaagctgttgcatctatctctgctggcaat

SEQ ID NO: 270874 - DNA, 720 bp, Zea mays
ttgctaagctagggtttccacgcatggcgaccacgccgccgcctacggcgatcctaggcaccctcggcgacttcacatcgcgggagaactgggacaagttcttcgcgctccgcggcacgggggacagtttcgagtggtatgcggagtggcctaacctccgggccccgctcctcgccctcctcggggaccgcggcgccgcagcgggggcggcccaggagatcctggtgccagcgtgcgggagttcggtgctgtcagagaagctctacgacgcggggttctgccgcgtcaccaatgttgatttctcccgcgtcgtcgtcgccgacatgctccgccgtcacgcgcgcgcgaggccagagatgccctggcgtgtcatggacatgaccgacatgcagtttgcagatgggtcatttgatgtcattcttgataaaggaggactggatgctcttatggagccagaggctgggacaaaactggggataaaatatctgaatgaggtcaagagagttatgaaatcaggagggaagtttgtgtgccttacccttgcagaatcccatgttttagcgcttcttttgtctgagttcagatttggatgggatatgagtattcaagctatagctagtgaatcctctgaaaaatctgcgttccaaacattcatggtggtcatggtaaaagggaagatgggtgtagctcaaacaataaatcatcattggatcaatctgg

SEQ ID NO: 270875 - DNA, 411 bp, Zea mays
cggacgcgtgggcggacgcgtgggcagaattgcagccgaatccatcggagcccacggccgcacgcccgcaccccggcctgcggccaccgcatcgcctcgtatgctccgcgcttgcacacgcgtcggcggcgcgggcgcgggcggctgcggccgacgagaacgcctcatggcctccctcatccccttcctccctccctcaccttactccactcacctcccgcgccagccccagccccagccgccgacagccgctacccagcccgccgcagcggcgcgcccatcccggttccgcctcctgttcgcgcgcgccgcggcgcagcggcagcgcgactccgagccggcgccggcggccgaggagaggcggtcgctggccgtcagaacgggggagctgttcctggggctggcggcgct

SEQ ID NO: 270876 - DNA, 360 bp, Zea mays
ccgtccggttcgtatgctcccccacacctgacagaaaagcgccactaaaaccctagccttccgccatggccacctcccctgccgcctcgtcctcctccgctccgaccgcctccgcggtggctgcggctacgatggctgctgaggccaccgacgggccggtgctcagcgtagtatcgaagcgtctccgcgcactgcggaagaagtacaaccgaatcacgcagatggaggagtcgctcgccgccggcaagacgctcaaccgagagcaggaggaggttctccgctccaagcccgtcgtcgccgctctgatcgacgagctcgagcgcctccgccctccgctcgcctacgccctcgcggaggagc

SEQ ID NO: 270877 - DNA, 678 bp, Zea mays
cccacgcgtacgcccacgcgtccgggacgggagtccgccttaggttgtaggctccgttcgatcataagcaacacaacacccttccgtttgcgtcgctcctccggcctcccctccctggtcggtcgatcgcgaggatgacgccggcgagcgtggtcgccgcgcccaggagcgtcggggcgttgcccttggcggcgttcccggcgcccgcgagggccggggtgcggaggaacggccggtcctcgaggcccgcggcgtgcggcggggacgaccagcagccgccgtccatggccgcgatgccggcgtcgctgcgcgccatccaggccaggaggaagcacgaggcggcgcagcgcggggtgccgcgggcgacggccacgagcgcggccgggtgcgccgtggcggccctcgtcaaggccgtggaggccgtccagggcgcggcggccgggggcgccgcggaggccgcgcgcggcgccggggacgccgtggcgtgggtgttcagcaaggtccacctccagtcgcccgacctccccgtcgggctgctcgggatggtcgcctgttgcctcggcacgatcgtggaggcggcgaggtgccgcgtggacgcgaggaagcccgaaggcggccccggcgggcacgccggggggcgaacgccccggaggggaacggggcccccgcggaggaacc

SEQ ID NO: 270878 - DNA, 514 bp, Zea mays
cggcctcttccgcttcgtctccccgcgcaggcgcccccagtccaccgacatcgtggctgccgcctcctggggagtcttcgccggcaccgccggcctctacctcgtccacacaaagaagggaaaaagactggtggaacaaggaagccgcagaattcgaaagataacaagtgatatctacagcaaggcccatggttggaagccggttgacaggcgtctccagtgacattttgctgctgataatacatcttttgcttctggatgtattcagtttgtctgcttttggtagataaaaactagcttttagtcatttctggtgatgcgatgttcctggctgcttttgggatctatcctttgtagatattcagtgatgtctgttagactgtcggacttcttctggtttgctgtgttccttcagttgggtttcatacccctgtgtagctgataatgtggtaggcttatcggcttgtgactgttggatttgtcgtgaattctgtaagaactgtgtttggtttct

SEQ ID NO: 270879 - DNA, 1437 bp, Zea mays
tctttgcgtccgcggacgcgtgggttcactgggaacttttcttaattaaccagtttacatttaccaaaaacttattcaacttttcactgttcaagttcaatttgttttgtgcagtattgatctgttgtgcagtgtatactttgaggttcggttggccgatcttgcgatcgaataccaaaaacttgtgtggtactctgttgctgaataaaacttggatcaggttaccccaaccccaatggcatttaccgagccgatggaggcgaacctgctacgccaagtgctggactatccccccagtgctctgtccatgtccatccctccttcagcttcattgatggttgcactgctctactatactataagtgaattgagttaaagcattttttgttcgactactgtttggtgcatgcaacttaatatggctgatttttagtctttctattttagtttataaattgtcaatcacagggattaaaagagactaaaagtaaggtttcaggttctatttctatccatctttaattaagggctgaaacgatactgtcttgattcctaattcacctaatattcctagaccaagaacgactcgggttaatggtcagggatgccaaattgtttcagtaaaactaagcaagctcgtatgatgattatgtacctacttgagaacaaattgtctaaaacatatctgctactacacttcagtaaaacaattgatcacacacaagaagttcagatcagaaagcaggctgtcgctactcccgtcaggttctcggatggttcccgtcaagggctgaccatggagaagagcacagtggtggtcagtgtccctgttgttgtcatggccgagactgctgagaccgactacatttcgagcttgtggcacctttgcaggatgcagagtcccagaaagatgttgggaagggtgataaatcaggggataagggaactgctgagaagtttgcaatatatcagaagcatcgttcttcgttggcagacactgttcaattcaggaggccagctgctccaacttccagtgtgaatgctgatattgtgggaacatccactctgcagtctgcatctctaccgaaacaagaaccctcaacagctacatccaagagctatactttcagagaaggtgatagggtgcgttatgtgggtccagctcagttatcctcattgtcacaaaggctcctctccttttgctggcttcgctgttggaagcgagacatcatgtggtgtggataacgtccttgcagagcacgtgaactcaaatttcactctaatgtcagctagctgctacatagtgcacttctgtatattatgagtatgtatacagaattttaaagtatgaatacatgtgttttaaagcttggacaaccaatcatttattatccgagaatttaatttggttttattaataaatttaaacctttctat

SEQ ID NO: 270880 - DNA, 447 bp, Zea mays
gtagatgtcaagcctttaaggatgggatgaaacaaggaattattaatccaagtgatattgatgttacctttgaggattttccttattatgtcagtgagaacacaaagaatgtgctcttgtcatgtgcattcatacacttggaaaagaaggagttcatcaagcagtttgctgagatttcatcaataaaccagcgaattttgttatccggtccagcaggttccgagatttatcaggaaacattggtaaaggcacttgccaaacattttggtgctagactccttgtcgtggattcacttttgctgcctggggcaccttcgaaggatccagaattccagaaagtagttgggaaggctgataaatcaggggataaggcagctgccgagaagtttgcaatatatcagaagcatcgttcttcgttggcagacctgttcacttcaggaggccagc

SEQ ID NO: 270881 - DNA, 436 bp, Zea mays
  unsure (1)..(436): unsure at all n locations
cccacgcgtccgcaacagcgggggtgcatgggacaacgccaagaagtacatcgaggccggcttgtcggtaggaggcgaggtcgctggggcccaagggatcggaggcgcacaaagcggcggtgatcggggacaccatcggcgacccgctcaaggacacctccggaccgtccctcaacatcctcatcaagcttatggccgtggagtcgctcgtcttcgcgcccttcttcgccgcgcacggtggcatcatcttcgaccacctctgatcaatgcatgctgctgacgttccatggcaaaggcgccggctgtcgccccaagccgcctctttgaatttgccgtgatcagttactaagaataatcgtcgtgtatgtagcctgtaacaagtaatgccagaccaccagagttggaggcttattcatgtctggcccttntatcttac

SEQ ID NO: 270882 - DNA, 771 bp, Zea mays
gcggcacacaattcgcgcagcagcgtagaaactagaaagtccagtccccaaactccccagcgggggcgagcagaggaggaagagtagccgccgccatgtctgggggaatcgcccgcggccgcctcgccgaggagcgcaaggcctggcgcaagaaccacccgcacggtttcgtcgcgaagccggagtcgctgcccgacgggacggtgaacctgatgatctggcactgcaccatccccggcaagcaagggactgactgggagggtggatacttccctctcacccttcatttcagtgaggattaccctagcaagcctcccaagtgcaagttccctcagggtttcttccacccaaatgtctatccttctggaacagtctgtctttcgatccttaatgaggacagtggttggagaccagctattactgttaagcagattctcgtcgggatccaggacttgctagatcagccaaatcctgctgaccctgctcaaacggacggctatcacctttttatccaggatcccacagaatacaagaggcgcgttagactgcaggcgaagcagtatcccgcgttggtctgagagcttcgccctactagggatccaagctgcacattcgcatagctgatgctagtgtcttgaatggaagactaaaggtaacatggttctttgaggagtaactatcgccattgtggacctaacagtgttatttaactatttggagtgtgtttttgcgggatgatgtgaaaaccttgctgtgtctggtcatcaagga

SEQ ID NO: 270883 - DNA, 560 bp, Zea mays
tccaagtgcaagttccctcagggtttcttccacccaaatgtgtatccttctggaacagtctgcctttcgattcttaatgaggacagtggttggagaccagctattactgttaagcagattctcgtcgggatccaggacttgctagatcagccaaatcctgctgaccctgctcaaacagatggatatcacctttttatccaggatcccacagaatacaagaggcgcgttagactgcaggcgaagcagtatcctgcattggtctgagagcttcgccctactagggatccatgctgcacatccgcatagttgttgctagtgtcttgaatgaaagaccaaatgtaacatggtgcttggagaagtaactatcgccattgcggactgtgtgtcttttaacagccttattaactgtttggagtgtgtgatttgcgggatgatgtcaaaaccttgctgtgtcttgttatcaagaattgctctgtgttgtctgacaaaaaaaaaaaataaaaaaaataaaataaaaaaaaaaaaaattaataaaatataaaaaaataattattattaat

SEQ ID NO: 270884 - DNA, 637 bp, Zea mays
tcggtcacccagagcagacccggatttcgctcttgcggtcgctggggttttagcattggctgatcagttcgatccgatccggctgcgaaggcgagatggcgttcgcggtttctggggcggtgctcggtggggccgtaagggctccccgactcaccggcggcggggagggtagtctagtcttccggcacaccggcctcttcttaactcggggtgctcgagttggatgttcggggacgcacggggccatgcgcgcggcggccgcggccaggaaggcggtcatggttcctgagggcgagaatgatggcctcgcatcaagggctgactcggctcaattccagtcggatgaactggaggtaccagacatttctgaagagacaacgtgcggtgctggtgtggctgatgctcaagccttgaacagagttcgagtggtccccccaccaagcgatggacaaaaaatattccagattgaccccatgttgcaaggctataagtaccatcttgagtatcggtacagcctctatagaagaatccgttcagacattgatgaacatgaaggaggcttggaagccttcttccgtagttatgagaaagttggatttaatcgcaacgcggaaggtatcacatatcgagaatgggc

SEQ ID NO: 270885 - DNA, 852 bp, Zea mays
gcctgccgcagtgccgctccttccctccctctacccgtcgccgctgctgccatggacgaagtcgtcagccagattttggagaagcaagtgctgtctgccgcgaaggcggtggaggacaagctcgatgaggagatcgccgcgctcgatcgcctcgatccggacgacatcgaggcgctccgcgagcgccggatccagcagatgcgccgcgccgccgagcgccgcgccaagtggcgtgcgctggggcacggggagtacaccgaggtccccgagaaggagttcttctccatcgccaaggccagcgagcggctcgtctgccacttctaccgcgacaactggccctgcaaggtcgtggacaagcacctgtcggctctggcaaaacagcacgtggagacacggttcgtgaaggtccacgccgagaaggcccccttcctgacagagaagctcaggatagtcgttctcccgaccctcgccatagttaagaacgccaaggccgaggacctggaagagcgcctggcgaggtcccaggtcgtcttcctggacgggcgaagggtccgcgcacgcgtcgaagcaggccgctgccgccaccaaacggagcgtccggcagtcgggcaccggcgactcgtccgattccgagtagctctcgtgtgttattgttattattattattattatatctaaatgggtacacagcacagacatgttttggctgctatgccaacaggcaacattagcattgcaaggatatgcgtcttattaggacctggaagcgaaagtggttgtgggttgagttgctgtacagtgctactgctgccgtgtggatcacatctgatctgattgggtgggttttgctct

SEQ ID NO: 270886 - DNA, 857 bp, Zea mays
tccactcgtacgcgctccttccctccctctacccgtcgccgctgctgccatggacgaagtcgtcagccagattctggagaagcaagtgctgtctgccgcgaaggcggtggaggacaagctcgatgaggagatcgccgcgctcgatcgcctcgatccggacgacatcgaggcgctccgcgagcgccggatccagcagatgcgccgcgccgccgagcgccgcgccaagtggcgtgcgctggggcacggggagtacaccgaggtccccgagaaggagttcttctccatcgccaaggctagcgagcggctcgtctgccacttctaccgcgacaactggccctgcaaggtcgtggacaagcacctgtcggctgctggcaaaacagcacgtggagacacggttcgtgaaggtccacgccgagaaggcccccttcctgacagagaagctcaggataagtcgtcctcccgaccctcgccatagttaagaacgccaaggtcgaggactacgtggtcggcttcgacgagctcggcggcaaggacgacttcagcaccgaggacctggaagagcgcctggcgaggtcccaggtcgtcttcctggacggcgaagggtccgcgcacgcttcgaagcaggccgccgccgccaccaaacggagcgtccggcagtcgggcaccggcgactcgtccgactccgagtagctctcgtgtgttgttgttgttgttattattatatattctaaatgggtacacagcacagacatgttttggctgctatgccaacaggcaacattagcattgcaaggatacgcgtcttattaggacactggaagcaaaagtggttgtggtttgagttgctgtacagtgct

SEQ ID NO: 270887 - DNA, 626 bp, Zea mays
cctcgcccaccaccaccgcacgccggacaaaaccgctctcctcgccacattcgcagcccccctcgctcgcgcacacgccacaccacaccaccagtacactgctctacgccacagtacagcagcatccagcgggcggctggctgcctaatctttccagctctttcgtcccctcgccacgccgcccaccgctgccgcatcatccgcccgttgcccgccgtcgtcgcctggcccgcggcttccgcccccattcgccgtcgcagcgcgccgagccccgtcccagatcgccgcggcgcttcctgccgccgtcggcgcggcgcagggttgaaatctatttgaccactcagttataaccatttctggtctgaagatgcttcgtcaatgacatctggaaactggaatagtatgcgctgatcttctatgcttcaccacctgactatcaatgggctctttcctgtggaaacagcccagctacctcttcattttgataattcttcaccttgttgctcatgaggcaagaacgctgagttcagacggtgaagcacttcttgccttcaagagagcagttacaaattcagatggagtctatctacattggcgtgagcaagacgcagacccctgcaattgga

SEQ ID NO: 270888 - DNA, 1000 bp, Zea mays
ttatgtcgagcgcctccgagctcttcaccgcgcgccgtgccgcccgtggggcccgcatctccgacctcgacctggatccgcacgccgacgcgctccgggaccagcacggacttggcgcccggcaccggcgccgcgggtgccgcccgcgacgccagctcgacgccgccggggacgtgcggcagcacctgcacaccggggccccgccaccgcgtcgccgcgggtcgtacaccgatcagatcttatcctacatagacaacaacaaccttggggttggggattctgcagctcggaggaacagactcgataggctgatgttcaggacaaatgagcggcttcctggtgctgtactgcaagcacaagcgcgtgtcctggagagactcagaggcatttctcttggttcatctgcctccaggccatccatctcattagatgaattttccgctaacgatgtatttagaatcatcgacttcagaaacagggaaacgtggcatgaggcaaaccggccccactcatcgtcgttccacctaggcagtgaatcagatgaagaaagaccaaacgtcagctccgttaactccaaccggtcaactggacttagcaaggcggctttcctgcgtctgcagattgagatttttgaggctagcaaagatgataacagagaggcttcaccagaatgctctatttgccttgatggattttacgacggagatgagctgataaggttgcactgtggccacaggttccactcaacatgcttggagccatgggtgaggaaatgttcagactgcccatactgtcggacaaatatacggtcacaatcctgatggcaaacccttagttctgaacaagattataaccaccgcgaagttcaactgctgtaaattcgctgttgcgggcaccgcgttccagttagtctggtgctccaatggttgcgtgtcatttctaatatactgaatgttttgtgttgttgtgtggctcaaaaaggcatatggtgttgtgtgct

SEQ ID NO: 270889 - DNA, 627 bp, Zea mays
ctcgagccgcacaaccacaagacccacacacccgtcggtaaatgccaagatcgcaagtccacggcccaccccccaaatcggccaatctccacttcttaagctccctgtcgcctccgcctcctcgtcgtccggcctcccgcgcctccgccggggcctcgccgcctcgaatggtgtacgagcgcatccacgagccgctcccgcgccgtcagtccggcggattctccccagctaagctgcgagcgatgcttcgcgggctagagaaacaccagcgcaacagcggcgaggacacgtcgccggaggccaacgactccggcgagctcgacgaccggaggagcttggaatgctccacctccaccgagatgtcgagcaacagcggccacaggtcaaggaaccgggccccggacgacgacagcttcgactcggagagcagctcgtcggggccgcccacggtgaagaggtcggccgcggtggccgccttgctgccgcccttctctcgcccaacgccgtccaagtgggacgacgccgagatgtggatttccagccccacgtccaaccgtactggccgtgccgggcctaccgctggaactatgccaaagaagtccgcattggcatttcctggacatggag

SEQ ID NO: 270890 - DNA, 398 bp, Zea mays
gacaggcatggcgagccgcgagcggcagcacacccgacagctacgactacgactgcgagcacctcgtgctcgacccggcgtctctgggcgtgccgtgggccgacccggccgccgtggagatcccgccgcagctcctcgccgcgctcggggagtacctctccggctccgcggcccgcggggacgtcgaggcggaggcggatgcggacgacgagttcatgatgcacgagttcaaggtgcggcggtgcgcgcgcgcgcggagccacgactggacggcgtgcccctacgcgcacccgggcgaggccgcgcggcgccgggacccgcgccgcgtcgcctacgcgggggagccgtgcccggacttccggctgccgccgggcgccgtcaccggcgcgtgcccgcgc

SEQ ID NO: 270891 - DNA, 518 bp, Zea mays
  unsure (1)..(518): unsure at all n locations
acggacgccacgccctgcccgccggggctgcttgccactcctctctcttcctcatccatcctggccccggccccgcccccagaaccaaaccagcctccctccccagcagctcacgagagagcgcaagcaagtattactgcgcaccgcctcgcccgcgggcgtcagcgtgaagctgccgcacagctaccccgcgaggcatggggatggacgccggcggcgggaagctgtcgtacagctaccccgcccaccaggacggcaagctggtgaagagcttcagccgcgtggagccccgcaagttcggcctcgccctcgtcgcgggcttcctgctcgtcacctgcgcctacttctccaccgccaagttcgacgccatccacgtcgccatgatcagccccgtctccggcaatgcggctgtgatcggcccgctagtgggcgccgccacgccgacacctccgactccagcagcgatagatttngcaagcaagaccggacgatcgctgtccagtccgaggagaggaggg

SEQ ID NO: 270892 - DNA, 456 bp, Zea mays
  unsure (1)..(456): unsure at all n locations
gtggcgctgggcatgtgccgtgcccgtggcttgcttcgtcgtgctcactagtcacgagagagggaggaggctctgcttctgctagccgcttcttcttctcctgctgctcttccggagataagcagggggccgggacagctgactagctgagaggcatggggatggacgccggcggcggcaagctgccgtacagctacgccggccagcaggacggcgggaagctggtgaagagcgtcagccgcgtggagccgcgcaggttcggcctgggcctcgtggcgggcttcctcctcgtcacctgcgcctacttctccaccgccaagttcgacgccatccagatcgccatgaccagccgacccgtctccagcaatgcggccggggtcgncgncgacgccgacacctncaacgcctncaggcagggattagatttgggcaacacagggcccggcgcgatgtcca

SEQ ID NO: 270893 - DNA, 476 bp, Zea mays
ggtcgacccacgcggccgcggacgcgtggcatcgcccataatattttgagcattcaaaaacacacaaagggaagtgcactagcaacttcctaacaacaatggctaccaagatattagccctccttgcgctcctttccctttcagtgagcgcaacaactgcattcattattccacaatgctcacttgctcctaatgccattattccacagttcctcccatcagttacatcaatgggcatcgaacaccctattgtgcaagcctataggctacaacaagcgcttgcggcgagcgtcttacaacaaccgtttgcccaattacaacaacaatccttggcacatctaaccatacaaaccatcgcaacacaactagagcaacagtttgtgcccgcattgagccaactagccgcagtgaaccctgtctcctacttgcaacagcaactgcttgcatccaacccacttgctctggcgaacacagcc

SEQ ID NO: 270894 - DNA, 834 bp, Zea mays
cttccatcccgattcctccgcctttgactttccgcgcccgcagcccccgccggggtcctggcgacctgcctaggacagctgtcacgcccgcaaatcacgtgaccatgcccttccatgtcctcgcgtcctccactccgcccgcgagtcccctccccgcacccgcagcccccgccgtcgtcctcgcggccagccgaggacagccaccgcgcccgcaaatcacacgaccatgcccttccatgcccgcaaatcacgtcaccccttccatccatggcagtcgcgctccctctgcgcccttccatccatggtcgcggatccctacgcgccgcgattcttcccatacgctccctctgcgcccttccatccatggccgcggatccccgatgttgagatctgggagctgaagctggagatctcgcggatgcgggtgcggctgacggcggacgacggacggcgcaagaagtgcggcggccggagctcccagtgctccgacggcaaggcccgcaggcggtagaaggcatccttcgcctatgactgatgcttcgctgctggcgtcgacagtggaggcgcgacaggcggtgatcgtggatggatgcggtctcagcgtctggaggatcggtcggagctaagcagggaccgtggctgctgacagctgagtgggtgacgatgatcaagactgcggttttaactgttggtgatggcagtccgtcgctcagacgaacaaacaacagggaggaatggaacggatcaggaggagtttatagcaggaaatgctacaggctagcgagagattttttagcatgcaggaacgacgcaggatcagtaaagtagtgtagc

SEQ ID NO: 270895 - DNA, 461 bp, Zea mays
cgttgctgcggcgggagaaccgggagctgaagctggagatctcgcggatgcgggtgcggctgacggagctggagcgggagcaggggctgatgaagcagcaggggaggatgcgcggcggggacggcggcggcggcggcggcgggcggggcggcggcggcgagcacggccgcgccttcctcgcgtcgctgtccaggggcatcggccgcatcaccatgttcggcgggcccgcggcggccgacaggcggcgcaagaagagcggcggccggagctcccagtgctccgacggcaaggcccgcaggcggcagaaggcgtccttcgcctacgactgaagcttcgctgctgatatcgacagtggaggcgcgcagcgcatgcggcgatcgtggatggatgcggtctgactctcagcggctggaggaccggtcggagctaagcagggacggtggctgctgacagctgagtgg

SEQ ID NO: 270896 - DNA, 521 bp, Zea mays
gttctgtgagggcaatctgtaccaagtttgtaggaacgcaagttgcactgttactctgcagctgcctacaggaggtcagcgtcgcgttgcggaaaatgagatattggtgctgaggtattatcctcgacggcagccttgctgggatgtggtgaagaacctgggaggtcactcactttttgttggaaggaacaatgcagtgtcaatgtatgcagagggtgtgccaggattgaggggcaactgcgtatactggataggtgggcgcggcaaggatcaaggcatggtctttgacatggaatctgggagctccacgccgtgcacggctcctcctgttagccttttacctgggcatccacatagcacaatctgctggtacttcttgagcgatttaatgagcatcaacaacagctacaacagtagctgcagcagcagcagcggaggaagaaaagtttatcagactcgagcaagagcacgagcagatcttggacaagacatggaagaatgattgcatcgctgaacttctc

SEQ ID NO: 270897 - DNA, 600 bp, Zea mays
tcgctttcgcgtccgggcgattctccgccgcctcgtggggtctttgttatgcaccacgtccacgagcgcctccgccgctccaacgctccaacgcttgagcgcctccaacgccactccaacgccacgagcgcctccgccgctccaccgaacaactccaacgccactccagctcttgcagcagtagaactctactgcagccagctacgacaccctgcgcctgccgcactaggtacatttgattctggtttctgccgcacaagatccgctacctcttggacccggacatctacaccgacggcaggatctccgtgcagggcatcgacgccgtgctcttcgcgccggacgacgccaaggccacgcagaccgtcgacccgaacaggaagcctcctaccatcgtcacccacaagaagaagatcaagctccggcgagttcatctattgctcaacctcagtattggccaacgtgaaaacatggaggtgaagtgaagcaagtggtagttgagcatatgctggtggttggttgtcttcatgaacatctctttgatggctgataccattcctgggactgcaagccaacactgtcctttaacccatgacccat

SEQ ID NO: 270898 - DNA, 853 bp, Zea mays
ttgacgcgtgggcttcaaccgccgccgcagcctcgcggcgatctcggccgtgctgcccacgggcgcgcccgaggtggaccccaggacgcaccgcctcaagaagcccgcgccgccggtggcccccggcgcgccccccgtgctcccggtctgggacgccatggcgcccggcccctccatcgcccccgcgccggcgcctggcccgggctccgggaagcaccacttcgacggccacagccaggtcaaggacttcatccagacgctgctcctctacggcggctacaacgagctcgccgacatcctcgtcaacctcacctccctcgccaccgagatgggccgcctcgtctccgagggctacgtcctcaccgtgctcgcccccaacgacgaggccatggcgcgcctcaccacggaccagctcagcgagcccggctcgcccgagaacatcctctactaccacatgatccccgagtaccagaccgaggagtccatgtacaacgccgtgcgccgcttcggcaaggtgcgctacgacacgctgcgcctgccgcacaaggtcgtggcgcgggaggccgacggctccgtcaagttcggccagggcgagggctccgcctacctcttcgacccggacatctacaccgacgggaggatctccgtgcagggcatcgacgccgtgctgttcgcgccggacgacaccaaggccacgcagacagccgaccctaacaggaagcctcccgccatcgtcacccacaagaagaagatcaagctccggcgaggttagtacctacctaccttcagatctggacctttgctcctttgtgtcctactcgtaccattacagattgctcaaaagtatcccacc

SEQ ID NO: 270899 - DNA, 770 bp, Zea mays
cggacgcgtgggcaacgccttgcgccgtttcggcaaggtgcgctacgacacgctgcgcgtgccgcacaaggtcgtggcgcgggaggccgacggctccgtcaagttcggccagggcgagggctccgcctacctcttcgacccggacatctacaccgacgggaggatctccgtgcagggcatcgacgccgtgctgttcgcgcccgacgacaccaaggccacgcagacagccgaccctaacaggaagcctcccgccatcgtcacccacaagaagaagatcaagctccggcgaggcaagttgttagaggcgacgtgccagatggccgggctcttcggtcagcgatcgcgattcgcgagctgccagtagacggagaaaggatctgttgatctccacgacaccgaaagacgaacgaacgaacgaactgatgggctgccgcaggaggagggggagccgtccacattattgcttgtatttttttttccactcttttgtttattgttgagaataataatgaatcaggtgggggatgtaaactttgggttgttgttggtgtgtcgtccagaggggaaaaaagaaaggcagccaaaaaaaattgtccatacatgaatgaagaagcccaggatcgttgtctttgtataggagaaggaattgaaaccttttgtttttttttctttttctgtcattctttgcttctgttcccgttttgacaatgagaaatatcgggtaaacacacacccattcttacttaaaaaaaaaaaaaaaaagaaagaaa

SEQ ID NO: 270900 - DNA, 700 bp, Zea mays
cccacgcgtccgcccacgcgtccgcccacgcgtccgcccacgcgtccgctccgcctacctcttcgacccggacatctacaccgacgggaggatctccgtgcagggcatcgacgccgtgctgttcgcgccggacgacaccaaggccacgcagacagccgaccctaacaggaagcctcccgccatcgtcacccacaagaagaagatcaagctccggcgaggcaagttgttagaggcgacgtgccaggtggccgggctcttcggtcagcggtcgcgattcgcaagctgccagtagacggagaaggggctgtgataccgaaagacgaacgaactgaactggtgggctggggctgccctggagaggcagagggagccgtccacattattacttggtttctttcttttttttgtttattattgagaataatgatgaatcaggtcaggcgggtgggggatgtggctgtaaactcggtgggctgtcggtgtgtccagggggaaaaaaagagagaaaaggcagcgaaagaaattgtccatacatgaagaagcccagggtcgtcgtctgtgtataggaagggattaaaaaagatgttttgttttcttctgtctttctttgctttgcttgtgttcccgttttgacaatgagaaatatcgggtaaacacacaaccttccctattatacatttcccttcattttattatacat

SEQ ID NO: 270901 - DNA, 1058 bp, Zea mays
cagggcgccctcacggcgaactcccacctcctatcgcccctcacctctcctttctctctctagccccgcacaaatctctcctcccctctcgccctcgccgcattgcccgccgacgaccccccggcccccgccggatagagaggaggaggagcggcgcggctgcgggagagccgggcggcggcggcggagcgggcttcatgtgcgacctagtggccccctcgcgccggcaccagcagcggtacgaggatggccgtcggctagtggccggatgcataccatttaggtatagagctaacaatgatgaaacctctggtgacaaatctaagaaactcgtggaagttctcatgataaattcccaaagcggacctggtcttttgtttccaaagggaggatgggagaatgatgaaactgttgaagaggcagcagctcgagaagctatagaagaagctggagttcgaggtgatatagtgcattttctggggctctatgacttcaaaagcaagacgcatcaagatgcgtgctgccctgagggtatgtgcagagctgcagtgtttgcgctgcatgtaaaggaagagctggcctcatggcctgagcagagcacccgacagaggacctggctcacggtccctgaagctgcatcaagttgccgataccagtggatgcaagaggccttgctgacaggcttctctgactggcacgacaagtggagcagaggcgcggcgggcggcggcgcaaactgtgacccggcctaactgctgacaggcccatctgcagtcgtccaatttgtccatcccctcccatttcccctaggcccccaaccttgcggaatgcaataatacagtgtacttgtcttgatgctgggttggtcattgacatgttatcttagttgtagtgggacgaggtacatctcatcaagacgagaattctcacaacttttaagtgtcaattctcgtgccctattatttctcggtttcatccgctgtcgtcgcggtgctgcatgctgcatgcacgcgccgcacgcattgtaactccgctcctgattctggagatgcatatgc

SEQ ID NO: 270902 - DNA, 437 bp, Zea mays
cccagcgttctgcaccctcacggcgaactccccaccgccggtcgcccccctctctctagcgccgcacaaatctctcctcccccgctcgccctcgctgcattgggcgccgccaagccccccgccggatagagaggacgagaagctgcgtggctgcgggaggagcgggcggcatgtgcgacctggtggcccgcacgggccggcaccagcagcggtacgaggatggccgtcggctagtggccggatgcataccatttaggtatagagctaacaatgatgaaatctctggtgacaaaactaagaaagtcgtggaacttctcatgataaattcccaaagcggacctggtcttttgttttcaaagggaggatgggaaaatgatgaaactggtgaagaggcaacagctcgagaagctatagaagaagccggagttcgaggtgat

SEQ ID NO: 270903 - DNA, 426 bp, Zea mays
acgcagacggcgagcagaacacacctgcagctgcagaaatagggtcatgtcctgctagcttgagagctctggtacggtgtagcaaggtacgggagagagagagagtagcaaactagctagggcacagggcagggcaggggccggctgcattatattgggatcggatctgggggcgaccgagctagcatcagctgagagaagagagagggggcaatatataatggtgttgttgtcgctggaggcgttgaggaagaggaacgtggccggtccgctgctgctgttcaaccttgccctctacgtctccatgttggggttcgcgagctgggcgctcaacgccttcgtcgaccacataggcgaccaccaatactacgacccacctgcaggcgacgcgtgcacgtgcatggacacgcacacgcctgcatgagc

SEQ ID NO: 270904 - DNA, 422 bp, Zea mays
gggcctcacccttttccctggtgttgcaagttgcaacacacagcgtccggcgagatcggcgagcagaaaccacgagcccgcccaccatccggtacgcgcgcgcgatgtgtcccgtcagaggcggtggttgttcttggccagcgtccgtcgtcggctctgtcacggcggcgctgctcctcgccgccgtcatcgtgcggctcttcgtcccccgtgcctgttcttcaggaattatcaaggggcggcggcaggtaggtgctggtgctgccggaggagcacggctccctgccggctcgctcgggtggccgctcctcggcgagacgctggcgttcatccgggccccgttctcgcctcgcccggagtcctttgtcgagaaacgccgcgtcttgtacgggaaggtgttcaagtcgcacctgtgggggtcg

SEQ ID NO: 270905 - DNA, 558 bp, Zea mays
  unsure (1)..(558): unsure at all n locations
ggaattncccgggntcgaccccacgccgngtccgcaactaggcaaacataggaagggcacaaattaggggtacccaaccaatatggcagnnccaaaatatattttgcgcctcccttatgcctctccttggtntctttctgcngcaagtgccctgctacngcggcgacccanattttcccccccaatggccctcgcaaggcgctcctcaatagcttccncccttcttcccccccgtacccctctcaaccaccgcggtgtcccttcggtatttgtgaaaacccccaattcccttcaaccctttacaggatccccaacaggcaatcgcagcgctggcatcttaacctttatcaaacccttgttcctccaacccaatcatcagccctattacatcgcagttacctttggtgcatttatttggcacaaaaccaatcagggcacaacaacctacaccacaacttgtgctagcaaaccttgctgcctactctcagcaacagcagtttcttccattcaaccaactagctgcattgaactctgcttcttatttgcaacaacaacaac

SEQ ID NO: 270906 - DNA, 608 bp, Zea mays
  unsure (1)..(608): unsure at all n locations
gcgaggcantcgcagctggcatcttacctttatcacccttgatcctccaacaatgggcaggcctattacagcagtaacctttggatcctatcgggttgaagaatcgggttttcacataccgaagacaccgctggtgagaggtacggtggaagaagggaagctataggagcttgtgagcattgcgggaaaatggtcgcggtagcagcacttgcacaaagaccaaggagcataaggaaggcaaaatattttggctgccattgttggtacactattgcgctttctatgttgttgctaccgcaaccattttcccacaatgctcacaagctcctatagcttcccttcttcccccatacctctcaccagcggtgtcttcaatgtgtgaaaccccaattgttcaaccctacaggatccaacaggcaatcgcaacaggcatcttaccattatcacccttgttcctccaacaaccgtcagccctattacagcagttacctttggtccatttggtggcacaaaacatcagggcacaacaactacaacaacttgtgctagcaaaccttgctgcatactctcagcaacatcagtttcttccattcaaccaactggctgca

SEQ ID NO: 270907 - DNA, 923 bp, Zea mays
ctccgctagcataggaggcaaggaaggtttttttgaggaggccggctgtttatacgcggcgtgacagacacccagggccaggacgggtgctgtttatccatgctgctccggctgaagatcgtcggcggcgtccactcggtggtgctcccggctcctgttccaggcggctatggccatggcgcctgctacgcggcagtagagccctgctggcgccgaagccggaggccagcgctagcggcggcgggtggccctagtcgcgaggcggccgaggcagagcgccacggtggtgatggcgctgaaggaggagccggagggcagcagccgccgcggcttcgccggcggcggtccgagctgggaccccgggctggagatccaagtccccttcgagcaaagaccggtgaacgagtactctgctctcaaggatagcgccctctactcgtgggcggagctgagcccagggtccttcttcctccgcctcggcggcctgtgcctcgtgaccttcactgtgctcgcggctccaattgccgccgcaagcttcaatccaggaaaggatccactcaagttcgtgctagcagctgggatcgggacgctgcttctggtgtcactggcggttctcaggatatacctggggtggagctacgttggtgatcgcctgctgtcagcggtggtaccgtacgaagaaaccggatggtacgacggccagatgtgggtgaagccaccagaggtgttggcccgtgacaggctcctgggatcttacaaggtgaagccggtggtcaacctgctgaagcagacgctggtgggcaccggcgcgctgctcgtgggcgccgtgtcgctcttcgcgttcgccgcgccggtcgaggacttcctccacgccctgagccagcctccctcctccgccaccgcctcgtccaagccgagcttga

SEQ ID NO: 270908 - DNA, 1106 bp, Zea mays
cacgtctatagcaactgtgaagctcccacctgctgagaaaatgactcctgagagagtttacggtaaaagtggttctgtaagaaagacaaaggtccccataactgcaacaccttatactgtcgcttctctccaagttgctactaatagtttctgtcaagattctcttctgggtgagggctcacttggtcgtgtttataaggccgatttcccgaatggaaaggttcttgctgttaaaaagatagatagcgccgcactttctttacaggaagaagacaatttccttgaggctgtatcgagcatgtctcggctaaggcatccaaacatcgtgccattgacaggatattgtgttgaacatgggcaaagacttcttgtctatgagtacattgtaaatggaacgctgcatgatatgttgcacttctctgttgaaataagcaggaagcttacatggaacatccgcgtaaggatagcactaggcactgctcgagcacttgagtacctgcatgaggtgtgcatgccgtctcttgttcatagaaatttgaagtcttcaaacattctactagatgaggagcataatccacacctatctgactgtggacttgctgccttgactccaaatactgaaagacaggtttcagctgaagtatttggatcatttggctatagcgccccagagtttgcaatgtctggcatttatactgtaaagagcgatgtatacagttttggagtggtaatgttagagctattgacagggcggaagccactagacagttccagagagaggtcagaacagtctcttgttagatgggctacccctcaacttcatgatattgatgcacttgctaggatggttgatccagcattaaacggaatgtacccagctaaatcactctctcgttttgcagacgtaattgcactctgcgttcagcctgagccagagttccgcccacccatgtcagaggttgtccagcaacttgtgcgcttgatgcagagggctagcatcgtgaggcggcaatcaggagaagagctagggttttcatacagagtcccagaacgagaaggagacctgagagacatttccttatgagcaagtgcgtccacgatagaag

SEQ ID NO: 270909 - DNA, 647 bp, Zea mays
tcggcagacgtgcggggcagagcacaacagcaggggatccggggagggagggaagccatgggcgaggaggcggccaagaaggaggaggtggagaagcccaaggaggccgccgcggcagaggagaagaagaaggacgacaagcccaaggaagtaggcggcggcggcgagaagcccaaggacggggaggaggacgagaagaagaaggaggacgcgccgccgcctccgccgcccccgccgccggaggaggtcgagatgcgggtctacatgcactgcgaagggtgcgcccgcaaggtcaagaagatcctcaggcgcttcgacggagtggaggatgtgatcgccgactccaaggcgcacaaggtgctggtgaaggggaagaaggcggccgccgaccccatgaaggtggtggagcgcgtgcagaagaagactggccgcaaggtcgagctgctgtcgccgatgccgcccccgccggaggtggaggagaagaaggaagatgaggcggagaagaagaaggacgatgagaagaaggcagagcccgagccgccgaagccggaagagaagaaggatgcaggcggagccggaagcgaagagaagaaggacggcaaggaagaggaagagaagaaggaccgcggcgagaagaatgaagagaa

SEQ ID NO: 270910 - DNA, 1277 bp, Zea mays
tttccgactttctaaaccttcgacccatcacctggagctctgggatgtttttatcgttggtgcgccattgccgggccactgcagcgtcgtcaccgacagatgatgggtacgccaaggacgccaaggacaggaggcggcggcccggcggagacggggacagcgaggacgagggtatcaagtggttcctcccgttcctggcgctcgggctcctccgccacatgagcgcgtcctccaacctgatccacgactgcgacgaggtcttcaactactgggagcccctccacttcctcctctaccgctccggcttccagacatgggagtacagttccgactttgctcttcggtcatatttgtaccttttctttcatgctcttgtagctgggcctgcttcattgatctttggtgagcataaggttcgtgtgttctactcagtgagaatctttcttggtctcatttcaactattaccgaaactgttctggtggttgctctttcaagaagatatgggaagcggcttgcttgttatgttcttgcaatgctatgcttatccagcggttgcttctttgctagtaccagtttcttgccaagttcattctccatgtatgcagtaacactttcgtctgcactcttccttcttgagaaatatgctggtgcagtctcagttgcagctgctggagtgatccttggggggcctttctcaattttggtcttcctccctgttaccgtttattctctaattagaggatcttttagaagggtttttctatctggatttgtgacttcactgtgctttcttgttctttcgtttgttgctgattattactgctatggtcgattgacattctcggtgttcaatcttctgaaatataacgttattggtggcggcgaaagtcacttgtatggaaccgaggggttttcattttacttcaggaatggattcaataatttcaattttgccttcatcctggctcttcttttctcgggggttgtaccatttgcaagaaagaaatatgctcctgatctcctgatagttgtctctcctgtctatatctggttggctttcatgtctttgcaggcacacagagcacaggggagcctctatccaatttattcattgatatgtgatgcagctgcagctgatacagactgtttacctgattttttccatgacaaatattcatctgatcagtctattgttgaatagatagcgacaaggctagggactttgatacttggttttattctgtgtgcttgccacagccgaacattttcatgttaa

SEQ ID NO: 270911 - DNA, 354 bp, Zea mays
gcgcgacaacgccgggagctggggagggcaaacacgcactagacccaaatcctcgtagctccagacatccagaacggcagaaccttctagaccaaaccttcgacccatcacctcgagctccagccatgtcgctctcgtcggcgcgccaggacggggccactgcagcgtcgccaccgacagatgatgggtacgccaaggacgccaaggacaggaggcggcggcccggcggagacggggacagcgaggacgagggtatcaagtggttcctcccgttcctggcgctcgggctcctccgccacatgagcgcgtcctccaacctgatccacgactgcgacgaggtcttcaactactggg

SEQ ID NO: 270912 - DNA, 499 bp, Zea mays
gctggcgaaggcgcggcgcgcagggccagtagcaaccctcccatggcctacgctgcgcctcccatggcgtcgtccctcaccgcctcccacccccctctttccccgtcccacctcataacccatccgcatcgctgccctgcgcgccccaaccccaccaccggcctcctccgcctcaccccgtctcgccgccgcggtcgtccccccgtggccgtccgcctcgcaatatctgcctcgtccacctcagccccgcccccgtcggcggatcggtcggaggccgcgtcgtcgctggagagatacctctcggcgacggtgacgggagcggtgatgggaacgggggcggccccaccagcttcggccccgccgcgcgccccgccggcgatgaaggggggacggaagcagtatagcgcgttgggggctgtcacgctcgagaaggcccagcttcgatctcttccaacgccgcaagaatatcatgcccgagctggccacaggtgtggtgggt

SEQ ID NO: 270913 - DNA, 582 bp, Zea mays
  unsure (1)..(582): unsure at all n locations
gttgaccaccctccggtgctcggcgtcgcccaggacggcctcctccacgcgcggcggcaggagcgccgcgaacttggcggcggcgtagcggccgaaggcgcaggtcgggagcacgcccagcagctccgcgggctccatcccgcgcatgtcccggaactgcgcgtaccgctcccgccggaacgcggcggtgtccagcagcgacgagagggagccgtccaggtagaaggactcgtgctcgaagccgccnaggagggcgcgcgtggcgtgcgcctccagcgcgtgcttggccagctgcggggaggacaccgggggcttggtgagcgaccgggtggccgccgcgagctccagccccgccgcgcgcatcaggtgcgcgaggtgccccgcgaaggcccgcgtcgccgcgcgggcttgctcggcgcaggtggtgaagagctccgccgtcggcgcgccgccgttctgcttggagggcgggacgtggtggtggcgcccgttgcggcggctggtggccgccgcgagcttctctttgagcgcgttcacctcggcctgcctggactggagctggcgctggaggtcgtcgagcgc

SEQ ID NO: 270914 - DNA, 1112 bp, Zea mays
cagacgcgtgggcggacgcgtgggcgggggggatcgcgcgaggcgagatggagctctcgccggtggggaggtgggccgacctccccgaggacatcgccgtagccgtcgcctcctgcctccaggaggccgacgtctgcgcgctcggcggctgctcgcgctcctggcgcagagcctgcgacgctgactgcatctgggagcgcctcttccgctgccgctggccatctgccgtggcgtcggcgtcccctgtgcagggatggaaagctctctacatcagccagcacagaagaatggctgttgcaatatctaatgtggttgaatttgtgggcagcagcttaaataatgagtcacttgaatccgaatactatctgaaagctattgctgatttggccttgatacctgatataggattcctcgatgtccagtttttcttgttctcaaggaatcatagtgcgataatcaaccttattggactgcactactcgatcgcatctttgcatgtgctgccaactgaagtcagtaaagcactccaagctcaccgagtagcagaaagggtagtttgtgtgaacctggtcattaggtggttctatggtttccggttgcccgacgaatacgagtgccaccgaatctctctaggtgagctcaccgtggctgagggagcagagtttttcgccatccttaaccgtggagctgttcacacggtattccttctccggatcagtctggtgaacgtagacaagtgaccctaaagtacaaaaaggtacacacggccacacgccataattagctgcctggcttgttttgcgccctttgtaaatatgtgtaagcttttgttccctcgccccccctggtgcctcttgtttgttgcaaacgcagccgtggggatggatggatccaagtatggagccatttaagcttcggttgcgcagtaaactttataaatacgtaatgtaaaggcttgtcgtgtgtggtttgtgctgcacattttcgccgtttctgtgataagctctgtcgaatgttttctgtatttgttgcagagcagctagtgtgatccactcgttccctggaacacacaaaacaaaaaaaaaaaagaaagagtaaaaaaaaaagtaggt

SEQ ID NO: 270915 - DNA, 1308 bp, Zea mays
tgtccttccacgcgtccgcacgcacccgcacttgctgtctgccgctgccgagcagcagctcgagcagctccagaccgaccgcgaggccgacaaggagaaggataaggagagcgatgctggcgacaagctggctccgacaggtggcgacctcgtgctgtacaggcggattgctgaagtaaaagagaaggaacggagaaggactttggaggagatactctatgctctggttgttcagaagttcgttgaagctggtgtctctctggttccagcactctcacgctccaccgatccttctggaagagttgatcagtgggcagaaactgtggaagaaaagcttcaacgtctgcactcgcatgaggcctatgaaatgatcgagaatcacctcaccctcattctggggcagcgtcaaggtgacgccactatcgcagccataagtaagctccgtgttggccaggtctatgctgcatctgtgatgtacggttatttcctgaagagagttgaccagaggttccagctcgagaagacaatgaagggcctcccttggggatcagaagaggaagacggcgctttgaatcaagttatgacgaccgacttgatgccttcagctcagacttctagctctcatccagagatgggctcgtggaccgcgcctgccttcagcacaggagggcccagccaatctatcaagccttgccgccttaggtcgtatgtcatgtcgttcgatccagatacgcttcagaggtatgcaacagtcaggtcaaaggaggccttcggcatcattgagaagcacacggaagcgctatttgggaagccagagattgtgatcacacctgaaggcacccttgattcttccaaggatgagcatattaggataagctttgctgggctgagaaggctgatcctggaggctgttaccttcggatcgttcctctgggacgttgagagctttgtggattcccggtaccatttcgtgaccagctaagattgtcatcctaagtaaagaaaggttcgtggtttacgtctctggtctgaatgtctgtgggcttcggaaagacttgtacaatgatgctaggctgttaccacaccccttactgatgcgatggtatcaatgatttgcgcagttctatggcatcgcattatttgtaaagaccaactgccattatcctgatatttagccgttatgttctattaacatctgtgctgcccggggggcgtagcgatgtatttttttggctatcccctctgcaaattgtaagaggaattctaggctcatagccaattctttggcgaacctattattctcgtttt

SEQ ID NO: 270916 - DNA, 662 bp, Zea mays
tgtcatgtcgtttaattccgatacgctccagaggtatgcgacagtcaggtcaaaggaggccttcggcatcattgagaagcacacggaagcgctatttgggaagccagagattgtgatcacacctgaaggcacccttgattcttccaaggatgagcatattaggataagctttgctgggctgagaaggctgatcctggaggctgttaccttcggatcgttcctctgggacgttgagagctttgtggattcccggtaccatttcgtgaccagctaagatggtcatcctaagtgaagaacgattcatggtttacggatcttgtctcacaatgtctatgggcttcggaaaggctgttgtacaatgatgttagactgttaccactccccttaggccatgtttttcaccgttaatatatgtgaattggatggtattgagttggtttaaatttatagcaagtcaaaatacataccaatccattccaatacatttttaatcctcatagaattggatggtattgagttactgtatacggtggtatcaatggtttgcccagttttattgcatcacagtattgtaaagacaaaatgtcattagcctgatactcagacgataggttttagtaaaaaaaaaaaaaaaaaaaaaaaaaaaaagggggccgctcgcg

SEQ ID NO: 270917 - DNA, 1069 bp, Zea mays
gtatatatcaacagaaggcacttgatatcaatgaaagggagctgggtcttgatcatccggaaactatgaagagttatggggatttatctgccttgtactaccgccttcaacacattgaaatggctctaaagtatgtcaaccgtgcgctatatctgcttcagttttcatgtgggctttcacaccctaattcagctgccacctacataagcgtagctatgatggaagaaggcatgggaaatgttcatgttgctcttcgatacttgcatgaagccctgaagtgcaataagaggttgctaggagctgatcacatccagactgctgcaagctaccatgccatagccatagccctttcaatgatggacgcgtactccctaagcgtgcaacatgaacaaacaaccttgcagatacttcaggagaaactagggcaagatgacctccgaactcaggatgctgctgcatggctagaatattttgagtcaaaagcattagaacaacaagaggcggctcgaagaggcatgccaaaacctgattcatctattgcaagtaaaggacatcttagtgtatcagatcttcttgacttcataagcccggaccaggaaagaaaagaaagggatatgcaaaggaaatgcaggcgtgcaaagaataatatcagagctcatcatggtgaatcagttgaagagaaggagaattttcagcttgtttcaggatctcctcttgaagcaagcaaagacagttttcaagaagaaaaactggatgtgcatcctcctgctgtattagaagaaatttatgctgcccatgatgagcagaagcaatgtgatgttttatcaccagtaagagtattctgatgaagggtggcaagcagctagtatgagaggaagatctgcaaatgtaaggaagaaaagcagtcgcaggaaaccggctcttatgaaattaatggttgatcattttgaagatggtcatacaggttctgtgtataggactggtttacaacctcagacaaaaggaggcaaagaagattctgtgagtgcttctagccagctttcatttggaagttttttgaaaacggatt

SEQ ID NO: 270918 - DNA, 574 bp, Zea mays
cccgggccgacccccaccacgagtccggactgattgaccgcaccgattccgcgatacgttcccgaatccaacccatcttcgtccgctccggccactcgtttcgccgccgtcggtcgccacccgcaaggtttggaggataagattcgggagggatggcttccggtgggcagccgcagttccggtacacgcagccgccgtcgaaggtgctccacctgcggaatctgccgtgggactgcactccagaggagctggtcgagctggggacccccttcggcaaggtcgtcaacaccaagtgcggcgtcggcgccaaccgcaatcaggcattcatcgaattcggcgaccaaaatcaagctattgccatgatatcatattatgcatcgtcaacagagccagcacaggtaagagggaaaaatgtgtaccttcagtactcaaatagacaggagattgtcaacaacaaggcaactggggaaggttcaggcaacgttttgcttgtgggaatggagggtgttgcaccagattctgtcagcattgatgttctacacgtgctagccgttgtcacggagtatcatggcag

SEQ ID NO: 270919 - DNA, 1367 bp, Zea mays
caacagcggaaatctgtcgaggaaactggttccagtttctattcacccctgacatatttaaaagatgcccagggttttgcggagaagcttttctctcggttgcagaaatgcaatgagcgatttgaggtaaggatgatgatgctaaaagtaatcgcgaggaccattgggctgcatcacttggttttgttgaacttctacccgtatcttcaaagatacgttcaacctcatcaacgagatgtgacgactctactcgctgcagcagttcaggcttgccatgatatggtacctccagatgctgttgaaccactgttcaagcagatagtaaatcagtttgtgcatgaccgttctcgtccagaggctattgctgttggcttaaatgttgtgagagagatctgcatgagaatacctttgatgatgaatgaggatctgctccaagacctcgttttatacaaaaagtcccatgagaaagctgtttccattgctgctcgttcgctgatcacattgttcagagaggatctgtccttcattgttagtcaagaaagatcgtggccgtcctgtggatccaaaggctcggcccaaagcatttggagaagttactgttgctagcaacgttcctggtgctgagttgctagatgaaaatatttcttcagaaggggaaagttcggacgatgagtctgatggttttgactccgatgatgagatggacttgacacctgcccctcctggaacagaagaaaatatggagggttcatctgttgcaaacaaacatgatgccgatggagataccaaagaggaagatgatgcatctgatgatgaagatggtacggatcaagatgactccaacagtgatagcgatgaactagacgatgactctgatgtggatgaggatactgatatatctgatgaagacgaaggtgacgacggtgaagtgaaagaaagcataaatggttcagaggatgaagctttagaccagaaggaagacagcgaagaggaagacaagtcaaaaggcagtggctctaaagcgcagaagaggaagtttcatgattatattggacagctaagttctgctgatgcaagccttcgagttctgaagaggttagcaactgccaagaaggctgaagaaccatctgatgaaactggtaaaattctatccgatgaagatttcaaacgcatcaaagaactcaaggcaaagaaagaggcgaagctggctttggctcagcatggactaatcaagggtgtcgacacaaggtctgtaacctttaagatgccatcatctgaccagctcagcaggaagcgtgtcgatccacgtgagcttgaggctcacgtcaggagaaagatgtccaaggaagaaaggttggcgttggtac

SEQ ID NO: 270920 - DNA, 627 bp, Zea mays
tgcacgcctcgcaccgcacggggaacaccgatcgatcgatccctcgagaagcagagacaagtagcccgcccgcccgcccgcacacatagagacagagagaatcaagccgccgccgaccagtgacatggcgccctgggccattgccatccacggcggcgcgggcgtggacccgaacctcccggagcaccggcaggaggaggcgaagcgcgtgctggcgcggtgcctgcaggtgggcgtggacctgctgcgcgcgggcgcgcaggcgctggacgtcgtggaggccgtggtgcgcgagctggagacggaccccttcttcaactcggggcgcgggtccgcgctcacccgcgccggcaccgtggagatggaggccagcatcatggacggccgcggccgccgctgcggcgccgtgtccggcgtctccaccgtcaagaaccccgtgtccctggcgcgccgcgtcatggacaactcgccccactcgtacctcgccttcgacggcgccgaggagttcgcccgtgcgcagggcctggagaccgtggacaacagctacttcatcacggaggacaacgtcggcatgctcaagctcgccaaggaggccggcagcatcctgttcgactaccggatcccgct

SEQ ID NO: 270921 - DNA, 539 bp, Zea mays
acttggagcaggaccaagtgaatgctgttctgactgctgttgtccagggaatgaaccaggcagagctcagccctgaagttcgtcttgctgcagttaaagccctatataatgctcttgactttgctgagagtaactttgcaaatgaaatggagaggaattatataatgaaggtggtttgtgagactgctatgtctaaagaagtggagatcagacaggctgcatttgaatgccttgttgcaatagcatccacatattattcacacttagacccttatatgcaaaccatattcgacctgacagctaatgcagtgaaaggcgatgaagaaccggttgcacttcaagctgtcgagttctggagcgctatttgtgatgaagagattgcactccaagatgaatatgagggatctgaggatggcaactctactgtacactttcgcttcattgaaaaagccctccctttacttgttccgttgctgctagaaactttgttgaagcaagaggaagatcaagatcaagatgataatgcttggaatatttct

SEQ ID NO: 270922 - DNA, 1136 bp, Zea mays
actcgagcgaattcggctcgacagccatctcctcaccctcgttcaccacacagtccgccactcctttagtagcttgtgatttgtacgtcgacgagatcactggtcgggtggcggacgacgacacatggggaagggtagtgtgggtgcatcatggtgggcgttcctcctgctcgccggcgtgctgctggtcgtagcagccacggccggggcggaggacggagtggtcgaacgggaccgcaaggaggacctgcggtggtgcaagcaggcgtgcgagtggcagtacggaaaggacaccccgcggaagagggaatgcgagagcgagtgccgcgagcggcaccagcaagctgacgcgggcgaggacggcgacagcggcgtggacgcctacgtctcccgctccgggaggggcgagtgccggcgccagtgcctgcgccgccacgagggccagccgtgggagacccaggagtgcatgaagcggtgccgccgccgcggactggccgtcgacatggagcaagagtacggtcgcggcacgagagcgcgggcaagtgccgggagaggtgcgagcgccaccaccgcggggactggtgggagaggcagcgctgcctgatggactgcaagagccgggagcgggaggagggcggcacggcgaggaggaggaggaggacagcggcgaccgctgcccttgcgagaagcagtgcgagggccaccacgaccgggaaagcaggcagcagtgcgtccaggcttgcgagcgccggcgacagcagcgcggcggcagccgtgactccaacgtcgacgaggacgacagcgaccggcggtgccagatgaaatgccggcgccacagcgatcggcaggcgaggcagtggtgcgtgcagcgctgcgagcgtaacaacaggaggaggacgccgccgccgacgacgacaacagcggccggtgccagaagagatgccagcaccacagcgatcggcaggcgaggcagtggtgcgtgcagcgctgcgagcgtaagcaacaggaggacgccgccgccgacgacgacgagaacagcgaccggtgccagaaaagatgccagcagcacagcgactggatgaaaaggctgcggtgcatgcaacggtgcgggcgacatgaggagggctgcgcacgcg

SEQ ID NO: 270923 - DNA, 1075 bp, Zea mays
gtttaattttctactaggagctagtatcgagcgggttatttgcaacgacggcggggtcttggcgttggcgggcgtgtttggcaccatgggcgaccgctgccctgcgagaagcagtgcgagggccaccacgaccgggaaagcaggcagcagtgcgtccaggcttgcgagcgccggcgacaggagcgcggcggcagccgtgactccgacgtcgacgaggacgacagcgaccggcggtgccagatgaaatgccggcgccacagcgatcggcaggcgaggcagtggtgcgtgcagcgctgcgagcgtaacaacaggaggacgccgccgccgacgacgacgagaacagcgaccggtgccagaagagatgccagcaccacagcgactggatgaaaaggctgcggtgcatgcaacggtgcgggcgacaggaggagggcggcgcacgcgacgacgctgacgacgaggccagccacggcgaccggtgcgagaagaagtgccagcagcaccaccgcgactacgacaagaagcagcagtgcgtgcgcgactgccgccgcggccgtggctgggaaacggtggccggcgccatccttgaggtggtgtgacgatcgacgacgtgcatggcgtggcgcagagctaataataaaagggtagtgtacgcttaccgcgtacgtacgtgtcaccgggcgtggcactctccagtctccagggacccatccaccaagtgctactgctccttcgtagggagacgtgggaataaagagtggtagctgcatgcacgtacggcggccatggctctccgatgagagagctagctgtgtacgtgtgttcgtgatgttgttccatgcatgacatgtatacgtcttgcctaatcacgcttgactaggtgagagactgtgcaagtgtattgtgctatttattatataattatatagtactctttttatgggggtgtgttattttttttatttttttatttttttttatttattttttattttatttatattttttattattttattttttttattttatctttttattttattattttattattttatttttttataatttttta

SEQ ID NO: 270924 - DNA, 1117 bp, Zea mays
gcgccgcgttcgagatgctccgccgcacgctccgctggcgcagggactggaccggcttcggctccggcgccgagtccgacgccgacgccgacctccccgaggagctcgcgggcgcgtgctacctcgacggcgcggaccacgagggccacccggtgtgctacaacgcgctgggcgtgttcgcggacgacgccgtgtacaagaaggcgctgggcaccgaggaaggcaaggccaggttcctccggtggcgggtgcgcgccatggagcgccacgtcgccgagctggacctgaggcccggcggcgtcgcgtcgctgctgcaggtgatcgacctcaggaactcgccggggccggccaagaaggacttccgagtcgccgtcaagcaggtgcttggacctgttccaggacaactaccccgagctcgtcgcgagaaacatcttgttcaacgtgccgttctggtactacgcgttcagcaccctgttctacccgggcctgacgcagaggacgaagagcaagttcgtcgttgctcgcccgtccaaggtcaccgagaccctcctcaagtacattccgatcgaggccatcccggtgaagtacggcggcctgaagcgcgacggcgacaccgagttctccgcggacgacggcgaggtcgcggaggtcaccgtcaagggaagctccacggagaccatcgagatcgaagccactgaggctgatgccacgctgacatgggacctgacggtgctggggtgggaggtgaactacaaggaggagttcgtgccggcggacgagggctcctacaccatcatcgtcaggaagggcaagaagatggcgtccggcgaggaggcggtccgcaactcgttccgcaccggcgagccgggcaaggtcgtgctcaccgtccagaacacctcgcacaggaagaagaaggtgctgttcaggcacaaggccaagagcgcctgcgccaaaaagtgctgaaaggctaaaagatttgggagtgaaattggttgtggatttcaatattcgttacattctttgtgtgtgtgtaaggagagagaaagagagatagtcccttgttcggtgattatttgaggtggttgttgcagcaaaaatgcaaagagttttcggttgg

SEQ ID NO: 270925 - DNA, 474 bp, Zea mays
cggacgcgtgggcgtgacgcgtgggcggacgcgtgggtttttttcctctcctgcgcctcgccaccgcttcctcttgtcgcccgcctctctcatcgaccctaggcgcgccgcctcgccgccgccgatcccgcagccgtcgatcctggccgctccgatagccggtcagtccgtccccatcatcccctcgctatcgatcgcctccgacttgcgtgggtttccggcgcttgcacggccgcgacgcgactactcttggagtcatagttcgtggattgtcaatcgaaagagggctacttgattgtttggaatctacttttatagttgattccaagcatggaaagtctaccaaatggttcagtaaacaatgcggagcataaccaggaaaacaagaagtccatggatgctagtgtgcctgaagaagtacaagatgtttttatttacagagaagatgttgtgagcttgaagtccaaggaggat

SEQ ID NO: 270926 - DNA, 691 bp, Zea mays
ccttccgccctccgcccaaaaccccacgcgagcaccccattcccatccatggcgaccaccacctcttcctcctcgctgaccactcctctcctccgcccgaaccccaataccaaccctgctcccagatctctccaactcctcaggagcaggaggtgcgctcgtgccgtaactaccgccgtagccggaggtgcggtgccttacggggctaatccgcggcgcgggatttggtcgatcagggatgacttggtggtgccaaggtcgccctacttcccagtggagtccgcggcggggcaagagcgtgggccgtcgcccatggtgatggagcggttccagagcgtcgtcagtcagcttttccagcacaggattatccggtgcggtggtcctgttgaggatgatatggccaacatcattgtagcacagctgctctacctggacgctattgatcccaataaggatatcattatgtatgtgaattcgccaggagggtcagtgacagctggaatggctatatttgatacaatgaagcacatcaggcctgatgtatccactgtttgtatcggactagctgctagtatgggagcttttctacttagtgctgggaccaaaggaaagcgatacagcttaccaaactcaaggataatgatccatcaacctcttggaggggcccaaggacaggagactgatcttgaga

SEQ ID NO: 270927 - DNA, 126 bp, Zea mays
atatttgatacaatgaagcatatcaggcctgatgtatccactgtttgtattggactagccattccagctgtcactgaccctcctggcgaattcacatacctaatgatatcctgttctagatcgcga

SEQ ID NO: 270928 - DNA, 575 bp, Zea mays
aatcgaacggtccatgatcaagtctagcagggagaaactcactttcccaaggaagtcaccgtatccgcattcgataaacctgccgtgtcccgttcaccccgcgttcgcttcatccgggcgtgggctaccgccgcagccgccgccctacgtccggtgaccaggctttcattgagctttgccgacgacgaccacgcaccagatggctgggtatatgtcaagagggccccaaaatggttctgtgtatgtctgcaatctacctcctggaactgacgagaatatgttggctgaatattttggcaccatagggttgctaaagaaggacaaaaggaatgggcgcccaaaaatttggatctatagggacaaagtttccaatgaaccaaagggtgatgctacagtcacttatgaggatccacatgctgcttcagctgctgtggaatggttcaataacaaggatttccacgggagcactattcaggttcacatagctgagtcaaaaagcaaagatgctttcgattaccccacgagtttggacaccattgctggtgttggtgaacaagatgaactggataatggag

SEQ ID NO: 270929 - DNA, 463 bp, Zea mays
aaacatcctgccgtttcccgttcacccagcgtgcgctccatcttggcgaggccgcgagggcgaccgctacagcagcagccgccgccgccgccgccagatccccaggccttcgttgaacccttcgccgtaacgagatcagatggctgggtatatgtcaagagggccccaaaatggttctgtgtatgtctgcaatctacctcctggaactgatgaaaatatgttggctgaatattttggcaccataggcttgctaaagaaggacaaaaggactgggcgtccaaaaatttggatatacagggacaaagttactaatgaaccaaagggtgatgcaacagtcacctatgaggatccacatgctgcttcagctgctgtggaatgggtcgataaccaggatttccatgggagcactattcaggttcacatagctgagtcaaaaagcaaagatgcattccataaccccacg

SEQ ID NO: 270930 - DNA, 2120 bp, Zea mays
gggccggttagcacacagtaccgtattttattcaagattcttaatttttaaaccaaaactgtttgcaatcatctcagatgcagaaagagaaaagcaaaggtgttaatcctctggttgagccgtttgacttgaccttcttcgcacccatcagtctaccgattaaccaactccctgcaaagtcgactgcgtctcctcccacgcactgctgctcgaggagacgcgggaaaaataaaaaaaggcaactcaggaaactgtaccctttcggttctagcgcctatccccctcttattctcaccccctgagctctcttcactgatgagtgagccatcccctttggatggctcgtataatttagatccacgtctggagattctggacaggtatgtttagaacgacaggtgcgatgagaccatcgcctggaccttctcgaggtccatgccaggagacagcacgtaactagcagcaacagcgagcgcgatgaccaccaggctgctcttcaggcaggtggcgccacgggtcagctttccaaagatcactttgcagtgcttgtctgcttctttgatagatgcctgctttccagcatctgttgtggactccagcgcagcctcattcttagccttaaagttcttcactgttgccttgagagcttcagaactgagcttaggagacacatccctccaatcaatcacaactttgctcaggacagcaacactggcttcaatattttcaagataaattctttcccactgcttgtacgactctgcattttgagttaagcaccaaatgaaaacatcaacagcctccctggtgagctctgcgttgttttcttgcattgcttttgcacacaaaggtaaaagctgttgtgatgcttgtttcacagtttttgagccaggaggaccggcaagagccaactccttgatcattgggtaggctgcttcaaacctttctgtagccttcactcgagcattagaaacaggaaatgtggctctcatgaacaagtcaaatgaaacagggggaactaagcgttctccctttctaacagcaccattcaataatatagaacgagctttggtgacagacaaaattctttcaagcaactgcaaaaccaaatctcttgcaaggggattcccacttgacttcgcacataatgtgggaaatagagaatgagcccagcaaaacatgccagacactaggtcaccttgagaggcctgagcaataacccagacaatgatgggaagcttttcctgtcccagatatttattgtttcccattatctttggcataacatttaccagtacatcaggctttcttcttaaagtcatggcaagaacaacaaagattgcaacctgggcccttggagactgttgtgcaaccttctttgaacccttagggccagctgatggacctgacaattcagacatgatgctatctatacaccacaaaacaaagtctcccagggcatcagaagatctttgactgatccaatcactcacagtcttgatcacagcctcagatatatggcacagtgggatatcaaccatcttggacactgttgattctttgaacatctttgcccatggaaattgagatgcgctcacagctgcaaatgcccggccaaagtaatcagcaaacctcatgagctgaatgtcctgttgattctcgtacgatgccgagatctcgaagaggtgcgctgcgaggttctcggcgtcgatcaggacggcggcctcggcgaccgtcaccttcggcttcttcaccttgggcttcttaggcttcttgacctctccctcctggcgcggggcagcggcctcgtcggagtcgtcgtcgtcggagtaggcggcgcccgtggcagcggcgatccgcgcgtcgtcgaggtcggccgccctggaggcgagctgctgctgcagcgcgcggtggcgctcctgggagcgcttctcgacggcgtcgaagacgccgccaggcttgccgttggactgcagcgccagatcgggcgccgtggtgcggggcggctgcgcctgcttgcggttgcgcttgggatacgacaccgtctgccagccgtgcgaggggtcggaggaggcgacgagcaggcacaggaaggaagaaagcagcccacgcgtcaacga

SEQ ID NO: 270931 - DNA, 500 bp, Zea mays
caaggaatggaggagggcaatgacgagggcccaggagaggcggccattgaagaaccagttggttctcttggctcaatgtcgcgtctgtcgcatctattcatgtataatccagaaatggaggatggcaatgacgaggactcaggagaggaggcggccattgaagaaccagttggttctcttggcgcaatggcgcctctattcatgtatgatcaagaaatggaggacaacgaggaggatcaggcacactagatgcagattgcaccagctgcagcgaagcctttgttttgtgttgctggggcggctctacttatgtaatgtggaatggagggattgcgcaagcttaaaagtatggctggatcggccttgttttttaactggttctctagttactgccatctaatagccaacatttttcccgcttttgtaaatccgcgcagttgtttgtttcagaggaaaacccactaaggatatgcagaactaaaataaaaaaaaaaaaagaa

SEQ ID NO: 270932 - DNA, 849 bp, Zea mays
ctaaaggcaacggtgctcgctgtggtgctcaaggtgcatatgcattgtgaggcttgcacacaagtgatcaagaagagaatcctcaagatgaaaggcgtgcaatctgtagaggcagacctcaaggcttctcaagtcactgtgaagggtgtgttcgaggaggccaagctgtctgattatgtgtataggcgcactggcaagcacgctgctatcgtcaagtctgagccggttgcagctgagaatgttgatgatggaaatgccaaggatgacaagaaggcagccgaaggtggggaggagaagaaggatgatggcaaggaggaaaagaaagatgaagacaagaaagaagcggataaacagaaggatgatggcaatgctggtgatgaagggaaagacaaagaccctggcgccgttgctaacatgtatatgcactacccgaggtccaatcatctgagcgaatacggatatgcctaccagtacccacctcagctcttcagcgacgagaacccgaatgcctgttctctgatgtgagaaagccagaaccaagtgaccttaagcgcgaaaataagaggggattgagttatcccctgattttggaggttcaggaagtttagaacttttcttttctatttctaaggttgaactttctgtctggtacaaagtgaactctgggctggtttgtggacatcatattgcgtatgctactggttagtaggattttgtgttgcacctttcacctttggcttttatttttgtacaaagatgtattatatatgctagttttgaaatagcttgctgctagtactctgtagtctgttgtccggaatagacggagctttctcagttaacattgcc

SEQ ID NO: 270933 - DNA, 431 bp, Zea mays
gcccccaaaaccttcccagaaaggcgacggagtcaggttcgaatcgaaatcggggtcaccgcggcggcggcggcggcggcgggtctactcatcagagactacagagcagggggtctcacgctccggcggcgggacgatggccatggcgccgtcctcctcttcctccggtggcggcggcggcgacggcgccaacgccgccgacgcgatggctctcgtgcaggggtacacggccgaggagctcgccatcgcgggggagttcctcaccacctggctccccttcctctctgccggcctctgtccctcctgcgcctcctcgctccgcggccgcgtcgactccctgatcacgcgaggccgcgcagctgaagaatcgccgccggtcgatcagattgagccgtcagggtgggactcggatccagcgggcccgcagaacc

SEQ ID NO: 270934 - DNA, 730 bp, Zea mays
gcggaggtctcaagctccaggagtaattccggttggatctggacgacgaggaagctatacatttctttcaagatcttattaaccattgccttaggtcttttgttccttaaattggttaaaaccttccttaaatggcttaatattggccggtaccccagcttatggcctaaaaaccaggtttaatctgtacattcttactgtcacaagccaccggtataagccagaaacgacactgatggatggaagcctaggcgcctagcatttggggttcaagctgcgccgcatctgcgaattgattgggctgatgcagggcatgggcaatcttctcgtgccggtgacacccaggaattcgggttgtcagttgtcacttgtgatagtagaattccgtcacgcactgctgtagacctatgggcattcgtcagatgtatatatgcgttaatgtataaaatcaacttcagtagcaaatttgtgaataccggaatacgtgatggtttagggcctgtttgtttaccccatggattatataatctggattatttttggaggattatataatctggattatataatctgagtagttctgtttgtttacccagattatttgagttgttaataggattctttttgtatgaggaagacaagaatgccctctatatttgtactaggttgaaactcatatatgagatgaacaatgtaacaaccgtttctgagtattcataatttattacat

SEQ ID NO: 270935 - DNA, 1524 bp, Zea mays
cccacgcatccgcaaaagaaaattgaaaaattgaggcagctattatcaggagttttcagtgagcttacaaactttgatgagccaattcgttcaccattagcaccaactcttctcctaacaggagttgtgcctcaagaatcgtctatatttaagagtgccttgaaccctttgcgcctgacatttaaaacagcaaatggcggaacatccaagattatttacaaaaagggtgatgacctccggcaagatcagttggttattcaaacggtttctttgatggaccgactactcaaattagaaaatctagatttgcaccttactccataccgagttcttgcaactggacaagatgaagggatgcttgaatttattagttccagttctcttgcacagattctatcagaacatcgcagtattacaagttacctacagaagttccatcctgatgaggatggtccttttgttataacggctcaatgtttggagacattcataaaaagctgcgccggttactctgtcattacatacatattgggggttggagacaggcatctggataatcttcttctaactgatgatggacgcctttttcatgttgactttgcttttatccttgggcgagacccaaagccatttccgccaccgatgaagttgtgtaaggaaatggttgaggccatgggtggtgcagaaagccaatattacacaaggttcaagtcctactgctgcgaagcatacaacattctgaggaagtccagcagtctcattttgaatctattcaagctgatggagcgatcaggcattccagacatctctgccgatgaaagcggaggtctcaagctccaggagaaattccggttggatctggacgacgaggaggctatacatttcttccaggatcttatcaacgatagcgtgagtgctctgttccctcaaatggttgagaccatccatagatgggctcaatattggcggtaacgcaagctaatgtcgtagaagcaagtgtgaatctgtacatgctgactgtcacaagccacggtaataagcgagaaacgacactgatggatggaagcctaagcgcctagcatttgggggttcaagctgcgtagcatctgcgaattgattgggctgatgcagggcatgggcaatcttctcgtgccggtgacacccaggaattcgggttgtcagttgtcacttgtgatagtagaattccgtcacgcactgctgtagacctatgggcattcgtcagatgtatatatgcgttaatgtataaaatcaacttcagtagcaaatttgtgaataccggaatacgtgatggtttaagttctttagtagtttgtaatgataagactagcctgccaggtgccagcagtctcaggagcatgtgggctccacaaggagattagcagctgctggagcattaatgtgaaactaccaagtcttatatgatagcaatatcttttgctcatgcaagtagtcataactcgcaagtaatgggaaacatgtcatgcatgaggaagtattgctgtg

SEQ ID NO: 270936 - DNA, 693 bp, Zea mays
  unsure (1)..(693): unsure at all n locations
gttggagatggcgctggagctcggtgacgctacgaggccggaggtcgcctgcccctactgcgacgaggaccatgacgtcgcatccctctgcatccacctcgaggaggaccacccctacgagccccacgccgcgccctgccccatttgctcccaaaggattacaagggatatgcttaaccatatcaccatgcaacatggttacttgttcaagaatggtcacagatcccgtagatttattgttccagagagccatgcgatttcattattgagtcgagatctacgtggtactcatttacaggctcttctagggggtggtcatggccacagatcaaataacgcagtgaccacaaacatttccagtgatcctcttctttcatcgtttggcctgagcttctcagcatctgatgcaccagaaccatcaaaatcagcatcttctattccagacggtaccgcaatacgtaaggagacaccagttcagccttgggaatcaaggtatatattactcctgatataagtttgctagattctttatggaccacatttacgattgttctccataaattttaagctattttattaattacttgcatatctgctgaaaacgatctcatgatgaacctattgcatcttctgttctcctttagtcctttctattatccaattacctttacattggnttcttaatatatgcta

SEQ ID NO: 270937 - DNA, 508 bp, Zea mays
acatcgattggcctgagcttctcagcatctgatgcaccagaaccatcaaaatcagcatcttctattccagacggtaccgcaatacgtaaggagacaccagttcagccttgggaatcaagtattgattcatctctcacgagcgaggaaagggagcaaaagcggaaacaggccaccgggagggcaacctttgtgcaaggcctagtgatgtctactctattcggagattgatcgctcaagcagccctaggttcttgcacttgctagatcggctctttctcctgcctggtccgtcgtcagatagtgctccacccggttcggactctgatggcagggaaaattcgccccaggaaacttagccgcgttcacctttttttttttcagaaaagtgcgccgttgattctagcatgatgcagcttgatttaagctagctgttgctgtacctgtacctttgtttttatcaatttatcggccagcaattcttatctgtaaaaaaaaagacaaaaaaacaa

SEQ ID NO: 270938 - DNA, 512 bp, Zea mays
gtgcaccacgccaccccttcctgtctctctgctcctccgcatccgcttgtgcgcccgtgccgctcactgcactccattcccaatctctctgcctcccctgcctgtctctccacgccagtgcgcgcagatcgggcgggtgtgaagaggagctcatcacatcctctgctgcttcttctgtccaataagagctagctagctagctagctcgccgattcaacagcaagcggcggcagtgatgcgcggacttgtcctcgcatagccaagatccgtccagcagcggcagcttgagcgcagacagattcaagaatggaggagaaagcggcggacgcgacggcgacagtggcggcggcagcggcagcggcagcggcagcggatcaggacggcgcggtgtactgcagcgagcacccgtacccgccaggcgcggcagcggcggccggggcgggcgccggcggcatctgcgccttctgtctgcaggagaaagctcgcattgctgtctcgtcgtccaagtccag

SEQ ID NO: 270939 - DNA, 1126 bp, Zea mays
acgccgcagtacggtccgaatccgggatcgaccacgcgtccgcggacgcgtggcgagtaacagaattctgtaaacgaaacaaattgcagttgatcataagagcccatgagatgtgttatggatgggtttgagcgtttcgctcatggacaattgatcactttattttcagcaacaaattactgtggtactgcgaacaacgcaggggccatacttgttgtcggcaggggcttagttatcgtgccaaagttaattcatccacttccacctcctgttaattcacctgagtcctcccccgaacgtggggatgccacatggatgcaggagcttaacattcagcggccacctactccaaccagagggcggccacaagctgccggtgataggaattctcttgcttacatatgatacttgacacgacagagccacctccatctgctggatatgtttgtttgtaatcagaaatttctttaccagtttcaaggtacatatggtatagccaagaagaacaatcaaccaacaggacatcatggatacacttgtgatcagttccctggtaatcctttgtgatgcatcggttttaactgtagttgtgtgctaccgtgacttcagctcctaactggggagctgcataatcagcatttcagatctcaagcaacattgtatgattgcgataccagtggacaataatcaagtctgatgtagttgtaatagctaatctgtaatttcagtgtacatggatagattgttctttcgtcagagtaggaaggtttccaaatgtttgcatactatgcatgctgcagcctgggacgcggtttaaacaggacagctatacaagttgccagatctgagctagattgggcagagaagatttgaaccattttatttgctctccgcggagcgcgaatgtaagaggttgtgttgtgttgtgaaatactgaattcgttataggtatttgtgcaataaattaagttttgcttaaaaaaaaaaaaaaaaaaaaaaaaaaaaaaaaaaaaaaaaaataaaaaaaaaaaaaaaaaaatataaaagaatataaccgaccggtctaccttgatcaatcttagggtccccctcctattaaaaacattttatttaaaggggggggggt

SEQ ID NO: 270940 - DNA, 724 bp, Zea mays
gggagactatgttgaccgaggtcagcgcggcttagagacaatagctgggcttcttgctcttaaagtcgagtaccctgaaaatgtacacttgggcagaggaaatcatgaagctgctgacatcaatgccctttttggcttccgccttgaatgcattgagagaatgggtgaaagtgatggaatatgggcttggacaagattcaatcaactgttcaattatctcccactcgctgccatgatagaaaagaaaataatctgcatgcatggaggcataggaaggtcaataaacacagtggagcaaattgagaaacttgagaggcctatcacaatggatgttggttccattgtcctcatggacctgctatggtctgatcctacagaaaatgatagtgtggagggtttgagacctaatgcacgagggcccggcttagtgacatttgggcctgatcgagtaacagaattctgtaaacgaaacaaattgcagttgatcataagagcccatgagtgtgttatggatgggtttgagcgtttcgctcatggacaattgatcactttattttcagcaacaaattactgtggtactgcgaacaacgcaggggccatacttgttgtcggcaggggcttagttatcgtgccaaagttaattcatccacttccacctcctgttaattcacctgagtcctcccccgaacgtggggatgccacatggatgcaggaacttaacatt

SEQ ID NO: 270941 - DNA, 369 bp, Zea mays
  unsure (1)..(369): unsure at all n locations
acacaggtagataccacaaccctgtgcagagttcttgcagtctcatcaaggtgacaggaacgacataggacatggaggccaccctgtgcccgaagccccatttcgtggtcatcccatggccagccaccagccacatgatccccatcgtggacatcggctgcctcctcgccgcgcacggcgccgcggtcacgatcatcaccacgccctccagctcgcaactcgtccagagccgcgtggaccgcgccgggcaagcctcagcgggggtcacggtcaccgcgatcccgttcccgggcgcggaggccggcctgccggacggctgcgagaggacggaccacantccatcgtctgaccttgtgcccaactttttcg

SEQ ID NO: 270942 - DNA, 504 bp, Zea mays
cggacgcgtgggcggacgcgtgggtagaattgaaaatttttccattatcgaaagaagaaaaaaacataatataatggatcaaccatctgatcgatcgtcctgttcgtcctctctctctcttttccaggtgcccttaaaactgtcacaccatgaatgaacacacaccccaccctccagctcgcaccaacacgaacgaaaaacaggaagaagaaaaaataagcttactaccccgactttctccccttttaagcatgcaacgcaaaagggggaaaaaggaaaagtgattgcaagaaaaaaaaagagaagtcgatcgagagataaagcaattagtagcacttagcggcactgctcgtttttctaacctaccgatacctacacccgatcatgccgccggctcagcgctagctcagtcctcgaatccggtcttctactagacggcgtcccggacccggctgaggtcgcgccccttgagcgtcctgccgatcccctcgtgcaccgacagcg

SEQ ID NO: 270943 - DNA, 436 bp, Zea mays
agaccattagctttatctactccagagcgcagaagaacccgatcgacaccatgagggtggggctcgttgccctcgctctcctggctctcgctgcgagcgccacctccacgcatacaagcggcggctgcggctgccagccaccgccgccggttcatctaccgccgccggcgcatctgccacctccggttcacctgccacctccggtgcatctcccaccgccggtccacctgccgccggcggtccacctgccaccgtcggtccatgtgccgtcgccggttcatctgccgccgccaccatgccactaccctactcaacgcgtcccggcctcagcctcattcccagccacacccatgctcgtgccaacagccggatccaagcccgtgccagctgcagggaacctgcagcgttggcagaacccccatcctgggccagtgcg

SEQ ID NO: 270944 - DNA, 563 bp, Zea mays
cccacgcgtccgcgacaagggctcggccgcgatggcgaacgagatcaaggcggatctggagggcagcgatggccccgccaaggccgacgccatgcgccgcgccatctcgctcctcctaaacggcgagacgctcccgcagctcttcatcaccatcgtccgctacgtgctcccctccgaggaccacaccgtgcagaagctcctcctcctctacctcgagatcatcgaccgccgggatccggccggccgcgccctgccggagatgatcctcatctgccagaacctccgcaacaacctgcagagtcccaacgagtacatccgcggcgtcacgctgcggttcctctgcaggctctccgagcccgaggtgctcgagccgctcgtgccgtccgtgcttgcgaacctcgagcacacgcaccacttcatcaggagacacgctgtctcctccgtatccgcgatctaccgcctcccgcatggggaccagctcatcccggacgcgccggagctcgtcgagcggttcctcgcatctgagcaggacgcgtccgcgcggaggaacgcattcctcatgc

SEQ ID NO: 270945 - DNA, 614 bp, Zea mays
cgtcccggtcccgtcgtcagtgtcgtgtactcgttttcccttccaaggcacccgttgcgagggcggaggcgccgatggccggggcgggggcgggtgcgggagcgggggcgctggccgggctcgcagcgtgcgcgacgctggcgtgcaacgtcgcaggcgccgtgctcttcctcctcagccaagacgacgagcggctgcggcgcgggtgtgcggcgaggttgggcgctggcggcgtcgcgtcgcaaccggtggaggagtgcggggatgaagaggcgctcgcgccggacgccgtcctcaacctcgagctcggcgacccgacgatgtaccgggcgttctggcgggaggttggggactgcggcgccaccgtgatccgcgggtgccaggggatgagctacttctccgacgacgacgccgtgctctgctggttcctcgagccggagctggagcgcgaggtgcgccgactccaccgcatcgttggaaacgccgtcgtcgacggctaccacctcgtggtcggcaccggcgccacccagctctaccaggccgtcatgtacgcgctcagttcgccggcgcgccgggaccagcccgtacccgtcgtcttgccggcgccgtactac

SEQ ID NO: 270946 - DNA, 448 bp, Zea mays
attatttagaccaactagcaacatagaaagcacaatagtgtaccaacaatggcagccaaaatatgttgcctccttatgctccttggtatttctgcaagtgctgctacggcgaccattttcccgcaatgctcacaagctcctatagcttcccttcttcccccgtacctctcaccagcggtgtcttcggtatgtgaaaacccaattcttcaaccctacaggatccaacaggcaatcgcagctggcatcttaacctttatcaccctggttcctccaccaatcatcacccctttaccagcaagttcctttggggcctttattggccccaaacattaagggaccaccacttccacaacttgggcttacaaaacttggtggctacttttaacaacaacaggttctttcattcaaccaactaactgcattgaactctgcttcttatttgcaacaa

SEQ ID NO: 270947 - DNA, 1518 bp, Zea mays
ttctgctatggtcaggacagcatccctcacatgctttgctggcatgacttctgatgtattcttctccctgcctgaaaataagagagactatgtgacctcttcttctgttcatgcggcgttaaatgatatggttcctagcgtaagatcagctgcatgtcgagctattggcattgttgcatgttttcctcagatattgtcaagctctagcctaccaggcaagttcatagatgccattgagttcaatacacataactcatcaactccagttcgtgtcaccgctgcatgggctttggcaaatctctgctcttgtattcgttttagagcactggaagtgcatacagatccctatgcaggtgtaggtgtattgagcaaatcaagcatatctcttttggttgaagttgctttgcgtctggccaaagatagtgaaaaagtaaaatcaaacgctgttagagctcttggttatctttcaagatttatcagattcaattaccacgccggcacaataaatgacccaagtaacagtgattcacttttttatggagatcctgtgtggcttgaaagaatggtgcaggctttgatgtcttgtgtgacaactgggaatgtaaaggtccaatggaatgtttgccatgcccttagcaacttgttcatgaatgataccttgagacttcaagacatgccttgggcatcaagtgtttatagcatacttctacttctaatccgggactcaaacaattataagataaagatgcatgcagctgttgctctatcagtgccagtgtcaaggcttgattaccgcagctcatttccagatgttgttcgaggcctcgtgcatgctctcgagtcattgaactcaaacaattcatcgttaccttcaaatttcaaacagagagacaacctcgagaagcagcttacgtttactgctctccatttgcttagttttgtgtcaccaaacgacgatccaagcctgaaagattttcttaccaagaaatcgtcgttcctagaagactggctgagatcactatgcgcatcgttcaacagctcggagcgccagcccttgccaacggaggccacaaacgacgaggacggcttcagcccaaacgtgactcagaaaggcatgctgtcttccgccctgcagtccttgctcggcgtgtacgcgggcaggacccagcaggtcatcacccagagatttgagcaactggctagaagcgtcgcttgaatggtgagcagcgacgagcagtcaggtgtggtctccactccagcctccattaacaagcagcgatatattggtcgtcgtctacccctcaggacggacagcgcgtcaggcagtggatccttaaattctgccgaatcccatgagctccaggcggcacttgtctcggatcttggctgtcatcatgcacaggctctgcaagcctggcttggtcggtgttttcgcgttggttacttgaacatcgtactgtgagtcaccacacattatatatatattatatatattataattattatatatatatatat

SEQ ID NO: 270948 - DNA, 614 bp, Zea mays
cagagtataaaagcaaatatggtatgtggttcgcatcaagagttgcaccggtcgtcttcatttgaaaggcattgggaagaaagcgctgcagaaagtgttgcaagtaatgatgtggtatcactcctgaattcttcaattgtttcttcaaaagtagatgctagcaattctgtcttagagaaccctgttgtgggaagtgagatgtggagaagtaaaacgaaagattctaagcctgccaagtctggacgtctatctcacgaagaaaagaagcttgggaagtctaatgatgaaaagaagacaaaacctcggaagtcaatggaatttcataacatcaagattggcaaggttgaacttcttgttacatacgagggatcaaggcttgctattaatgacctaaggttgcttatggatactttccacaaggcagaatttactggtacatggaggcgactattctctagagtcaaaaaacatatcatctgggggagttttgaagtcggaaccgggatggaagggaagaaagttaaccaccataaggaaacacttggggggtctatttctggaaatgatcttaacttgagtgacaaggatgttggtcaacctggaaaacatgatca

SEQ ID NO: 270949 - DNA, 1570 bp, Zea mays
gaactcagggcttgtgaatatgcttgtcgaggacaggtatgaagacctgaccaggatgtacactttgtttaatcatgttcctgatggtctcgcaacaattagatctgtgatggtgtctcatattaaggatactggcaaaagtttggtaacagatccagagagactaaaggacccagttgattttgttcagcggcttcttaacatgaaggacaagtatgacaatatcatcaatgtgtcatttagcaatgacaagagtttcctgaatgctctcaattcctcatttgagaactttataaacttaaacaacagatcacctgagttcatatcactgtttgttgatgacaaactgcggatgggggtgaaagaggccaatgaggaggatcttgaaactgtcctggacaaagtgatgatgctgtttaggtatttgcaagaaaaagatctatttgagaaatattacaagcaacacttggcaaagcgtcttctttctgggaaggctgcttctgatgattctgagagaagcatgcttgtgaagctgaagacagaatgtggctaccagtttacttcaaagttggagggcatgttcactgatttgaagacctctcaggatactacacaagggttttatgcatctacttcctcggagctgccggcagatgcccccacaatgtctgtccagatactcacaactgggtcatggccaacgcaaacctgcaatacctgcaatctcccccctgaaattgtttctgtctcagagaagtttcggtcttattaccttggcacacataatggcaggaggctaacatggcaaacaaacatggggacggctgacatcaaagtaacatttggaaatggaagcaagcatgaactgaacgtatcaacataccagatgtgtgttctcatgctgtttaactcagcagatgtcttgacttaccgtgaaattgagcagtctacagcaataccagccgctgacctgaagcgatgcctccagtcactagctcttgtgaagggtaagcaagtcctgcggaaagagccgatgagcagggacattgccgatgatgacagcttctgcgtgaacgacaagttcaccagcaagctcttcaaggtgaagatcggcaccgtggtggcgcagaaggagaccgaccccgagaagctagagacgcggcagcgggtggaggaggacaggaagccgcagatcgaggcggccattgtgcggatcatgaagtcgaggagggtcctcggccacaacagcatcatggcggaggtgacaaagcagctgcagccgcgtttcatgccgaatcccgtggtgatcaagaagcggatcgagtcgctcatcgaacgcgacttcctggagcgggacaagacagacaggaagatgtatcgctatctggcctaagagaaccacctgtccttgaattcgatttcatcatatctacccatgttgtataaacagaccctgatccatgtaacttgtccagagaaggaaatgggtctttctgcatcccgtgccccttttaagttgagacttttttttcaaaaaaaaaaaaaaaaaaaactcgagactagttctctc

SEQ ID NO: 270950 - DNA, 1176 bp, Zea mays
agctctttctccctctcgtggcgctgggcgaccgcctacgcaggccgggcgccgtcgccctaagctacgccaggttcccgggtcttggtcggtcccttcaccggcgaagagcacccaccagacgcgccggtgcctggatccggaggaagtgctgcgggtttcggcggttcgtctctctcgttgtttccggcggggttatgaaggcggtgggatacaacctctacgatagcagcgggactgatgacgatctccctccagcacaaaatagaggattgagaggacgggttttcagtgggaatggccgagcatctgctggggcatttccttacatgagggcaaataatgatttggagagtgaaatacatcgagttgagcaagatgcatatactggtgttcttagggcatttaaagtgcaatctgatgcaatatcctgggaaaaagagagcttgattactgaactcaggaaagaactgagggtttctgatgaggagcatagggagctattaaataaagtcaatgaagatgggagcatccgtcaaatgagggagttaagacaggcaggtggaatcccaagtggtctgcatcgtggcaacagggttttatatgatgcagaacctgggcccactaccaagaggcaaagggcatctcattcgattccttcgcaatctgcaggcctccagtcccctatgatgccctcccactcagtttcatctgcaaaatggggtcctttgcaagcaagaggcacgaaagcgaggacgcccattcctttggcgttaccatctgtggatccaagttcactaataaaccataaagtttatacaaggtggccagaagacaacaacttctatgaggccaccataacacggtataaccctgtgacgggtgagcatggactcgtctatgacatgggcacacaagccgagagttgggaattcagtttaactttgtgatatggcacctgaagatataagatggggatttgatggacacctttcaaatcgtgatgtctggagcccttctggccctatgttgatgaggcacatgaccaacaatggtgctatggcaggttcaatcaagggaagagggaggttatcaataaatgagacgataaaggactatgctccacctgaaaatggcaccaataggaattttgatcatgtcgacataccaaatacc

SEQ ID NO: 270951 - DNA, 437 bp, Zea mays
cgcacaagccctagccgccgaccaccatggcggcggcgccacctccggacccgacggttctgattgaagacctcgtcgaggagttcctcctccgcattcccccggatgaccccgccagcctcgctcgcgccgccctcgtcagtaggcactggcaccgcgtcatcaccggccccgtcttccgccgtagattccgtgagttccaccgctcgccacctttgcagggctacatctccaacatccacaattccatccacttcgtccctatatcgtcgttccgcccgcgccatgctgacctcgacgacgtgatagcgatccactcaagccctggtcgcgtccttctctgtcgccgccccgggaagggtctggatgtcttccccgggaagggtctggatgtcttcctctccgtgtgggatcccatcaccgatgagctgcgggat

SEQ ID NO: 270952 - DNA, 499 bp, Zea mays
cccacgcgtccgactgctcagtccactgcccagcacggatctcatctcaccagctgcccgcgcatccaattcctctcgctggacggctgcagcacatcatcaggtgagaccgtgagagggaatgggatcaacaacaatgtcccctccatcttttcccgtcgtcctcctgctcctcctcctcgccaccatagccgcagccgccggaagcaacatggatgaggaggtggtggacgacctccagtatcttattgacaactccgacgacatccccaccaacgatcccgacgggtggcctgagggagactacgacgacgacgaccttctcttccaagatcaggaccaggacctcacaggccaccagccggagatcgacgagacccacgtcgtggtcctcgccgccgcaaacttttcctccttcctcgcctccagccaccatgttatggttgagttctacgcaccttggtgtggccactgccaggagctcgccccggattacgcc

SEQ ID NO: 270953 - DNA, 415 bp, Zea mays
gtcttccttcccacccatccctgtttctagctcctcctccttccccagcgggtggccgcagcaatttgcaagcagaggaagaaagcttccgggcgtctcggcgcgaagaacagcgtcacgttctgacggaggagaacaggagaaggtctcgggtttcggccggctgcctgtatgagcgccaccatggcgtggtatccattaccgcagagcggaggcacaggcacgccgtcgggcggcggcgagctgttggacgaccagagcggcggctgggcgctctggagcttcggctcagctgacgacgaccacggcgctggcgtggtgcgcgcggagacgcgcgggagttcagacgagcggacggaggagggccggcccgcgccgccgcagcagcagcaggcaacagacgacatcttcatga

SEQ ID NO: 270954 - DNA, 1135 bp, Zea mays
cccacgcgtccggtggaaagaagaggaagcgaacgagaggcaacggtggccggtcgcgggacgggtggggccacgcctggcctgacgcgggaagccggccggaaccatccaactccgccgcgtcgtcgtcgccttcgtctcgcgtgctcaccaagagaacaaaacgcgagcagccaagaattcaacgtccacggtccgcccaccctccgtttccgcttcctccctccacgtcgtctcggtcttcctctcctgtaatcccgtgacacgggtggctgcgacggcgaatcagatccctacccgtggcgttggtcgtgaattggcgccgtctccccctgccagccggattccctgctttgttctcaggcaacattttgttcactagtgtggtagctttgttgattggagtgcgcaatgggaggctgtgcgggaaaggtacgtcgtgatgacgaagaaaagcttgattttaaaggtggaaatgttcatattataacaagcaatgagggctgggaccagaagattgcagaagcaaacagagatgggaaaactgttgttgcaaatttcagcgcttcctggtgtgggccatgccgtgtcattgctcctgtctatgctgaaatgtcaaagacttatcctcaactcatgttcttgacaatagacgttgatgacctgatggacttcagctcttcatgggacatccgtgcaaccccgacattcttcttcctcaagaacgggcagcagatcgacaagctcgtgggcgcgaacaaacctgagctcgagaagaaagtgctagcagccgctgatgccagtacgtcctagtgacacaagtggaagtgggcaaacgatctgtgatggcttcccggtgtatagtttccatggttcatttgtgtgcttgtcccatgtttgcctggggacgatgacgttttacaattttggcccccatcgcgcgcactcgtctgtttctctcatggaagccgtgtgaacctgtgcgtgtgtgtgacgaatgaacggaactttatatggaccagtgcttaagagtctttgcaacataattatgaaggtttgtttgcaaaaaaaaaaacagaaaagtaaagaataaaaaaaagaagtaaaaaaaaaagtaaagaaaggggggccgctc

SEQ ID NO: 270955 - DNA, 558 bp, Zea mays
gataagtctttgacatttcagcatagacaggagcaatgacacggcatggcccacaccatgaagcagatcgacaagctcgtgggcgcgaacaaacctgagctcgagaagaaagtgctagcagccgctgatgccagtacgtcctagtgacacaagtggaagtgggcaaacgatctgtgatggctttccggtgtatagtttccatggttcatttgtgtgcttgtcccatgtttgcctggggacgatgacgttttacaattttggcccccatcgcgcgcactcgtctgtttctctcatggaaggccgtgtgaacctgtgcctgtgtgtgacgaatgaacggaactttatatggaccagtgcttaagagtctttgcaacctaattttgaagggttggttgcaaaaaaaaaaaaaatataaaaaaaaaaaaaataaaataaaataagaccattataaaaaaaagttatattgaaaaaaaaaaaaaggaagacatctttttttactcaaacaaaatacccttttagccggctagaccattaactgggggggcccttttagggttt

SEQ ID NO: 270956 - DNA, 716 bp, Zea mays
gcacgggcacggggacgcgagcgtgtcacgtgcgcaccaacattccgccccgaattcggcatcccgtttccagcaacctaaaagaaaaggaaacagaaaaaaaaaatcacaggagaaaccgatttcccccttttctttattttcttcgtcctcttcgtctctactcgccgcccagtcacctcgaatcccttcgatccaatctccgagcccttggcaatccaacatcaatgtattaggcgcccccttcctcaaaccgcggcggcgcggccatggcccacggcggcggcgccgggaaggcgaaggtgacgccgaacctggcggtggacggcgagggcacgcgcacgctcaaccgcactgtgctgcagcgcctcgacccggccgtcgaggatattctcatcaccgcggctcacgtcacgctgtacgactttgacaccgatgtcaaccagtggagacggatggacgtggaggggtcgctcttcgtcgtcaagaggaatgctcaacccagattccagttcattgtcatgaatcgcaggaatacagataatctagttgaagatctcttgggagattttgaataccaacttcaagctccttatattatgtaccgcaatgctgctcaagaagttataggaatctgggtttacaactcccaggagtgtcaacaggttgcaaatcttttcagcaggattctgaatgctttctcaaaggtggcacca

SEQ ID NO: 270957 - DNA, 1237 bp, Zea mays
gggaactaggatcagaagcaaaagattgctgagagaatgctcacctggcggacaaactcacgtggcagtgatattggcctggctaagtatgacagcggtgaaattgggcatgggaagtatgacagtggtgagatccctcgtggatatatcccgtcactaactcatagccagatctcaggagagattcctggagcttcccctgatcatatgatgtctcctgttgggaacattggcaggcgtggacaccaatttccttatgtaaatcattctccaaacccatcgagggagttctccggtagccttggcaatgttgcatggaaagagagggtggatggatggaaaatgaaggataaaggtgcaattcctatgaccaatggaacaagcattgctccatcagaagggcgtggagttgctgatattgatgcttctactgattataacatggaagatgccttactgaatgatgaaactcggcaacctctatctagaaaagtgccaattccttcatccagaataaatccgtacagaatggtcattgtgctacgtttggctgttctatgcatattcttgcgctaccgtatcacacatcctgtgaacaatgcatatccactgtggcttttatccgtcatatgtgagatctggtttgctttgtcctggattttggatcagttcccaaagtggtccccaatcaaccgtgaaacataccttgatagactggctttaaggtatgaccgagaaggtgaaccatctcaattagctcctgttgatatctttgtcagtactgtggatcctatgaaggagcctcctcttgtcactgcaaatactgtgctttccatccttgctgtcgattatccggttgacaaggtatcttgctatgtttcggatgatggagctgctatgctgacttttgatgctctctctgaaacttcagagtttgctagaaaatgggttccgttctgtaagaagtacaacatagagcctagggctccggaatggtactttgctcagaaaattgattacttgaaagacaaagttcaaacttcatttgtgaaagaacgccgggccatgaagagagaatatgaagaattcaaagttcgtatcaatggtcttgtagccaatgcacaaaaagttcccgaggagggatggatcatgcaagatggtacaccttggcctgggaacaatactagggaccatcctggaatgattcaggttttcctgggtcacagtggagggcttg

SEQ ID NO: 270958 - DNA, 626 bp, Zea mays
gtcggctcgttgagtcgttgacagccgtagcccccacccccagcacgccgtccccgctttcctctcgccatcttccccagaattccgacccgctagatccgcaccctgttctttcgcctcgctcctcggcacctgcccgtctcccatgggctcttgccgccgctgacactggggcccaacgctctcctccgcgtccgcacccgcctccgcctccgcctcctctccctccccttccacctcctcctattgcctccactaaacctagccgaccgcctccgcccgccgacatcggaagccctagttgctgcgggaaccgccctgccggcccgccgctcctccgccccaagtgtccctggtttcttggatgcaccgactgctccgatggatgcccctgcgcccgccgtggagatccgcgaagtctgggcgagcaacctggaggaggagttcgaggtgatccgcgacgtcgtcgacgcgtacccgtacgtcggcatggacacggagttccccggcttcgtggtgcagccgatcgccgagtaccggttcacctgcgaccgcatctacgccggcctcgagggcaacgtcaacgtgctcaagctcattcagcttggcctcaccttctccacgag

SEQ ID NO: 270959 - DNA, 558 bp, Zea mays
gacccaccagatccgcccccgttttctcgcctcgcggtctcgcccctcgcacccgcccctcagctcccatgggctctcgccgtcgctgacactggggcccaacgctctcccccgcgtccgcgcccgcctcctccccctcaccctcctcctcctcttgttgcctccactgactctagccgaccgcccccgcccaccgacatcggaagccctagctgctgcaggaactgccctgccggcccgccgctcctccgctcgaagcgtctccggtttcttggatgcaccggctgctccgatggctgcccttccgcccgccgcagaggaccccgacgccgtggagatccgtgaagtttgggcgagcaacctggaggaggagttcgcagtgatccgcgccgtcgtcgacgtgtacccgtacgtggccatggacacggagtttcccggcttcgtggtgacgccgagcgccgagtaccggttcacctgcgaccgcaactacgccgccctcgagggcaacgtcaacgtgctcaagctcatccagcttggcctcaccctctccaacggggc

SEQ ID NO: 270960 - DNA, 710 bp, Zea mays
gcgggagcggtgctgctccagaagcagacggcgagcgagcgactcacctctcatctgcccgcccctctcctccgtacagcctctccccctctcctctcctctcctcccaaaacaagagcagcgagacgcgcgcgcgcgcgccacgagctggtggaacctcgccgcctcccgcggcagatctcgcgccgagccctggtttcgacgcgagatccgcgcccgccgtccgccgctcgccgcctccgtcccggagcattaccaggattatacttccaccttgaagatggcgatcggattactagcgtttgagagccaccaggggctctggaacagcggatactattcacagttgtttggaattggaggagttctcatcactcttaccattcttatgttatccacgggctactttgggggaattggtgccccatttgctccatatttctggccgtatctaggacaagttccaaagaagagggaacgcaaaaggcctgtgagagtgtacatggatggatgctttgatctcatgcactacggccatgcaaatgcattgcggcaggccaaggtgctgggcgatcagcttgtagttggagtgggtagggatgaggagattgtggcaaacaaagggccacctgtcctttctatgggagagaggttgtcctcttgttagtgggcttaagtgggtcttataggtgttttccaattcttcctat

SEQ ID NO: 270961 - DNA, 571 bp, Zea mays
cccgtccaagcccctgctccggcgccggctgccggcggcgaggctcgcggcatccgccgcatccaggggtcaagcctcggcgaccgcgggcgcggcggcgccggcggccgtggagacccgcggcggggacagggaggggcaggtcacgccgcggtccgcggacttcaacgcctggtacacggacgtcatcgccgctgccgagctcgcggactacgggcccgtgcgagggaccatggtcattcgcccctacggatacgccatctgggaggccatccaggattatttgaatgtcaaattcaaggagacagggcacagcaacatgtacttccctcagttcattccatactcatttatagagaaggaagctagtcatgttgaagggtttagcccggagcttgcattggtcaccattggaggaggaaaagaactagaggaaaagcttgtggtaagaccaacaagtgagaccattgtaaaccacatgttcaccaaatggattcagagctatcgtgatcttcctctcatgataaaccagtgggctaacgtgacaagatgggaaatgcggactaaacca

SEQ ID NO: 270962 - DNA, 383 bp, Zea mays
cgcgagcgtagcctctccttctcccctctcacgtcccaccgcatgcgcaacacgcgcctgccttcccggtccagccccctgcccccaggtgttgcgtcccccgtcgatcgccactcgaccctgctggtggagtgagtgccggtgatccatccggagttggatttgtcctcggcaaggaggttttgcaccatacaagatcgtcaaaattgccgaaatgggaggtataattagtggggactcgcctaggcacagctcaccagcatcgaagttagagaaaaagatggttgacgctatgcaacagagggcattaaaaggaacctctgtgaaatcattcaatagtgtcatcatgaaatttcctaaaatcgacgagaggttgagaaact

SEQ ID NO: 270963 - DNA, 1095 bp, Zea mays
cactgccagatctcctctcctctccactgaagactctgaccagtgggactaggatattccttcttcttcacccacgactccgccttcctagttcttgggcggccggcgaggacgaacacggactcgcgctctcgctcgcgccatcggaggaaaggagatccactcggagcatgcgggccgccgcgcggtagatgaaactgaggaacacggcaataacacgagcaaattcagcttgtcttccaatgggggatcgtgttggtgtcaagtacaacagcatcaatgaggctgaagagcataagggagggcatggcatccccaaggtttccatgatacccctcatattcctcatattttatgaagtttcagggggtccctttgggattgaggatagtgtcaaggctgctgggccactactggcaattttgggctttcttctgtttgcactcatatggagcgttccgagaagctctaatcactgctgagatgggcactatgttccccggcaatggtggttatgttgtctgggtttcttcagctcttggtccgttctggggttttcagcaaggttgggcaaagtggctcagcggtgtcatagataatgccctctatccagtcctatttctggactatgtcaagtccagtgttccagctcttggaggtgggctcccaaggaccttagcggtgcttatcctcacagttgcgcttacatacatgaactacagagggctgactatagttggctgggtggcagtctttcttggggtgttctctcttctcccgttctttgtgatgggattgatagctattccacagattgaaccttctaggtggcttgaaatggacttggggagtgtggattggggattgtatctgaatacactattttggaacctcaactattgggattcaatcagcacattggctggtgaagtcgagaatccaaagagaaccctaccaagagcgctttcttatgctctagttctagtggtgggaggatacctctacccattaatcacttgcacagcagcagttccaatcgttagggagcactggtcagatgggtatttttcagacatcgcaagaattctcggtggc

SEQ ID NO: 270964 - DNA, 937 bp, Zea mays
agggcctccccgggcaggcgctcttcgccgggcagcccacatggatcgcctctggcctctcctccgcgccgtgcgagcgcgcgcgtcaggcctacaacttcggcctccgcaccatggtatgcttccccgtcggcaccggggtgctcgagctcggctccaccgacgtcgtgttcaagaccgccgagagcatggctaagatccgctcgctctttgggggcggagcagggggtggctcgtggccgcccgtgcagcctcaggcgccgtcgtcgcagcagcccgccgccggagccgaccacgcggagacggacccgtccatgctatggctcgccgacgcgccggtcatggacatcaaggattccttgtcgcacccgtcggccgagatctccgtctccaagcctccgccgcatccgccgcagatccattttgagaacgggagcacgagcacgctcacggagaaccccagcccctccgtgcacgcgccgccacccccgccggcgccggctgctccacagcagcggcagcaccagcaccagaatcaggcgcaccagggcccgttccgccgggagctcaatttctcggacttcgcgtccactccttccttggcggcgaccccgccgttcttcaagcccgagtccggcgagatcctcagcttcggcgccgacagcaacgcccggaggaacccgtcgccggtacctcccgccgccaccgccagcctcaccaccgctcccgggagcctcttctcgcagcacacggcgaccatgacggccgccgcggcgaacgacgcgaagaacaacaacaagcgctcaatggaggccacctcccgggcgagcaacaccaaccaccacccggcggcgacggcgaacgagggcatgctgtccttctcgtcggcgccgactacgcggccgtcgacgggcacgggcgcgccggccaagtcgga

SEQ ID NO: 270965 - DNA, 373 bp, Zea mays
aaccactactccatcccttcctccgcgtccgcggaggccgtcgcggacaacctgtggaacgcgttcctcggcggcggcaacagcgacgtgccccgccccttcggtgacgcggcggtcaacgagcatcgacttctacatcgacgaccacagcgcaccgggcgaccactacgacgagctcgcgcgccgtctcgactacttcaacagcatgtactaccacgccacgacgaagtacgtacggctgacggcgacgccgcggtgcgcgttcccgcccgacggccccatggcgcgggcgctgcggacggggctgttcgagcgcatccacgtccgcttctacggcgacgccgacaagtgctcgtacaagaacggcgacgtg

SEQ ID NO: 270966 - DNA, 442 bp, Zea mays
ggtgttggtttcttggttgtgcttcgcggcggccggcgtcggcgcgataggggcgaactggggcacgcaggcgagccacccgctgccgccggagacggtggtgcggatgctcaaggacaatgggttccagaaggtcaagctgttcgacgccgaggagggcaccatgagcgccctcaggaagagcgggctggaggtgatggtcggcatccccaacgacttgctgtccacgatggccaccagcatgaaggccgcggagaagtgggtcgacaccaacgtctccagctacctcaacgacggcgtcagcatcaggtatgttgcagtcgggaatgagcctttcttggagacatacaacggaagcttcctgcagtccactttccccgccatcaggaacatacaaggcgcgctcataaaagccggcctgggcaaccaagtcaaggtgaca

SEQ ID NO: 270967 - DNA, 421 bp, Zea mays
gctctaccggtctcgattcccgggctgccgtcgtggcgtctcaccgtttccaggatacgaacatgaggtcggccaccctgcttacgatctgcaccttgtccgcgctgctgctggtggcgcgcggctcggagaagccatcggccgcgccgccgccggtggtggccgtgggcgtggcggcagccagcgacctcatccgctccggcggtcaccgctacctggacgtcagaacagaggaggaattcaggagtgggcatgtggaggattcactcaacgtgccctatcttttcttcacttcacaaggaagggagaagaaccccaagttcatcgcacaggtcgcagcgggtttcgacaaagaggacaacatagttgtgggctgcaaaagcggagtgaggtctcgattagcatgtgctgatctcatggc

SEQ ID NO: 270968 - DNA, 508 bp, Zea mays
ggttcctttccacaggatgtccgaccccgccgctggaggcgccatggttcctgctgccggacgcggcatcgcatgggcgaacggcggcccccggttcggcgacatggtctgggccaaggtgaagtcccatccgtggtggcctggccatatctacagcgtcagcctcaccgacgacgaggaggtacaccgcggccaccgcgacgggctcgtcctcgtcgccttcttcggtgactcgagctatgggtggtttgaccccagcgagctcgtccccttcgtggaccacttcaccgagaaggcggcccagggcggcagctcccgcagcagctttgccgccgccgtggccgaggccgtcgacgaggtagcccgccgcagcgcgctggcgctgctctgcccttgcgacattcctgacgccttccgtccccaccccagcgacggcaacttcttcctggtcgacgtcccggcattcgacaccgacgctgactaccaactcgaccagatccgggccgga

SEQ ID NO: 270969 - DNA, 688 bp, Zea mays
gcccgaggcggcgccggcgggcaacgcgggggccgaccgccccgacggcaacggggcccccgcggaggagcccgaggaccacgacatgccgcagctggtggaggcggatgtggagaaggcgctgtgggcccagatcggcatcttgcatggcggtggcggcctggtcggggacagcagctacggggcgcaggaggaactcgacgaggaagaggccaaggagatcgacagcgcccgcgcgcggcgccggaaggcggcctacgagatggccatcgcctcaggcggcgccagctcgctcatcctgtccaactacgcgcagctcctgtacgagatcgacaaggacatcgagagggcggagatgtacttcaagcaggcggtggccgccgagccggcggacggcgaagcgatgcggaggtacggcatgttcctgtggcacgcccgcggcgacacgggcggcgcggaggacatgttcaccggcgccattgacgcggagcccgagagcagccaccaccggagcagctacgcgtggttcctatggatgaccggcggcgtcgagacctgcctcatggacaccggcaggcagagcgacggcaacgacgcggattgaaccgcgcagcgcccttggcttgggatcggagacacaatccaaaagcagacaagaaaaagacgacgacgaccttacctttaccac

SEQ ID NO: 270970 - DNA, 1162 bp, Zea mays
  unsure (1)..(1162): unsure at all n locations
cacgcggtacgtgagttccaccacagagcacaggggcggaacacacgggcactagcggcggacgcgtgtggccggggatctagatctcccatcgcctcgcctcgtctccctccagtccaaaccgccgtcgaccgccttgcccccgactccgcccgcactcccacccgctgctgccggatcccctgcccctaccgtacggtctgcccgctttcaccggccgcccgcccgccgncgccagcctagctggggtcgggtggagatccaccaggaaaagagggtgctctcttctcctcgtgcgggtgttgtaattttgtcaagccagaagggcagcagtacttatagagttgttccaccatggccaatgatggagacgatggacaaagccaggattatctcttcaaaattgtcctgatcggggattcctctgttggtaaatcgaacttgctggcaagatttgcaaggaacgagttctacccaaactccaagtccactataggaggggtcttccacacacaggtgttggtcatcggtgggaaggagattaaggctcagatatgggacactgctggacaagagcgctttcgagcagtgacatctgcttactaccgaggcgctgtgggagctcttctcgtctatgatattagcaggcgtcagactttcgacagtgttggtcgatggctcaatgaactacacactcattccgatatgaatgttgtcacgattctggtgggtaacaaaaccgatctgaagcatgcgcgtgaggtgagcaccgcggaaggacaagccctggccgaggctcagggcctcttcttcatggaaacctcagctttggattcgtcgaatgttgcagcagcttttcaaactgtggttaaggagatctacagcatactaagcaggaaggtgtttcagtcactagagcagaagaaaagcgagctgcagtcgctaagcagcgggaaagccgtggtgctgcagggtgaggccaaccaaacaagcagtggggggaggtggttgctgttcctcgtgacctgacacgaggactgcagctatggagggcgatcggattgtgagacattcgggtgtgtaaccctgtaggtccgatttgtgaaaagttgcttttcccccatgttcttgttctaaaggtaagctggcgtggctgcttgta

SEQ ID NO: 270971 - DNA, 542 bp, Zea mays
agacttggcaacgacagatagatattgagagaaaggagcagccaccggccagcgggacaacccaaccaacgcgatctctggggcaggcaaaggacgacgggtcggcgagaggcggggccatgaggatccggaagcgcacccctgccagggcagcgtcgccgggaccgccgcctctgcctcctcctcctcccctaccgctgcagcgtcccacggagaaaccacgggatgaggcggcggcggaggaggaggaggagaagcgggcggtcctcgccgccggagtccgagaaggcgacgaccgggttcgccccgccgccgccgccgctggctctgggaacagcagcgcaacggacgacgtgccgaggccggagccgcaggagcaggaccccgccaggtgcagccggaacgacgggaagcggtggcgctgcaagaaggcggccgtgccggggtacctgttctgcgaccgccacatcgcgtggtccatacgcaagcgcaagtccagagctagcaccaagctcaaggttcacggcagcggcgtcctggag

SEQ ID NO: 270972 - DNA, 540 bp, Zea mays
cccacttgtccgcccacgcgtccgcccacgcgtccgagcatccccttcctcttgccatcgatccagtcattgaccttgattcatcctgtagttcatcagataatgcgttcgcttcacattctgcattggttgaaggcatggaacaggacacaggggattccagggcctcaaagaataacaaggcctggagaagatctttggatttctactcccatcctgacacaaatcagtccacgaattatcaacccagtgaaagcgctctcgctccgcacaatcctgataacacacaagaagcgtctgttgatccatatgattcagatatgactccaagcctccaggaggctttgcaccggtcaactatggacataagtggtgcagagtatagagggaaggaggtaccacttcttgtggtccctacaaggtatctcctcaagctggacaccacgatgacctcttactgtgatatgcaacgagtcctctttgagaggagaaatcagcatataatcaagctattgcaacaaatatttgtgatgggaagat

SEQ ID NO: 270973 - DNA, 615 bp, Zea mays
tcgcagcaagcagccgttcccccaaaaaaggccagagctcagcagagccccgcaggccgccgcacccaccagaaaccccagtcgatcggcggcggcgatgtcgctgtcctcggtgaagatcggcgaggaggtttggctcacatgcctctcccacgccctcactaccgagaccgaggaggtcatgggcctcctcctcggcgacatcgagctttccagcaagggcgccaccgcccttatatggggagcgtctccgcagatgaggtgcgagcggaagaaggaccgcgtcgaggtcaacccggagcttctcgccgccgcatccgcgcaagccgagaaaatgacggccaccatcaagaagactacgagggtgatcggatggtaccactcgcacccacatatcactgttctgccggcccatgtagatgttcgtacccaagccatgtttcagttgctggatacaggctttgtgggccttatattttcttgttttagtgaagatgctcaaaaggttggaaaaatccaagtgtatgcctttcagtcagagggtggacaacagcatgcctttctcttgccaatgctgcagttattgaccttgattcatcgctgagttcatcagat

SEQ ID NO: 270974 - DNA, 386 bp, Zea mays
ttcgacgcgtgggcggtaggatacagatcgcacggttctgccctagccatgttgcagttgccggatacaggactttgggggccttatatttgcttgttttagtgaagatgctcaaaaggttggaaaaatccaagtgactgcctttcagtcagagggtggacaacagcatgcccttcctcttgccattgctccagttattgaccttgattcatcccttagttcatcagataatgcactcacttcacattctgcattggttgaaggcatggaacaggacacaggggattccagggcctcaaagcataacatggcctggaaaagatctttggatttctactcttattctgacacaaatcattccacgaattattaacccaatgaaacac

SEQ ID NO: 270975 - DNA, 813 bp, Zea mays
tctatctatatatactactagcaaaaccagcaacaacaacacccaatgccatcacgaatgtggaacctcaacaaagccctggtcacctcactactctgcatctcggcgttgtcgtcgtcgccatggccatgcacggcagccggtcagctgggcggcaagcccctggtcaccgccgtcaccaaggacgcgtccacctccctctacacggcgccgctcaaggacggccacccgctcgtcctcgacctcactagcccggtcatctcgctggccacgtgcgccagctcctccaagaacaacaacggcacgctcaccgccacgctatccgccaacgccaccgacggccagaacccgctgttcccggtctccttctcggcggtggccacgtgcgcgccgtcgtccaggctgcccgccggcgccggcgccgtcggcgtcgcggggctcgcgccctcctccagcagccagcagtcgctcccggcgcaggtggcgcgcacgcagaaggtcgccgacaaggtcgcgctgtgcctgcccagcgacggcaggtccacgtcgggcgacagcggtcggcgtggccatcttcggcggcggcccgctgttcttcgtccccccggaccgcggcgacttcaccacgatgctggccggcacggcgccgctccacgccggagccggagccggtgcccccgggtactacgtctcctccaccggcatcgccgtggagcatgcccgcgtgggccgacccgccggggcgctcggcgtggcgctgagcttcacggtcccgtacaccgcgcttccggcccgactggtacgctccgttcg

SEQ ID NO: 270976 - DNA, 476 bp, Zea mays
cggtcgcttgggttcagcccccaaacccgaacactcgcaatcgcaagtcgcaaatatctgtcgccgtctcgccaagccagcaccaaccgcctcctagaactcgaccgccatggcgagccaaggcgagccgtcttcctccgatccgaagggaagaaggattactcgacggcgatcctggagaggaagaagtcgccgaaccggctggtggtcgacgaggccaccaatgatgacaactccgtcgtcgctctgcacccggacaccatggagaggctccagctcttccgcggtgacacggtcctgctcaagggtaagaagagacaggacactatctgcattgtgctcgcagacgagacgtgtgaggagccaaaggtccggatgaacaaggccgtcaggaagaactcgagggctcggcttagtgatgtggtatctgtccatcaatgcccagatgtcaaatacggggagcgtgtgcacatact

SEQ ID NO: 270977 - DNA, 1872 bp, Zea mays
ttttcttttgacgcgtgggcggacgcgtgggcggacgcgtgggaagaaaacctctgaaaaaatctcaagtttgaatggtattgcacaaaccaatgtaagagcacaaaatttgaatggtgtgtctccatttggtgataagacgcacggcacaatcattggctactctacaatttccagcaagactaaaacaatccactgttcaaagaatgaggtcaaagctgaagatgctccagcctctcaaaacaatgctctaccttccacacaagcccccatagctcgaaatgatgttggtatcttgccaactaaaccaatgcagtttgctgtaaaaaatgaggagaaaacctcatcccaccaacctgcgccatttacaaatacttgtggtgaacaaacagttgttgggaggcccttgcaggaaatggaacctaaggctggtgcaggggaaaatacttctgttgtctctgctgttgctaatgatgccgctacattgtccaaggcagacaaactaacttctcagcctcaaacagctccatcttccaagccaactgccaatgtaaaggacacagctactgagtttgctacactgtctttatcaaagaaggattctgttgtttcaaatggtgctgtgcttagcattggatgtctcacatccggtgagaaagcaatgaacttatcagaatctgtggatcaagctaatgaaatcacaaaggcacttcctacgagtcagaacaatactgcaccagtaattgctcaagcagattgtggagtagagatcagctctggtgtcatcatgcacgttgctgtgtctgcttcatgcaatggaactacagagaaaaaggtgaattcgaagtcaaagaagtttgtgaggtatcctgttgtgaacatgtggttagggtccagacatctaaagccagggaagaaagcgaaccgcaagagaagtaaaatgataagacgtgttgtagcctgcaaggacgcggcaaatttatcttgtttgagtgagcagctgacgtcaacatcgtccactgcatgctctgaaaccgtagaatgtacctccagccatcagaaacggtcacatgctagtgcaaggtccaaagatgacgcccagtcctcgcaaaacaagcagaaggtcgacggagctcgtgtcggtgctggcacaagtgcaccttcttgcagtgccggcgttccaaagtctgatccgaacccttccacagatgctaaggttgtagcgacccagcctgccagtattcgcgcaacggacctgatggaagctaccgttccgcgctgggatgacgtagacgtgccaaatataaaggtcgctgagccgcagtccaaacgcaagagcggtggctacatcttagatgagtgggacgaggagtacgaccgagggaagacgaagaaggtgcggagatcaaagcaagactttggcgggccaaacccgttccaggaggaggcggactacgtatcgcagcggaggacgaagcagaaatcctaccgaggcaagtcttggaacaagcgggcctaacacggtagtagagggggagttgagagaatacgcgaagagagaatccctggacgcacatgctgtttgttgttacgttttagcacccattggtgagggagatttacgtttaaaaaccatatccgtcgtcggtacggtagtccccattagttgtcgacgatatgacgttttgggcagttttcgtagaacatttgaaacatttgttctgtttagttgagttggggggaacaaaattggcgagactattttgctgcattctgctctgttgtttagttactgatgaagaataaaacgatggtggtgatcagttttatgattcagtgcttgccaatgcgatctttacccttttgggaagt

SEQ ID NO: 270978 - DNA, 968 bp, Zea mays
  unsure (1)..(968): unsure at all n locations
tggaaaaatagtgacaccatttcgtattgtcaagaacttgcgctgcatttctcgcactttccgaaattcaagacaagaagatgcacacgagttaatggttaatttgcttgaatccatgcataaatgctgtttaccttctggggtatcgactgagtctcaaagtgcttatgacaaaagcttagttcacaaaatatttggtggccgccttagaagtcaggtcaaatgcacacgttgcttacattgctccaataaatttgatcctttcttggatctcagtcttgagattgccaaggccacgactttggtgcgggcacttgaaaattttaccgaggatgagctactagacgagggccaaaaggaatacgagtgtgaacgctgcaggcagaaagttgtagcaaagaaacgacttacaattgataaagcccccaatgtcttgacaattcatctgaagcgcttcagccctttcaatcctcgtgagaagattgacaaaaaagtggacttccaatcaattcttgatttgaaaccatttgttagtgactctaaaggaacagattttaaatacagcctttatggtgtcctagtccatacaggttggagcactcaatcaggccattactattgctacgttcgtacatccagcgggatgtggcacaatcttgatgataaagaggtgcgccaagttcgtgaagcagacgtattgaagcagaaggcttatatgttattttatgtacgtaacagtattgggaagtcggtggtgtgcaaagataataatgctgctaatttgctcaagaagaaaacctctgaaaaaatctcaagtttgaatggtattgcacaaaccaatgtaagagcacaaaatttgaatggtgtgtctccatttggtgataagacgcacggcacaatcattggctactctacaatttccagcaagactanaacaatccactgttcaaagaatgaggtcaaagctg

SEQ ID NO: 270979 - DNA, 673 bp, Zea mays
cccactcgtccgcccacgcgtccgcccacgcgtccgagctaccgttccgcgttgggatgatgtagacgtgccaaatataaaggtcgctgagccgcagtccaaacgcaagagcggtggctacatcttagatgagtgggacgaggagtacgaccgagggaagacgaagaaggtgcggacgtcaaagcaagactttggcgggccaaacccgttccaggaggaggcggactacgtatcgcagcggaggacgaagcagaaatcctaccgaggcaagtcttggaacaagcgggcctaacacggtagagaggggggagttgagagaatacgagagagagagagagagagagagaatccccggacgcacatgctgtttgttgttacgttttagcacccattggtgagggagatttacgtttaaaaaccatatccgtcgtcggtacggtagtccccattagttgtcgacgatgtgacgttttgggcagttttcgtagaacatttgaaacatttgttcggttgtaacggagtgctgtttagttgagttggggggaacaaaattggcgagactattttgctgcattctgctctgctgtttttagttactgatgaagaataaaacgatggtggtgatcagttttatgattcaaaaaaaaaaaaaaaaaaaaaaaaaaaaaaaaaa

SEQ ID NO: 270980 - DNA, 176 bp, Zea mays
gcaaaatagtctcgccaattttgctgcattctgctctgctgtttagttactgatcaccaccatcgttttattcttcatcaaccactaaacagcagagcagaatgcagcagaatagttactgatgaagaataaaacgatggtggtgatcagtttaaaatacaaaaaaaaagggcggc

SEQ ID NO: 270981 - DNA, 741 bp, Zea mays
tttttgaccaaagctttttcaggtctgagatcaggttgcgggaggggcgtactaagcctattgatgttctccttaagaatcttagtttctcagatgaatttgacattgagttaaatgagccttatctggtgttcaagggattaacagtgaaagaaatggaagagctatgtgatgacattaagatgcatcttgatctggacagggaaagccaaacaaatgttaagtactgggaggcactcatggcggtatgtgaatgggagctaggtgaggctcggaaaagagatgccctagatcgggctagggtccgtggtgaggaaccaccacctgaggtccttgcagaagagagaggtttgcatgcaagtattgagggggatgtaaaaagtctcctggatggtaaaacttccacagagcttgaagatatgcaaagtcaaattgagtcccaaatgcgctctggaactgcgaaagttgttgaatactgggaggctattctgaaacggcttcatatttacaaagcaaaggcttgcctgagggagatacatgcttctatcctaaggaagcatttacatcgattggagcatcctggtgctgctgaacaggatgtggattctgagaaagaagttgataataaatctgtaggatgaaatgcatgaagacgaagatgataaaacgatatttacctgagcctatgccttatcagacagataatcgaatttgaagaggccgatggatccttttctccac

SEQ ID NO: 270982 - DNA, 852 bp, Zea mays
agctccgccgcgaccgcaccttcaccatgagcgccgcgcttgatcgcttccgcaacatacagctgcaggaagagtttgacactcatgatccaaaggagaacgcttcactactcccttacttgaggaaaaggtcaaaaatcattgagatagttgcagcgcgtgatatagtctttgctttatcacagtcaggagtatgtgctgcttttagtagagagacaaatcggagaatatgctttctgaatggaagtccagatgaagttatccgcagtttattttacaacaagaataatgattcactcattactgtatcagtatatggttctgaaaacttcagtgctctgcgatgcagaacaactcgaatagagtacgttcggcgaggacaaccggatgctggtttccctctttttgagtccgagtccttgaaatggcctggatttgtagagtttgacgatgtcaatggaagggttttgacttactctgctcaagacagcacttacaaggtgtttgatttgaaaaactacacattactgtatttggtgtctgataagaatgttcaagaaataaagatcagccctgggataatgctattgatttatgcaagaacaagcagctcggttcctctgaagattctttccattgatgatggtacagtcttgaagtccttcagccacctcctccatcgtaacaagaaggtagattttattgagcagttcaatgaaaagcttctggtcaagcaggaaggagagaacctccaaattcttgatgtaaggaacttccaattgacagaagtgagcagaactgagtttatgactcatccgctttattttttacatgagctgcactgttttgcat

SEQ ID NO: 270983 - DNA, 643 bp, Zea mays
tgtcacttgtaggaagagtttgacactcatgatccaaaggagaacactttgctactcccttacttgaggaaaaggtcaaaaatcattgagatagttgcagcgcgtgatatagtctttgctctatcacagttaggagtatgtgctgcttttagtagcggtacgttcgccgaggacaagacaaaaccggatgctggtttccctctttttgactcaccatgtcaacatggcaatttcaggacccaacgtctctgcgagagaccttgggttcccttatccgaaggcaggcaccgctaagcctacagacgtggtggtgaagttctacgtcctctacgagaagtggcggaggggcgagctcctgggttcttcgtcagttgcgcggtacttgaaaagcatcactcattcgaacgggcaacaagaatttccgggtgtgggtggacagactggtcacatcgccgatcggtacaagcaactggttggtgaggtttgataactgggagatggaaggtggcgttcggtactgctgccgcactactcttctgctgaataacaaggttccaaaagaactagaagtacagattggttgaacttcaaacaaatacaaagagctatgcatacaagtggtggaggctggtggtaattgttt

SEQ ID NO: 270984 - DNA, 2090 bp, Zea mays
ttctgtaaaatagcctcaccctcctcgtgccttatcttcatctcacctgctctttctcctccgtgctgatcggcagtctctaagctttgcaacaactgatagccgaattccgcgcgccggtccctaaaaaaatgcaagtactaggtagtagataagatgcatttccctgtaatttttcgttattatatatactcagcacgggaaggaggggagacactctgttcaaccaccagccgagttcgcagcggcactccagggtccaggcccagcagcctcttcggctcttcgttgggggtgcgtggacaccggaaattgcctcggggattgcgttcctgatctaagcccggcatgaagggctgctcagagcgtttgctgctcctgctgctgctggcatcgtcgttgttactgtccgtcgtggttgccgcgcagcagacttgccctgccgacctcgacagcaaatgcgacggtggcgcgcctgatgactgggagggggaattcttccccggcgtcccgaaaatcaagtatgagggtccaacaagcaagaaccctcttgcttataagtggtataacaaggaggaagtcattctcggaaagaagatgaaggactggatgcgcttcagtgttgcgttctggcacacgttccgtggtactggcgctgatccttttggtgcgcctacaaaggtttggccttgggaggacggcacaaattcgttggccatggctaagagaagaatgagagctcactttgagttcatggagaagctgggggttgacaaatggtgcttccatgatagggatattgcccctgatgggaaaactctcgaagaaacaaatgctaacttggatgagatagttgagctggcaaagcagctccagggtgagaccaatataaagccattgtggggtactgcacagctctttatgcatcctcgttacatgcacggagctgctactagcccagaggttaaagtatatgcatatgcggctgcacaagttaagaaagctttggaggtcactcactacctaggtggtgaaaactatgtgttttggggtggaagagagggttaccaaactcttctgaacactgatcttaagagagaacttgaccatttggctaactttcttcaagctgctgttgactacaagaagaagattggattcaacggaacactgttgatagagcctaaaccacaggaacctacaaaacaccagtatgactgggatgttgcgactacgtttgcttttctacagaagtatggtcttaccggagagttcaagattaatgttgagtgcaaccatgctactctatctggacatagctgccatcatgaactggagactgcacgcattaatgggctgcttgggaacatcgatgcaaacactggtgatcctcaagttggttgggacacagatcagttcatgacagacattgcagaggctactttggttatgtcaactgtggttaagaatggtggacttgcacctggtggcttcaactttgacgccaaattgcggagggaaagcactgatgttgaggacttgtttcttgctcatatctccggaatggacaccctggcccgtggcctccgcaacgccgccaagctgatcgaggatggttccctagatgctctcgtccgcaagcggtaccagagctttgatagtgagattggtgccttgatcgaggctgggaaaggagactttgaggcgctagagaagaaggtccttgagtggggtgagcccactgttccgtccggcaaacaggaactggcggagattctgttccactctgctctatagatggcgccatgtccgtagcggtagctcctggaataagcaagcactgagcctgcgccctcccaacgcgcgcggtcgtcctcaccagtcaccaccaagggaatgtttctggttgcgcgcgatgaaccatgtacaatacaccgtggaactgaaataaattgaaatagctagtcagaatttttagaactgttgcctctttgtttggaacggaatgaaactgaacttggttagtttgagcttatccgtgcaaaaaaaaaaaaaaagggcggccgctcgcgatctagaacccacggtcc

SEQ ID NO: 270985 - DNA, 635 bp, Zea mays
tgtttcttgtccatatctccggaatggacaccctggcacgtggcctccgtaacgttgccaagctgattggggatggttccctagatgatcttgtccgcaagcggtaccagagctttgatagtgagattggtgccttgatcgaggctgggaaaggagactttgagacgctagaaaagaaggttctagagtggggtgagcccactgttgcatccggcaaacaggaactggcggagattctgttccagtctgccctatagatgatggtgccatgtccataggtccaggaataagcaagggtgcgccctcctccgaacacgcactcgtcctcctcaccacggggatgttatggttccgtgcgatggactacctacaatacagcatggaactgagataattaggatgtaatctgtcagaaaatttccagaattgttacctccttttgtttagagtggattagtggaatcaaactggagttagttaaagcttatcctacattttggtgtggcgatcgtgtttggtacttccttgaatgctgtttcatagtgtggcaacgatgttgctgcttagtcctacaactggtggtagtaatgtatcatagttcgaacgtttcttcacaataaattatgatctttaat

SEQ ID NO: 270986 - DNA, 468 bp, Zea mays
catatatttatattagaaaagaaaactctgttcaaccacccgccgagttcagcagcactctcctccgccctcttccaggtccagcaaagattggggacgcgtaggcatcggagattgcctcgggagcgcgtttcctggtcaactaaggccggcatgaagggctgctcagagcgcttgctgtttctgctgctgctgctggcatcgtcgtcgttactgtccgctgtgattgccgcgcagcagacttgccccgccgacctcgacagcaaatgcgatggtggcgcgtctgatgatgattgggagggggagttcttccccggcgtcccgaaaatcaagtatgagggtccaacaagcaagaaccctcttgcttataagtggtataacaaggaggaagtgattcttcgtaagaagatgaaggattggatgcgcttcagtgttgcattctggcacacgttcccgggggactggcgc

SEQ ID NO: 270987 - DNA, 507 bp, Zea mays
cataccaccctaattataatggttataataatcatccaattccaactccaactcgtacgcgagttttagcccgagttgttaggttgttggtgagtcttcgagggaaaataatccttttggagttcttctgtaccgagtagcgagtaactcggataacggattccaagcaaaagcggtcaagctataaatacaaaactgattgactccaagtcctctcaatccgcctcgcccctcgcctttccctctctcacggcggcggcgagatgaaggtaacggtaatgaccggcgacgagcagatcgtcaccctcgacgtcgaccgcgacgaatccgtggaaaatctcaaggcgctactcgaagtggagactcgggtgccgctgcggcagcagcagattcacttcaatgggaaggagatgcagaacacggagaagctcagcgccgctggggtccaggacggcgaccttgtcatgatgttttccaccagcgaaaggccatctcaggatggcttaa

SEQ ID NO: 270988 - DNA, 531 bp, Zea mays
tcgcgccgagacgcccttcggcttcggcgaagcctcgaaccttttttggttcaacctttccaaaacggaggcgctgacgcaggccttccgccgcgccattggcgtccgcatcaaggaggaggccgaaatcatcgagggcgaggtcgtggagatcttgatcgaccgccctttgtcggcctctgccgctggcggcagctcggctgcccctacaggtgctactgcggttggtaagtcggggcggctcacgctgaagaccacggacatggaaacggtgtacgagctcgggggaaagatgattgaggctcttgggaaggagaaggtgcagagcggggatgtgattgcgcttgacaaggcctccgggaaggtcaccaagctcggacgctccattgggaggtcgcgggattatgatgctgttggcccgcacaccaagtttgtcaagtgtcctgatggcgagctccagaagcgcaaggagatcgtgcactgtgttaccttacatgagatcgatgtcatcaatagcaagacacaaggttt

SEQ ID NO: 270989 - DNA, 588 bp, Zea mays
cggacgcgtgggggcggaggcggaggcggatgaaaaggtcgcggaagcggattctgaggaggagaagagggcggaggaggcggaggaggccgccgcggtggatgaggcggcggtgatcgatggcactgggtcgttcaaggaggatagtaacctgctgtccgagctccccgaccctgagcgcacagcgctcgcgcagctcaaggagctcgtcgccaccgcgctcgctaacggtgagttcaacctgccgtcgacgtcagccaaggaggaggccaagaaggaggatccggcaaaggaagaagctccggcggacaatgaggacgagcccaaggcagaggaggcggctgcccaagagcccgtcaaggaggaggccaagcctgaggagcccaaaacggaagcgccggcggaagcagcgcccgaggaggttaaggacgagacacccgtgccggaagagaccaagactgaggctcccgcgccggaggagcccaaggccgaggagcctgccaaggaggagctcaaggcagaggcggcgacggaagcggtcgccgaggagaccaaaccagctgagccggtgccggatgaggaggagaa

SEQ ID NO: 270990 - DNA, 456 bp, Zea mays
cggacgcttgggcggacgcgtgggctgaactacgcagcggaaaaatcccatcaaaaaacaaggggaaaaaacaacacagcatgaactgcttgaagaactcgcgttctgtcctctcgcgactccttcgccacaggccccacgtagcagcgccaccgccgccgacgccggcgacggcgccgcagccaccggcttcacggtactactactacgcctcccgcgtcaagccagccgtctcccgaccgccgccggcgccccagttgccgagatctaggcactactacacatccccgcggcggcagcaggtcgtccacttcaaccgccgccgcggcgggtcccggtggtaccacgaccagcggaagctcacggcggcgggcttaatcagcggcggcggggcggtcgcgttctacttgcggccatttggagaccggggcctacaccaaccggttccaccttggc

SEQ ID NO: 270991 - DNA, 561 bp, Zea mays
  unsure (1)..(561): unsure at all n locations
gagaggttcactaatgccctctttcactatgcgaccatgtttgactctttggaggccatgcatcgttgtaccagtggtagagacatcaccgactcactcacagaggtgtaccttctaggtgagatttttgacattgtctgcggcgagggcagtgcacgcaccgaacgtcatgagttgtttggtcactggagggagaggctcacctatgctgggctaactcaagtgtggttcgaccccgatgaggttgacacgctaaaagaccagttgatccatgtgacatccttatctggctctgggttcaacatcctagtgtgtgatggccgccttgcactagcgtggcataatcgcccgttatatgtggcaacagcttggtgtgtgacacgaggaaatgctgccagttccatggttggcaacatctgtaaaggtacaaatgataatagaagaaaggaaaaccgtaatggacccatggagtaacaggaaagataaccatgtcatgaacaaatcgatcaagttattaaatgcactgttgacttccaaaaaaaaaaaannttatttttttac

SEQ ID NO: 270992 - DNA, 927 bp, Zea mays
  unsure (1)..(927): unsure at all n locations
cacttttacggttcctccgagttttcgtttggtattttctgtttaccgaaatcggcaattattcccctccacaaccattctgngatgacagtgtttagcaagatactgtttggttccatgcacctcaagtcctatgattgggctaaaagtctgccggcggtgtagcaacgataatgcacttgagaactctgatggagcaggagctcgtctggccaaggtgaacacagatgccgtttttgacgcttcatctgagaccgtagttctgtaccctgaaaatggagggaacttgcactgctttacggcgctgaccccttgtgccgtgctggatgtgatgggccctccctacaaccgtgctcaaggaagggattgcgcgtattacagcgaatcgccctactcgtgtgctggagatgcacaatattcttggctcaaagaggttcacagcacatttgagatggaaggcataaagatggagcccaacttcatcgtctaataattaagcaggcatggcatggcatgacatggcatcgtaatgctgctagtttcatgtagataatctctagctgcgggggtgtagtacaactggaagacggccagatgctcttttgacattcgtttgccttaatttcatatgcctccctttatgtatgttaacaattcgaatcttgggtcatggtcactttttttctgttttccctgtagacagcaggtgctactttttgaagtgatcatggaccaaattctgtgggtcgtttggttggtttttgttgagcagcagaacagtcttcaactttctgcctgccatcgtgtttcagtttcagggcccatgccttgtgttttctctttgaatgaacaaagaactgtctctagcatagttataaatggatatggtccaggcttccaaatcaaaaaaaaaaaaaaaaaaacgaa

SEQ ID NO: 270993 - DNA, 517 bp, Zea mays
ttttcaaggtcgagctgctgtcgccgatgccgcccccgccggaggtggaggagaagaaggaagatgaggcggagaagaagaaggacgatgagaagaaggcagagcccgagccgccgaagccggaggagaagaaggagccgccggtgatcgccgtggtgctgaaggtgcacatgcactgcgaggcgtgcgccgaggggatcaagaagaggatcctcaagatgaaaggcgtgcagtccgtagaaccggacctcaaggcgtcggaggtgacggtgaagggcgtgttcgaggagtccaagctggcggagtacgtgtacaagcgcacgggcaagcacgcggccgtcgtcaagtccgagccggccccggcgccaccgccggagggcggcgccggcgacaaggcggccaaggaggaggagaaggggcaggaggaggagaaggagaaggaaggaggaggcgatggcggtggcgaggagaagaagaaggaagggggcaaggaggaagagaagaaggactgcgagaa

SEQ ID NO: 270994 - DNA, 1173 bp, Zea mays
cccacgcgtccgggctgattggttgcatctgcggattcaggcagtggagtgattgacatgaactggtttgagacacttaacagaattaaaaacatcccggtcaagcaaacatccgaagataacttggagactgctgttacgttaatgaagagcacttataacttttatcgggagagcccttgtggaacatttccttcaggtatcaatctctacacggttacaccatcacaagctcctattgaagggctaccgccaaccgctgctgtagttgagacgctcgacttaagtattccaagaaaactccttctgtgggtatacactctggttcatggtcgttactcaaatatatcctccgttgtaaagtattgcgacgagatgaagttaagaagtaaaagaggaaccccagctgcgtctgcttcgtcacaagttgtgcagccagtgtcgcatagtaccgtttcttcccaagttgtatctaaagaaaagagctcccaagttgaacccgctgaagcagcacaaaatccttctgatctagctgccacttgcgttcctgcataccaagaagttggtggtgctagtgcctcgcaaagtgccattgaggcccagaaagctactgctgcggcatctcagctcactcgcagtggttcatcaagggcaatggaaaatgcacaggacggcggggagaggaagtaacgagatagagttcgtttttttttatcgtctatgctacatcttatggatgcatatgatcctgcctgacgattctcaggtctcagctctccgtggctccgtgtgcaaatctctgccacgggcgtgttttaacgcctgattggatggttgcccgctggcgcgcccggccagcctcgtacggccacttcggacgcatctgcatcttcggaggtacccgcagatgtagatgaatggccgtaaaatggtttggtctgcgtctctttacatataaccaaataaaaactcagataaagttaactcatgtggtggtctatgttgagatgatgcgggtaaccaatcgaacggttaacaaattcaggtcgtatgtatatcctggtttacagttagtgtttcctaagtgcatttgtagattatagagctgtcaagattgaacgatacatctgtaaggtgttacaaatgctaaatgctaatcctgattttgtggct

SEQ ID NO: 270995 - DNA, 682 bp, Zea mays
attcataatcctgagattcgtcgagcttctggtgatgcttctgttgagcaattacttgagaaaatgttcactgtattcatggatcatgcgaacatgtgggctgatataagcaatataccagaggtgaacagtccagaattatcagaaagcaatctttacagctatatccaccagtacatccatttgctcgagagtgatgtacgactagatgttctagaaggactaaacgagaagataagaaagcgtttcaagacaccgaagttatcaaatagtaacttcgctaagatatgcaagcatgcttctctggcatggtgccggtgtattctcatcaaactggcctcaatcactccactgcctgaatccgcagatgcaaccaatcagcctgcaccattatccaatgggcttctactctatgttgacttgcaacctgatgagcttcttatctcatcccctgatgggcctgctcaattcaaagggcttgacatgaactggtttgagacacttaacagaattaaaaacattcccggtcaagcaaacatccgaagataacttggagactgctgttacgttaatgaagagcacttataacttttatcgggagagcccttgtggaacatttcctttcaggatcaatctctacacggttacaccatcacaagcttctattgaagggctaccgccc

SEQ ID NO: 270996 - DNA, 404 bp, Zea mays
  unsure (1)..(404): unsure at all n locations
gctctccgtggctccgtgtgcaaatctctttcacggtcgtgttttaacgcctgattggatggttgcccgctggcgcgcccggccagcctcgtacggccccttcggacgcatctgcatcttcggaggtacccccagatgtagatgaatgcccgtaaaatggtttggtctgcgtccctttacatataggcacccaaatgaaacccagataaagttaactcatgtggaagatggtgcgggtaaccaatcgaacggttaacaaattcaggtcgtatgtatatcctggtttacagttagtgtttcctaagtgcatttgtagattatagagctgtcaagattgaacgatacatctgtaaggtgttacaaatgctaaatgctaatcatgattttgtggcttgnnaaaaaaa

SEQ ID NO: 270997 - DNA, 391 bp, Zea mays
ctcaactcgttctcgacccgaaaccccaaatacctcgcggaaaacccttccctcccgatggcaaccgccgccaccgccatggtggtacccgagcagccacgccgccggaagccggccccggggcgcgggggagtggccctccctgcgggtctctcggaggaggaggccagggtgcgggccatcgccgagattgtctcggcgatgggggagctctcgcggcgcggggaggacgtggacctcaacgcgctcaagtccgccgcgtgccggagatacggtctggcgcgagcgcccaagctggtggagatgatcgctgccgtgcccgaagccggaccggccgcgctgctgccgcggttgcgcgctaagcccgtgcgcacggcatcgggtatcgccg

SEQ ID NO: 270998 - DNA, 561 bp, Zea mays
cttgaaaaatatggggtgaaaaacattgttgggatacagcatggattccgtggattttttgaggatcacttatcagaagtgccgctttctaggcatgtagtccaaaatatcaatcttgctggtggtagcttcttaggagtctctcgcggtggtgcaaacatttcagacattgttgacagtattcaggctaggaggcttgatatgctatttgtgcttggtggaaatggaacacatgctggagctaatgctatacatgatgagtgccgcaagagaaaactgcaagtatcgattgtatgtgtccccaaaactattgacaatgacatattactgatggacaagacctttggatttgatactgcagtggaagctgcacaaagagctatcaactctgcatacattgaggcacattctgcatttcatggcattggactggtcaagctgatgggaagaagcagtggcttcatcacaatgcatgcctccctgtcaagtggccaagtggatatctggctgattcctgaggtaccattcactgctgatggaccgaatggaggtttttcgaca

SEQ ID NO: 270999 - DNA, 1231 bp, Zea mays
  unsure (1)..(1231): unsure at all n locations
tcgccctttctctctctcctcctcctctccccccggtctggccccattccccactccccccacctgtgcagctccggcggtagggctccatttcccctgcacctccggcggcgccggatctgactttgcctggacgccggcggcgccgtttcaacatcagaagcaccggatccggtgctgtttctcggctgcctcagcttccgccgccgggaggtccctggcggcgctcgccggcgccctccggcctttgctgagtcctctagacttgagaaggctgctgctgagtatatggtatctgcgggccattgtgctgtccatgcgagcggagagcatgcgtggcagctgtgcttcgggtgatgcccctgaccagagtagctgccgatgcattcggtgtgttgacgatcggactgttggcgctgcttgccgctctgggcctcttctgcatcttccaatcggtctacttcaggtgtcagatccggagaggaccctccttcctcccgctaggctactttaacggcccatgggtgacccgcgtcgctctggttctgatcaccatctggtggggagtaggcgaggtagcgagactgagcttcttgaagcaaaagctgttctccagcttgacatggcagaggaacatatgcgatgcgtacatactttccaacctagggttcgcggagccggggatcttcttcgcattcgctttcctgctccatggctcgttgcagaagaaggagctgggcactttaaaccagagatggaactggaagagcatggcctacacgctggttttctgcgttccagtgttctccgtgcaggcagtcctggtgttcgtcgtcgggcccaggcttgttagagactcgaaccatgatctcgggaggaggaagatcgcgaaatacttcgtacggacgcacacgccggttggagacaccagcgtctgcacctacccgttgttgggcaccatctttctcgggctcgtggatgccttcctgatgagctacgtgtcgtacgtcggatcacgggcgctgtccttggtcatcaacaagtcgctgcgaaggagggtgtacctgctgatgctgtcggggctctgcttcctcccgaccagggtgcttctcctcggcttctcggtgctgcccaggccaggagacgccgncttcgagggcatcgtgttcctgtcgttcttgacgatgcttgcctgcacggccgtcgggatactcttgcttggctactaccc

SEQ ID NO: 271000 - DNA, 1122 bp, Zea mays
aaatgcaaggttttggtgaccaacatgctgcttttggtgctcgtggtatgggtggattccagatgcctgaacctccaataacgcctggaccatttgctcctggattgtcacgcaatgaaggtacaatccctggcattggggttgcaatgaccttggcaggccagtcttttgatggatctgatggagagcagaggccatctattccgggtcttccacctgggcaacccccgttgccaccaggtcctcatccatcacttcttgggcagcaacaacagtatcaacagatacctcagcagcaacatccccagttttcgcagccaccacctccaaacatgccccaactgcaggcaccagctcacatgctttcacattcacaaggatctcggcctactcttccgcagcttccaccaatggggggaccatcagggccttcacaagtgaacccaccgcttccgcctatgcctcacccaacggcaatgcatgggtcacagagtcagatgatgccccaaatgccacagcacatgatgggcctaaatcagatgcatgctggttctgtgcctgctggtactgtacccccaatgggtgggttcccaagtgggatgggaaacatccaaggagcatcaggttcgtctggcgtacaaaattttcctatgggtggcatgtataatcggcctcagggacaaatggctccacaagggcaaatgacatccattcctggtctaagctcttaccagggaatgggcaatgttggccttacaccgccaccgccacagcacccgccgcctcgaggaggctcggcaacacagtgaccatccctggagcaaaacaaggattgtactgaacctaaactttctcgtgacactaaatttgtagcatgtaaatccatctcgagcaatatcagcgtgtctagactcccgcaaatcacgagggatttcttcacgattattgctcaggcagctaggatttttgctatctcgtgctgtggtttacaactgggggccttctgtcatgtgcctcatttgtactgtaattcgaatcgtgcctttacttgccggctgcttagatgttgaacatagagaattctttccctcagttttgagaagcataaaccccccctgtgcc

SEQ ID NO: 271001 - DNA, 445 bp, Zea mays
cccgtccgcgtccgcgctctccaaagtttcgtccaccatttcgctcccgcaagcaccgatttgtttactgctctctccgacgcgcggcggcggagctccctacgacgactgaaccatgtgcggcggcgcgatccttgccaaccttcgcgagccggcgccgcgccggctcacagagcgggacatctggcagcagaagaagaagctcaagaggggcggcggcggcgggaggcgctcgttcgcggcggaggacgatgaggacttcgaggccgactttgaggtcttcgaggcagactccagtgattcagatttggagctcagggaggggactgacgacgacgtcgtcgagatcaagcccttcactgccaagaggactttctccagcgatggcttaagcaccatgactagtgctgtagcaaggtcagccaagaggaagagaaagaatcta

SEQ ID NO: 271002 - DNA, 1424 bp, Zea mays
gttgttaagaaagagacttgcaatgggatctgtttagatgtctcagctaatggtgatgacagcaacttgcctagtgaaaggacttataaactgaacttatctgaacatgctgcagcagataatgcagctgagaccgattacagcaagatgaaagaagtcatcagctatgtttacacagcacagcagcgagtgggaagacatccaactttgcattggtaggcctattgctgattttgaaaattttgtttactctgcttctccagttgtgcactgcagctcgtgctctgttggctgtaaatcttgcctgcaagaatgtgtgaaggatggcttatgtttgcatcagactccagatatcactctaagaactgtctggcagtggtacgaaaagcctagttgctatggtttggatgtaaaggcacaagatctctggaggtcaaaagccttgtggaatagtcattgtcagtttacaacatattttgtaccatatctatctgctgttcaactcttcagtcaacctaaaagaaccagtggtggaagcattgataaggaatcaatccatagggatgtgacatgtgaaacatctccacagctgaacctgcccccaatatttgcaaagctttttccaaaacaatctgttccagtaaataaaccatctactctgcgtactgaagatgatcaacagtcagcagatggggagctggtatttgaattttttgaatatgaacagccatactcacggcgacaattatttgacaaggtaaatgagctgattgccggtgcgaaaccgtcaaattgccaaatatctggggacccaaagaatctggaggccagcctgcatgatctccatccagcgtcttggtattgtgttgcatggtatcccatataccggatacctgatggaaaattccaggctacattcttgacatatcactctcttggccactggattcgtcggagcagctcagcaggtggggccgctgttttgccagtcatgggcctgcagtcttacaatgccaaggcagagtggtggtttgagatgagcaagtccgaatctgaaggcgggcagtcgcaggccagtgaagcatccgagattctgaaggagagatcgcgcacgctgagtgaggctgcggccgtgttgtccagggccagcgtgctgaagaatgggcagatgagtagaaacagacatccagactacgagttcttcctctcccggagctgatttggaagtgcctcttcgtactcggatttagttaggtttcagtgtatgtatgtgttgttgacactaaagcttattctgcaaccgatgactggaagctgtttgcttagcttagcttagcaatataataataatgctagtcagttctcatccaagtgtcatgtccctgttattgaagtagatcagagatgaaacaggaaggaccccg

SEQ ID NO: 271003 - DNA, 561 bp, Zea mays
cggacgcgtgggcggacgcgtgggctccccggccgcccgtctctcccgagctaaactgtggcaggcggctagctgttacgagctagctccgcgcgcgctaggcggcgtcacgtacgtgctgtgatcaactgtctagttctctactcgacgcggacaccctgacccgcgcgcgcgccgtggccatggtcgccgccgccgccgccatcctcctggtcctgcccgtcgtcgccgtcctcgcgtcgtcgtccgcggcggcggacgggtcgttcataacgtgggacgacctcagcaccccgtccgccgccgccgtgcagggcggcgtgaaggcggccagcgggggaggcgcccgcgagctggacacgatcgtggtggcgcacgacgggacggggcactcgcgcaccgtgcagggcgcagtcgacatggtgcccgccggaaacagccgccgcgtcaagatcctcgtcaggcccgcgtgtcagggagaggtgcggtgccgatcacaagcgtcggtcgctatggcatggcgcgcgacgtgatcacgtgacgcaggctcgcatgccgtcg

SEQ ID NO: 271004 - DNA, 540 bp, Zea mays
tcgtgttggggtagctagctagagagagcagcaggccagcacagcaggcgtccgggaggtcgccgtgctgcgagaaggcgcacacgaacaagggcgcgtggaccaaggaggaggacgaccgtctggtggcgtacatcaaggcgcacggcgaagggtgctggcgctcccttcccaaggccgccggacttgtgcgctgcggcaagagctgccgcctccggtggatcaactacctgcggcccgacctcaagcgcggcaacttcacggaggaggaggacgagctcatcatcaagctccacagcctactcggcaacaaatggtcgctgatcgccgcccagctgccggggcggacggacaacgagatcaagaactactggaacacgcacatcaagcgcaagctcatcgcccggggcatcgacccacggacgcaccagcggtcgaggttttcgtagttgcccgtctccgtcgtcgtcgtcgccgggcaagcaactttcgccacatggcgacctaaggcggtggccggcgcagctgctcgcgagacag

SEQ ID NO: 271005 - DNA, 597 bp, Zea mays
ttgtgtgcccacgcgtgcggccgcaacccaccgagaggcgagaccggcggcggcaaaaggagcgatacaaaagcagccagggttgctggcaacagcgtcggtcgcccgcccgctcgccatggggaggtcgccgtgctgcgagaaggcgcacaccaacaagggcgcgtggaccaaggaggaggacgagcgcctggtcgcgcacatcagggcgcacggcgaggggtgctggcgctcgctgcccaaggccgccggcctcctgcgctgcggcaagagctgccgcctccgctggatcaactacctccgccccgacctcaagcgcggcaacttcacggaggaggaggacgagctcatcatcaagctgcacagcctcctcggcaacaaatggtccctgatcgctggaaggctgccgggcaggaccgacaacgagatcaagaactactggaacacgcacatccggcggaagctgctgagcagggggatcgacccggtgacacaccgccccatcaacgagcacacgtgccagcataaccatatcgttcgacgactggggccaggggaaggcgctcaagtgccccgacctgaacctggacctctgca

SEQ ID NO: 271006 - DNA, 618 bp, Zea mays
gtagcaacaagcaaaggcccagatcgataatacgatggggcggtcgccgtgctgcgagaaggcgcacaccaacaggggcgcgtggaccaaggaggaggacgagcgcctggtcgcccacgtccgcgcgcacggcgaggggtgctggcgctcgctgcccagggccgccggcctcctgcgctgcggcaagagctgccgcctccgctggatcaactacctccgccccgacctcaagcgcggcaacttcacggccgacgaggacgagctcatcgtcaagctgcacagcgtcctcggcatcaagtagggccgccgcgcgcctctccctctccctcctacccctcggcagtcgtttcgtttcctaaactggccgggtacgttacgtgcaggtggtccctgatcgccggaaggctgcccggcaggacggacaacgagatcaagaactactggaacacgcacatccggaggaagctgctgagcagggggatcgacccggagacgcaccgtccggtcacggagcaccacgcgtccaacatcaccatatcgttcgagacggaggtggccgccgctgcccgtgatgataagaagggcgccgtcttccggatggaggaggaagaagagccc

SEQ ID NO: 271007 - DNA, 636 bp, Zea mays
cagctcgccgctccactctcctggttctgctgcggccgtcgccggctaactagctatagccagccactcggagtcggaggcacagcacctccccccgcgtcgccagcgcacttggacgaccgatggggagggcgccgtgctgcgagaagaaggggctgcggcggggcgcgtggagccccgaggaggaccagcgcctggtggcctacgtccggcagaacgggcaccccaactggcgcgcgctgccccggcaggccggcctcctccgctgcggcaagagctgccgcctgcgctggatcaactacctccgcccggacctcaagcgcggcaacttcaccgccgacgacgacgccctcgtcgtccgcctccacgccctgctcggcaacaagtaagcactcagtctcagttcgccgcccgcccgccggtaccattatttccctcctcctcgactcaatcattttcccatcgtcggccggcccgtcgcgcgcaggtggtcgctcatcgcggggcagctgccggggcgcacggacaacgagatcaagaactactggaacacgcacatcaagcgcaagctgctgacccgcggcatcgacccgcaaacgcaccgccggctgagcgccggcggcggccctcaccgcc

SEQ ID NO: 271008 - DNA, 414 bp, Zea mays
ccgcaaactcaggggaggcgcgcgcaagcaagtaccacgagggagcagcgggcaggcaggcatgcagccatggggaggtcgccgtgctgcgagaaggcgcacacgaacaagggcgcctggaccaaggaggaggaccagcgcctgatcgcctacatcagggcgcacggagaggggagctggcgctcgctgcccaaggccgcgggactcctccgctgcggcaagagctgcaggctccgctggatgaactacctccgcccggacctcaagcgcggcaacttcaccggctacgacgacgagctcatcatcaagctccacgccctgctcggaaacaagtggtcgctcatcgcgtgacagctgcccggccggacagacaacgagatcaagaactactggaacacgcacattaagcgcaag

SEQ ID NO: 271009 - DNA, 1006 bp, Zea mays
tcccggattattgcactttattgtgctttttttattttaaaaattcccttaatgcctggggattattggcaaattcccagcacaatatttgtttgtattgcttggccctggtgatgaagccaaaaaccaacttcctgatatcctgggggtaaatcaaggtttgttggaaaggacaaatttttcaaagtcagctataaaagcctgaatgagggccgttcaccttccggtgatcaaataccatggaaattttgtgaacagttccaagacaatgtatttccaagtctctcaggagctcgtatagtgcgaattgctgtccatcctagcgccttgaggcttgggtatggctcagctgccattggccttctatctcggtactatgaagggcaaatgagaagattatttgatgacgatgaggaggaaacggaagagcctgatgtgaagattactgaagctgcagagaaggcttcactgctagaagagaccataaaacctagggcaaatcttccaccactccttgttcatcttcatgaacgtcgtcctgagaagctccattatcttggtgtatcttttggactgacccaagagcttttccgcttttggcggaagcacaacttctacccgttctatgtcggccagattccaagtgctgttactggtgagcatacctgtatggtgttgagacccttaaacagtgatgacatcgaagttagtgagtcaaacaaacatggattttgtggatccgttttaccaagatttcagacaaagattcaggcggcttttgggaacttctttccggcatcttaattttaagcttgcaatgagtgtcttggcttcgaagattgattactcaaaccatgagccttcagaatacgataataatagcacttcaaagttattggaagacatgctatcaccacatgacatgaaacgactagaggcgtattcaaacaatttagtcgattatcatctgattctggatcttgtacccatccttgcacatcagtat

SEQ ID NO: 271010 - DNA, 354 bp, Zea mays
gaatagccggcgaggatgcgtcggtcgaagacgtatagcggcacgacggggcgccgcggctccgagacggcggcggcgagccccgggtggtcgtcgatgcggagatcatgcttaaaccacaccaccgcggcagcgcccccgtccctcacgggggtgggggcattggaggcgacgatccggactcggcatcggttccgcaggacccgacggtggtggggcggggcagggagaagcggcccgaaccgtagcgcaagcagagccatgggaggggctgcgcggaggcgtcagctgtagcagcggcagccataggcggggaagagcggggataagaagggcggggctagggcgcgccca

SEQ ID NO: 271011 - DNA, 547 bp, Zea mays
acgcctccctccctcccggccgggacaaaacggcggctcctcctcctccggcccctccccgctctttctgtgaggcgggaaccgaggcggatgccgaggcgacggggctcgcgcaccgcacgcgtgtgcccgccgcccgggggccaggcgaggtggtgaggtgaggccgagcgcggttttaaattgttcacccggccgcccttctcgccgtagttttcagtggtacaagcaagggaggaacgaacgtgagggctgcctgcctgcctgcggacatgggctccagcctcaagtaccgatctggcctgtgcctcatcgtcgccgtcgtgctgatctgggtcatctccgccgaggtcacgcaggggatattcacaaagtacagacatccatttgcagttacttacttgggggcctcccttatggtcatatacctccctttgtcattttctaaaagattttatatacaattctgttgagaaggcattctagaaacactagtgctttcaaaattgcaagcaaatcttcctttggtggctgcgcccccttgaag

SEQ ID NO: 271012 - DNA, 715 bp, Zea mays
  unsure (1)..(715): unsure at all n locations
gtaacgcagaagaggcaaacgggcagcgagctagatctcgcgtccccgctgcgactgtgaagccaccgtcgtcagatcggacaaggcgccggagcctcagcaatccctgagcagactagaggagtagctaaggcaaagggaggtggcaaagatgctgccgacgaccgcgtccaaggggcgcggggcctcccgctccgccccgccgctcttcggtccctacctccgccgcatcgtcaagtggcaacaaatggatattgaatacacattttggcaaatggttcatctctgtacttcaccaaaagtagtctatcagcacaccaaatatcacaagcaaacaaagaaccagtgggcccgtgatgatcctgcatttgttgttattctgattcttttcctcgtgtttgcaacatcagcttactgtgcagcatatggagagagtgcctcacatgctgctctaacaatcacttcggttgtgtttctccatttcttgtttgctgggatagttttggccacactttgctggttccttacaaattcttacttgagagaggaacctaacagccatgttgttgagcaacgcgtggagtggctctatgcatttgacgttcattgtaactcgttctttcctgcgtttgtcatcctatatgtggtgcagtattttctgtcgcctctattggtcgcgcatggcttctttccagctttgntatctaatctactc

SEQ ID NO: 271013 - DNA, 1065 bp, Zea mays
ccgtctcgtttggacctccatccgttgctttcgccgccgcgctgagtttgggccgggctctgttaatctgggcgactttgattttctctgctcccgctgccccggccgtcaggagtgaagcgatgctggagaaagaccggatatcctacttctacgacggagatgttggcaatgtctactttgggccaaatcaccccatgaagccacatcgtctctgtatgacacatcaccttgttctttcatatggacttcatcaaaagatggagatatataggccacacaaagcatatccaatagagcttgcccaattccattctgctgattatgtggaattcttgcaccggataactcctgattcccagcacctatatgcaagtgaactaactagatacaatcttggagaagactgtccggtctttgataatttgtttgagttctgccaaatctatgctggaggaactttagatgctgctcgcagattaaatcataaaatatgtgacattgccattaattgggctggtgggctacatcatgccaaaaagtgtgaggcttcaggcttctgttacattaatgatctagtattaggaattctggagcttctcaagtaccatgccagggttctttatattgacattgatgtccatcatggagatggagttgaagaagccttttatttcactgacagggtaatgactgtgagtttccacaagtatggtgacctgttctttcctggaacaggtgatattaaggatataggagaaagggaaggaaaatattatgccatcaacattccacttaaagatgggatagatgacactagctttactcggctttttaaaacaattattgccaaagttgttgagacatatctgcctggtgctattgttcttcaatgtggggctgattcattggcgagggatcgtttaggctgcttcaatctctccattgaaggccatgctgaatgtgtaaagtttgtcaagaaattcaatattccccttctggtaactggaggtggtggatacccaaagaggatgtagcacggtgttgggccggttgaactggggg

SEQ ID NO: 271014 - DNA, 434 bp, Zea mays
ggcgccgcgggacgacgtgcccctggaagcgagcacgggcgcctcgccgccgcgcaccgcgtcctctactcggcgacctccgacctggcattcaccctccacgcctccccgttccgcttcaccgtgtcccgccgctccagctcgacgcctctcttcgacacctccgccgcgctggtcgtcaaggacaggtacctggagctgaccacggcgctgccgccggagggcggggcgtcgctgtacgggctaggcgagcacaccaagcgcacgttccggctgcagcgcaacgacacgttcacgatgtggaacgccgacatcccggccgccaacgcggacgtcaacctgtacggctcccacccgttctacctcgacgtgcgccacgccggcgccgcgcacggcgtgctcctgctcaacagcaacggcatggacgtcgagta

SEQ ID NO: 271015 - DNA, 622 bp, Zea mays
  unsure (1)..(622): unsure at all n locations
tttcattttggcggacgcgngggctnacgacgcgggcggtcgcttaggtgtgcaaaacgattgtccaccaagcaaggaacgcaccccgaatcccaactcctgtgtccgccatcgcctcgtggcggtcgctcctgctcctgctgctgctgctgctcccccagccgctcccgcccggagcacgccgccggcgccgacgccggcgcgtcgcatggatatggcccccgcgtctgtctacttcaatccgcgctcggtcgaggaaatcttcaaggacttctccggccgccgcgcggggctcgtccgcgccctcacctccgatgtggacgatttctgcagcttgtgcgacccagataaggagaatttgtgtctctacggccttcccaacgggagctgggaggtgtcgccgccggcggacgaggttcctccggagttgcccgagccggcgctcggcatcaactttgcgcgcgacggcgtgcagcgccgcgactggctctcactcgtcgccgtccactctgactcgtggctcatctcagtcgccttcttctacggcgcccgcctcaacgccaacgaccggaagcgcttattcagcatgatcagtgatcttccttctgtctttgaagcattt

SEQ ID NO: 271016 - DNA, 508 bp, Zea mays
cgcttgcgcctctctctctctctctttgttttctgcttcacccctgccgccccggccggcgccgccgccctacgcttggtgcctaggtcttcatcggatcgttcaccgggcacaagcatcacccagcagggtttcttgccctatctgtttaagactgggatcgcttctcccccgccgaccaagccgtgcctcccctgttgccggcgtcgcccctcccccaccagtgaaactcgcggtctctctccaccgcacgcacctcgtgtagttgtcgccgcgtgcaccccctgtagccccggcgttgggtcctactgctccatccggtttgcttccggcaacaagatcaacaacaagcgagcgaggtagtgaaaagctgcagctgtgatctctggaggtgctcttcctactctttgctggtattttgatggtggcttgatggccagtaatatgcaggcttctgggctgcctcagcctcccagacctcccatgatgggttctagcgctcagccac

SEQ ID NO: 271017 - DNA, 582 bp, Zea mays
cacaccaccaccttgggcgccgggcccttccatgctttccttcgctcgtcggcaaggacaagatatatagtgctagctgttctgtgctgcggtcgtcgtcttcttatataagacgccaacgacgcatgtcctcggagcctgccggggcccggccctagaggcgtcgccgggccgggccactgcacggtcggcggatatggctgtcgaagcgcacagcctcctcttagcaggagggcacaagcaactcaccagcgcgggatggccttggacgaccggcgacgaagctagatgcgcgacggcgcgaccgagccaccagcaggctttccagctccagcaggcctcgtgtgtgggcgtgggcgtgggcctgccgccggcggctccggtctcgtcggccgcggcggcggcgccaccagcgccgatgatagcgcagcagtacgctgctggcggacggctgttcgtgggagacgcggcggagagcggcgtcacgttcggaggaggaggtgcggtgcagcaggaggcgccccggaagcggaagcgcgccgagcaggggcagacgccgccgtcggttcttgggaccggcgc

SEQ ID NO: 271018 - DNA, 789 bp, Zea mays
accgtttttaattcccgtgagctaatcggcggcgaatccccaaccctagcagcagtgggcggccggaccgggacgggcggtagacggctccagcacgcaacgctgacaggtttggccgtgcgaggcgcgagggctagacaggtgtcgcggcgccaggcatccagttccagggctgcgtgggctcgaccagagcgagtctgcaatccgcccgtccttgtccccgtcggcggccgttcaccagtgtcaggtgcggaggtgacaacatttctgaaagaagtaagcaagcactagttatatggtgagtcatgtcaaaggcacgtaatgctgtagttgccactggattgctgctcttcgctggtgctggcttatcatttccgttccttttcgtgaaatcaaagaacaagcctattattgattcgacaaaacctctgccaccacaggctacttttcgaggaccatacgtgaatacgggttcacgtgatatcggacctgatcgtaccaactatcccaagaagtgatttgaatcttccatgacatttcggagtcccatttcactcgactccactgctgtgaaattgttcgttttggggccatcttactgtgcacgtgccttgatattgcaaaaaaataaaataaataccaatacctaaataaagggtggttattgaagctcctccattctccttgctcccaaacaaattccccttgcttccaaataaatcctagtgtaaagtttctcaatattgtatgggaatatctattttttacagatccatatatgattagttg

SEQ ID NO: 271019 - DNA, 586 bp, Zea mays
cggtcgcgtgggttccccaatcccatctcctgccccccctctcccaaccctatccacgccgccgccagccctgctcgggtggtgcgcatacatgaaccatccgtcctcgtcgtcgtcctccgcccagccgccgccagccccggcggtggcggccgaggccacctccctcgcgccgggcttccgcttccaccccaccgatgaggagctcgtctcctactacctcaagcgcaaggtcctcggccgcccgctcaaggttgatgccatcgccgatgtggacctttacaagctcgagccctgggacctgcccgcccgctcccgcctccgctcccgcgactcccagtggtatttcttcagccgcctcgaccgcaagcacgccaaccgcgcccgcaccaaccgcgccacgtcgggagggtactggaagaccaccgggaaggacagggaggtgcgccatgggcccagacttgtcgggatgaagaagacgctcgtcttccacgcgggacgcgcccccaagggcgaacgcaccaactgggtcatgcacgaataccgcctcgagggcgatgacgccgcagggataccgcaggactca

SEQ ID NO: 271020 - DNA, 796 bp, Zea mays
  unsure (1)..(796): unsure at all n locations
agatacttcnaagcaaaaattgtggggatattgttcatcaacagattgttgagcgcgacatattgagtgaaatggttaagatagtgaagaaaaagccagacttgagcgtccgagagaagatattgagtttgattgacacatggcaagtggcttttggaggtccatctggaaaatatcgacagtatcatgcggcttaccaagaactcagggctgctggtgttgattttccgcctcgtgaggaaaattcagtcccgttgtttacaccacctcaaactcaaccgttaagacatccacatctatatacacctccaggtcaaagctatgaagatgctgctatacaagcttctcttcagtctgcccctcctgcatctgccctcagtctgagtgagattcaaagcgctcgagggattgtggatgtcttagatgaaatgttaaatgctctagaccaccggcatcctgagggtgtaagggaggaggtcattgtcgaccttgttggccagtgccgatcctatcaatctcgtgtcatggatcttgttaacagtactggcgacgagagccttttatttcaggctctaggactaaatgatgagttacagcgtgttgttcagcgtcatgatgacatagcgaaggggatccctcctggtaccggagcacctgtacctgcttctgcaaatgtcaaccaagggactgccccacctaggcccactgcggtttcattttctccacttctaaatgtacacgaggacgatgaaccagaagacgagttctctgtgctttcccgcaggtctgcgaggga

SEQ ID NO: 271021 - DNA, 681 bp, Zea mays
cccaacctctgtcgaaagtttcacctccggtcgctggtttcctccaatctccgtggtagttcagcgcgagcgggcggcggggtttgagctcgatggtcacttccggcgaacaatcggctggcggcgggtctgcggcgagggcgtcgaagctgcggtacccgctgcggtcggcgagcaaggggaaggcggcggtcgtttccccggcggctgatgctcctcccaccatctctgctccgcgacgggcaaaaccatcttcagatgtcagcaagagcatgtgtttagacctttctgtgaaggataattctgccaaacccccacggaggcactcaatacaaaccaagccaggagctagcccaaggccaacaccttctggaactgtgactccggtgtctggggttcggtcaaagaggtcggaaagccaggggaggtttgataccccgacatcagaagtgtccatgtccatctcaaggcgcaagttcagcacgctttcttcaatctcgtactggatgacacagatcaggctggcagaggctgcttccaagcactcggtttctctgggcttctttaagcttgctcttgaatcagaatgtgagcctttggaccggatgagggaagaactcaagtcctacgtagcacggcatggcctggcgacagaattggaggacccagttaaggacattc

SEQ ID NO: 271022 - DNA, 634 bp, Zea mays
gaaaacccgggccgaccgcacgcgtccgcttgtatccctcctccccttctggccgacgaaaccctacgcgcgcgcgctgccaagccctcgccgccgacgcctactccgactccgacgccgcagtcgtgatgtacgccgacaggtcctcgggcaggaaacgctctgtaatggaccgcctcggctcgggcggcggctcgcgctcgcggtccgacgacgcaaaaaggttttgccaggatgatgggacatggagacgtgagctttataaggattctagaggaactcagacttcatctgaacctacttccagaaatctggaatcgaacaaaaaatcccaagtgcagcaaaaggttgtgaagaaattaccagtttcagatcttcgtggaaagttatctggtgtcgcgagccagcgccctcaacttagcagtactgttcaggtcccaaaacctgtaaaagaggttattaagagcaacaaacctgttcaaaagagagaccccgctccaactactgcccctcctgacatcaagaaacccagtgcacctgcacccgtaccagcaccatctgcactaccaaagcaatcccagaacaagattgatgcttcgcttgacagtttactgaagtctcttgatctagagaa

SEQ ID NO: 271023 - DNA, 278 bp, Zea mays
tcaaacacagcgcgctccgcagacgcccacctagcttccgctattcaccagggggtccccttctgccctccgccctatctatccatggaaaggcggcacggcttcttcgcggcgctgcgggaggaggtggcgcgcgggctgtcgccggcgcgggcgcgccgcaagccggacgccacggacctggccgccgcgctcagcttcaccggagtggcaggcgccggcgagatgctggcgccgctcatggaggggcccgatccggagcccagcgacaactggga

SEQ ID NO: 271024 - DNA, 688 bp, Zea mays
tggtacgcctgcaccgatccggccttacctcctggacccacgcgtccgattacattgttcccgaggtacttctgaagaaaggatatggaatggaatgtgactggtggtcacttggtgcaataatgttcgaaatgcttgtggggtatccgccattttattctgaagacccaatgtcaacatgtaggaagatagtgaattggagaagtcatctaaaattccctgaagaggccagcctttctctagaagctaaagatctcattagcaagctattgtgtaatgtggatcagagaattggaacaaaaggtgcacatgagataaaggcacatccatggtttgcaggtgttgagtgggaaaaactatatcagatggaagcagctttcattcctgaggttaatgatgagttggacacacaaaactttgaaaagtttgaggagactgctcctccaatgcaaacttcatcaaaggcaggtccttggagaaagatgctttcctccaaggacgtgaactttgttggctatacctacaagaactctgaaattgtgaacgatcctgagcttccaggaattgctgagctaaagaaaacgaacaacaagccaaagcgaccaaccatcaaatcattatttgagactgctgatagtgaaaaccagccttctgatggcagttttctgaacctattacccacaccaac

SEQ ID NO: 271025 - DNA, 390 bp, Zea mays
agggcaaagcttcgagcaacaacagcttgctcgactcagcgcccatctatctctcttctcccccgcctgtctagccagcggcggccaccaccaccgttcagttattatagcaagcatgacgaagcacggcgtggtgatcggcccggaggacgtcgcggcggcgcggcatttctcgttcccgccgccgaggacggcggcgggcggcgagtcgtgcaggaagctggcggcgcatgtggacctcggccccgccgtcgtggggtcctgtctcgactccatgaaggcctcgtcgcccaggcataggctcatggtgcccgtgcccggcaccgccgacgcggagcatcacgactggatggagctgcacccgtcggcattggaccgcttcgacgcgct

SEQ ID NO: 271026 - DNA, 410 bp, Zea mays
cccacgccaccagcaagagaccaacagcaagggtgcgaagaaagggtggccccctagctagcctagctagagagagagagagtcatcataatactcagagagaagcacgagcacagctgcactagctagctagctactgcaaagaagcaagctctcgatcacaatggccgccattccttctctgctgcgtcgtcgactcgccattgtcgtcgccaccaccgccatgctcgtcctgcttcttccctccccgtccgtcgccggcgtccccgacctgctccaggacatctgcgtcgcggacctcacgtccaccgtgaaggtgaacgggtacgcctgcaaggcggcggcggcggtgaccgcggacgacttctacttcagcgggctatgcggcgcgggcaacacgagcgccagcg

SEQ ID NO: 271027 - DNA, 1763 bp, Zea mays
caagtcgcctccccctactgtaggccgctgctgctcctctcctcccatctcaccacacaccgcagccccagcaagatcgcgcggaggccatggcgaagacatagccttcctccgccggcgccaagccgaccgcggcgcccaccgcgcctgcgccgccggttacagtgcactcggcgctggtcacctacacctccatgctcgcgctcctctccctctgcccgcccttcgtcatcctcctgtggtacacgatggtgcacgcggacggatcggtggtgcggacttacgagcacctcagggatcacggcgtgctcgaggggctcaaggccatctggcccatgcccaccctcgtcgcgtggaagatcatcttcggcttcgggctcttcgaggccgtcctacagctgctgctccctgggaagcgcttcgaagggcccatctcgcctgccgggaacgtgccggtctacaaggcaaatggcttacaagcatatgcagtgaccttgataacttaccttggtttgtggtggttcggtatatttaaccctgcaatagtgtatgatcacttgggggagatatactctgctcttgtttttggaagctttgtattctgtatttttctctacataaagggccatgtatttccatcttcatctgactctggatcctctgggaatgtgataattgacttctactggggtatggagctgtaccctcggattggcaagtactttgatatcaaagtcttcaccaactgtcgtttcggtatgatgtcctgggctgttcttgccgtaacctattgcataaagcagtatgaaatgaatggcagagttgctgattctatgcttgtgaatactgcacttatgttgatctatatcactaagttcttttggtgggaatctggatattggtgtactatggacattgctcatgatagagctggtttctatatctgctggggatgcttggtatgggttccatccatatatacttcccctggaatgtaccttgtaaaccaccctttgaatttgggcccccagctagcactctcaattcttctagctggaatgttgtgcatatacataaactatgattgtgaccgtcagcgccaagaatttcgacggacgaatgggaaatgctcggtctggggcaaggctccatctaagattgttgcctcttatcagactacaaagggagaaactaaaaccagtcttctcttgacttctggatggtggggcttgtcacgtcacttccactatgtcccagagatactatctgcatttttctggactgttccagctcttttcaatcacttcctaccatacttctacgtgatctttctgactatattattgtttgaccgagcaaagagggatgatgaccggtgctcatcaaagtacgggaagtactggaagatttactgcaacaaagtaccatacagagtcattcctggcatttactgagcatctcgagttctggacgactcttgatattaagctcaacagatgccacgatatccagtcttcataccgatttgctactgattgtgtaatgtcgctggtaggcttgggctgtacgcagtattaggtgtaggcaacttggcttttggcatttaccttgtatgtgtcgtgtatctagggctggggcttgctccttcagttgttagacagtagggggtaatctcaggggtgcaatgtactccctccgtcctaaaataaaagcatatctagtatttaaattttgtttcaaataaaaatgcacaatgaactatc

SEQ ID NO: 271028 - DNA, 670 bp, Zea mays
  unsure (1)..(670): unsure at all n locations
gccagctgggagcatggaccngtgatctcattccacatccacccactgcgggngctggccctgatattccacctcatttttattgtgaactgtgccgactgaaccgggcagatccgttttgggtgactacagcaaatccactactacctgtgaaatttatctcatctggtgttggaaatgatggagcaagcgcacctcaaattgtggagaagaccttccaactttcccgagcagaaagagaaacagtccagagcccagaatacgatctccaggtttggtgcatccttgtaaatgacaaagtccagttcaggatgcaatggcctcaatatgcagaattgcaagtgaacggtattcctgtacgagtaatgaccaggcctggttctcagttactagggataaatggacgtgatgatgggccactggtaaccacatgcagtagagaagggattaataaaattagcttatcaagagttgatgctcgaaccttttgctttggagttcgaattgttaggaggactgttcctcaggttttgttcatttagctttctacttatcatatagttgaaatgactaggttcacatgattttctgttttgtaaatggtccctatgtaatgtgaacctttatcctggttcatggccaaaatcatctaaacaaccatattttgtgt

SEQ ID NO: 271029 - DNA, 485 bp, Zea mays
gaacggtattcctgtacgagtaatgaccaggcccggttctcagttactagggataaatgggcgggatgatgggccactggtaaccacatgcagtagagaagggatcaacaaaattagcttatctagagtggatgctcgaaccttttgctttggagttcgaattgttaggaggaggactgttcctcaggtattaaatttgatcccaaaggaaggtgaaggggagtcttttgaggatgctcttgctcgtgttcgtcgctgtcttggaggtggaggtgctacggacaatgctgatagtgatagcgacctggaagtggttactgaatctgttacagtcaaccttcgttgccctaatagcggatccagaatgaggattgctggaaggttcaagccctgtgttcacaagggctgtttttgatcttgaaacttttgcgggaattgaatcaacgctcacgcaagtggcaatgcccaatatgtttaaagaatta

SEQ ID NO: 271030 - DNA, 403 bp, Zea mays
tttaacaactccctccatcgtcttgaggcgggcgcagccttggctgtcctcggcaccgcggcggttgaggtgctcatcccggtagcggcattggttggcatcgctttcgcgttgttgcagtggtatgtggtggccagagtccccgtgccttcgcacgccggcgaggacggcggtggaggaggcaataagaacgtgagggaggaggaggagcatgtggaggaggacggcatggactaccttctcgtggaggcccggtgcgccgagaatcagcgcgccatcttcgtcggcgccacgtcgttcctgctaaccgagtacaagtacctggcccggttcacggcggcgttcgcgggggtgaacttcgtgttcctggggtcggggcaacggttcaacgcgccccctgggc

SEQ ID NO: 271031 - DNA, 575 bp, Zea mays
cagccacaagggcgctggatcgctcggcgccgtcgcggggttcgccatcgccgtggtgttcgcgtggaagttcctgcgccccagcagacgtgctcccaagcggccccgacctaccgcctgcagcggctcccgctgcgactgtgcctgatgcggccgagcctatcggtgactcaggcaaggtagtaacacgggaaattgtggtgaagcgactgaaaggctgcagaaaggttacatgccaacttctcggtgttgtttttgaggagaaaattcctgaggagcttcagaaacatgccaccgttagaccctccgtggtagagctgctactggaaatatccagatattgtgatctctacctaatggagactgtaattgacgataagagcgaggaaaatgctctcatggccctggagacctctggacttttcagaactggtggcctgatgaaagagaaggtgctcttttgcagctctgaagttggtcgaacttcatttgttccacaatttggaacaaaatttcaaaataacaacaaccttgacaaaatttcccaaacaaccccggttaattcaatgcaaact

SEQ ID NO: 271032 - DNA, 600 bp, Zea mays
  unsure (1)..(600): unsure at all n locations
cggcttttgctccgacgccggcgagcgagaccgtgaggcgaggcgagccaccgcggcggcgggggcagcgatggggtccatgacgatcggtgccaagtacaagaccacgatcaaggaccccggcaccccgggcatcctccgcatgaacggtgataggttcaccttcacccctaatgatccacgatcggcaatgaagttcaatgttgatttccgaaccatcaaaggtcacaagttcaataaagtagagggtaacaaaagcagcattattgaacctttcaaaagaagacaaggctggaggctacatatttgagtttgacaatgttggtaaccgtgaccaatgtcgagactttgtagctagggttttaggcagacatcaagggatagtgcctcctagaccaactgtggctcctgaaaactcagttgcttctgctgctctggaacaactcagtgccgcagaagtggagagacgggttaaactgttgcgagaagacagcgaattgcagaaattacataagaagttnngtcttgggaatattctgcaagaatctgaatttgggcaaccgaaagaattacttgtgatgaagcanatagagatcaaac

SEQ ID NO: 271033 - DNA, 468 bp, Zea mays
ccttttcgtccgcccacgcgtccgcccacgcgtccgcccacgcgtccgcccacgcgtccgggctttgacgcgaccggcacggcggcgacgcacagcccgacgacgaccctccccgctgccttctccccgggcatttgctggagctggaaggcggaagcgttcccgttggattacttcttgggctggaaagagtgaaagacccggatgcactaaatcctgtcctggaacagttacggccctggaattgatcccatgctgccgaacgggccctaagttggaacctgttcaggcggggggtcagctcgcagctgactggggatccggcaccgcatcgccagacgccaggaggggactatcagccatggcagcgaggcagccgccgccttcgtccgcgtccgcgcccgcgcccgcggcgggtctctccatgaaggactacctcaagaggtacatgtcgggcccaaggaccga

SEQ ID NO: 271034 - DNA, 437 bp, Zea mays
cgacacgctcgccggcgtcgccatcaagtacggcgtcgaggtggcggacgtgaagcgcgccaacggcctcaccatcgacctgcagatgttcgcgcacaagacgctgcgggtcccgctccacggcaggcacgcgccgccgtctcctccctcctcgtccccaagccacgccgccagagaatggactaaaaatgctgcttccctggacccgctccttaaccttaaaccaccacggagcacagtttcgccatccatgagccttctactacaggggtgccatggcctgacgccggctccaaagggggacctgaacctgaccgatgaatgcgctcaaggccatcacaggaaagccggaagcttatcgagcacctttgtgccgaggagaagccggcaagggctggccctgaggccaaagtctggcggtcgggcagacacgaacg

SEQ ID NO: 271035 - DNA, 458 bp, Zea mays
caaacacttgctatgcccgctcctcgccgcgcactgctcagcacgccgtgcccgtgagggcatggacgcgagcgcggccaccgccaggcgcaagcgcaagcgccccgacgccgacaacaccggcgacgccaccgccgccgccgccgccgccccggccgccgtcgacgaggcctccgacgccgaggtcgaggagttctacgccatcctgcggcgcatccgcgacgcctcccgccggctgtgcggcgccggcgcccggcccgccccgcgggcgccggcgtggcggcccagcttctcctgggaggacttcgcgaccccggcccctggcgcgccggcgcctgagaccccgacgcccggcgccgcgcaggagccggcgcagccgcggcccgacgagcctgtagccgtcgtccgcgctaccgccccgtcgccgcgtgccgggctggacctgaacgcggagccgg

SEQ ID NO: 271036 - DNA, 297 bp, Zea mays
gatgccataaaagtcatgttcaacctctaggcgggcaagccgcctccctctcggtccagccgtctaggcgccgtcgccgttgccgtatgcccctgcccccacccaggccacagctcctggaataaaaatgacagaaaagaaactttatagttcgatgaatgggcagtttgccgtggttttggaataatttggactttgtcttctttcgcttctgttgtcgtaccattgtcttaatcgattcgtggatttcgaagtccaaaaccaaaaaaaaaaagggcggccgctcgcgatcagaac

SEQ ID NO: 271037 - DNA, 405 bp, Zea mays
ttccagttcagcgcccgcggccgcgatgccataaaagtcatgttcaacctctaggcgggcaagccgcctccctctcggtccagccgtctaggcgccgtcgccgttgccgtatgcccctgcccccacccaggccacagctcctggaataaaaatgacagaaaagaaactttatagttcgatgaatgggcagtttgccgtggttttggaataatttggactttgtcttcaaaaaaaaaaaaaaaaaaaaaaaaaggaaaaaaaaaaaaaaaaataaaaaaaaaaaaaaaaaaaaaaaaaaaaaaaaaaaaaaaaaaattaaaaaaaaaaaaaaaataaaaaatatataataataaatatattaaaaatattatttttaatttataaatataaattttttttattttc

SEQ ID NO: 271038 - DNA, 518 bp, Zea mays
caagcagaagccggactaggcccatcaccaagacccactgaaccctcgccgtttcgtcgcacccaccaacacgagagatgagctccggcggcgcggacaagcccggcagtggcggcggcgcggtgaagacgccgtcggacttcctcaagtccatcaggggccgccccgtagtcgtaaagctcaactccggcgtcgactacagaggtatattggcttgtctggatggttatatgaacatcgcaatggagcagaccgaggagtacgtgaatggccagttgaagaacaagtatggcgatgccttcataaggggcaacaacgttctgtacatcagcacgacgaagcggacccttgccgatggcgcgtaccggattggagtccctctgtcctcctcccgtgtgtgtgccgtgcaacttcgaagcccgtagcttcggttgcgctctgactctgatgcatcccttcaaatctctgtaccccccctgtctggaagggagttgtaggggagatggaaagtgtatcgc

SEQ ID NO: 271039 - DNA, 1767 bp, Zea mays
  unsure (1)..(1767): unsure at all n locations
gtcctttataagatcatatgttgtgcccgaaggctttccagatagtgtcacaccttcatatgttccatacatgacatggagagcattgaagcatttctttggtggagcaatgggtgtgtttacaacaaggaccttgctcaactctgttggagtctcccaaagcagggctgcatctggtgctgtggctatcaactggattctcaaggatggggctgggcgtgttggaaagatgctttttgcccgccaagggaagaaatttgattatgacctgaagcagcttcgcttttctggtgatctcttgatggagttaggagctgggatagaactagctactgcagctttcccacagtttttcctaccaatggcatgcatagcaaatgttgttaagaatgttgctgctgtcacttccacctctactcgaacaccaatttacaaggcgtatgcaaaaggagaaaacatcggtgatgttactgctaaaggagaaagtgttggaaacattgctgatctgttgggaactggaatgagcatactaatctcaaagagcaatccatcactggtaacttcatttgccttcttgtcgtgtggatatcttctcagttcatatcatgaggtgagatctgttgtactaaacaccctgaatagggcaaggttcactgtggctgtggattctttcatcaggactgggtatgtaccctcgctgaaggatggaaactcacaagagacaatatttaatccaccttggcgacatgagccagttgcaataggatcaagatttggagatgcgtttcaagaacctgcttcgtttcttgctataaaacctttgttcgaggatgagaggtatattgttacatataacccaacaaaggacaaggtatatgctttgctcaaggaccaagcaaagccagatgacattctcaaagctgcttttcatgcacatgtgttactgcatttcatcaatgcctcacatgctaacctgaatgcacggaagcgcatgaactccaaccggtcgtaccagtatgacccactgaacatggactttgtaccacacatcgaagagtcgtgcaagatcgttatgtcatcttatggagttttcaagaagaaagcaagagaacagggatggataatgtctgaatcacttcttaacccgggacgagcaagattgtgtggagcagtaccacaatgatccaagcctttttcgtttttcatgatgaagaggatgagttctttttcatacaattggtatgtgagtcagcgaaactaacttaagtcgacaatcagctcaagtacataaaatgcaccaaattgtcatgagtcctgatcctgcaggaacagtacttgaacctggagcgttagatcgcaacaaccaccatgacaggggggtgctgactcaggaagggtccgtgaaggctccaaactgcggaagatcgactaacaatcagctcttgtatattcttttggtattgtataatggaggcggctatctttcctaatgttgaccggactttagtggtcatcggctgatttgttttgactatctgacaacaatcccccctgctaactttgcggtatcgtggtcctcgtttccctaatttggggggcgatacatgccagttttcgtaaagaatatctgtgtttatatgcaaattgatttgatcatttgtctcaggcctgtttggaacaagggagatgttttctgcgtatgtttcgtgaaattaaactgattcctatgaaaaaaaaaaaaaaaaaaaaaaggncggccgctcgaaa

SEQ ID NO: 271040 - DNA, 518 bp, Zea mays
gttctagatcgcgagcggccgcccttttttttttttttttttttttttttttttgggggaaaacttccatcaaaatttctcattcatgtggccggaaagtgacccaacactgggtacaatgtacataagcagatctcattgtttttcaccaaggtatcttttattcatctccaatcaagacggttcttccatattgcgccattctgtcattattagtttattacattgataataaaccttatggccaatatattacgcaaaaggttagcatttcaaccagcattaatcattcttggccttgataaacttcttaatgatgcccatcatctcgcttcctgggaatcgtccaaggcagcccctcgcagcggcgatctcgttgaactcacacacactgtcgccactgaaagctttaagttgaccaggcttgtgctccagtgattctatactgtcgagcaaatcttctccggattttaccgaagggaggggaaaatcgccgagctgtgtattcataatattat

SEQ ID NO: 271041 - DNA, 1096 bp, Zea mays
attcggctcgagcaaaaccacgcgcgccacgtggccgtggctggcccctcgccgcagcccggcacgccgcccgcccgcccgcgctagccggccatcaacctcatctgaaagaaggagtccacctgacgccgtccgcctcctcgtcaccccgtttcgcttcgcattccttcccctctctccctttattcctatcggcgctcggccaccttcccgcaccaacccaccagcccccgcattcccgggtgcctcgcttcgctttgcgcgcgattcgatccaggctttggttggaggcatggcctcgtcgcccgcgagcagctacgactgctccttcaaggtcctgcttatcggggattcggccgtcggctagagcagcctcctcgtcagcttcgtctccgccgctcacatcgacgacgacatcgcgccaaccataggggtggattttaaaatcaaatttctcagtgtgggtgggaagaaactaaaactgacaatatgggacactgccggtcaagagaggttcaggacaattaccagctcttactacaggggtgctcatgggattattttagtttatgacgttacaaagagggagagtttcacaaatttggctgatgtgtggaccaaggaaatagagttacactcaacaaataaggaatgcatcaaaatgcttgttggaaataaagtggacaaggatgaggacagaatggtgacaaaagaagaaggtcttgcatttgcacaagaacgtggatgtctctttgtcgagagtagtgctaaaacaagagaaaacgtggaaaaatgttttgaagagcttgcattaaagattctccaggttcccagtctattggaggaaggttcttcggttgttaagaggaacactctgactctgaaacaaaagcaggagaatgcaaaccgaagtggaggatgctgtcagtaggtcggccagttcttgttgcaagccactcgaggtatcatatatttaggtccttgtaagttgtattgggatgtagatgagttgtatctaaatgcacagcggcagagccaatgcaagtgatgggagaactaaccacttgaggttttggtgtgaattgatctgtacaga

SEQ ID NO: 271042 - DNA, 622 bp, Zea mays
cgggcgcgtgggcggactcgtggggattttcagtctattggttgtggggatttggatattgaaggtcttactgaatccatatatgttgcccacaaagatgagtacacagaatttgagcaggcatcactcaggcagctatttcagtcaaagatggctgaactgagagctgaggctaagcaacaatctgagtctactggctcaattggacgtgcaaaaggagcatctttgaccacatcaccacagcaacagatatctgttactgtagtaacggaatttgttcgctggaatgaggaagccataaccagatgcacactactgttttctcagcctactactgttgcagctaacgtgagatccatatttgcatgcttgcttgatcaagtgagccaatacttaactgaagggcttgaccgtgctagagagagtttaaatgaggccgcagctttgcgggatagatatgtcatcgggacaagtgttagtaggagagtggcagctgctgctgcttctgcacaagaggtggcagcttcagctggtgagagcagctttagatcctttatgattgctgtgcagcgttgtaccagtagcgtagctattcttcagcagtacttctcaaataccatat

SEQ ID NO: 271043 - DNA, 575 bp, Zea mays
gcatagcaaaagagaagttaggccttcttgtccaggcttgtgttggcggcggcgatggcgacgtcggcgagcacgtccggcgagtggctcaagggcgcgctgcaggaacttcgggagcgtaagggcagctcgctggagttcgactcggatctcatctcgggcctcgtctccttctgcgagctcgcgcctccctccgacgccaccagctatctcgagaattttattgggaaagaagctgctcaggacatcattcaagaatacttgcggaggaggggtcacattggttcctcaaatggaactgagagctttcagtcatctaaccttcagccttatgttaagccttcagctgatgcagcaactacacaaacaaagaaacaaacacgcacgcaaaaagattcagcatcttcttctagtcagagttctaagagtcaatcagaaattgcagaatcacaagttccttccaagagaggttcaaaaaagaaaggagcaaaggtcatttccctcgctgaggcagcaaaaggttctattgtcttcaagcaggggaaaccttgttcatgccaagcacggcaacatga

SEQ ID NO: 271044 - DNA, 422 bp, Zea mays
ggctgctgctgcggcggcaattagctcatcgactccagattggagaactcgacaccatgaaggtgctgatcgttgcccttgctctcctggcgctcgctgcgagcgccgcctccagtacaagcggcggctgtggctgccagacaccaccgtttcatctaccgtctccgttctatatgccgactccgttctatctgccgacgtatcagcagccgcagccatggcaataccccactcaaccaccgcagctaagcccgtgccagcagttcggatcctgcggcgtcggcatgcgtcggcagcccgttcctgggccagtgacctctgagttcctgaggcaccagtgcagcccggcggctacgccctaaggatcgacacagtgccaggcgctgcatcagcagtgctgtcaccagatcaagcacgtggag

SEQ ID NO: 271045 - DNA, 354 bp, Zea mays
cccacgcgtccgcccacgcgtccgcttctcacttccccagagtccgaactacgagcgagcggctgcgattcccagcgtccgagcgccccggcgccggtctcctacgcggggaaggaccggcctcggactgctacggcgccggatgagcgagcaagtctgtttcttgggcaagctatcggtcgatgtggcagcggagtagagtactggacgggcgcggccacatgaggttcggctccggaagggtggaagtccagatcgttcttacccggcatatgaccttgatatttcatgggtaaaagactattgtcccccttctctaaagacttataagcttcttttgcctataattattag

SEQ ID NO: 271046 - DNA, 976 bp, Zea mays
cccacgcgtccgcccacgcgtccgcccacgcgtccgcccacgcgtccgcggaactgactagaactagtacgtagatccaacactcgggacgaaattaaaagagacgacgcacatcaaccggcaggcatcgcgcggtcaccaccatggcggcgcaggagggcggcatgaggctggtgtcgcacccgatcgcggcgcacgacgggcggctgccgcggcagtacacggcggaggggcagggcgccaagaaggacatgtcgccgccgctggagtggtacggcgtgcccgagggcgcgcggtcgctggcgctgctggtgcaggacatcgacgccgaccccagcgtgccgtggacgcactgggtggtggccaacatcccgcccgccaccaggggcctccccgaggggttctccggcgccgcgggggcgggggcggggccgtggcccgggccgcgaccagctcggcggcctgcaggagggggtcaacgactggaagcagcccggctggcgcgggcccgtgctcgcctaccacgggcaccggattcagttcaagctctacgcgctcgacgacgaggtgcacctcggcaacaaggtgaccagggataagctcatggaggccatcgacgggcacgtgctggaagaagccgagctgatcgccgtgttccagggagtcgtcgccaacaactaacacacacactcagagatatctttgttggcgtgcttcgtatttgcttgtgtggctaccatgtaattttgatcgaataaaagggaacttcacatgtgcttagcttattgtgtgacgaagagtacgtcatgtggacagctttacgtgccgacgtacgttaagagtaacccaccggtctttcaaatgctagcagttgtgaatttggccatggcagcattatcaatttgcctgcagcagctcctatcatcagttactggtggagcttatttaagatgaaatagtaaacctggttgatgac

SEQ ID NO: 271047 - DNA, 610 bp, Zea mays
gtgaagttcccttttattcgatcaaaattacatggtagccacacaagcaaatacgaagcacgccaacaaagatatctttgagtgtgtgtgttagttgttggcgacgactccctggaacacggcgatcagctcggcttcttccagcacgtgcccgtcgatggcctccatgagcttatccctggtcaccttgttgccgaggtgcacctcgtcgtcgagcgcgtagagcttgaactggatgcggtggccgtgggatgggcggcacgggcccgcgccagccgggctgcttccagttcaggctgtacgcgctcgacgacgaggtgcacctcggcaacaaggtgaccagggataagctcatggaggcgatcgacgggcacgtgctggaagaagccgagctgatcgccgtgttccagggagtcgtcgccaacaactaacacacactctcagagatatctttgttggcgtgctttgtatttgcttgtgtggctaccatgtaattttgatcgaataaaagggaacttcacatgtgcttagcttattgtgtgacgaagagtacgtcatgtgggcagctttacgtgctttacgtacgttaagagtaacaaaatggtctttc

SEQ ID NO: 271048 - DNA, 827 bp, Zea mays
cccacgcgtccgcccacgcgtccgcggacgcgtgggcgacggcgaggccaccgatcctatctatatatattcactcgtaccatggaggaggaattccaggaggccgaaatcctatggccggcaggcgtggacggcggcggcgaggcggcgcctgcttgctcggtccgtcatcgtcccagggcagccacgccggtcgacatctctcggcagaagcggcggtgccgcccctgcccggtgtcgtcgtcggagcattattacgccaccacgctcgacgaccaggaaaccgacgacgtcggcgatggtgcaaaagggacgactgcgaaccacggctcggcggtcgtgccgccgcacgttcttgtcgcgcggcggaggaggctggtgcgcggccggacggcggcctactccatgtgcgctggcaaggggaggacgctcaaagggcgagacctccgcgacgtccggaacctcgtcctcaagatgacaggcttcatcgaggagtgaatgaatgcgtgccgtcgcatcgcatggatccagaggattcttttcagcaagccaatggaagaagcacccgtagcagtctagcagaaggatatacaactatacaagaagatgacgactgttcacgcgtaataatttattaatttgctagcttatgtaataattaattaatgtacatagctagctaagaagctgagggtgaaataagttgaaaagagtaaatttaaaatgaacgccagctgctgtggtactgcacatcaatgttgtaattgtagacatgtagtaagcctgttaacattttctataatcataagacgaagcaaatttcaatt

SEQ ID NO: 271049 - DNA, 701 bp, Zea mays
ggcaagcagggcaggtggcggcgggggcgcactccggcgggcgggaagaagcgcgggcgcacggcgggggacaaggagcagaaccggctgaagcggctgctgcggaaccgcgtgtccgcgcagcaggcgcgggagcggaagaaggcgtacctgacggagctggaggcgaaggccaagggcctggagctccgcaatgcggagctggagcagcgggtgtccacgctccagaacgagaacaacacgctccgccagattctgaagaacacgacggcgcacgcgagcaagaggtccggcggcggcggcggcggcggcaagggcggagacggcggcaagaagcaccacctcgccaagagctagtgagaaatgagagagggagctggttcgtgccctgctcgcgctcgcctgatctgaccattgctggcgtgttgctgttcctgacgacgccttctctttttcttcttttctcctactgttacccgtgggtttcgtctctcgcctcgctgatgcacactgttttaactgttagccatcccgtctactcaccagtgaacactgctgctagttaatttctcggtggtttagggtgccgtgccagaacgccgtgtaacttcgttcttgtactatcttgtagttcagccttgcggtttggcaattcgattcaaaaaaaaaaaaaaaaagggcggccgctcgcgatctagaac

SEQ ID NO: 271050 - DNA, 515 bp, Zea mays
gtcatctgcggggcttggccacgtaccgcgccaagcgtggcgtcctccccggctccacgtacgacatttctaagctccacggccgcatccggagcgagctcagcgttaaggtaaccaccacgcagctcggtgacaaggtacggcgtctcaagcagaagtacaacctgcttgcgtcacgtggcaagagcgggcgggatccagacttgcccagccagcacgaacagagcgtctatgagattggcaagaaggtttggggagcaagtgctaacggtggaggaagtaccggtggtgatgggtacgagattggtggtgacagcgaagaggagcatgagtttcgagagagtgacgaggatgtggagaatggccgagatgaacgtgcccgcaagaacaggagggttatgccaatcgccatggcaaacgggaacggggctcggttgggggctgtgaatgccaatagcagagggaagtttgaaactgagaagggaaaggatgcttacccctacctttgggagact

SEQ ID NO: 271051 - DNA, 542 bp, Zea mays
cccacgcgtccgggggcccgcacggcatcggcgacctcggggacgaggcgcttgctttcctgcattggctccgcgacgccggctgcacgctctggcaggttctaccacttgttcctccaggtaggacggctggggaggatgggtctccttattctggacaggatgccaactgtggcaatacccttttgctatcccttgaggagcttgtaaaagatggtctactgatgtcagatgaacttcctgatcctgtggatacagagtatgttgaatttgacactgttgcaaatctgaaagaaccacttattgcaaaggcagcagagaggctcctactaagccatggagagctcagaacacaatatgactgcttcaaaaaaaatccaaatatatcaggttggcttgaagatgcagctctttttgctgctattgacaaaagcatcaatgcattctcttggtacgagtggcctgaacctctgaaaaatcgccatcttggagccttggaagatatatatgaaaaacagaaggattttatagagacatttatg

SEQ ID NO: 271052 - DNA, 1335 bp, Zea mays
cggacgcgtgggggacgcacgaaccccaggaggcaccgtctccaaagtccaaaccctaaccctagcgcccccaactcgtcgccgggagatggccatggacgcggagcggcggcaagcggagctgatcgcgcagttctcctctcaggcggtggctctttcgtccgcgcagcagctcgccgctctggtgctcgaggccacctcccacccggccctcttcgccttctccgagctcctcgccctcccggccctctccatgctcgctggcactcagtactcgtcttcactggacttgctccggctcttcgcctatggcaccttgaaggactataagaataattcgggatcccttccagcattgttgcctgatcaggtccgaaagctaaagcaactcagtgtgctaactctggcagagtcaactaagatactaccatatgatcagctcatgcaagagttggatgtttccaacgtaagagaactcgaagatttcctaatcaatgagtgcatgtattcgggtatcgttagaggcaaactggatcagctgagaaggtgctttgaggtacaatttgcagctggaagagatcttacacctgatcagctaaagaacatgatagagactttgtctgattggttggggacatcagatagactgttgcatcaaattcaggagaaaatcaagtgggctgacacaatgagtgaggtgaacaagaagcaccagaaagaatttgaagacagagtggaagaggccaaaaaatcaatcaaggcagacatcgacttacgggggcatgacgacttcctctctgaatctggaggaataatggattttgaagaggaccgcgtccgaccaaagaggaggcgacaaccaccggcgtagtttcaattaagcccttacaaatctctcccacaatgggaactgctgataccttgattgagacattttgacgccagagctgaggaagcattgtacatttgtcatataatgcctccagtgtagcgagtcagatattttgccttctggtcaaactgctcgcgtgtgtgtgttttggtagggaatgtacaggttcaaaccttgacgttatgttgtattttttggtagatgacccatggtagaaatagcgctgttatggttatggcactgcgtttttctccaagtttcatttcgttctgtcatgttttgatgttttgtgtggtggggtgctcgcagggtcgtggccatgggcgaggtgccctatttgccatatgatgtgacgtgaatcttcgccgtttttccttttaagatgatatagatccgttccaatttttggctgtgattttatcccaaaaaaaaaaaaaaaagaa

SEQ ID NO: 271053 - DNA, 453 bp, Zea mays
tcgcggacgcgtgggcggacgcgtgggcggactcgtggtctgacgcgtgggcggacgcgtgggctgagacagagtacggtcgcgagagtgaaggcaaggaaaaacacccaaacggcccaaccccaggaagccccgtcggaccctacagaccctaaccctagcgctcccgacgcgccgcggagcgatggcgatggacgcggagcggcggcaggcggagctgatcgcgcagttctccgctcaggcggcggcgctttcgtccgcgccccagctcgccgcgctggtgcttgaggccacctcccacccggccctcttcgccttctccgagctcctcaccctcccggccctctccaagctcacgttcgcgcactgcccttggcgtgcgccctgctacgttactccgggacccgctgccggactaggttttgggtttcattatctgtttgtcttcgcgtc

SEQ ID NO: 271054 - DNA, 374 bp, Zea mays
cgtccgaccaaaaaggaggaggcaaccaccggcgtagtttcaattagcccttaccaatctctcccagaatgggacctgctgataccttgattgagacattttgacgccggagttgagtaaactttgtacatctgtcgtgtgatgcctccactgtagcgagtctgtttattttgccttctggtcttggtggggacgtacaaggccaaacctaggcgttatgttgcatttatttggtagtaaatggcccatggaagaaataacgttgttatgattatggcactgggttattctcaagtgtactgaacgataacagaagcacctctgttaaatgatgattgacccccggcttgctgaaaaaaaaaaaaaaatattaa

SEQ ID NO: 271055 - DNA, 616 bp, Zea mays
tttaactgttcataaataagggtatgaacatatttgtgcttgtgggcttatatcctacgtgcactccacttgtagtttctggaattttctgcttgtttgatctaccattgctgtcagcgtgcatattatagaaaaatatgcacattgtcttattccttaatgtatctttgtgcaagtgtaggtaattctggattccttccagcactgttgcctgaccaggtccgaaagctaaagcagctcagcgtgctagctctggcagagtcaactaagatactaccatatgatcagctcatgcaagagttggatgtttccaacggtatcgtcagaggcaaactggatcagctgagaagatgctttgaaagtacaatttgcagctggcaagagatcttacacctgatcagctaaacaacatgatagagatcttatctgactggttgggaacatcagatagcctgttgcatcaaattcaggagaaaatcaagtgggctgacacaatgagtgatgtgaacaagaagcaccagaaagaatttgaagacagagtggaagaggccaaaaaatcaattaagaagttgaacaatttaagcaggcagacatcgacatgacgactacctctctg

SEQ ID NO: 271056 - DNA, 512 bp, Zea mays
ggctcgagattgatcggtcacctgacctcatagataactctagggcggacggacggacgcgcgtctccggtcccgtccgtaatagcactgatccgatccacgccggccggcgatggagctcatcaagtccagggcgaccgtgtgcgcgctcctcctggcgctgctcctgctctcacactacgacggcgggacgacgacgacgatggtggcggaggcccgggtgtgcatgggcaagagccagcaccactcgttcccctgcatctccgaccgcctctgcagcaacgagtgcgtcaaggaggacggcgggtggaccgccggctactgccacctccgctactgcaggtgccagaaggcgtgctaagcaaagctcttcaaacacccttggcttgccagaactgaactctagtagtactaagtaacacccttggctagctgtgcacaacctacgtaccgtgcatgcatgtaatgtggtgtcatgtaacgtgacagcaataaatagtattaacaataat

SEQ ID NO: 271057 - DNA, 446 bp, Zea mays
gggtagcacacctctgtgcaaagcacattggtggcgggaagcggtgcatgtttgaaggaggtgctgcctgtgccccaagtgcgcacggggctactgaatattgcgtggcgcatggaggaggaaagcgctgttccgtgcccggctgcaccaagagtgctcgtggccgcactgactgctgtgtgaagcacggtggcggcaagcggtgcaaggttgagaactgtggcaagagcgcccaggggagcacggacttctgcaaagcccatggcggaggaaagcggtgcacatggggcacaggctgtgaaaaattctcccgtggcaagagtggcttctgtgcggcacatggtaccttgatggccaggcagcgagaacaagaggcggcgaagaatgtaggaagcatgattggaccaggtctcttcagcggcattgttgtgtcatctgccaccgca

SEQ ID NO: 271058 - DNA, 1001 bp, Zea mays
gttcctccgtcgcgtgggcgggaggacgaggaggaggaggcgcatccctccatcctctgcgactgcgtgcgtctctcgagctcgagtcgattgatgattcatcttcctagtctcgtctccgcgccattctccaaatccatctatcatcaccatcccgatcccagccccagccccagccccagccccgccagacccagacccgatgcagcaacagcaggacccagcacccgccgatcccgacccactgccgccccccgacctcggtgatgccgccgcctcgtccgcaacgcagacgatcccttcccgcaacgcctcctccaagtacgatttcgtcaaggtcaaggtctggctcggggagaacgccgaccactactacgtcctctccaggttcctcctcagcaggatgctcacagtcaccaagattcctaatcatgtcgccatcaagattgcccttgagctcaagaagctgcttgtcgacaacagcctgcttgatgtatcccagagtgatctagaggctaatctgttcaagcttatggaaaaacggggatacggagaggagtatataaatcgctataaaatgatgacaaggttccatcatcaacgggttccactagtaattttggtgtgtggaactgcctgtactggaaaatcaacaatcgctacacaacttgctcagaggctcaatttgcctaatgttttgcagacggacatggtgtatgagctgctgcggacatcaacagatgcgccacttacttcagttcctgtgtgggctcgcgattttaattcacctgaagagcttatcactgaattctgcagagaatgcagagttgtacgcaagggtttggctggcgatttgaagaaggccatgaaagatgggaaaccaattatttttgtgggaattcatttggatccaatcatttatcttatggattaggtaataagtgttggtattccctgaccgtaataatctttcatattttttaattctatctttttttttt

SEQ ID NO: 271059 - DNA, 1041 bp, Zea mays
ctcctgcacgcgcccggcctgaacttgccggacccacccacgcgttcatggatgtgtttaagagtgatggtaattccaggacggagaagacagtaacagattctgaaaatccaggcatctctgtagaaaggaaggttgaacatcaattcaaaaatggactagcagagaacagaatggattctactgaggacaacaaaaacttcgtcaaaagcaaaaaaagcacactggagaaaggtagaaccagtgaaggtctatcttatgctcagaaccacgaaaccaaggtccatgattctgcacgttctcaagaaaaaaatcccaaggatgaaagtgatgggcacaaagatttggaccaacagaagaataatgccaccaagaaagacaaacctgctgctgagccgataattgttccaattgtactgaggatgtctgattttgatcacaaagcattgctagaggaatggatagccactagagctttcagagataattgcattcctcaggatcatcggaaacttataaacaaccttaagcttattcaggactacctttgttcttttgagtcacagggattgaccattgttgatatctcagcaaattcgtttcctcaaacattagattggcttcacagctatcttcttcagtgcatcgagcgaggtcttttggctgcgtgtttagaaagctgcaatcaaggtcaatgacactcttggatgtaacctgtccaaccacacctcagtgggcattatatgctggcaatggacactaagaatatcattgtaaaggattacgcatgagtctggatatcatctccaaccaagaccgatatgaaaataccatcgtgatgttgtcaataccagccataagcgtgggtctgtctgattggggttactcgcattaatattgtactgtattgtattagaggttatgcggcatactcataatctgaataagataacaaaatttggcattgtttgctttatctgaatataaacttgttccaaacgtaatcacggagaggactaggaaccacttaagtatgtgaat

SEQ ID NO: 271060 - DNA, 446 bp, Zea mays
cgtctgtgcctggcccagccagctgtcttgttcctccgtccgggaggacgaggaggaggaggcgcatccctccatcctctgcgactgcgtgcgtctctcgagctcgagtcgattgatgattcatcttcctagtctcgtctccgcgccattctccaaatccatctatcgtcaccatcccgatcccagccccagacccgatgcagcaacagcaggacccagcacccgccgatcccgacccactgccgccccccgacctcggtgatgccgccgcctcgtccgcaacgcagacgatcccttcccgcaacgcctcctccaagtacgatttcgtcaaggtcaaggtctggctcggggagaacgccgaccactactacgtcctctccaggttcctcctcagcaggatgctcacagtcaccaagattcctaatcatgtcgccatcaacatttcc

SEQ ID NO: 271061 - DNA, 378 bp, Zea mays
cagatgcgccacttacttcagttcctgtgtgggctcgcgattttaattcacctgaagagcttatcactgaattctgcagagaatgcagagttgtacgcaagggtttggctggcgatttgaagaaggccatgaaagatgggaaaccaattattatagagggaatacatttggatccaagcatttatcttatggatgaggaaaagagtgatggtaattccaggacggagaagacagtaacagattctgaaaatccaggcatctctgtagaaaggaaggtcgaacatcaattcaaaaatggactagcagagaacagaatggattctactgaggacaacaaaaacttcgtcagaagcaaaaaagcacactggagaaaggtag

SEQ ID NO: 271062 - DNA, 1147 bp, Zea mays
ttgttttcttctctcatcttcctgctcaacatcagtagcagctttagctgtagcagcgccaccggccaccgccacgccatggccaccacgttgcacaagccccttggggcgatcaccgttgacgacctcgccgcggtggcgcctgggtcggacgccaccgcgctccacgcagcgctccggcgcgcgctcgactcgcacggacccaccgaagtgtggggcgagctctgccggtccgtgctctgtccgtctgtccccttcgccgtccaccggatgctctactacggttgcttcgccgggttcccgtcccccacgccgccggcctggacgcccgaccccaaggagtctgtcttgaccaatgtcggccgtgtcctcgaggcgcgtggtaggaacttgatcggcgacgcgtacaaggatcccatcaccagcttcccagacctccacaacttctccaacgagaacccagaggcgtactggaagatggtatttgaggatatgggtatccaattcagcgttcagccatcctgcatctggagagagaacactgcatatccttctggcgagtggctaccaggcgccgagctcaacgctgctgttaattgcttgactgctaaacccccgaggagctccgacggtccggccattgtatggagggatgaagggaaggactctgatcctcttaacttcatgtctttggaggacttgaggaagaaagtttgcctagtggccaatgcaattgatgccctggaactgccgaagggatctgcaattgctattgacatgcctatggatgtcaatgctgttgtgttctaccttgcgatcgtgttggcgggatatgtggttgtctcaattgcagacagttttgctgcacctgcaatatcaatgaggttgaagttatcagaagcgaaggcaatttttactcaggattacatccttcgtgatgacaaagaactaccattgtacagtagagttgtggaggctaaggcccctatggcaattgtgattcctggaagggggtctttgctaataaagggactacgtgttgacgacctttcctggcaagatttcctttgaagggttaatcataccgaggctgtaaattacactggccgtaaccaacctgcctattcattcaccaatattctatttt

SEQ ID NO: 271063 - DNA, 751 bp, Zea mays
tcccacgcgtacgcccacgcgtccgcatcaaaagaaggcagggaaagatctgatctggggggtgagagagcaggaggagaaagccaagccattgccctcccctcttgaaggcttggagcttggttctacatcctcttctcttcccctccgtctctctctctctctctctctctctatttggtttgcttgcttgcctctactagactctagtcgtcgggtccggccatggccaccatcctggagaacatccagaaggcgaggttcctgccgaccaggccgctcaaggacgagctgcccaccttccagggcggcggcggcggcaagggcaaggaggagagccacctcatgggcctgaggaagcggctgtccagcttctccggcaagatccagcccatctcctccgcgtcggccgccgagtgggcgttccgccgctccaagtcggcgccctccctcggcgccgtcttcgccgcggggggcggctccctgaggcagtggtggcagtggggcgtcggctggctcctgtccaagaagcccgggttcgcgggcgacctcgagatgagcgaggaggaggtcgccgcgctgggccgccagagcaggggcacctgggcccacgtcctcttcaagatgcggtccggcgtccgccgcctcgtcgcgtccgcgcactcgctccccaccacgcacaagcagcagtccctgccgtcgtcgtcggcctcggcggcgcagagcgtccagtgcaaaccgtgggcgtcgt

SEQ ID NO: 271064 - DNA, 877 bp, Zea mays
cgaaagctcgaggactgtactcgctcgcaaaccctagccgccggaccggccggtgaccgtgcggcgctgaggcgcgcgctatataaacagagccatccattcctcccttaccgttcagtcccacctcgaccgcctcctctcccctcccccggctctgtctgttgacttaccccgtcgagctttctagtcagctgctcccgttgccatggggaaggagaaggttcacatcaacattgtggtcattggccatgtcgactccggcaagtccacaaccaccggccacctcatctacaagcttggaggcattgacaagcgtgtcatcgagaggtttgagaaggaggctgccgagatgaacaagaggtccttcaagtacgcctgggtccttgacaagctcaaggccgagcgcgagaggggcatcaccattgacattgccctgtggaagtttgagacaaccaagtactactgcaccgtgattgatgcccctgggcaccgtgacttcatcaagaacatgatcaccggcacctcccaggctgattgtgcggtgctcatcattgactccaccactggtggctttgaggctggtatctccaaggacggccagacccgtgagcatgcgctccttgctttcactcttggtgtgaggcagatgatctgctgctgcaacaagatggatgccactacccccaagtactccaaggctcggtacgacgagatcgtcaaggaagtgggttcctacctgaagaaggtggggtacaaccccgacaagatccccttcgtgcccatctctgggttcgagggtgacaacatgatcgacaggtcgacgaacctggactggtacaagggccccacccttcttgaggcgctggaccagatcaac

SEQ ID NO: 271065 - DNA, 1262 bp, Zea mays
gacctgtagacagtactctagtctctagtccacgaaatcctcgtacttgtgttggctggccctcgactagcgtgttgtagcacactagcgccacagtaatcgagagtgctctcccaggtcgaggtggtgtaggtgtttggcggacagccggggcgttagaatctgaggaggagaagatggtggtgctggtggtggccacgacgtcggacccggcgtccattgggcccgccgccgccttcctcgccatgcccggatggtcccccggcccgcccatcgccgaggcgatggagagttttactaatgggaatgttcgattactgaagcatgagcgtagcattgtcgcagaggatgatcttgaccagcgatggcaggaagccactggagagtctgtttctgaggtcatattcctcagcaaacacactgcagtctccaaacgtccagcactcacagtgcatccaattggtgtgccacatctgaaggaggatgaaaccccaccccaaggaggaactcctggatgggcagcaattccaagtcctcgaattggaccttggctccggttgatgcaaaagatagctgtagaacaaggccttgttccagagtttgaggttacgcttgaggctactcaccatggaccagttaccagcacacccaccatgtttgttgagataggatttacagaagaccactggggtcgacaagatgctgcacaggcaattgctctagttctatggaaaggtcttggtctggaggatggaaatgctgttggaacttggcagaggaattgtgaaaaggttctattaggtataggaggtggtcactatgttcctcgtcacatggatattgtcatcaaagatggtgtatgggtcggtcatttactctctggttactccttgccaatggacatgccgtcgcaagtaaatgtaaagagttctgaagaggttgctggaatgtggaagcactccatcaaagtttcttatgaagcaacaaaggcagcatttcctggtggtgaagttatcgcgcatcttgatcacaagagcttcaagggctggcagaagaatgctgttacatgcttcttgcaggagcagaacatcaggataggaaagcctagcgatttcctgtgacgtgctgcgacagcagtgctggacaggacaggtggaagaggctgtgaatgcttgagctgatttccctgggcacgcgcgcgctgaataaatatgagacataggggctgtttggttcgtggctaaatgtgtcatactttgcct

SEQ ID NO: 271066 - DNA, 477 bp, Zea mays
cggacgcgtgggcggacgcgtgggctgcaggcgttgattcggaagtatgctcctgtcgccattgtcattggggtagtattgatgctgttttggctcaagaacaagatatggtgattgtacagtacgaaggatactgggccctgttacaacaccggagaagaacagatggagataaaaaccaggtctattctggaacaagatgctttggtgacttgtatcccgtatctgcccattcaagcgattacttaaactgcccttttgctcctccctataagctagtatcaaagtgaattcgttggagtgcagacctgataagagcatctccggaagtctttcaaaattcactctaaattgtcattttgagagtcatttgcttaataactgtcattctgtttttttcactccaacagctttttatatcctgtttgcactaaaaaaaaaaaaaaaaagggcggctgctcgcgatctagaactagt

SEQ ID NO: 271067 - DNA, 309 bp, Zea mays
gtgaattcgttggagtgcagacctgataagagcatctccggaagtctttcccgattcactctaaattgtcattttgagagtcatttgcttaataactgtcattctgtttttttcactccaacagctttttatatcctgtttgcactaaggagtcattctctttctatattggactaccgatgaatttggagaagatggatatattcggatagctgttttttttaaaaaaaaagctgttgggggttttcttagcaattaggaaggttatagtctctagagaaactcatattttgtgcatccgttgaactc

SEQ ID NO: 271068 - DNA, 487 bp, Zea mays
cccacgcgtccggggtctacaaatatacactactactccactaatgtcacatatcgacaaccaggtgatctcaagtaattaacagaaaatatattccatcattgaaaatgagttccgttgttttgggtgctactggtagggagaataagacatcatggcctgaggtggtgggcatgtccatcaaggaggcaagagagatcattcttaaagacatgcccaacgctaacattcaagttctaccggttggctcgcttgtgacccaagactttcgccctgatcgtgttcgcatcttcgttgatattgttgcccagactccaacagttggctgacaaggatatgccttatctataggccaaataaacaaagcctacttttatgtatcatggctaataaatcctacatttcttggttatccttgattggtttagcttattagctatatccccatcaaaagggggaccgagaaattccatgtatgtctatcata

SEQ ID NO: 271069 - DNA, 581 bp, Zea mays
atgcaccgctgcacacgccacacgggcacggcgccttcgtctccaacacggcgactaattaaccccactgattccgacgaccgagctcccccacactttttcctggcaaaccctgcacgcctccgcaaccgcaaccgcgtcgtcggcgtgcgcgatcccgagaggcccagccatcagcttccttggcggggtgtgtatgcgcgtacgtcggccgtgaccagatcggctgagccaaggccatggcggaaccggccctcctcgcgccggaccccttcgcggacctccccttccccgaatttcaggcgcccatcgacggcgacagcttcgcgctcgaggacttcgatctggaggatctggacctggacgtggacttcgacctcgacctcttcggctcggacgggcaaccctcgcaaccgcccccgctcgcgacctcgtcctcctcggccgggtctccggttggaggctcgtcctcttccggtgccgtcggggacggcggagggctgaggaatgaggagtcttcggagtcgtcttcgaggagcgcgagcggcacggatggcagcggcaaggggaagggggaggag

SEQ ID NO: 271070 - DNA, 1089 bp, Zea mays
attgggattgagatctggacaatgtcggcgaggagcagcgacggtccttgttgcaggagtggttgcgcactcgcatctgccaagttggatctggatctctcaggcataagcgagtttgacctatcagcagaggcgttgccttggttgatgccgccggaggaggcagacaagaggacgacgcacacgcggcaagaggcgcaggagttggaggagcgcatgacctgtctgcggttgctattcgaggacgcagcagatgacagaattctcgccagaagggagcttggagcagcagccgacgagttcctgctccgcttgacgacgcgtcaacaggccttggcgcgcgagtactcgcgcctcgccaacctgaagaggcctccggatctctccggcatgactgaggccgaccgggcggcggaggcggagaggctgagggaggagatgttgcagaaggcgcgtcaactccaggaccagggggacatgagcggcgcccgcgagtctgaaggtctggcacgcatcatcgacttcgatgtcaagcagggtggcgaatacctcaacagtatctgctgtgtcggcaacatctacaccttcgaccacacagaggagtcgcccgttggtccgatgagatttaccaacagaccctggcaagacaagatgtgtgtgaattgtgcgtcgataaacatcctatctgtcaagattgcatgctcggatatcgacttccccatccaagtctatggcaccgttgttgccagggactgcatcgactacaagtgtgtttacctcttccgccgagataatgaccattgccaactcatcagctctaatgaagaatcattgatcttgactggcccaaaacggggacttgcattgtggtacgatgctgattatgttcagactgatctctgggtcaaggatcgtcaagggcattgcaaacaattcagtaaggggatcgtgaggatcccaggcaatcaagtgtgtgacaaatgtgagcctgaaacagtatctcttgctaccacgctcagtactgtggatgtgacatatgacgatgtggaatgtgcggtagacgcaactgttacactgaagttacacagg

SEQ ID NO: 271071 - DNA, 998 bp, Zea mays
gggctgaagatcactaacttctttcacaaaaaattgggaagtcacaacccaactcgcaccgtcataaagttaatacgtccactccaaaacctctgcccaccactaatacataaatcaatgcttggattgatttcatgagttcattatacaattgggctcctcaactcacaagggcaaaacttcgactataacttcaatctacccaaacatgtgtgtgccgggaaataacttataatggcaaacagcggcagttctatttgctgaacttgttggctactgcaggctccgtaagcgtgtcccaaaccttcagtttgccttttgaacctccacatgctaacaagaaggggctgtcatttgaaaatgataccgaaaaaatagctccaagctttggattttgggaggcaatgcatgatggtttgtcgtttgatagatcccatagtttcaccattttatcaactgagcctgttgcgagaaagttaggggcagacgggttgaaggagatggaagaaacagccttatcgtgtgcatgaagggtatacatagactggccagaagaacttgatgaagctgttcgcttatcgaaggcttgaaccatcccattttcaagactgaccacaaatgaatgttcattgtgtggattccaagctaaactttcgacgtctgcttcaacagaccatttatgacaattctgcccaccatctttcatatcattcatggcaactgttttatcaaaggatccgctaagcagaacttcaggtgactgtgggctccaagcaactgcttgaaccttgtcatcatggtgttctagagtgactgcacatttaccaacagctatatcccagattttaacagttgtgtctgcacttgcactagctagaacattcctcacttccttgttccatgcaggaccaagcacagaacttctgtggcttcctttctcatacttcttcccctttttgccctttgtctttttcttcttttttgaaagtactaatagc

SEQ ID NO: 271072 - DNA, 564 bp, Zea mays
ccgtttctttcgagtcacgagtcactccaggtccaggctgagcagcaatggcgccgcgaacgctcggcctcaacgcggccccgctcctccagattctgcggtccctgtgcctcctggccctcgccgcggcggcggcggtgtccgggcggcgccacggggcctccccggcgcgcggcagcgggcagagcatgtacctggcgccggcctgccgggcgcacacggcgtcggtggcggacttcggcggcgtgggcgacggcaccacttccaacaccgcggcgttccggtccgcggtggaccacctgtcgcagtactcgggcgagggcggcggcggtggcatgctgtacgtgcccgcgggcaagtggctgacgggccccttcaacctgaccagccacttcaccctctacctccaccaagacgccgtcatcctcggctcccaggacgtaggcgagtggccaatcgtggatcccctgccttcttacggaagagggagggacaaggtcggagggaggttcgctagcctcatcggcggatcgaacctgaccgacgtagtcatcactggcagca

SEQ ID NO: 271073 - DNA, 1298 bp, Zea mays
cccattcgtccgtataggagggtggagggaggagggattttgccgatcacggtctgcagtcaatttgtcagtttattgagacatccaacttgcatgagttgatcaacaagcccatccctggttccttatggaggcatcatcttccttgcgcttccaagtttctcgttttagttcgttcaagatatggctatgcctttttctggtactcgttcttcagaactgcagcccagcactttcagattcaccatatttggtcggtatggggagctatgacataacagggccagcagcagacgttaacatgatgggatatgcaaatgctgagcagattgcatcaggaattcactttaggctaaaggcccgtgcctttatcgttgctgagcctaacggcaagcgtgtcgtgtattgtaaatcttgatgcttgcatggcatcacagcttgttactataaaggtgcttgaaaggcttaaagcaaggtatggagatctttataatgagaataatgtggctatcagtggaatccatacgcatgctggtcctggtggttatctgcagtatgtagtttatattgttacatcacttgggtttgttcgccaatcatttgatgtgattgtcaatggaatcgagcaatgcattgttgaagctcacaacaatctccaccctgggaaaatctatgtgaacaaaggtgacctccttgatgccggtgtgaatcgcagcccaagtgcatatctaaataaccccgctgaagagagaggcaagtataagtacaatgttgataaagaaatgaccctcatcaagtttgtacatgacgagtctggtccgattgggagtttcaattggtttgcaactcatggaacatctatgagtcgtacaaattctttgataagtggtgataacaaaggagcagccgcgcgtttcatggaagattgggcagaacaaaatggcattccaaaacaggcagctcatgtaaatcacgatggcttggaatcttcacacatgacctctcgacttccgagaagagtctccccaataattcctgaaccaaatgagatgactggtgacttagtacaattggcgtcatcctacgaagcctcaggtggacggcgattatcaagttcaggtatcactcaagcgtatcagaagtacccaagaagacagacctaaatttgtttctgcattctggcagtcaagttgaggagatgttagtccaaatgtactgggaacttactgtatagacagtggtcttccttgtgagttcaatcacagcacatgcaatgggaagaatgaattatgctatgg

SEQ ID NO: 271074 - DNA, 444 bp, Zea mays
  unsure (1)..(444): unsure at all n locations
tcggcctgtgcggcgtgtgcttccaaggatatcacttgtgccccttgcctcccaggctctcaattcccaccctctaaatctgtccactcccaccgccactccccctctgccgctgccggaaattcatgttaactattttttttggtgcgtctacatcagaatctcataagcctgcagtcaatttgtcagtttattgagacatccaacttgcatgagttgatcaacaagcccatccctggttcctgatggaggcatcatcttccttgcgcttccaagtttctcgctttagtgcgtccaagatatggctatgccgttttctggtactcgctcttcagaactgcagcccagcacgttcagattcaccatatttgggtcggtatgggggaggctatgacataacagggccagcagaggacgttaacatgatggngatatgcaaatgct

SEQ ID NO: 271075 - DNA, 619 bp, Zea mays
ggcaggcgataccgtaccgagagagttgaagctgagaaagaatggcggggctctacgagaagcagtcggagacgtacgccaagaagcgtccgcagtaccccaaggagtggttctccatgctggccggcctcaccgcggggcaccagcgcgcctgggacgccgggtgtggcaccggccaggccgccatcagcatggcggagcactacgagagcgtggtggcgacggacgtgagcgaggggcagctccggcacgccaccgcgcacccgaaggtgcggtacctccacaccccggagcacctctcggaggacgagctggtgtcgctggtcggcggcgagggctccctggacctggtcgtggtggccacctccatccactggttcgacgtcccgctcttctacgccgtcgtgagccgcgccctgcggaagcccggcggcatgctcgccgtgtggggctacaactacgagatccacccgttcgaggacgcgctgcacggccagctctacccggccctgcggccgtacctggacccgcgggcggggctggccatggagcggtaccggtccctgccgttcccgttcgagcccgtcggggtgggcgccgagggcacgcccgccgacgt

SEQ ID NO: 271076 - DNA, 1058 bp, Zea mays
cgaaaggacaaccagcgccgtctctccccaccctcgcggtcgtcgcccaccgtttttattacatcttcttcttggtttcagctgcgcacaagcgtcccgtgaagctcctgtgccagacacagagagagcaaaccgtgcagcggtgcaggccagcgcgatccagctcccatcagtgggcgcgcccgccgtctcttgcgaccctgtcttcttggtttcttggcggggtcgtcctgctcgtgtcgcgctgcccacaacccgcgttctgtcgcggcatccgccgtggatcttggcccgggttgtccctatatcacgcagaaaaaagggccatccccccccccccccttcgccctcgggttcgttactgagtgtgccggagtggtattcgtgttccgccgggtgccgaggtggcctcgcggtcttctgccgtctcatcgtcgcctgctccccgtcgcgttcatcccgaggcatatcttggtcttgtaattgtataaaaagaaggtttggggaatcaggtttatctaaccagtggacatggtatcagttaatcttgggttagttcattatgtactggaccacatatatggaacacttcttcatcgcaccaaactaggaacaccatttttctcaaaaggatggggaggtaccaaacttgatttgctagagaagatggtgaagcagttgtttcccgaggcacgttgccaaaactggccaccaactgctgtgcagccaatgtggaaaacagtatgggagacaaacaattcttgtctgcgagaaggagttttcaggactacatgtgatgagcgactaatcgatgcattgccacctgagagtcacaatgcaagagttgcttttcttacccctaaaaatgttacacctgagaagatgtcatgtgtggtccatcttgcaggcactggtgatcacacatttgagcgcacgcttatgctgggtgggcctcttcttaagaacaatattgcaactattgttcttgagagcccctattatggacagcgacgtcctagcatgcagcgtggtgcaaagctccagtgtgttagtgatct

SEQ ID NO: 271077 - DNA, 510 bp, Zea mays
gcgctttatcgccggtgtcggctgcgcgtccacgggggacacctccgccgcgctctgggcctactgcgcagccgcgggaatccccgccatcgttttcctgccagcggaccgcatctcgctgcagcagctcatccagccgatcgccaacggcgctaccgtgctctctctagacactgattttgatggctgcatgcggctcattcgcgaggtcactgcagagctgccaatctaccttgccaattcgctcaacccgctccgccttgaggggcagaagacagcggccatcgagatattgcagcagttcaattggcaggtgccagattgggtcattgttccaggaggcaatcttgggaatatctatgcattctacaaggggtttgagatgtgccgcgttcttggacttgttgatcgcgtgccacggcttgtctgcgcacaggctgcaaatgcaaatccattgtaccggtactacaagtcaggttggactgagtttgagccacaaactgccgagac

SEQ ID NO: 271078 - DNA, 530 bp, Zea mays
gggatttcaaagcaaatgaaggttctgaatatctgcaaagatctagcacctgctgatttagctgaggacgaagttctgttgcagactgttttagatgaaaccattaacactctgagacttaaggatgaaactgaagatgtgaataggctcatgaacactgagttctcagttctctcagtagttttgttgcaattagggatggagctcagagatctgcacttacagaagtgtgccattgagaaagaagtggagagtggagaaacagagttgctttgtttgcaaaacaaaaaccaacagatgttggaacagaatgaacaactaaggaatggattacaggaaagcagtgaaagggaggaggtgctgaaaactgaagtattcatcacacaagagaaactatcttgcttgagagagtcctaccagacatcacaagatgtaattttcaacctgaccgaaaaaaatgagtccttgtctaaggaataccagtccttgagtgagaagtacaattccttggaagatgagaatgatactgt

SEQ ID NO: 271079 - DNA, 688 bp, Zea mays
cgtaggtcgttccaagcctctaaaatgagtcatactacttccctctctctttcctctcttgcctccgtcgccatgacccaccgcctccttctcctgctcctgctgctccctttgctagcgccgcctgctgcgtctgcacgccagggcgcggggcaggatttgggacagtgccccgggctggagtacggcctgccgccgttcgccgccgctctccgggcaagctgccccgtctcgacggaggggtactcgccccccgaggaggttgttaatggggaagaacttctcaggttgttggatggcaaggaagagcacacagctgtccttttctatgcatcatggtgccctttctcagaaagaatcagaccagtctttgatgatctgagctcaatgtttccacgggttaagcacttggctatcgaagagtccaatgtcacgaaagccattttgtcgagatatcatgtccgtgcactaccttccataataatagctcgcagctcatacatattctgggcgctcagttcgaaagatctcgactctctagtcaacctttacactgctgctacgggtcaagaaccagtcgcatatattggtactcgcaagtggagggccacgcaaagcacagactatgctaagatttggaacagctcgattagtgaaacagtgaagcaagaaccctgcctagcattca

SEQ ID NO: 271080 - DNA, 404 bp, Zea mays
caaacctcgaaagattcccaaagctgaccctctagaaagccaagagaactcactcctctctctctctctcctctcgcctccgtcggccgtcgccatgacccgcgtcctcctccccctgcttctgctgttggcgctgcctggtgcgtatgcacgcccggcgcggccgtatttgggacagtgtccggggctggagtacaggctgccgccgttcgccgccgcgctccgggcaacctgccccgtctcgacggaggggtactcgtccccctacgaggttgttagtggggaggagcttctgaggatgttggatggcaaggaagagcacacggctgtccttttctatgcatcatggtgccctttctcgcaaagaaccagatcagtctttgatgatctgagctcaatgtttc

SEQ ID NO: 271081 - DNA, 457 bp, Zea mays
cccacgcgtccgggcgataggtggacttcaatcgcttaaaggcatggcagtggatgagagtctgattaactatgatgtcctcctgcatgtgcaccagtgctgcccagactttgtggagctgaaggtgtctgcactgtacgtggatgaagacatggcctcagtcatctgcaactctcttcctcgtctgaaaaagttggagataccaagttgtgacatgtcttccgctgcgattataaggttccttgattgcctagagcagctcgagcacctggacatctcaggttacgagacatcagccatctcaagcccggttcttgagaaagcttcgcggctcaaggtcttcctctggaactcgaaatttgagcttggggagttcatggactgctccaattgtggagagcacaacattaaccctcaagaaccctgcaagtgcatgatggagcacaaggtcatggac

SEQ ID NO: 271082 - DNA, 550 bp, Zea mays
cttgagaactcgatgctgagcaaccctaagggcggcggagccatggaccagcatagcttgatggacctccaagacggcactctgggctcattgctttcagcgctgatgcaacactgcagcccgcagcagcgaagctatccattggataagggtgtcccgcccccttggtggccaacagggaacgagtcgtggtggcctgcgttgggcctcccaaagggagaagcgcctccgtacaggaaaccgcatgacctgaagaaggtttggaaagttggtgtcctgacgggcgtgatcaagcacatggccccaaacttcgataagatcaggaaccgtgtaaggaagtcgaagtgtctgcaggacaaaatgactgcaaaggagagcctcatctggcttggtgttctacaacgcgaggagaagtctgttcacggctttggcagtgctttactacagaatgctcggcatagtagcacttcagacgacagaacacgagggcatatatagcagcagtgacgagtatgatcgtcgaccgccttgagcagcctccttgttccac

SEQ ID NO: 271083 - DNA, 582 bp, Zea mays
  unsure (1)..(582): unsure at all n locations
ctcacgcgtccgtctgcttgctatggttactgatgactccaaggttctcctccatcgcttcaattggcaaaggctttggacaatctctccagggaagtgcatcacatcaatttgttggagccctgatggtaaaataatagcacttggcacagaagctggtttgattcttttgcatgatgtggaggtgtgtatctggatgatgataaaaactgtcggtgccttttgtgtctttgtatgaacattcgtttgtacttcatagacacctgatccagtgcctatcttctctttatttttttctttttgcttattctcttttttatatcatgcttaaacctttatgagcgaactattaggagacaattaagggatacaggcctcaaggacttcttgcccaattatgttttcgatagaggcattttaatacttcttgaagattattgcgtatcagctatactattgtcaattgtgtttgacaggcaggaccacttgatcacatacagttggngatcttgcagccactgcttgaacatctgtgcagattctcaagacctcactcttccatgataaacttctcacaatatt

SEQ ID NO: 271084 - DNA, 458 bp, Zea mays
cggacgcgtgggcggcgctgcttatctcgcgctcccggctcccctcctcccccgcgccgcgatgaacacagccatggccaccacctccttatccctccaaggccgcccatcccacgctcacaccaggaagctctcctccccgttcctcggcgcccccgcatccttcctccggccgctggctcccacgcccgccgccggcccctcctcgcggcggacgcttgccgtcagggccatggcgcctcccaagccgggaggcaagcccaagaaagtggtgggccttataaagctggcgctcgaggccggcaaggcgacgccggcgccgcccgtcggcccggcgctcggtgccaagggagtcaacatcatggcgttctgcaaggagtacaatgccaagacggccgacaagcccggttacatcatcctcgtcgagatcaccgtgttttgatgattagagctttacc

SEQ ID NO: 271085 - DNA, 434 bp, Zea mays
gaaaaatagacagagtgaagaccttgacgtgtttgaaggccgcaacattaaactgtgggcggtttgttccgatgaacctgattggattgaaatgtttgatgatctgcttcttcaaaccgagaagaaggccacagatctgcgagagctgatgcggaatgaagcttccaagaattctcaggtcacccagacgaaaggaccaagtggaccacggccacggggaaggaaaccaacaaagaaggatgtggtggaccttaggaccatcctcatccactgtgcacaggctgtggcagcagatgaccgcaggactgctaatgaattgttaaagcatataaggcaccattccaagccaaatggtgatggaacccagaggttagcacattgctttgcagatggtcttgaggctcgattggcaggcacagggagtcagctttacc

SEQ ID NO: 271086 - DNA, 453 bp, Zea mays
agggtcttcttgttcaatccccatctcgatcggggaggccaccaaccaccatatggcgggagggaaggtttactcgttcgaggaggtgaggaagcacagcgaccgcaaggactgctggctcatcatcgccggcaaggtgtacgacgtcacgccgttcatggaggagcaccccggcggcgacgaggtcctgctggcgtccgtcggcaaggacgccaccgcggacttcgaggacatcggccacagcgcctccgccaaggagctcatgccccagtactgcatcggcaaggtcgacgcggctaccttcccggccaagcccgcctacgtcgtcaccaaggacgacgccaggtcgtccgagaaggccgcgacgagcgccggcgcttgggccacgctcctgcagctcgccgcgcccgtcctgctgctggcgctggccttcgcgctgcagcagaactatgc

SEQ ID NO: 271087 - DNA, 755 bp, Zea mays
atctgcacaatcctaccgtgttgtcaaggaaaatgcagatgatgctttctatgagctgcagaatccccagcagcagatccaggcctacgtctttgatgttgttcgggccatagtgccgagaatgaatctggacgatctctttgagcagaagaacgatgtggccaaagctgtattggaggagcttgaaaaggtgatggcagattatggttacagcattgagcacattctcatggttgatatcatccctgacgctgctgttcgtaaggcaatgaacgacataaatgcagcccaaaggcttcaactggcaagtgtttacaagggagaagcagagaagatccttatggtgaagaaagcggaggcagaagcagaggcgaaatatctttctggtgtcggtatcgctaaacagcggcaggcgataaccgacggccttagagagaacatcctgaacttctcacactcggtgtcgggcaccagcgcgaaggaggtcatggacctgatcatggtcacgcagtacttcgacaccatcaaggagctcggggacggctccaagaacaccacgatcttcataccccacggaccaggccacgtgaaggacatcagcgagcagatccgcgacggcatgatgcaggcctcatgcagcaacgtgtaaatcaccgactctctgtgcacgattggagacggctcggctcgggatgaggcctggagtaccatgttcatagtgttaggttggtggtagtggtaaataaatgaatgct

SEQ ID NO: 271088 - DNA, 169 bp, Zea mays
cggacgcgtggggaggaaataagttcttttccaccttaattccctcccaatcccgaaggggatttgaggttcacaaagtagcgaatgtgtcagactcctacttccctcgcaaccatactaccttgtactacctgaaatttttatttatatatatatttgaaatgttatt

SEQ ID NO: 271089 - DNA, 452 bp, Zea mays
ctctgcttggagattccagcgccgagcgtcttcttcccagccccggcgccggtccctgctcgagctccctccctgtacgcgcgtgctcaggttccagctcgcgtacaattcacggcgagcagtacatggttttcttcctcctcgtcacatcgattcgtcggcctgctgtgtcatgctccagaccgttagatcaccgtaaacatcttgtcgtgcacaataccgtctcgaacccaccacatccgttgtcggttgtttaaatcatcgcctggccgggagtgtcgacattagttcgctttcgtccaaattgccaccgcggatacttaagtcttgggtcgcgcgtttttctatcttgcgtgcgaacatttgacactcctatcattttgtgcagctattgtttcaaaccatctgggcacaacaagttgcagtaacttaatgatctcttttgttattcc

SEQ ID NO: 271090 - DNA, 440 bp, Zea mays
tctctatcgtcccgatccgtcgttcatcagagtcgtaaccgtacgccctcgttcccctcgtcgctctcccaagtcccaaccccggttcctttggtctgcgcgagcgagcatggcgtcgccgtcgcccgccgtctcgtctctggagacggaggcgccccaggctaccgtcacgagggagcgcaggctcaaccccgacctgcaggagcaccttccaaagccatatctcgcgagggctatggtggcggtggacccggaccatccgaccggaaccgaggggcgcgacccccgcggcatgagcgtgcttcagcagcacgtggctttcttcgaccgcaacggcgacggcgtcgtctacccctgggagactttcaaaggcatgcgagcaatagggtgtgggttctttacatccctcgtcatctcgttcctcatcaacctcgtcatga

SEQ ID NO: 271091 - DNA, 1108 bp, Zea mays
attattttcttttcttcttctttccccatccacccgcgcaccctcaccgaaaggagaaggcttcagccttcaagcgcacacaggcacgcaaatcccctcttcatcaacctcgactcgagtccgcgcgcgtccccgaatcgaggggagatgagtcgtccgcatgacggtcacaggtccttctttcccatggggaatcccttcaggatgattctcccaagaggagcccgcctgccaccgaagctcactgagctgctcacttcgtatgaggatggcctggcctcgagcttgaggaaggtcaagccagaggccacctcagaggtgttcacactatcatggatgaagctcgcagtggagtgcttatcagagctgcacaccaatatagccaccctgattactgagcttgagctgcccttatcagactgggatgagaagtgggtggacatttacctgaacagcagtgtgaagctgctggacatctgcattgccctgagctcggagctctctcggttggatcaagggcagctgcttgtgcgatatctcctgaatgtgttgaactctgggagcgacatgccatcccaggagcagctcaggagagctgaggtgtctcttaaggaatggatagagcgagcaagtgaaaggtctcccaggcttgatagttgcttggcagcgctacaggagctttctggaaaccttagcctgatgaaggttaggcattctgctaaggggaaagtgctcatgcgagcattgtatggaatcgaggctgttaccgtcttaatctgcagcgtacttgtagctgtactgtcgggtaccttcaagccactggtggactttgatgtccctgagaaatttggttggtctacggccttcattgatcttcagaaggccataagcggtgaacttagcaggcaactgtccagaggtagtgttgcagctgtaaaagagctggaggatgttgatgtatgtgctaaacagctgcatacattgacttgcactgttcagcttgaagaggagaatgccagcctggctcattcatttagccgttcaaaggaagtggtcctgacagatactacaggccaaggaagaggccatgtggataatctaaagtggc

SEQ ID NO: 271092 - DNA, 599 bp, Zea mays
gacaccctgggtgagatcgtgctcactcttcaggaggatcaccatgtgtggagattcgagtcttcgggccttttctcttctaggtcctgctacaaggttctgtttttgggctccatcaccttcgaaccttggaaaagactttggaaatcttgggctcctcctaagtgtaagacctttttatggttagccatgcagaataagtgttggacagctgacagactgcaaaaaagaggtcttccccatccggaagcatgccctttctgtgaacaagagcaagaaacagttcagcatctgttgactggttgtgtcttcgccaggcagttttggcatagcatcctctcccccttcggtatgggccacttaactccagggccagaggatactaattttgctgattggtggggactagtgaccattcaggtgcacagaagcaagagaaagggagtcaacagtgccattattttgggagcatggtgcctttggttgcatagaaacagagttattttcgatggagatttaccaaccattggcaaggtgcatagaagcttcgtcgacgagctatccttatgggtgctggctggtgccaagcacctcggaag

SEQ ID NO: 271093 - DNA, 408 bp, Zea mays
ctacaaaccctaacccaaccgggagcaccggaaattttggaggctgaagcggaaacgggagaaggcgatgacgacgagggagccgcgcgaggcgtcccggcgcgatgggcgcgactcgcacgggaggcgcccccactcctcgttcaggtcgcggagggacgatcccagcccaaggagaagagatgacaggaggcgtgaatcggacagggcgcaccacagaagtcgagatggagaatttttggaggtggtggaccatgatcagaagcggaatagagatgctgcgcagagcgctgaccctccgaatgctgagtcgaagtcagcgagtgatatgaagaatggcccctccaccaggcatgagagatcacctaggtgaaccaaacgattttctgagtcgagtgaggcatggcg

SEQ ID NO: 271094 - DNA, 389 bp, Zea mays
caacgacagccccagacaacactcaccgatagcaagtagcgccgccgacgtttcgagagcagagtatccaagctagccaagcgcgcacctcggtgacctagctagctacctagctagttcaggcgacgatatggcgtctggtcaggagagcaggaaggagctggaccgcaaggctcgcgagggcgagaccgtcgtccccggcgggaccggcggcaagagcgtcgtacaacaaccaatttcccagttgcaacaacaatccttggcacatctaacaatacaaaccatcgcaacgcaacagcaacaacaattcctaccagcactgagccacctagccatggtgaaccctgccgcctacttgcaacagcagttgcttgcatcaaacccacttg

SEQ ID NO: 271095 - DNA, 812 bp, Zea mays
aagctcgaactcggccagacaacactcaccgatagcaagtagcgccgccgacgtttcgagagcagagtatccaagctagccaagcgcgcacctcggtgacctagctagctacctagctagttcaggcgacgatatggcgtctggtcaggagagcaggaaggagctggaccgcaaggctcgcgagggcgagaccgtcgtccccggcgggaccggcggcaagagcgtcgaggcccaggagcacctcgccgaagggcgcagcgcggaggccagactcgcagggagcagctggggcagcaggggtacagcgagatggggaagaagggcggtctgagcaccacggacgagtccggcggcgaccgcgccgccagggagggcgtcagcatcgacgagtccaagttcaccaagtagtcctatcgcgtgcgtgcgtacgcagcgttcgtagctgtctgcgtagtgtaccttggccgtagctagtgctactctctactttggagtagctgaatgataataatgtagctagcagcatgcatgtaggcgatcatacatacgtacgtacacaggtacgtgtgtgtgatcatgtatgcttccagaagggtatcctagcttaatcagtcacgtcgtcaagtcgtcaatatggcaggttcgcgtcagggctttgtagtttgatagcctgtttcacgactcctcaataatcaagtagtgtaatgaaagtttggcggttcaaaaaaaaaaaaaaaaaaaaaaaaaaagaaataataacaagcatacaacaaaaacaaataaagactcggttcaaaaaatcaggggggggc

SEQ ID NO: 271096 - DNA, 299 bp, Zea mays
caacactcaccgatagcaagtagcgccgccgacgtttcgagagcagagtatccaagctagccaagcgcgcacctcggtgacctagctagttcaggcgacgatatggcgtcaggtcaggaaagcaggaaggagctggaccgcaaggcccgcgagggcgagaccgtcgtccccggcgggaccggcggcaagagcgtcgaggcccaggagcacctcgccgaaggtatatatagccgactgcggctaaccatctgcatatgttaattcactgtcgttggctttaattacacgagtagtgtggc

SEQ ID NO: 271097 - DNA, 573 bp, Zea mays
tactcgtctcggaattcccgggctttgagaggttactggaagaggaggctctgacgacaagcacactcgccgccggtggtggtggtgccgaggtgtggttgctcagccgccctaaatgttgaccggccgccggtgatggaagaggcggcaacgacgatggcgcctgcggcggtgagtagtgccgtagtaggggaccccatggagtacaatgccatactgaggaggaagctggaggaggacctcgaggccttcaaaatgtggagggcggcctccagtgttgtgacctcagatcaacgttctcaaggctcaaacaatcacactggaggtagcagcatcaggaataatccagtgcagaacaagctgatgaacggcgaagatccaatcaacaataaccacgctcaaaccgcaggccttggcgtgaggcttgctactagctcttcctcgagagatccttcaccatcagacgaagacatggacggagaagtagagattctggggttcaagatgcctaccgaggaaagagtgaggaaaagaaaggaatccaatagagaatcagccagacgctcgagatac

SEQ ID NO: 271098 - DNA, 1462 bp, Zea mays
attatatcttagtccagtttgtttcattttatctgtgcttttgtgggtcctttttttgtcagaatttgcatcaacacggtgaagcgccttttgttttctttacacacggtagtgatcaactatgtcttccccactggtgttgaagactacgttcacaggattggcaggacaggaagggctggtgccactggtgttgcatatacatttttttgtgatcaggattcaaaatatgctgctgacctaatcaaaattctggaaggggcaaaccaacgagtgccccgtgatttagaggatatggcttctcgtggcggtggacgaggtaggaagaggaaccattgggcatcccgccctgacaggggtggttcacgttctgaactggattcaaggtacagcagcagagatggactagcatcttctgggaaatcagagagtggtcgcggcagtcgtggaagggatgataatggtagccgtggcaggtacgaccctggtgaaaccgatgggcgatctcgtaggtctactagaggccgcagtagaagccgtagcaaaagtgacagtagaagccgtagcccaagtcccaagaagtcacgtcgtcatgaaggtagacgtagcaggactaagagcaggagcaggagcaggagccgtagaaatcatggcgctagccacagcaagagtcgcagccctgtcgctagccgtaggtatgaaaagactgcttcaggatctgctcggcctaactcggggcatgcagagcacaaaagccctccaagatctcactctagggatgaccatgtgaaccactctgaccacaaggatgaccacaaggatgaccacatggaagatgggaagatggaaagggttgatcttgatcgctcgcccagcccacacgatgacaagtctgctccatatagtcctgtgtacaatggcaaagccagtggctcaatgagccccaacggtcagccagaggcaggtgccaaatttgttgaaccttctgggaaacctgagcctgcatctccagtgcgctgcagcaaaggcagagatgatgatgaggaaggtatcatagacgaggatggagagattggtgaggatgatccgcgtgcaaatgcagctgtgcagaatggtaataactgacggagagtggcctgcatcttctgtgacaaccaagacttatctgttatgcaaaatgcagtcattccaatctgcaagtcctgaatacggaaatgcatttgtgtgccattaaatatctcgtagaacatgtgatactgatgcctctaccatcgatgaaccaaaactgttgatgcatgtcatgtcatgttgttaaacttaatgacattgttgtgttctggtgttttacagccagttctgtaagtgatttatgataaaatatattgtcaggtctggaagtggtagtttatgataactagcaaagttatgttgctacagtttctatctctaaagtatagaatat

SEQ ID NO: 271099 - DNA, 622 bp, Zea mays
ctagttgagagatttagatagaggggttgatgttgttgttgcaacacctgtaaggttaaatgacatcttggagatgcgaaaggtgacaattggaagtgttgattcacttgttgctaatagttctattactcagcatatagagatcataacaccctcagaaaaacaacggcgcctggagcagatattacgatcccaggattcaggttcaaagatattaatattttgtaccaccaagaggatgtgtgaccaacttgcaaggacactcaccaggcagtttggagcttcggccattcatggtgacaagtcccaaagtgaaagggagaaggttctgaatcagtttcgatctgggcggtctcccattttagtggcaactgatgttgctgcgcgaggtttggacatcaaagatatcagggtagtgatcaactatgacttccccactggtgttgaagactacgttcacaggattggcaggacaggaagggctggtgccactggtgttgcatatacatttttttgtgatcaggattcaaaatatgctgctgacctaatcaaaattctggaaggggcaaaccaacgagtgccccgtgatttagaggatatggcttctcgtggcggtggacca

SEQ ID NO: 271100 - DNA, 807 bp, Zea mays
acacacgcgtccatacacgcgtccgcggacggtgggccgggtagatcagagagtggtcgtggcagtcatggaagggatgattatggtagcagtggcaggtatgactctggtgaaactgatgggcgatctcgtaggtctgctagaggtcgcagtagaagtcgtagcccaagccccaagaggtcacaccatcatgaagctaggcgtagcgcagcaggagcaggagccgaagctgtagaaactttcgtgctagccgcagcaagagtcacagccctgttgctagcagtaggcatgaaaaggctgctgttatttcaggatctactcaacctaacttggggtatgcagagcacaaaagccctccaagatctcactctggggatgaccatgtgaaccactctgaccacaaggatgaccacaaggatgaccacatggaagatgggaagatggaaagggttgatcttgatcgctcgcccagcccacacgatgacaagtctgctccatatagtcctgtgtacaatggcaaagccagtggctcaatgagccccaacggtcagccagaggcaggtgccaaatttgttgaaccttctgggaaacctgagcctgcatctccagtgcgctgcagcaaaggcagagatgatgatgaggaaggtatcatctgcaagtcctgaatacggaaatgcatttgtgtgccattaaatatctcgtagaacatgtgatactgatgcctctgccatcgatgaaccaaaactgttgatgcatgtcatgtcatgttgttaaacttaaagacactgttgtgttcgggtgtttttc

SEQ ID NO: 271101 - DNA, 627 bp, Zea mays
ggcaacaaaaagcaagaagactttcagattccttagcacatctcattctattacaggggtcaaatatctcattagggtacaatacatgtggtaagacgctggtttattcattatatcatacttttccagtgggatgacagttaaattctttcattgttgtgctccagcctccagcgaaaagcctgtgcgcctcaggcgaccgcggcgtctccgacgagctcgaagctctgcagctgcttgaagttctcccacgccttctcccacaccttggcctcgtacagcttcttttcgccgccgccggcctccttcacctcgacggtgaagtggtgcagggtcccggccacgacctggtgcctcaccttcaccagcctctcgaattccagcatcgcgttggtcttgctgttgtgctcggcgaccgcgaagcgcgcgagctcgatggcctcgaggtcgttctcgcggcccaccggcgcgtcccggacgccgcccaccatccccacgggccgctcgttgtgtacctcagccatcgatcgctgctgtggtccggtgacggtgagcggcgctgtgcagggaggggggaaaaggagaggagaggcgagacgagacgagacgagacggatgatgccggcc

SEQ ID NO: 271102 - DNA, 1007 bp, Zea mays
tcctacgcgtccgcccacgcgtccgcgcccgcgcgggcgcgagatctaggccagtcgccgcggcgtggccgcgggctgacgggatctctgtcctcccgacacgacgaacctctaggaaggcgcctaagacgaggaggaagcgggggctatggaggcgtcttcctgggacgccgttcgcaagcaggcaaggaggttggaagctcagttagatgaccaaatgattgcataccgtaaattggtttctatgaaatcagacggttcagaggacgacattgagtctgatatagaaagatcactgaagcagttacagcaagtgaattcgcaaatgcaaacttgggtatcatcaggaggttctgaagttctttctcatactctgactcgtcatatggagattttgcaagaccttactcaggaattctatcggcttcgatcaagtctcagggcaaaacaacagcatacttctctccttgacttgagagattttgacagagcaaagtttgatgttgaggagccgtcagactcagctgatcaagttcttctcagggaacaagctgcgattggcaggagtactggacagatggataacgtgatatcacaagctcaggcaacacttggttctctcatgacccaacggtcaacattcggtggcatcactacaaagataagcaacgtcagcagccagcttccaacaattaaccacgtcctctcatcgatcagaaggaagaaatccatggataccatcatcctttccctcgtcgcatctgtctgcgcgttcctcatcttcatctactggctgtcgaagtaggtttaccaaagcaaatgtattacggtgttgtaagcttgggatcacactaccggtacagatgatcgtgattggtgtttgtacaatattggttgattgaatgctattacgattcgggagtgctgtagccaccgtgtcttcagctgtgattgattgggcgcatggattgaagtggcctatcaagcacttatattataatggaggg

SEQ ID NO: 271103 - DNA, 695 bp, Zea mays
cccacgcgtccgcccacgcgtccgcccacgcgtccgcccacgcgtccgcccacgcgtgcgcagggaacaagctgcgattggcaggagtactggacagatggataacgtgatatcacaagctcaggcaacacttggttctctcatgacccaacggtcaacattcggtggcatcactacaaagataagcaacgtcagcagccagcttccaacaattaaccacgtcctctcatcgatcagaaggaagaaatccatggataccatcattctttcgctcgttgcatctgtctgcacgtttctcatcttcatctactggctgtcgaagtaggtttaccagagcaaagatattacagtgttgtaagcttgggaccacaccaccagtaccggtaccggtacagatagtcttcattggtgtttgtacaatattattggttgattgaatgctgttacgattcgggcgtgctgtagccaccgtgtctccagctgtgcaactgctgccaatactgtgaactgaactctgtacctcgtgtacttcggcataactaagggtggagcaactggcgttgctttagctgccccatgttggcatgttgctcagatgtcggcttaaaggtggatcttcacctatgactatagttgacaatataggctctatattttatacaataaaatataaggatgaggctctatttgttttt

SEQ ID NO: 271104 - DNA, 325 bp, Zea mays
agctctcgaattccagcatcgcgttggtcttgctgttgtgctcggcgaccgcgaagcgcgcgagctcgatggcctcgaggtcgttctcgcggcccaccggcgcgtcccggacgccgcccaccatccccacgggccgctcgttgtgtacctcagccatcgatcgctgctgtggtccggtgacggtgagcggcgctgtgcagggaggggggaaaaggagaggagcgtttctcatcttcatctactggctgtcgaagtaggtttaccagagcaaagatattacgtacagtgttgtaagcttgggaccacactatctgtaccggactac

SEQ ID NO: 271105 - DNA, 1569 bp, Zea mays
tttcctactcctccacccagctcgccgcttcaggaatccggagagctcgcgtcgcgcgtgcgtgggcgtgggtgcgtgcggcggcgaagcaccagcaccaccctctcgcgtcgcgcgcgcgcgcgcgtctcgatggccgacggcgagccttccctcacgcgctggaccttcgaggatttcgtggtccactacgaggcgcgcttcggcctccggcgcgaggccgacggcgacgacgcacccccgccgcgcggatccgatcatggggccagccgccccgccactgcccgcgccaacggcggcgcggacctcgccgtcttcgagcagttcgagcggatggagaggaaggtggagataagcaatggagcaatagaggatggtccactgcagaaatctctacttccttcatttgaatctgcagaaatgcgcaacttagctgagacattgttaagggatataattcgtggaagtccagatgttaaatgggaaagcataaaaggtctggagaatgcaaagcgtcttctcaaagaagcagttgtaatgccaattaaatatcccaaatacttcacaggtctattatcaccttggaaaggcatattactgtttggtccacctggaacaggaaagacaatgctagctaaagctgtggctactgagtgcaaaacaacttttttcaatatttctgcctcgtcgattgtaagcaagtggcgcggtgactcggagaaactagtgaaagtgttattcgaacttgcaaggcatcatgcaccatctactattttccttgatgagattgatgctatcattagtcaacgtggtgaagctcgtagtgaacatgaagctagccggcgattgaaaactgagctattaatacagatggatgggttgactaagacagatgagcttgtttttgttctagcagcaacaaatttaccatgggaattggatgcagcaatgctgcgtcggctggagaagcgtattcttgttccattgccagagccggatgctagacatgctatgtttgaagagctcctgccatatacacctggcacaatggagattccctatgatgttcttgtggagaaaactgaagggtattctggctctgatattcgcctggtatgcaaggaagcagcaatgcagcccctaagacgggtaatggcagttcttgaaggcaggaaagaagaggtccctgagggtgagttgcctgaagttggcccagtaactacagaagatattgaacttgctttgaggaatacaagaccgtctgcacatcttcatgcacatagatacgaaaagttcaaccaagattatggcagtcatgtacatggctaaaggggagaagcttgttgtagggtttaatttgtatgctcatgcgtgggccaataggtgactactgaattcatcgacatgctgaggtatccttgtaaacactatgcttatccttgtatgctgtacactatcattcatttgatgagcaataagctgtttggtaactcagtctcacctggataaggagaaactacgattttccctgcatttggctcgatttatctattcctctggtgtcactct

SEQ ID NO: 271106 - DNA, 547 bp, Zea mays
gttctagatgcgagcggtcgccctttttttttttttttaagatagaactgaccaaaccgacccttacatacactgatgctgacacatacaaacagacacacgcacatactgagagacacaagcatgtcgacacacacatacgaccataatatataggaggcatacacactaaaacgaacacatgacatacaggaaattaaactaagtttaaattgcttattttccacgagacgaaacacgagcacggaaaatggcaagacaagagagcgacaccaccaaacatgcatgcatgggtatgctagttcacatgacactgcacgagggcccgccgccctgcctgggttggtggtggtggcggccatgctgctgctgctgcgcgcgctggcagtcggcgtcggcgtcgtcctcggtgccgatcgaccagccaggctcgcactggtcgccaccagcgtcggcgtaggcggtagcatcggcttcatcatcagcgtacgcggccccgcccgcccggtgcagcatcagcacgtacgccagctgcgtgacggccagc

SEQ ID NO: 271107 - DNA, 399 bp, Zea mays
gttctagatcgcgagcggccgcctttttttttttttttttttttttttaggcatagaatcacttatgtctttgttctttttctcacgaagaatcagaataggatagaacttaccaggccggcccttacatacactgatgctgacacatacaaacagacacacgcacatactgagagacacaagcatgtcgacacacacatacgaccataatatataggaggcatacacactaaaacgaacacatgacatacaggaaattaaactaagtttaaatcgctcattttccacgagacgaaacacgagcacggaaaatggcaagacaagagagcgacaccaccaaacatgcatgcatgggtatgtagttcacatgacactgcacgagggcccgccgccctgact

SEQ ID NO: 271108 - DNA, 2494 bp, Zea mays
cccacgcgtccgctcccgcgagcacgctacgaatcgccgtggtaaatgctcggccggggcggccattagaaggcgctaatcacgcccaggattaaagagcccccctctccgccttggcctcggctcgcgcacctgcctgcctcactgcctgcctacctacctgcgttgttgccttcttcgcctcctccccctgtggccgcaccgcagcagctgcggcggcggcagaggtgaacagcttcccgcggccttgtcctgtccggactccggggccgggaccggcagcgcagcgggctcgcgggatctcccgagtcccgacccccatgcgtcggcctcggtgacagggtttgctagcggagtccatccaactataatgaattaggcacccagtacgtaatggcaacggaagtcaaacaaacttatttttcatggtcacaaggagagtcaactgaacgggatggtcctcaaggagtatctgtatcccagacacttgatcatggttccatttccttcggaagatttgaattagagtcactatcatgggagaagtggtccgtatttactaatgacaggcgcaatgaagaatttggaaaattcaatggtttagtcgctcagaaaaaggcttattttgaagagtattacaagaagatcagggaactaaaggcttcacagcagcaaaaccagcaaactgaacttattctggaatacagcggtgatggtagtgactccagccaaacagcagaagaggagcagggtgctgatcttgaaacccccactggatctggagcagctgttgatgtttatgtggaagaagttccatgtgaaaccacatcggagcatggactgcagtgctataatgaccaaggaaacgaaaattttgatacagaattttcctcatctaatctttcttcgtcaggtggatttctgcagcaaactgaccatgatgttagagttcctgttcgtggtgacaattctaccagtaaactgtatgcggcgccgcagaatgctagttctgttcacgatggtactagaaaaacatatgaagctgcaaggactcctagaaggattattgagaaagattccaggcttagacacagccccaagataataccaaaatccgtcaaagccctttcacaaagtgctatggattacacatttactagtgagaggcctggttcagtgaagcccaatacaactacgagccagaaggctaagccagtgcaaaggccaaatgcagcaagccagaagatgtctgcatctacagaaaggagcaagcttacaggtctcagaagaccttcctcagcaggtgcgcaacggccttctactggagagcgacatgctattgccagggagaattcacaattacctgtggtcgtttccaccccacggcgaccttccactgctgagagacgcccagtcacccgagatcgtgcagagaagcaagccaatgtcaccacaccacgccgaccttctacttctgaaagactccccatcaaaagagagactgcagcaaagcataatgatatttccgctgtacgtcgaccctctacaggagagagacgtgcttttactagagatggtgttctgagaactgatgtgaagacacctagtaaggcaagagcaactgtggctcatccgatgagtgaaatgactacagtgggcaatacgagaaaggctatcactccaaatgcagctagaagtagcaagctggaaacaaaaagcaataactacagactgaagggaccttcagcattggatagccactctactaggtcaaacagaatggacttgcaagtgtctggcaagcagaaatcgagttctgttaaccttcctccaaggaaaattttcagttctactgctggagaaccatcagttggaaccatttctaggtcaaaaaagaaagagggcgttcaggcgacagtgcaatctcgagcatccacttcaaagagaacaactcctttgcagactggaaacttaaaggcgaggggtccaaatccaccagcaccgtcacctccaccacgtcggccatcacgaacgactaccaaaccaagtgccggtgcctcatcgattggcggaagaaagccaaaggcttcagcaccacaatggcactgatgcagtggaggagagcggaaagcgcttcagtacagtggcccgcagagcatggtggatctgagggacgtcagtaccggccttcctttgtatggtgtgtactcccgttggcccgtgcagagcagctcccaagtgtagtctcagtacaacccccgttggcccgtcccttcctttgcagagcagcagtctagtgtatgtagtcgcgcgtatcatatcccaccggtgcctagtttcgtcgtccacaaggaacttagaacattgtaaatacctggaaataaatttgcagcttagctctaaagtaaatccagcccaagatttgtgaacatccatgtatgtcattagcaatggaagcccttgtttatcagcttgttattggtgtgttcaattt

SEQ ID NO: 271109 - DNA, 403 bp, Zea mays
cggcaacatcgccacatctcttgagaacacatgcatctgatgtgaatctagacgggccattagccaattcaaggagaaacttgtccagatcaccacctcttgatgtgttccctaggaatgtttccccaaagagaccactagagaggctaccaccatctcattctgtattgggacctgatcccagaaaattgcctgatcgaaatggcaggttaaggtgggctttggacgatggtgcacagtggcctacaataagtatgcttgatgaagagtacaggaagcaaagtgcaagggaacttattgatgcatatgggaatcgtcaaggacgagatgctgatgaacgacttcctaaagtgcagcgcctggatccaaatggtatggctagcagatctagtgcacgaaattg

SEQ ID NO: 271110 - DNA, 530 bp, Zea mays
ccaattcctctcctttccatccacgccgctgcgctcccgatgcaaccctaaccacctcatcgccggcgcgatcttccccgcccccactccccggctattgcctctgattggcggctctccgggattcacgttggtccggggtacggctcctgcgattttcacgcaatggagcaagatcagagcgtggttgtcggcagcgcggactctggtgctgcggcttttggttttgcgactggcaacccccctagcttggctgtgaccggcggaagcgccgtggcccccgacggtggagctcaggcagctgatgcctctgcgtaccatgccgagcacacggcgttgaatgggactgtcggcgatatgggtaattacccatctacaggagctgcagagaacggcgaagccgtccccaacgagacgggcgagccggttcctgagctatcgtacgaagaagccgtgctttcagcagaagaggctaggttatggagtgttgttaccgcgaattccttagattttaatgcctggaccgcact

SEQ ID NO: 271111 - DNA, 675 bp, Zea mays
ttgatgggattcttgggttcggccagtcggattcgtcgatgctatcgcagttggctgctgctcgtagagtgaggaagatttttgctcactgcttggacactgtgcgtggtggtggcatcttcgctatctggaatgtggtacagcccaaagtaaagacgacgccgttggtgcccaacgtgacacactacaatgtcaatctgcaaggaatttctgttggtggtgctacacttcagcttccaacaagtacttttgattctggtgacacgtaaaggcactatcattgacagtgggacaacactggcatatcttccgagggaagtttataggactttgttggctgcggtctttgataagtaccaagatctgcccttacataattatcaagacttcgtgtgttttcaattttctggaagtatagatgatggatttcccgtaatcacctttagttttgagggagaccttacactgaatgtttacccagatgattaccttttccagaacaggaatgatttatactgtatgggattcctggatggtggtgtacagactaaagatgggaaagatatgctcctcttaggagacctggtcctctcaaacaaactagtaggttattgactcggaaaaagaagttatttggatggacagaatacaactgctcctcgagcattaaaattg

SEQ ID NO: 271112 - DNA, 2276 bp, Zea mays
cccacgtgaccggtcggtaagagtgcgcaggggaggtttgctctagaggttgccttgaagacattggtcctgtttaaggagtattttgctgtgccataccccctccccaaaatggacatggttgctattccagattttgcagctggagccatggagaactatggcttggttacataccgtgaaacagcattgctatttgatgagatgcactctgcagctgccaataagcaacgggttgcagttgttgtagctcatgaattagctcatcaatggtttggaaatcttgtcacaatggaatggtggacacatctgtggcttaatgagggctttgcgacttgggtgtcttacttagctgcagatcagttctttcctgaatggaatgtttggactcagtttctagaggaatctacaataggtttcaagttggatgctcttgcaggttcacatccaattgaggtggacataaatcatgttgatgaaatagatgagatatttgatgctataagctataggaaaggagcttctgtcattcggatgctgcaaaactatcttggggctgaggtctttcagaattctttggctgcatacatcaaaagatttgcgtattcaaatgcaaagactgaggacttatgggctgcccttgaagaggggtctggtgaaccagttagaacattaatgcattcatggaccaaacagcaaggttatcctgtcattaatgtgaaactcaaggatggaaagttccaactggagcagacacaatttctttcaagtggatctacaggagttgggcaatgggttgttcccatcacactatgttgttgttcctactcgcgccaagcaaagttcctttttcatgggaaacaagaagattttgatttgtcagcgtccgggtttacggactgccaaaagaaagatggcttctggattaaacttaatgtcaaccagaccagcttctatagggtgagctatgatgaggaacttgcagcccgacttcgatatgcaattgaaaccaacaaactgggtgcagcagacagatatggtgtacttgatgatgcctatgccctctgtatggctggcaaacaaaagctagtctccttgctgcatttgatttctgtgtacaaggatgagactgagtatactgtgcttgcacacataatcacgacaagtctgcacattgccgagatgatggctattgctgctccagaggagttggttcatctgaagaagttcctaattgatttcctggagccatttgcgctgaaacttggctgggatgctaagagtgacgagggccatctgaacgctttgttaagaggtacactcttaaccgctctggcagaacttggccatgaggctaccataaatgaagctgttcgtcgatttaatgtctttctggaagacagagagacaccactccttcctcccgatgttcgaaaggcagcatatattgctttgatgcagacagtgaacaaatcaaacaaaactggctatgaatcactactgagggtatatagggaaaccgatctaagccaggagaaagttcgtgtgttaggttctttggcatcatcccctgaccatgatgttgtccgtgaagtattgaatttcatattgtcacctgaggtgaggaatcaggacgcaatatttttgctaagaggggtgagttcaggggcacacgaggtagcatggcaatggctgaaggaaaactgggattacatattgggagcctactctggaactctgctcacctatttcgtcaacataactgtctcgccactggccaccgatgaacatggtgacgaggcggaggagtttttcaagagcagaaccaaggcgaacatcgcgaggactgtgaggcagagcatcgagagggtgaggatcaatgcccaatgggtcaagaacatcaaggccgaggctgacctcggcaatgttctcaagaagctggcttacaagcactgatcagagacggtccactttcatttctgtgttagtcctagtaccgagatgtaactttgttctctggaataagtggattaataaagggcactttcgtttgtgtgtcgtcctgagctgccttgtccgtagattcttacaaactgttctgtgcgaaagctaccatgatagatatgcgtcgtcgcgtcgaattgattgattctatagcctgataattgattgtgtatcgcccatgtcgcacaggagaacgataaatttgttccaatgatttgactgactgcgagttggctttcaaaaaaaaaaaaagggaagaaaaggaggaacgg

SEQ ID NO: 271113 - DNA, 738 bp, Zea mays
gacccacccgtccacccacgcatccgcccacgcgtccgcccacgcgtccgcccacgcgtccgcccacgcgtccgcccacgcgtccgcccacgcgtccgattgaatttcatattgtcacctgaggtgaggaatcaggacgcaatatttttgctaagaggggtgagttcaggggcacacgaggtagcatggcaatggctgaaggaaaactgggattacatattgggagcctactctggaactctgctcacctatttcgtcaacataactgtctcgccactggccaccgatgaacatggtgatgaggcggaggagtttttcaagagcagaaccaaggcgaacatcgcgaggactgtgaggcagagcatcgagagggtgaggatcaatgctcaatgggtcaagaacatcaaggccgaggctgacctcggcaatgttctcaagaagctggcttacaagcactgatcagagacggtccactttctttgtgtaactttgttctctggaataagtggattaataaagggcactttcgtttgtgtgtcgtcctgagctgccttgaccgtagattcttacaaactgttctgtgcgaaagctaccatgatagatatgcgtcgaattgattgattctatatcctgataattgattgtgtatcgcccatgtcgcacaggagaacgataaatttgttccaatgatttgactgactgcgaattggcttccaaaaaaaaaaaaaaaaagggcgg

SEQ ID NO: 271114 - DNA, 400 bp, Zea mays
ctcgctcgaaacccaagtcggaagccctcaggcgtagcgcgtccatggcgtccaccgcgctggtggcagtggcagtggggggcgccatttctctcggtctcgtcgcctcctctggcgtcgcgtcctgctccctgcgcgccggcggcgactcccggcggtttggcccccgactcgtcctcctgcggagaggaggcgccgagggggaggggacgaggacacggaattgcccaatatttcgttgtgccaataaggtggacgttgtgaccgaggatgacagcgtcgatggtgacgttaccgacgatggagaagaccttgaggatgcagctgatgacgccattgatgctgatgttggtaccgaagatgaactggagtcttcgctgcctgagggatgtgagtggat

SEQ ID NO: 271115 - DNA, 1301 bp, Zea mays
cgaaaaaaaattccccacgtactagaccacccacccgttggctttctcccctcgcaccggggaacgcggctgccgatccgctcccgatcccctgccctcctccttccagccgactgagattccaccaaatcggcgcccgtgcagtccccgattcgattggcaagcacgattggccgctcctgatcagctacgggatagggctggatttgatttgattggatccccaattgggtgtccgggtccgcgcgttcgggagggcgggcgggcggggggattgctttagggtttcagcgggtgcggtcgctgtgtaggcgggtagggttttgccatggcggagaagggctgcctgaagcggctccagaaggagtaccatgcgctctgtaaggaaccgccgccgcaggtcgtggctcgcccactgcccaacgacatattggagtggcactatgtacttgaaggaagtaaaggcacaccctttgaaggtggatattactacgggaaactcaaatttccaccggattatccttttaagcctccaagtatcagcatgacaaccccgagcggcagatttgcgccacacaaaagaatatgcttgtcaatgagtgactttcatcctgaatcttggaatccgatgtggtctgttgcaagcattctcactgggcttctgtccttcatgatggacgatgcactgacaactggaagcatcaagacatcagatgcagaaaagaggcgtttagcaaaagcttcccttgtctacaattgtgagagcaaaaactgtccgcacttcaggaaacttttcccagagtatgttgagaagtacaatcaacagctacaattggagaacactgctgcagagccggtgcctcaggagaatcctgcacctgctccatcccctgctgtccagcaagctccgaccgtggccaatagggcacaaccactggcggaggcgcgccgtgacaagaaccagaagaaggcggtgcccttctggatggtgctggtcatgttttcagttttcggggccgtgatggcgttgcccctaatgcaactttgacaacaataaagaccatgaggacgtgtgataccggggccgtaattttgtatagttttccattggttcgtctgtgtgactcagttgccccctagacttacctaccaccttggagtcatattgatgaacttgtgatggtaacatgtgtagaaccgttatctatcttgactagtagcgtcagaagctcgttcgtatttaaaaaaaaaaaaaaaaaaaaaaaaaaaaaaaaaaagggcggccgctcgcgatctagaac

SEQ ID NO: 271116 - DNA, 457 bp, Zea mays
cgccgatcccctcccctcccctttcccgccgactgatcccaccaattctgcacccgcgcagttcctgattcgattggcaagcgcaattggccgctcctgaccagacgccggatagggctggatttgattggattggatccccaattgtgtttgccacgtccgtgcgttcgggcgggcgggggagttactttagggtttcggcgggtgcggtcgccgtgtaggcggtagggttttgccatggcggagaagggctgcctcaagcggctccagaaggagtaccacgccctctgcaaggagccgcctccgcagatcgttgctcgcccgctgcccaacgacatactggagtggcactatgtactggaaggaagtaaaggaacgccctttgaaggtggatattactatgggtataccacattatctactgcctccaatatttgttttggtacttataaatctc

SEQ ID NO: 271117 - DNA, 463 bp, Zea mays
tcgccgggcatcgcgggcatcgcacacaaacgcaacctgcagccatggcacagaagctcgcgccaccgacggcggcggccgtcgtcgtcctgctggcgctcgccttgtcggccgccgcgcagaactgcgggtgcgcgtcgggcctgtgctgcagccggttcgggtactgcgggacgggcgaggactactgcggcgccgggtgccagtcgggcccctgcgacgtgccggagaccaacaacgcgtccgtggccagcatcgtgacgccggccttcttcgacgcgctcctcgcgcaggccgccgcctcgtgcgaggccaacggcttctacacccgcgacgccttcctcgccgccgccggctactacccggcgttcggccgcaccggcaccgtcgacgactccaagcgcgagatcgccgccttcttcggcaacgccaaccacgagaccataaagttctgctacatcaa

SEQ ID NO: 271118 - DNA, 791 bp, Zea mays
cggacgcgtgggcggacgcgtgggcggacgcgtgggcggacgcgtggccgtggcaatcgggggcatcttcgtcgccctcctcgccgtggccggcgaggcggctgtgttcacggtggtgaaccagtgcccgttcaccgtgtgggccgcgtccgtgccggtgggcggcgggcggcagctgaaccgcggcgagagctggcggatcacggcccccgcgggcacgacggccgcgcgcatctgggcgcgcacggggtgccagttcgacgcgagcgggcgcgggagctgccgcacgggggactgcggcggcgtgctgcagtgcactgggtacgggcgcgcgcccaacacgctggcggagtacgcgctgaagcagttcaacaacctcgacttcttcgacatctgcctcatcgacggcttcaacgtgcccatgagcttcctcccggacggcgggtccgggtgcagccgcggcccgcgctgcgccgtggacgtgaacgcgcgctgccctgccgagctgcggcaggacggcgtgtgcaacaacgcgtgccccgtgttcaagaaggacgagtactgctgcgtcggctcggcggccaacgactgccacccgaccaactactccaggtacttcaaggggcagtgccccgacgcgtacagctaccccaaggatgacgccaccagcaccttcacctgccccgccggaaccaactacaaggtcgtcttctgcccgtgaggccgctgaactagcatcagcgtgcgcgcgtcgaccaagaacaagaaataaacgaccgaggctgtgtatg

SEQ ID NO: 271119 - DNA, 364 bp, Zea mays
gcattcttcaaatacttgcataagatggcaggttccgtggctatcgtgggcatcttcgtcgccctcctcgccgtggccggcgaggcggctgtgttcacggtggtgaaccagtgcccgttcaccgtgtgggccgcgtccgtgccggtgggcggcgggcggcagctgaaccgcggcgagagctggcggatcacggcccccgcgggcacgacggccgcgcgcatctgggcgcgcacggggtgccagttcgacgcgagcgggcgcgggagctgccgcacgggggactgcggcggcgtgctgcagtgcactgggtacgggcgcgcgcccaacacgctggcggagtacgcgctgaagcagttcaacaacc

SEQ ID NO: 271120 - DNA, 786 bp, Zea mays
caatttaatgatgcccccaacaaagaaagcgttggctatggagaaagtggacgtggcaagcatggagaaaaatctctagctgaatcagtgggatcacttaacattggcattgttgactctgagttcatggattcaagtcctctaattcatgataaagaatcatgttctcctctagaacctgagggctccgttaatgaagataattttacagctgtgctttcacagtttaacgatgcccccaacaaagaaagtgaaggctatggagaaagtggatgtggtaagcatggagaaaaatctctagttgaatcagtgggatcacttaacattggcattgttgattctgagttcatggattcaagtcctctaattcatgataaagaatcatgttctcctctagaacctgaggactcagttaatgaagataattttgcagctgtgctttcacaatttagcgatggccccaacgaaggaagtgaaggatatggagaaagtggacattacaagcatgaagaaaaatctctagatgaatcagtgggatcactaaccattggcattattgattctgagttcatggattcaagtcctccaattcatgataaagaatcatgttctactcgttctgcagctgaccaatgttcaaggactataccggctaaatatgaattaagttcagaagagtcagattccacaggcagtcatttggtgtttgacagtggcaagaattatctggagttgaacaatcattctgtcacagatttggaaaggatttacgatggacatgccacg

SEQ ID NO: 271121 - DNA, 461 bp, Zea mays
gaccgaggcgtccgccaggagcaaattcctcctctctcgagggcggttgcgtgctcgcgtgaagaaggccggggccctagctctccgatcgcggtagggcgttcgcagcgccgattcgagccgacgattggccgtccgcgaaggttaaacaaaatcaaatccccctgttcatgtgttatggcagggcatcatcataataacacacatgcctccaggatggatcatgtgaacaggttccagagtgaagcacagccttttggcccaaagttatttatgcattctagaactgatgcagcaaatggagctctaccatcaggttatgtgggcgcaccaataagaccaaatggcattccattctcaagtcacaccgggcaatctcatattcagcacagtgatgctcctggaaccatgcttgcatcctattctggctatcctcttgctggaagctccagtagcaccta

SEQ ID NO: 271122 - DNA, 799 bp, Zea mays
  unsure (1)..(799): unsure at all n locations
aacggatagagctgactgcttgcatatgcgctagtacaaatagagcgccgcagtgaatccggcccaattcactttcccatcgcgtgaagaggttgccgttaccgaccatgtcgcagcagccggcgccggcgccggcgccgccatagcggccgtataggcaggtgagggaggcgacgccccatagccgggcgatctcctgcgtgcggttctccccctgcgggcgcctcctcgcgacagcctccctcgacggaacggtagcgctgctctccccgtcctcactggccgtaatcgccgtcctgcgcggccactctgacggcgtgtccgacctgtcctggtccacggagtcgttctacctctgctccgcctccgacgaccgcaccatccgcatctgggacatccggcccgtcctcgccggtggcgcccaggcagccgccgtctccggcgcagaccgctgcgtccgcgtgctcaaggggcacaccaacttcgtcttcagcgctaacttcaacccgcagaccagctcgcagatcgcttccggaggatttgattgtaccgtgcgcatatgggacgccacgagtggccggtgcacccgcgccatcgaagcgcactctgagcccgtcacctccgtgcatttcattagggacggatccatcgttgtatccggaagccatgacgggagctgcaagatctgggacgccaagagcggngcttgcctcaagacggtcatcgatgaaaagaagcccgcagtgtccttctccatgttctcgcccaatggcaaagttatcctcgttgccatgctcgt

SEQ ID NO: 271123 - DNA, 568 bp, Zea mays
gaagtaacatgatttttatacagggatgctccttcgttacggaagaccatgcagaacctgtcaggcccattgccacatcagctgatattactacttctatggatatgcgtctaatgatgaataagatcaagattgttgagttcatctctgttctactatcaattggtagtgcagctgccaaaacacgactgattcaactaggagcaatcaagcatgctatagatctattttttgagtacccgtttaacaacttcttgcaccaccgtgcgagaatatcatcggctcatgtttggagagtaagcaggatcgactgattggccatgtccttgatgactgtaaacttgttacaagaattctggaagcagagaagaactctgctctgtcgtcagatttaacgaagcatactttgtcttcagagggaagatctcccccatggataggaattgttggtcatatgacacggatagctaacaggctccttcagctggtcaacacaaacatcatggttcaatcacatttgcagcaaaattctgattggattgagtggcatgccagtaccctgacgaat

SEQ ID NO: 271124 - DNA, 1003 bp, Zea mays
ttatgaagatcttatgaatttgcttttctccttcctaaaacctgaccaccctcatgggacattgttggctggttactttgctaaggtagtaatttgtttggcgatgaggaagacacttcaactagttcgttatgtgcagggccatcctgaaatagttagccagcttgtcgatcttattgggattacttctatcatggaggttttgattcgcttaatcggtgcagatgaaactatgtattcaagctatgcagattctatgcaatggttagatgacatacaagtccttgagatgattgttgacaagttcagcacatcagattctcctgaggttcatgcaaatgctgctgaaatcctttgtgcagtaactagatatgcccctccagcacttgctgcaaagatttccagtccaagctttgtggggagattatttcaacatgcttttgaagattcaaggccaaaatcggtgctggtccactcattatcagtgtgcatatcgttgttagatcctaagagacttgtatcggcttcctatcaggctttccgtagtcagttgagccatggaacacttgtcaccgcaggtccagagacagttaatggcatgctggatagcctaggggatgtattgaagctgctggatgtttcatctgctgaaaatgttctgccaacaacatacggtagcttacaacctccactcgggaaacatcgcttgaagattgttgagttcatctctgttctactatcaattggtagtgcagctgccgaaacacgactgattcaactaggagcaatccagcacgctatagatctattttttgagtacccgtttaacaacttcttgcaccaccatgtcgagaatatcatcggctcatgtctggagagtaagcaggatcgcctgattggccatgtccttgatgactgtaaacttgttacaagaattctggatgcggagaagaactctgctctgtcgtcagatttaactaagcatacattgtctacagaggga

SEQ ID NO: 271125 - DNA, 469 bp, Zea mays
cggacgcgtgggtgggtttgaggaatcatggcaaagaaataccagggagaatatgcggggctggaatcctagaatgaacatgcttggcagtggaaatgttcgctctgacttccgagatgtgaatcaaatgcctgcacttccagccccagaactataccgtggcacgaattttcagaatggctcttccatgggccgtgcaccccgcacatgagttcctctgtggcatatgctggatcacagtgctcagtaccggtgacttgcactattttgcagaaaaatgttgaaacccaaactcagcttttgaaaaactactgtaacttgagacagttttaatagtcgagagctttccttagtttcagcagctctatccgagtactccaatcactgtagtttagtgctgcctgagatgcaactaaaatctgtttggacagggaggattatttcttgggaaatttactggtttttggtg

SEQ ID NO: 271126 - DNA, 700 bp, Zea mays
atccgcggctccacgcccaaaaccccaaattccctatccctatcccgcgcgccctgttcttcgtctatctctctcccgactcggaaggaaaccctaggcgccacgcgagggttctcgaaccttcgctccccacacccccgattcggaagccctagcctggacggttccgggaccttctggcgcgggaggatggcgggaagacgtctggaccagtcgctgctgccccagatccatgccctcttctccgacccgcttcgcgtggtttcgtacaaatggctcagtcggaacttctctgtgtcatcaaatgatgccaagaggttgcttcaggactttgtcaacaaacatggaactgacctccaagtgatttacagtgtatcggggtggttgaagagcaatccccaaaactattgtgtaaagctcatttcaggcccaaaacttgaagaaacaaggcaaattttcaaagattcttgttcagttcagatctacagtatccaggcctgtattccaaaagatacagctatactttggaatcatgaatttgtgcaggcagaggagcttttcaatcagccttttgattatgctaactgtttgagagataataggttttgtggtgttttgaattcttttgtcaagcgaacatccaatggaaagcatgtgagttcattgccaccacagcccttgaatagtgctgcagccgccg

SEQ ID NO: 271127 - DNA, 968 bp, Zea mays
aagccgaagcagcgttttttgctcgacaacgccagcaacctgctgagcggacttcctcagcggtggcggcctcgggaccatgcccgtcggtgagggcgccgtcaccgacctaaagggcaagcccctctacttctcgctttacgactggttcctcgagcatggctctgtctacaagcttgcttttggacccaaatcgttcgttgttgtctctgaccctatcgttgctagacacatcctccgggcgaacgctttctgttatgataagggagccctcgctgaaattttaaaacccataatggggaagggtcttatacctgctgaccttgatacctggaagcaaaggagaaaagttataacacctgggttccatgccttattcatagaagctatggtgaggacatttacgaaatgttcagagagaacaatttcaaagcttgaggagcttactgaaagtgaaggccgtgaacaaaattcgacttttgtggaccttgaagctgagttctccaatttggcacttgatatcattggattgggtgtgttcaattttgattttgactcggttactaaggaatctcctgtaataaaggcagtgtatggaacacttttcgaagctgagcaccgttccaccttctacatcccctattggaatcttcctttgacaaaatggatagttccaaggcagcgcaagttccatagtgacctcaaagtgatcagcgccggccttgataaccttataaaaaatgcaaaggagacgagacagacttgctatataggaagctgatgtggaaaagctccagcaaagggactactcttctctgaaggatgccagcttgctgaggttccctgttgacatgaggggagctgacgttgatgatcgccagcttcgagatgatcttatgacaatgcttattgctggacatgaaacaacggctgctgttctgacatggtctgtttttttgctagcccag

SEQ ID NO: 271128 - DNA, 1549 bp, Zea mays
  unsure (1)..(1549): unsure at all n locations
gaggtggagaagaaagatgagatcctggtggccgggaaggaagaagaggggagagtaagtgtctgcatccccccgaggaatgcactgctgctaatgcgctgccggtcagacccagttcgcatggctgctcttgccacccgcttctgggggtctccagctgcagctaccgtggagcaggtggacaatgaggtggctgggtgcctcaacgacaatgaggaagaagaagagaaggaagaggaggctgaggctgagccactggagtgcaaagatggagctcgcggttcagctgtttctgtcaaagacttgaaatgtgaagagtgtggttctgatgaaaatggtggcgctgaaacagaggagatagatcaagcaaaaacagaagctgaagagagttctaaatgtggagatctagtggaagaaaaggagggtgcatcatgcagagtaggggtggaggaagcacaaattgttcggaaagatgccgagttggaggttcctttgggagaagttacagagatggaaaaccaagggccggacatggtggagttggtggtcagtgaggaagaagttccaggacatgagaaagttgacgaagagatgatggggaggagatcaatcaacagctattctccctcggcagctctgaaagaggaccgcaccaaattgcgacggttgagtagcaggaggtgtgttagcactagtagcagggcctcatcgtccagtgatagggttggcaggcggcacagcttctcagctgagatggaggcacggcggtctagcttctcgagcttgaaggattcaaggagagctagtttctccattgatagagatggccggaggtggagcttctcaattgaacaggagcatcttgttgcgcagcctaaggtgctgatggcatccagaaaggggaagaagactaagtcttctgagccagagtcagagaaggattgtgatgttgttgctccaaacagtgtagaggaaggacaagaatcctgtgatgatggaaaggaagaagacactactgagaatgtagcggaagaaggaaaaacaaagtctgcggaagcgaaccaggaagtagagaaagtagaaactagagcagaagagtgtgaaggtgggacagtaccagtgatacataggaggaagaagagtggtgagttaccagattgcctcctgttgatgatgtatgagccaaagctctccatggaggtctccaaggagacatgggtctgcagcactgacttcgtccattggaagtcttaccagggcaagaataactacaaccactggcaacagaaggcttttgctgctggaacagtggagactgtagaaaaggagaatgctgaaggcaccaccgttgtgaatgatgtacaagagagcaaagatccatcgacggtgaactcagctgtgcccatgccatgtccagttgtccagaagacaccgccactcaaaccagcaacaacagaacagacgccgaagctggagttgccgncggtcaccaatgcggcagcctacgccccgtcgttctgaaaagtgcaagtcagagccgatgcgatca

SEQ ID NO: 271129 - DNA, 1181 bp, Zea mays
  unsure (1)..(1181): unsure at all n locations
cccacgcgtccgcccacgcgtccgcggaccgccggctgaccgacacgactccccccttcgtcttccaatccgccgctgttcgagtagtcggcggcgcggcgccggcggccggggcggcggcgatgaatcccctcacgcaggtgaagcggacgcagattatcaaccagaaggaggcgctcctgggcatcggcgaggacgcgtcgtggcacgccaagtttaaggactcggcctacgtctacgtcggcggcgtccccttcgacctcaccgagggcgacctcctcgccatctttgcgcagtatggtgaggttgtcgacgtgaacctcgtgcgcgacaagggcaccggaaaatccaaggggttcgcgttcctcgcgtacgaggaccagagaagcacgattcttgctgttgacaatttgaatggagctaaagttcttgggaggatcataaaggttgaccatgtgagcaagtacaagaagaaggaagaggaagatgaggaggagctgcagaagaagagggaggcccgtggagtctgctatgctttccagaaaggcgagtgcaaccgcggagcttcctgcagatattcgcatgatgagcagagaaatgcaaacaccggttggggttctaaagaggatagtggtgcacgatgggagcatgacaaacacagtgatgtaccgaagagccgaggcatgtgctatgctttccagaagggagagtgcaaccgtggagcatcctgcaaatttttgcatgacgagcagagaaatgcaaacagtcgtcgggactctagggatggtggaccatcgagatcagagcggtatggagaccgagaatctaggagtaggcatgatgatagaagagcagaagatcgggacagattcaggcgtgacaactcacctgagagatcacgaggtgagaggcagagggacgatgacagatccgacagaggaagagaagcaaaatcagaaagacgcagatatgatgtggaacatgaggatcgcaagcggtcaaggcacggcagagagtgatgccatgaaagaagtgtttacaaagaacacaaatggtgcaagaggccgtgggggattgacgtttgtactcttaaattgcaacacaaccagtgctgttaaattttgatatttgaatgtagatgcccccggctgcnaaaaaaaaaaaaaaaaaaaaaagttaaa

SEQ ID NO: 271130 - DNA, 636 bp, Zea mays
gctgccgctccagccttaactgttttgttaaagatgggttcctggcttcctgctgaccaatttagtatctgggtcttgccaactattgtcaagctttttgcctccaatgaccgagctatccgagcatgtcttttgcaccacatagatcagcttggggaatctatgtctgctcaaactgttgacgaacaagtttttcctcatgtagccactggcttctctgatactgatggtactattcgtgaactgacattgaagtcgatgctcgtattagcaccaaaattatctcagcgtacaatctcaggatctctcttaaaatatctctctaagctacaggtggacgaagaacctggtatcaggacaaacacgacaattcttcttggcaatattgcaggctacatgaacgatgggacaaggaagagagtgctgatcaatgcattcacagttcgtgcattacgtgataccttccctccggccagagcagctggaatcatggcactaagtgtcactagttcatactatgaaatgacagagattgcaactcgcattctgcctaacatcgttgagctcacatttgacccacatagtgatgtccgaaccaaggcatttcaggctaccgatcaggtcttgcaaattgca

SEQ ID NO: 271131 - DNA, 481 bp, Zea mays
cttgtcgtgtcgatctcaggtcgtgagcgcgccgttgatgcgttcgtcgtcctgggcctggacctcgaccagcatatgccaatcctcattcagaaaatggtaaacaaaaacaaacagctagaggcagtcaaattcattcaagctcttaatatagcgcacaaatacgctttgttgcctattatgagatcgtacattgatcacgccgcagttgctggtaagatgatccgcatcaggggagatgatcttgctactcagaatgcagctgatgcaaaagagcgcacacttattggaacattgcagaagttcattaaggaacagaagctagaagaactgcccatttttgaagaagctaacaagcgaatggcacatttggatcagcaaagtgctgagagaaaaagaactgctgctgcagcggctgcggctgctcgaaaggtttagaagaacattgaggagcagcagaaaaggatacaggagctgatgc

SEQ ID NO: 271132 - DNA, 460 bp, Zea mays
  unsure (1)..(460): unsure at all n locations
cggacgcgagggcggacgcgagggcggacgcgagggaaaaatcgccgtggaggcgagtcgccgccggcactgcccggcacggccctcttctccggcgaaggcggagctcgttacggggattccacatccgttaatcggtcccaccggatccctcgccgcctcccacgggccgggccgcgccgtggcgcgcgcgcaggccgagatgcggaagaggatggagagcgtcgacgatctgatcgaggaggcaaaactgcgcaccgtctggtgggcgctctgcatcttcgccgtctcctacttcctcacgcgtgagcacgtccccttctgtccctctctgcttccgtgcctcatttgcgaccgaattgggtttgcggctcgtgtgggccgcgagaaggacgggccggggcataaatctgggtcgaggagacctggttacgcgtgggctgcctangggatgtggcgt

SEQ ID NO: 271133 - DNA, 511 bp, Zea mays
ttccactcccgccgcctttattgcgccctcggggcgagtcgccgccggcaccgcccggcacggccttcttctccggcgaaggcggagctcgttacggggattccgcatccgttaatcggtcccaccggatccctcgccgcctcccacgggccgggccgcgccgtggcgcgcgcgcaggccgagatgcggaagaggatggagagcgtcgacgatctgatcgaggaggcaaagctgcgcaccgtctggtgggcgctctgcatcttcgccgtctcctacttcctcacgcatacaagtaaatcaatgtggacaaatgtgcccatgtcaatccttatacttgcatttctgcgatatctctccttcaaaggggagttcccgtggagggaacaccctgtacgtaagcagacacatttgtctcaagcctcaaagagacagttgtctgcaaatgatcatcgcctttcgactgtaccaccagtttccagatggagaaggaaagttggtcaccttttggtga

SEQ ID NO: 271134 - DNA, 977 bp, Zea mays
  unsure (1)..(977): unsure at all n locations
gataacaacaggagattngtggtccttgtgatgacaagtctcttcgtgtgtgggagccggcatccctgtggtgattaagtatattagtgagccgcacatgcactcaatgccatcaattgcactgcatcccaactcaaattggctggcagcacagagcttggacaatcagatactgatatacagcaccaaggagaggtttcagcttaataagaagaagagatttgccggccacattgtggcaggttatgcttgtcaggtgaacttctcacctgatgggaggtttgtgatgtctggtgatggcgagggtagctgctggttctgggactggaaaagctgcaggagattcaagactttgaagtgtcacaacggggtttgcattggatgtgagtggcatccgttggaaactagcaaggttgcaacctgtgggtgggatggtgtaattaaatactgggactgaacgttggcagagatattgcttgagctcctgggaaaggttttgtaacaatccgattcacgccgaatgtcatggcatactgtaagtcacatgctcgacaagagaatcccggaggaaaaaacatgttgtgttttttgaggttacatatatgggagaaaaaggtggggttttgccgctacctttgtgttggttctgcctgttagatgtccaaatgtacaatattcgcaccatattcaaatttttagttgtatctctgccactagcaacttgtttgcggtttctggtaatcctgttccttcgaacgtttgtaccatctgaggaagtgtctgttgtgtagtatccccctccggtctgttttataacttaggggttgtttgttttgggattgtaatctgtccagatcaaaataagttaagattatataatttgggcagattataatcacaaacaaacaggcccttagatagttccctattttaatagctggggccaagtgaacaggaaataaatagagattgagctg

SEQ ID NO: 271135 - DNA, 468 bp, Zea mays
cgggaggccttctctctctctctctctctctctctctggcgacggccatggtgcagcaacagcaacacagaatctacatcttgcagttcaggaagggcgagacggagcaggaggtggcatgcaaagtgtcgcagcccaagggcgtcgggcggcgggtcatgtactactaccaggactacggcagcggcggcggtggcaagagcggcaagacggtgcaacccagggcgctcggcgtgcggcgcttcttggccatgctcctgctctccttcctctgcgtggggacgctgttcgtggcgcccgtgtccttcctctccttcgtgcatagcgacgaaggcggcgcggcggcggcggccacggccgcgcgcgcggggtgttcgggccgtgctggccgtggggaacaacagcctctgctgcgaccgcacgtcggagcgcgcggacatctgcttcgcgaggggggacttgcgcatg

SEQ ID NO: 271136 - DNA, 353 bp, Zea mays
caatttcttccattcaaccaactggtttaatggtaatagttgttgctgcaaataagcagcagggttcagtgtagacagttggttgaatggaagaaattgttgctgcggagagtagggtgaaaggtttgccagagctacttggttgatcacaggtagcacgagttgctgcagctgttgtgccctggtggtttgtaccaatgactgcaccaaagattgggctggtgattgttgaaacaacaacttctaccatttaaccaattggccgcactgaaccccgctgcttatttgcagcagcaaatactactgccatttagcgagctagctgcagcaagtcgtgcttccttcttgacaca

SEQ ID NO: 271137 - DNA, 380 bp, Zea mays
cacaaagggaggaaaaagaccacagatactgaaactggaacagctgttggctctgtatctcttggtgcaatgcaacataaaatggctaaaatgaaacccaaggaagttgatatgaacttctacaggtttcagaaaagagaagcccacctcagtgaactggcaatgttgcagagcaagttccagcaggataagaaaaggatacaggaacttagggcccagaggaaattcaagccttactaattctgctcaaatcttaacactcgcgacaaacaattttgatttgctggatattatcttaccatgtatggttcttggctgaaacaatatcaactgtggactgtcttgcatttgcgggtgccaatatatgttattcttttagt

SEQ ID NO: 271138 - DNA, 443 bp, Zea mays
cggacgcgtgggggtgagttgagcaatgagaaggaggttgaggtcttttctcttagagaggaggcggtggaaccacaggatggggcagcccatgtttctgaagctaatggtgaattgggtgatgagaaggaagcaagtgatgatgtggtggttcttggagttgaagaagccccagaagaaccatctaacagggatactgatggtgatgaagtcctggttctcggaggtaaagaagcaccagaagaatcaactaagaacgatgatgatgttgaagactaagccaccaatcctgagccaatgagtgatgcaagtccagtggctctgaatgacagaagcatacatgagcttgctcctgcaagtgctgacagtgtgctcgaggatagccttgaaaatgagcagaatgctgaaaacctggccactgccagtgaagcggtggaagatgt

SEQ ID NO: 271139 - DNA, 287 bp, Zea mays
atgcgctcgatgaaacccttcatgtattctgcaacaactgacccatctcagtggtggacttcacttctgtatgctaatactaggccatgtatatccatcaaagaaaagattgcgatgtacattatcttcattgtctcattggtatatttttgtcagaaataatggtataatcgtttatgtgttggtttgagtttgtagagaaccatgtctaatcaactgtgattgttctctactgataaagaagctctgtcaggtgacaaaaaaaaaaaaaagaaaaaaaaaaaata

SEQ ID NO: 271140 - DNA, 632 bp, Zea mays
ccttaataaaaacccacacaaacaaagcgagggggggggagagggatgaagacgccaagccagctccagcccggcacccgagataaagcggcaggcacttggatcgctgacgagatgggactcacacgcccgcacaatgctgtgccacgcgacgcccacaaccccgccgacaccgcaaccgacgacacggcgcacacgaaagcaagctgaacgggcggcaccgccggggaacgcgggtggcggcaaagagcgccagagagagaagacagaccagtgcaaggctcgccggacaggggtgcggaaggtcaagaccaaattcgccaccgcagctactgtgcaagaagataaaactatggcaactgccaaaggcgatgtccaccatctccccatatacgacctggaccccaagctggagatattcaaggaccatttcaggtaccggatgaaaagattcctagagcagaaaggatcaattgaagaaaatgagggaagtcttgaatctttgtctaaaggctatttgaaatttgggattaatacaaatgaggatggaactgtatatcgtgaatgggcacctgctgcgcaagaggcagagcttattggtgacttcaatgactgggatggtgcaaaccata

SEQ ID NO: 271141 - DNA, 534 bp, Zea mays
aggggaagaaaggtgaggagagaaacaaccaagcgaaaaaaatcacgctttcattgcgaggggggaggatagggaggaagacgccaagccagctccagtccggcacccgatataaagcggcaggcacttggattgctgacgagatgggactcacacgccgtcacaatgctgtgcctcgtgtcgccctcttcctcgccgactccgcttccgccgccgcggcgctctcgctcgcatgctgatcgggcggcaccgccggggatcgcgggtggcggcaatgtgcgcctgagtgtgttgtctgtccagtgcaaggctcgccggtcaggggtgcggaaggtcaagagcaaattcgccactgcagttactgtgcaagaagataaaactatggcaactgccaaaggcgatgtctaccatttccccatatacgacctggaccccaagctggagatattcaaggaccatttcaggttccgtatgaaaagattcctagagcatcaaaggattaatttgatgaaaattagggatgtctttaatctt

SEQ ID NO: 271142 - DNA, 1269 bp, Zea mays
cccacgcgtccgttttcgcgtccgaaaacactgctcattgctagcatgtgctcgtcttaaacagatgtactttgcttggaggattatgtaaactgcaattcagttcttggggtgataaagcacagtagtaagcatccaaactgaaaattcaaaaggatgtctcacctaatggatgcccactggtggttattaagtggttttataagaagaaaacatagatgtggggaactgttcaaataactatgagcatacaggatgccatatgcttttcataaattgctagtttggttaatgcttctcatgtatttatgctttgagcacatgttagtctacgtgcgcgagaaatttcaagaaacactatccttccctcttgtgtttgcaaacaataataaatggtcaatttggactggtgatacttatcttacatccctttttagattcttactatgttctatagttgtagactcgtatttgctaatgtgagttttacattataggcggggtcaatagaaggcaaggtggttgaaataggactcacttctacttcattgatcaatccagaaaagctccctgtcatagtacccaactctttgttctccagtcagatgatagttaacagatcacgagctaattggcgagctagtgtgacaaagattcctattcgaattgaggatattgagaaggttccttctgcatcagaggagataaagactatgttaaggtctaatcaaaatgtgtccttggatagtgatgttccttactgctatctctcgagattggaaagttcatatggagagctcaccattggatgcaacctaaaaaacatgagaaaagatgagtggctatctgcccaacaagaaattcttttgggagctgctaggattatcaaatcacatggcattgaactgggaagcaccatgcagtgctgttaattcacgcttctggcacttttaagtaggataaataccgttagcctgcagaagtgcagaacttcatacagatgctacctagccgttttgttcttcaacgttttatgtcttcagaccatggacacccactaccaatactattctgttactgccgttttctttggaactaaggtctagtttccttttgtggtcgtcctaatggttggtgtttggatcggtttctgggagcttctttgtctatgtatactggtcaacgtttgcgccgcgcccacgcctgctctgtggatgagccctgagcgttttattggtcaattctgtgaaatattgggttttatcctcg

SEQ ID NO: 271143 - DNA, 1185 bp, Zea mays
  unsure (1)..(1185): unsure at all n locations
acaanatttgattttcctttcctttccttttccactcccgactattacccctcctcccactccacggagaagcgaaaccgacctttccccctcccccgcattccacctcgcggagatccagtccagccctagggtttcgccagcggcgagccaaactccacgagcgggggaagaggggaaagcagggacgacgagggggcagccatggggcagcagtcgctgatctacgcgttcgtggcccgtggcacggtcatactggccgagtacacggagttcaccggcaacttcaccaccatcgcctcccagtgcctcatgaagctccccgcaagcaacaacaagttcacctacaactgcgacggtcacactttcaattacctcgtggaagacggattcacatactgtgttgttgctgttgaatcggtggggcaacaaattcctattgctttcatggatagggttaaggaggatttcacaaaaaggtatggtggtgggaaagctgctactgctgcagctaacagcctcaatcgagagtttggatcaaaacttaaagaacacatgcagtattgtgtggatcaccctgaagaggttagcaagctggccaaagtgaaggcgcaggtttcagaagtcaagggtgttatgatggaaaacattgaaaaggttctggatcgtggagagaagattgagctgcttgtcgacaagaccgagaatcttcgctcacaggcacaagatttcagacagcagggaacaaatgtcaggagaaagatgtggttacagaacatgaaaatcaagctcatcgtcctgggaataatcatcgcactcattctgatcattatcctctctgtctgtcatggtttcaaatgccattaagcacagaccagaatactgatacattcaactgcacctattatactgctgcttggagcaaaaaaaagtatgatcttttgttgtttcgctagtgtgctgtggcccggtcattatgcataggtgttttacattgtcgtagtgtttgataaatgatggatggtgactgggtttgttgtgtcaactgtcataactattgtgcatttttggacgctatatgtgtagccttgatatgaatagatttactgtacttataagggctggtgtgactcagccgtttgctcctttgggcaatgtgcgcatttgggagcatcttgcatttaa

SEQ ID NO: 271144 - DNA, 864 bp, Zea mays
ccctacgcgtccgcccacgcgtccgcccacgcgtccgcccaacactcccagacccatttccctttccttcccctccggctccgcctcctcgaccactccgacaacccccagcgcctcctctccggcgagctccacctctccaccggcggcggcgagaagcgggggggctaactaagtctgtaggctgcggcggaggtgatcccggagccggagccgagtctagggcgatggggcagcagtcgctgatctacgcgttcgtggcgcgtggcaccgtggtgctggccgagtacaccgagttcaccggcaacttcaccaccatcgccgcccagtgcctgcagaagctccccgccagcaacaacaagttcacctacaactgcgacggccacaccttcaactacctcgtcgaggacggattcacgtattgtgtagttgctgttgaatcagttgggcgacaaatccccatagctttcctggacagagttaaggaagacttcaccaaaaagtatggaggcgggaaagcagctactgctgcagcgaacagcttgaacagggagtttggaccaaagcttaaagagcacatgcagtactgtgtggaccaccctgaggaggttagcaagcttgccaaggtgaaggcccaagtctccgaagtcaaaggagttatgatggaaaacattgagaaggttcttgaccgtggtgagaagattgagctgctagttgacaaaactgaaaatctgcgttctcaggtaaaggattcttttaggatgtacacattagcaatttaattttgcatgtgtgtagatccagtaaagcaaagatgaactcattttatctatagaatatataactctacgtagcatttaggga

SEQ ID NO: 271145 - DNA, 1228 bp, Zea mays
cctttttcctttccacgccttcccaccactcccagaggacccagacagacccccttcctcggcctcctcgaccactccgacgcccacagcgcctccggcgagctccacctctccaccggcggcagcgaggggcgagggggctaatactgtaggcggaggaggagccgagccgagccgatggggcagcagtcgctgatctacgcgttcgtggcgcggggcaccgtggtgctggccgagtacaccgagttcaccggcaacttcaccaccatcgccgcccagtgcctgcagaagctccccgccagcaacaacaagttcacctacaactgcgacggccacaccttcaactacctcgtcgaggacggattcacgtactgtgtagttgctgttgaatcagtcgggcgacaaatccccatagctttcctggacagagttaaggaagacttcaccaaaaagtatggaggcgggaaagcagctactgctgcagcgaacagcttgagagggagtttggaccaaagcttaaagagcacatgcagtactgtgtggaccaccctgaggaggttagcaagcttgccaaggtgaaggcccaagtctccgaagtcaaaggagttatgatggaaaacattgagaaggttcttgaccgtggcgagaagattgaactgcttgtcgacaaaactgaaaatctgcgttctcaggcacaagatttcaggcagcagggcaccaaggtgcggcggaagatgtggctccaaaacatgaaaatcaagctgatcgtcctgggcatcatcatcgcgctcatcctcatcatcatcctgtcggtgtgccatggcttcaagtgcggcagcaagtgaggagggggacttacagatggccgtgccctgccctgccctgccctggcacctgcgagaaggaggagactacatgtggagttttttttttttgcttctttagtcgtcgtgttaagtcgtcctgcgccgataattcttggtggtcaccagataaagagtcattcctgatgtcggtgttgattgctgttgggttggtcgggaaatgactgggtgaaccggggggcgaagtgggaggggggttgtgtcgtgtaattttggatgccactattgtgcatgtatagccccgtgtgctgtgctaccctgatccgtgttgctactcctatgtcagtacatgtttttcaaaaaaaaaaaccaaaaaaaaaaaaaaaaaaaaaaaaaaaaaaaaa

SEQ ID NO: 271146 - DNA, 309 bp, Zea mays
gtcacagacccctgtccctttccctttccttcccctccggctccgcctcctcgaccactccgacaaccccaagcgcctccggcgagctccacctctccaccggctgcggcgagaagcggcgggggctaactaagtctgtaggcggcggcggaggtgatccgggagccggagccgagtctagggcgatggggcagcagtcgctgatctacgcgttcgtggcgcgtggcaccgtggtgctggctgagtacaccgagttcaccggcaacttcaccaccatcgccgcccagtgcctgcagaagctccccgcca

SEQ ID NO: 271147 - DNA, 420 bp, Zea mays
gcggaaataccggggcggcccaacccgtccgaggcctcctagcaacatagaaagctcttttttgtcccaataatggcagccaaaagattttgcctcattatgctccttggtctttctgcaagtgctgctacggcgagcattttcccgcaatgctcacaagctcctatagcttcccttcttcccccatacctctcaccagcgatgtcttcagtatgtgaaaatccaattcttctaccctacaggatccaacaggcaatcgcagcaggcatcttacctttatcacccttgttcctccaacaatcatcagccctattacagcagttacctttggtgcatttattggcacaaaacatcagggcacatcaactacaacatctcgtgctagcaaaccttgctgcctactctcagcatcagcagtta

SEQ ID NO: 271148 - DNA, 810 bp, Zea mays
tctgttcgttgattggggattgtggttatatagctgtaaagtttgtgttcttttttatggattcgttttaaatctgatataccatttcgttttggattggttcaggcaataaggatgccaaatctgcagcttcgccaacaggagcagtttctgggtcgcccatactcgcttccccgcaccctccacttcctcgtcgccgtgctgattccagatcaaggggcagtgatccggaggatagggatgaggctattgctgctggccttgaggcagatggcagtggccttgactccccaggctcagacaagcgccaaagtggtgactgccctcagaggaaggggttccctggcaatggcggtggtcccagcctcagcagtggaagcagtgtatggtccagctcaaggagtgtgagtgatgctgaggaggatacaggcggccctgaggatgagagtgaagtcttcgatgattgggaaatggctgctgatgcgctttatgtcgatgacagttcttgtaaccagagttcaggtcccacaccgacactcccacaagctccgaccactgcagaaccttctcatgcagcgaaaccagaaccgattcaaagcaagacaagggcttgggcaccggatgacatatttcgaccacagagcttacccagcatctccaagcagaccagcttcccagcaagcattggtaaccgctggcaggatatgggaatgagtgctgcacagcagggaattctttcattgccgctgtcgtgccccatttgctgtgacgatcttgacctgacagattcgagcttctgtccctgtcctt

SEQ ID NO: 271149 - DNA, 483 bp, Zea mays
gagaagctggacgcgttcgcggctgatctggtgaaggagcagcagcggcgggcgcgcagcccgggcctgcccaccgtggtgatcaggcaggcgcgccccacggccacggccacgccgcggctgtcctccgccaccaccgcctcctccgccaccgtccggaccgcctccaccgtgccgtccccggcgtcgcagggctcctaccagcattagccgccgacggcggccgtcgtccgtcctgagttttgtacatgccgccgtggacagaggagtgcatatgcgacctccacccctcccccctatccctctctctttttttacccacacgtcgatggcgatgagccactgttatgtgggtccagccgtccacgacagagctaaaacgtggtgaaagtaagttctcggatggatgtagtaacttatttattataaaagccgcccaagttttaaaggaaaaaaaaaaaccgacggcttgggccgccccgg

SEQ ID NO: 271150 - DNA, 543 bp, Zea mays
gaaggagaggagcgtctcggtgattctcttgtccggagggcagggaaagagaatgggggcgaatatgccaaagcagtatctacctctactaggactaccaattgcattgtacagtttaaaaacattctgtcaactgaaggaagtcaaagaagttgtggtagtgtgtgatccagactacagtgatgtatttgaaggttctattgacaacttgcaaataccccttaaatttgcacgcccgggaaaagagagacaagactctgtttttaatggattgcaggaaattgatggggattcggaactagtttgtgtccatgattctgcgaggcccttagtttcttctgaagatgtaaaaaaggtcttagaagatgctgcagtacatggagcagctgttcttggtgtgcctgttaaagctacaataaaggaggccaatagtgattcttttgtcatcaaaactcttgaccggaaaactctctgggaaatgcaaactccacaggttatgaagccaaatttactcaaagatggttttgagcttgttaaacggga

SEQ ID NO: 271151 - DNA, 660 bp, Zea mays
tcggtgacggcgcctctcgtgcgcattttgcgcacgagcaccttctactacgtggcgctgtcgggcatctcggtgggcgggcagccgctggccatcccggcctccgccttcgccatggacgccacgtcgggctcgggcggcgtcatcgtggactccggcaccgccgtgacgcggctccagtccgccgcctacgcggcgctccgcgacgccttcgtccagggcgcgccgtcgctgccccggacctccggggtgtcgctgttcgacacgtgctacgacctgtcggaccggacgagcgtggaggtgcccgcggtgtcgctgcggttcgagggcggcggcgcgctgcggctgccggcgaagaactacctgatccccgtggacggagccggcacctactgcctggcgttcgcgccgacgaacgcggccgtgtccatcatcgggaacgtgcagcagcagggcacccgcgtcagcttcgacaccgccaggggcgccgtcggcttcacccccaacaagtgctagcctagcctagcctaagcctgccttctggctaaccgtgccctgttagccacggttgtcagtagcaatgacaagccggtgtttgactagcgggagaatgattagatggggggtaattgaccggtgggccctgccgaatctggggag

SEQ ID NO: 271152 - DNA, 1114 bp, Zea mays
ccagtgtaaagatccgggcttcccgggagcctgtggaccgccatccatgcttgccttttctgtttagctcacgatcgccgcccgtggttgcaggagctcaagaacctgcgcccgcagctctactcggcctccgagtactgcgagaagtcctacctccgctgcgaacagaagcaagtggtgctggacagcatgaaagattacgctgtcagggccctggtcaacgctgtcgaccatcttggcacagtggcctacaagctgacggacctatacgaagagcaggcttcagaaataacaaccctcgagttgaaagtagcatgcttgaaccagcaagtccgtacctgccagacatacacggacaaagaaggcctcaggcaacagcagatgatgggggctgccagaagacaccataaccattacatcgtaccatatgcgggaaacaaaagaatgcaggccttctctgttacgcaagccgatgctgatttcgacccaacgccaaggcctttctcttcagcaaggacccttgagtggcatttggtttccgagaagaattccaaaaccagtagaccagatcagtctgaaattgccttaggagaaacaaaaactactaaggcttccccaagtggtttccgccttctcggcaaggaatcatctgcatctcccttgtccaggaatgtgcattccaacataaccagtttggatattgtcagtgccggcatgaaggatcagcccacgaccaggcacttgtcatcgttcagttctttggacaaccccaggggccgacaaatccagaaggctccgcttcgcacaaaaagtatgctagccgctttctttgtcaaacacagatcagcaaagatgaaaaacgtctctgtgcgttgatcaactgcaagccaagcctgtagtttgctccagccaaaccgacgtggaagtgttaagggcatgagatgtatacatgtttgtatatggtatttgggtcttgtatgctagtgctctagagataaacctttacggatgcgctttcaatctagagtctttggcatcttgctcatgaccttaatgtaatgatttatatggatatatattactagttttataatctagtgtcatctccctagcc

SEQ ID NO: 271153 - DNA, 471 bp, Zea mays
gggaatcccggcaggcaaagcgaaagcatccgcgcgagaggcgtcgcgtgttccttgcttcgtggtcgcgtgccgtggcccttccgcttcccccgtatccgcccgtcctgttcccgccccgagcgaaccggcggcggcggaggcgatgcagcacgagccgtggcggcctggcgctgagcccgccgccggggctggggcgggccctgctcccaccaccgtcgacgaggcatccatggagcggagcatgagcttcgtcaaggcgcttcaggagctcaagaacctgcgcccgcagctctactcggcctccgagtactgcgagaagtcctacctccgcagcgaacagaagcaagtggtgctggacaacatgaaagattacgctgtcagggccctggtcaacgctgtcgaccatcttggcacagtggcctacaagctgacagacctatacgaagagcaggcttcagaaataacaac

SEQ ID NO: 271154 - DNA, 698 bp, Zea mays
  unsure (1)..(698): unsure at all n locations
cccacgcgtccggtcaaaggagaggaagatcatgtacactagtgaactggagaagaaggtccagactctgcaaacggaggccactacgctgtcagcacagctgaccctgctccagagggatacaactggtttaactgccgaaaacagagagctcaagcttcggttgcagtccatggaagagcaagctaaactgcgggacgctttgaatgaagccctgcgagaagaagtccagcgacttaagattgccgcaggacaagtcgggtacatgaatgggaaccccttcaatggtggactccagcatcagattccatcctatttcgtgcagcagcagcagcagcagcagatgtcgtactttggtggccaccaggctcagcatcacagtcaaaatcaaaaccatcgtcaccagatctgatcaaatgtggggcagacgctcagtggtcagtccctaaacgactccatggatttcatgtgaggagtacaatatcagggccagtactacatcgtataccgtaaagatagctaatgtacaatgtatgcatgtgcctcattggtagtgtgtagttagctcttcttgtatcattattctgaaaatggtctcgngtatagcaaaaatgatgactctattcttcttggtcgtttctggagtaatgaatagactgactagctactttaacaattatgtaatcttagctttttgt

SEQ ID NO: 271155 - DNA, 450 bp, Zea mays
caccaggctcagcatcacagtcaaaatcagaaaccatcgtcaccagatctcatcaaatgtggggcagacgctcagtggtcagtccctaaacgactccatggatttcatgtgaggagtacaatatcagggccagtattaccatcgtataccgactgcagttcagcactgtaaagatagctaaatgtacaatgtatgcatgtgcctcattggtagtgtgtagttagctcttctttgtatcattattctgaaaatggcctcgtgtatgtcaaaaatgatgtctcttttcttctttgctggtttctggagtaatgtgttagactgactagctacctttaacaatttatgtaaatctttagctttttttttaatggtggaaggttcttatacatacatacatacctgttaacttatttacagagtggagtttataagattttaccattttttaac

SEQ ID NO: 271156 - DNA, 370 bp, Zea mays
cgggagctcaagcttcggctgcagtccatggaagagcaggctaaactgcgcgacgctttgaacgaaaccctgcgggaagaagtgcagcgacttaagatagctgcaggacaagtcgggaacatgaacgggaaccccttcaatggtggactccagcagcagattccatcctacttcgtgcagcagcagcagatgtcgtactttggtggccaccaggctcaggctcagcatcacagtcaaaaccatcatcaccggagtccatcaaacgggagacagtcgcccagtgatcagtccctaaacgactccatggatttcggttgatgacaatataccggggctagtcatacatcgtataccgactgccagtcagcac

SEQ ID NO: 271157 - DNA, 1542 bp, Zea mays
ctgacattggttcatcttctactgtgtactgttcataatattacctgggctaggttttgaccggcccattcttgttgggccgacaaggattgtggaaggaatgggcggcccaggtttgcagctctgagtctctgaccgatcgctggcgtgcgtgcttgtgcttgtgcagggagtgacgaagcagatcggtggctcagtgcacgagctggcggcgaaggtggacgagtacgcccgcggcatgatcagcgggcccggctcctcgctcttcgaggagctcggtctctactacatcggccccgtcgacggccacaacatcgacgacctcatcaccatcctcaacgacgtcaagagcaccaagaccaccggccccgtcctcatccacgtcgtcaccgagaagggccgcggctacccctacgccgagcgagccgtcgactagtaccacggtgtcgccaagtttgatccggcgaccgggaagcagttcaagtcccccgccaagacgctgtcctacaccaactacttcgccgaggcgctcatcgccgaggcggagcaggacagcaagatcgtggccatccacgcggccatgggcggcggcacggggctcaactacttcctccgccgcttcccgagccggtgcttcgacgtcgggatcgcggagcagcacgccgtcacgttcgcggccggcctggcctgcgagggcctcaagcccttctgcgccatctactcgtctttcctgcagcgcggctacgaccaggtcgtgcacgacgtcgatctgcagaagctaccggtgcggttcgccatggacagggccgggctggtcggcgcggacgggccgacccactgcggggcgttcgacgtcgcgtacatggcctgcctgcccaacatggtcgtcatggccccgtccgacgaggccgagctctgccacatggtcgccaccgccgcggcaatcgacgaccgcccgtcctgcttccgctacccgagaggcaacggcgttggcgtcccgttgccgcccaactacaaaggcactcccctcgaggtcggcaaaggcaggatcctgcttgagggcgaccgggtggcgctgctggggtacgggtcggcagtgcagtactgcctgaccgccgcgtccctggtgcagcgccacggcctcaaggtcaccgtcgccgacgcgaggttctgcaagccgctggaccacgccctgatcaggagcctggccaagtcccacgaggtgctcatcaccgtggaggaaggctccatcggcgggttcggctcgcacgtcgcccagttcatggccctggacggccttctcgacggcaaactcaagtggcgaccgctggtgcttcctgacaggtacatcgaccatggatcgccggccgatcagctggccgaggctgggctgacgccgtcacacatcgccgcgtcggtgttcaacatcctggggcagaacagggaggctcttgccatcatggcagtgccaaacgcgtagaacttgtgctgatctgggcctatagagatgattgtacattttgtcgttaactagagtgtctg

SEQ ID NO: 271158 - DNA, 1773 bp, Zea mays
ctagttctagatcgcgagcggccgccctttttttttttttttactttgaactcggaacaaccctgaagtgattaactgagtgaatgctgccaagttatatcagcaagcgcaaggctaggcatccacttgcaagttacaacagcatttagattataacacaagatggtgaaaaaaaatacaacaatggacactctcctaacgaacaacaccaaatctcaggtattcagcagcagcagcagcatcaggcagttgttagctggagtctatacccgaaacattaagcagcagcaacatgaaattgttaacaggagcctatacccacatcttctttgtggcttccatccgctcgagcaagccctggatttcggtctgcatccgcagcttcatcttgtggtagtcgtagtgcgagttctcgagcgtcttcagctcttcaactttcttcctcctcttctcctccgtctcctggaagcacagctttgccaccttcgtggcgtactcctcctctagtttctgggtcttggtgcggacgatctgccggtagctgtctacctccttcctggcatcatcggccagtttctggaacagtttcgcctcagcttccttgcacttcacgatggtctcaaggctggatgagtcgtcgtccttcgagctggagctgaaatggggttctatggagagtggttttgggctggccttgagcacatcgatctgtgaatcaagaatggaggtgctgggcttgaagttgaacgaggactttggtggagtgatggttggggtctgaagatggagcatatctgtagatttgcttgtctgagccgccagtattccttttgacttgctaccagtaacagaacagtctgttacaccatatttaaagaattgtagcatggtgttcgtcgcatcaggaggagaaatgagtttctttacaagcatgctgaggacctcttctgccttggcatggagccccttcccctcgaaatcctcactagcagcaaatatcttcctaacaaagtccagctctttaatctgtgtctcagcactccagttctgagcacagcaattgaacacctccttaacaaacccaaacatctcagaagcatggttgcagccgaggcactggaactgcatctcggtcgtgcccatcgcccccttcaatgtcggacctggccttatcaagttcttctctagcgcgcatgcagcatggcaccaatgggagcagacatcacatccaacccagctgcatgtattcgcagcacaatcaaacttctggcacaccgggcacatacacgcactgcagaagcccttcttggtggagcaaatcttgcactcgcagtcgtccacagggacggcactcttgcagttcaggttgcggcaccgtgtcatcagaaacatctccacaagctcgctgctggagactcggcccttaccagtgacaaaagtggccatgccggttttgatggccaccaggatctccagctgcgtcttgtttgcccgccccaacacctcggcagtcaggtccgagcgacgctccagcttccgctgcaggctcgacagttcatccctcttctccggagcatcaaccataccccgcactgtctcccgcagcacctccagggtttcactcggaaaatcctgcagggcctgagccatggctggcacagggtccgacacgatctcccgcaggatcctatgaggccgtgacgagtgcatccctccatggctggcgtcaaagctggcgccagcgctgagcgcggctgccatcctggcggggtg

SEQ ID NO: 271159 - DNA, 795 bp, Zea mays
  unsure (1)..(795): unsure at all n locations
ccctcgcttccgggccgcccttttttttttttttttttgttatcagcaagcgcaaggctaggcatccgcttacaagttacaaaagcaggtagattgtaacacaagatggtaagaaacataacaatgggcaaactctcctaatgaacaacaccaaatctcaggtattcagcagccgcggcagcagcagacagttgttagctggagtctatacccgaagaaattaagcagccgcaacatgcaattgttaaccggagcctatacccacatcttctttgtggcttccatccgctcaagcaagccctggatctcggtctgcatccgcagcttcatcttgtggtagtcgtagtgcgagttctcgagcaccttcagctcttcgactttcttcctcctcttctcctccgtctcctggaagcacagctttgccaccttcgtggcgtactcctcctctagtttctgggtctttgtgcggacgatatgccggtagctgtctacctccttcntggcatcatcgcccagtttctggaacagtntcgcctcagcttccttgcacttcacgatggtctcaaggctggaggagtcatcgtcctttgagctggagctgaaatggggttctatagggagtggttttgggctggccttgagcacatcgatctgtgaatcaagaatggaggtgctcggcttgaagttaaacgggggttttggcggagtgatggttggggtctgaaggtgaagcctatctgtggatttactctttgacccccgtttcctttgactgtaccagtaccgaacagtctt

SEQ ID NO: 271160 - DNA, 593 bp, Zea mays
  unsure (1)..(593): unsure at all n locations
gaatncccgggtcgaccgcacgcgtccgcccaattcgaaatcgaatcgggtccgacgggtcggtcttgccgtgcgtgcgtggctgcgcgagcgactcgactgcacccccgctcctcccagtccccacacactgcgcgccgccgccgggtcctcctagggtttcgccgcgatgtcgctccggccgagcgagcgggagcagatgcggaagggcaactacaagcagacggtagacgcggaggagagccgccgccgccgcgagggccagatggtggacatccgcaaggccaagcgcgaggaaagcctccagaagaagcgccgcgatgggtttcccgcctccgccgccggtgtgccgccgatgggccactccaccgcgctccagcagaagctcgatggcttgccggcgatggtgcaggccgtccactccaacgacccctccgtgcagcttgaggccaccacacagttcaggaagctgctttctatagagcgtagtcccccaatcgaagaggtgatcagcacaggagtcgtgccccgattcattgagtttcttacacgtgaggaccatncncaactccagtttgaggctgcatgggcac

SEQ ID NO: 271161 - DNA, 473 bp, Zea mays
gccacgcgtccgcggacacatcgagtcgggtactcgggtcggtcttgccgtgcgtgcgtggctgcgcgaaccagcccacgctcccactccccgcccgccaccgccgggtccctctagggttttgccgcgatgtcgctccggccgagcgagcgggagcagatgcggaagggcaactacaagcagacggtggacgccgaggagagccgccgccgccgcgagggccagatggtcgacatccgcaaggccaagcgagaggaaagcctccagaagaagcgccgcgatgggttccccgccgccggcgccgtgccgccgatgggccactccaccgcactccagcagaagctcgatggcttgccggcgatggtacaggccgttcactccaacgaccccactgtgcagcttgaggccaccacgcagttcaggaagctgctctccatagagcgtagtcccccaattgaagaggtgatcagcac

SEQ ID NO: 271162 - DNA, 757 bp, Zea mays
cccaagcgcacagccagttgactcaagcgccatacctctgctccatagtgggcacccgtgtgtcacgggcacgacgagattcggcggggatggcgcggtggcgggcgcggcgcctgctgcctctggccaccttcgtcacactcggcatgatccttggatctttgcttcagttagcacttcttcatcgactagatggctattcagtgcatgcagatagtgatccagaggctgttcttcttcgccttggatatgtgaagcctgaagttatcagctggacgccaaggataattgttttccataattttcttagttcagaggagtgtgattacctaatggcaattgctagaccaagactccaaatatccactgtagtggatgttgcaacaggaaagggtgtaaaaagtgatgttcggacgagttctggtatgtttgtgaattctgaagaaagaaaatctccagtcgttcaggctatagagaaacgaatatctgtgttctctcaaatacctaaagaaaatggggagctcattcaagtattgaggtatgaagctagtcagtattatagaccacatcatgattacttctctgacactcttaaccttaagcgcggagggcagcgtgttgctacaatgcttatgtatttgacagatggcgttgtaggtggtgaaactcactttccgcaggcaggagatggagagtgcagctgtggaggaaacgtggtcaaaggattgtgtgttaagccaaacaaaggggacgctgt

SEQ ID NO: 271163 - DNA, 449 bp, Zea mays
gtaaaaaaaatctttttatatatataggtgcaaaacctcttctcggcttcgagggagtcaagcagaagcagaagcgctgaagcagcgcgtttgcagactgcaaagacccctgtgaatttgtgatgtactgaggtgttgtccagccaacagtccttgctcccaagattcttccgtactcccccctccatcggaccatcctctaccatagatctcccgaactccgccgtaatcgggacgaatcccgcgcgtgctcttgctccctgtcgttctccgcggccggcgcgagctgccggtggttcgttgccgtcgacctcgtctggccgctcctctgccctgccagctgccggattcctgctgctggactggattgctgcgcgtggagtcgtgagtatagctccatctatcctgactgatacggatcgacctctcctctcgtgggtttttgggtt

SEQ ID NO: 271164 - DNA, 379 bp, Zea mays
cgaagtctgccccgctcttcggcctcgtcccttctctccaggtgagcgctggatgaacctctgctcggctttctgcgttgcgctaatcgattgctggatggtcgccagtctgatttgatgaaacagaagttggggaaattgaggatctccttagggccatggatgtagatgatgtgctcagtaacttgcgtgttgttggtgtgccaacaaagagtgcaatttacatatggggttataaccacagtggccagactgcccgaaagggcaaggaatgccacttgaggatccccaagagcctccctcccaaactattcaaattggggaatgggaagagcctcaggtggaccgatattgcatgtggccgtgagcataccgctgc

SEQ ID NO: 271165 - DNA, 1927 bp, Zea mays
  unsure (1)..(1927): unsure at all n locations
gcaaatagaatttgaatctctatgctctagttttgatggacatcagaatgtgggcaggcgtatcttgaatgatttctcaagggcgtctgctgatcttgctgctactgctgctgatttgaaagttagacttcagatttacaaggtccgtcttctactgctcactaggaaccttaaggttgcgaagcgagaactcaaagtactaatgaacatggcacgtggtagggattcatctacagagcttctcttgaaatctcagctggagtatgcccgggggaattataggaaggctgtgaagctattgagcacaccaaataatcggactgaaccagcaatgctagccattttccacaacaacatgggatgtatactccaccaacagagatcgtatcacgcctctatatggtgctttagcaaagcgctgaaatacactttatcacttcgttcagagaaaccaatgaagctgtctacattatcacaagacaagtcttgccttatttcatacaactgtggtatccaacatttgatgtgtggggaagcctttgttagcagcttcttgttttcgtgaagccatgccgctcttctacaagcgaccccttttctggctccgtttttctgagtgcagcctgctagctctagaaaagggtctcctgtgtgcaaatggtgcttcctcatgcaacgatgagattgaagtcattgttgtggggtcaggacaatggaggcagttgattgtcaaccatgtgagcttgagaagtaatttaggttgtgcaggtgtgacttcaggtgaacataaaaagttggtttcacttggatttgctagacagtgtctactcaatgcgctgctactattgaatgctactgaacaggaaaattgggtaaccacatctaatgcagaggattgcgtccaaggaaccgtacatggatataaaagctcaggccagaagaacactacaagtacggattctaaaacaccttctgccccaactctagctaatgtaaatggtgaacaaaagggaacaagcttgaatgctaccttgcagagttctcttgctttctatgacgagatccgtagaaaagagtacctcaaaatcagacaggctgtcctggcgaacttggcgtttgttgaattgtgccttgataatcccttgaaaactttgacgtatgcaaagtcagtactgcaggtgacagactgttccaggatgtatgcgttcctcagccatgtatacgcagccgaagctctgtgtactttgaacagaccaacggatgctgctgagaagctatcagtttatataagagatggcaatgatatcgagttgccgtataatagtgtggagaattctgaaaaggccttggttgagaaagacagtgatggtgaagacttggttgctcctgcagtgacaaaactcgccacagaagaacctgagcagctcaggccggaggaggcccgtggtgtcctgtatatcaaccttggcatgattgctgcaaggcagggagaagttgaaaaagccaactacatggtgagccgtggcctggcgatgttgcccaacaacccccgggcagtgctagcatcggtttacatagacctcttgcaagggaagtcccaggaggctgtcgtgaagttgagacactgtaggaatgtgagatttagacccggtagcatagcagccagcagctgagcatagagaagcctcacttttcatggtttctgtagtttacaattaccatcatgatatttttggacgctgaccccaatgtggatgatcaaagatggtaatgttcctcctgtgtaccatacatacgaaatgaactgtagcactgcccttttagcttcaggggtcaaatctcaaatgtgttgtaactgtaccggtttaatttgcctctctctggactgaagagaggtcaagtgatcanaaacgtttcctatgttaaa

SEQ ID NO: 271166 - DNA, 418 bp, Zea mays
gcatcggtttacgtagaccttttcaagggaagtcccaggaagctgtcgtgaagttgagacggtgtaggaatgtgagatttagacccgctagcatagcagccagcagtcagcagtcgagcttagaaaagccctcccctttcatgatttctgtagtttacaattaccgttataatcttttttggaccctgaccccaatgtggatgatcaaagatggtaatgcttctcctgtgtaacatatataagaaatgaactctaactccccttctagctccctcccagattcaggggtggaatgtgttggaactgtaccgttttaatttgcccctctttggactgaagagagccaagtgatcaaaatagtttcctatgtttattcaagaatttggaaaataatgtgcagtcagcagctgttcctctc

SEQ ID NO: 271167 - DNA, 1603 bp, Zea mays
tgagaagttctctgttcactctttgggactgccgtctcttctctctgatccaagtgcgaagacacctgaagaagctcttgtgcatatctttggggaagccaagagaacaaccccgtccattctatacatacctcagttccatctttggtgggatacggcacacgaacaactaagggctgtgttgttgactctgttgaacgagttgccctccaaccttccagttttattgcttggaacatcatcagtggtttttactgaccttgaagaagagtgtgcttccatattctcttctcgcaatgtgtatcaagtggatcaaccaagttttgacgatagattgaggtacttcagtatattgtttgagtcattgctctctttccaaatggaagaatcaagaaacaagtcaaagaaacagaagtctgctattgaccttcccaaagccccgaaagaagtggagggccctaaggtttctgagctaaaggctagggcagaagctgagcagcatgctgttcgtcgaatgaggatgtgcctccgagatatctgtaatcgcattttgtacaacaaaaggttcaatgtatttcacttcccagtattagaagatgaggtgcctgactatcgatcaataatccacaagcctatggatatggctactgtcttgcagcgggtggactctggacagtaccttaccagggcagcatttataaaggatattgatcttattgtctcaaacgcaaagacttacaacggggatgactacaatggatctaggattgtcagtagagcatgtgaactcagagatgtggtccaaggcatgttgtcacaaatggacccatctttggtgtccttctgtgataaaattgcttcacaaggggggccactgcaggctgtggatgatgaagatagagctattcttcaagcagcacctgttgctcagctggtttctggtactagaataagtgcaaggcttcgaaatgtacagcctgaagtaaacctgtcacaaagttatgaagtgctaaggcggcaaaagaaaagtgcagaaaatgaacaaagcatgactagagatgaaaagtctcctgaagatgtagatttgtcgaagccaactgacgcagaagaagctgcaaaagaaccagagtcaaatggcactacgaaagaagccaacgattcaccagccaaagaaccagaagtatctacttcccctgaacccatggagagtgacaacggcaaaattgccgcggctactggcgacgacttgttagaacagctagaagccctgaagcaacgcttcatggaactcactgcaagctatggcgtgccgcagctcgagaggctgtattccaagataatgaaaggagcaatagagttgacaagtaaagaaagcaacgaggatcataggcggttagtagttaggtatttgtggacattcgttgaggccagcaccaatttttaacctggcgccaataagattcttgttttccttgtacatcctctttggaacgaaacaatagtagccgttcatcttgggagttgtccccgttccatgccttgtgacaaatcttccaaatgctctagtgtcagtaccccccttttgcttttaaatgatccccct

SEQ ID NO: 271168 - DNA, 576 bp, Zea mays
agctgcccgaggagcttgccttggtggtggtgtgcctcgaatgcgagacatcggccgaagcggcggtgtcgggtgttggcgggacctgccgcgtctacgtcgtcggcaccgctcatgtgtcgcaggaatcatgtgatcaagtgaaggccatcatcaactacctcaaacctcaggctgttttcttggagctctgtatgagcagggttgcaattttgacaccacaaaaccttcaggttcctactatgaatgaaatgattgacatgtggaagaaaaataagatgaacacttttggaattatctacagctggtttcttgcaaaggttgctagccaacttgaggtgttacctggagctgagttccgggtggcatttgaggaagcaatgagctacggtggcaaagttctcctaggagaccgccctgtccagatcgctttgaggaggacctgggggaaaatgtcactatggcacagggcaaaatttctgtactacatcattttccagtctgtatttttaccaagcccagaggaactgaataagatgttaaaggacatggatgatgttgacatgctaacacttg

SEQ ID NO: 271169 - DNA, 549 bp, Zea mays
  unsure (1)..(549): unsure at all n locations
cgcgttttcaccaccaaattctaaaccgcaatcccgccgcaatccgctccccgcgcgcgaaatcggctcacgcgtcctccgcttttcggctcacgggtcgctgaattgctctttctgctcgctcgctcgctgacttccactcaactgctcgcctggccgcctcctgctagtgcttcaatcgcccggcccccactcgcttgaaggcttccggaagctcgatcccttccgctcgctagctggctgcacagatcttcctcccgaggttcctctttctaccgtcgagtcgaatcggatcaccggagctatcggattcctcaaaatccgagactttggccgcccgccaccccgtctcagtggcggagctgctccgtctggtccgcctctgcctctctggcttgggggcgctctagggttcccgcgcgcgcgccccgtgatgctcgggaatggcgcttaaagccacggcgcanggcgccgcggagcggcccgagccgccatcggccggggctacgacgtttgttgcgacgttcggcttaaggactgcaagggcaa

SEQ ID NO: 271170 - DNA, 443 bp, Zea mays
  unsure (1)..(443): unsure at all n locations
ggggggctcgtgggctcgtcggcgccctccgctaggcacgcccgggcacccatgctcgaccagagccagatgcacctacagagcttgatgagctcgctggctgatgccggcggcatgttcggcggcgccaacagcggcagcatgattgacccgaggatgtatgacatgaaccaagatgtgaagtttagccagggccgtggtggcgctgagatgacgcgcgacttccttggcgtcggcggcgatggtgtcatgagaggcatgacagtggcgagagcggggcaccaagacggtgccggtgacatgagctccttggaggccgagatgaagtcggcctcgtcgcccttcactggagacaggatgcaataagagttcccaataagagaaccttgtgtgctcgcatagtgagcgagtcctgtgcagcctgccatgcatgcacncatggg

SEQ ID NO: 271171 - DNA, 574 bp, Zea mays
taaggatctacaagaaagaagtgctttcatactagacattttcttacagatgatttacttcctgtgcatgtctggaaatatagacaaggcagtttctaggattattggaattcttccaactgcaatgcctgataattctggtgacaagttgcttgctgatgtcatttcttgcttgaccatgtccgacagctgcatattttggatttcgtgcctatatgtcttaatttacaggaaccttccagaggaaattattgatcagctggagtttcagaaagctttacctcgtgctttaatatggccttctattgatcccagtgtagacaacagagataagattacagatcttctaaattttgctgcttgtaagatggctgaagatattagtgagtgtgttaaaaacggggatccatcttacctgatgttatcacaattcctcgctgttaaccacattagttgtctagcggccattggaggcttaaaatcttctgttgatatgctggtgacctacatgaaggagtacccaatgtgtcctcagattcttctgatctcagctcggttagacagaaagcatggt

SEQ ID NO: 271172 - DNA, 1131 bp, Zea mays
ttctttattcccttccctgctcctctaccccggcctctcccggtgaccagctggcctcttctttgttgaggcgagagacccccacccgatccggcgatggacgccgcgtccaggccgcctccgccccacggagcaggggtccgcgtccgcgccccgctggtggagtctgtctcctgctactgcagattagatacaggccttaaaactgttgttgaggccaggaagtttgttcctggcgcgaaaatgtgcatgcaacctgaagtcaaacaaaacaagcgcaagtcaaggggctcaaaaaaggaaaggtgcaggactcaagcaccacttttacctggccttcctgatgatcttgctattgcctgccttatacgagttcctcgacttgaacagcccaaactcaggatggtttgcaaaagatggaaccgtcttttgtctgggaattacttttactccttgcgtaagaaaattggagtggcagaagaatgggtgtatgtctttaaaagggaccgtgaagggaagatatcctggtatgcctttgatccactccaccagctatggaagtcactcccaccagttccacaagagtattcagaagcattgggctttgggtgtgccgttctgagtggttgctatctgtacttgtttggcgggaaagatcctttgaggggttctatgaggcgtgttgtattctacaatgctcgtacaaacaaatggcaccgggctccggatatgatgaggaaacgtcacttttttggttcttgtgtaataaacaattgtctctatgttgctggaggagagtgtgaaggaatacagagaacactgcagtctgcggaagtttatgatccaaataggaacagatgggcctgtgttactgaaatgaacaatgggatggtgcctttcattggagatgcatatgatggcatgtggttcttaaaggggcatctctggcttcctttctcctctggcgtagtttaataccccccatccaatacatggtcagaaattgatgatgagttatttgttggaacggaatgtttaattatctgtctaaacggccggtttttttcagagtataatgaatgaattgaaaaactattattcttttatttgaaccccatgtctttttggcac

SEQ ID NO: 271173 - DNA, 558 bp, Zea mays
ggcagagagagttttcatccggcagccgccgagcctgagatccctgcaccgccgcccgccggcccgccggaatggagttcgccttagtcgagagtgaatcgttctcgccttcctgccccacgcttaccatgccagcgctgtcgattggcaacgtggggcagctcgccgtcgaccttctcatatcctcgtcgcgggcgaggcgggtggcctacctcgacgagccctccgtgctgccctgcgccggcaacgacgccttcggccctgacgccgtcggcgacctcgcactcgctctcgaagcttatgaatctacatctcataagctgggtttcattcagcaaaggtctccagttactacaggaatgatggtttcatttgcaaaaaatgttgctgatttcataagcagcatcgggaagaaccatattgtcattatatcaagtttagattctggaaagaggagagtgattgatgcatccagtgacatgcaggtgtattacctttcaagttgcaatgaagatggttctgatccagaatatgagaaattggggtggaaaaagcttg

SEQ ID NO: 271174 - DNA, 407 bp, Zea mays
gcacaccgcacacccaatacggaaagaccaccgcaaacgccaccacgcccacgcctcgccgcgctccacatctgaaacctccagcccgacgcccgcgccggcgccgctgctcgcctgctcgtcacatttcctggtgcccgccaagccccgcgacctgggctccccagctccatccatcaaccgcctgcagccgcggaaatggcagcgccgacgacgctgcgctcggcggcggcgcgggcgcgcgcgcgcgcagcggagctcgtgagagggcggtcgccgcagcggcgtctggggacgacgtccgcggcggcgacggacagcaagaagaatgaggaggaggaggaggaggcggccgggtgggagctctcggcggcgcgggagtactacgactaccgcaagtctatcta

SEQ ID NO: 271175 - DNA, 710 bp, Zea mays
ttctcgtttcaccgtgcgccacaagcacacaactagggcgaccgccgccgacctacggccagctgtgcccatgtcttcgtcgggccctttgctggcgacgggaacccaccacaccggccgccaacctgaggttttgtgggctcagcgctccgagaagattttcttgactatctcattgccagatgcgaaagatgttgtgttaaagaccgatcctaagggcctctttaacttctctgctgttgtccatggggaaccttttagcttcactttggagctttttgattcaatactgtcagagggaagtaaaacgaagacaaagatgggcctgcgaaacataatctgctcaatccagaaagaaaagaaaggttggtggaagcgcttgctaaagtcagaggaaaagcatccatacatcaaagttgactggaacaaatggtgcgatgaggatgaagagtctgagttctctggggattcagatggtggctttgatgaggcaaatgaaggagatgaaagtgatgatgatgatgggatgctttatctccccgaccttgaaaagctaaggggcaagtgatctggctgcttcggtgaagggagtagggttgatgtaacaagttaccgttgacgtgacagagtaggcttatcatcgacgtagttggggtcttacttgctgagcatctgcgacggcttgagacttttaggcatgtcttctatct

SEQ ID NO: 271176 - DNA, 643 bp, Zea mays
gttgagtgaggccatggtctccggaaaaaaaaagagaaggggggcacacacgccacgcttacagattgcagtattaataatacttgcaccatgtttggtctatccacagaagaatgatgcaattcatggaaatgctacaaataaacattgcttaatgaagctgttccaaacggcgagaggcgcctctggagatggcggcgtccacgtcttggctttgattaatttcgggcgtcggcaccgggcaggcgctggcatatgcctcgcctacatcaccagctccgacacccaccccaagtccggcccgtcgtcctctgtgacggcaggcagaaccggcgctggcgacgcctgggccttcctgaagctgagctcccgcatcgcgagcatcagctcctccatctcggcgtcggcgtcgccgtccttcgacggctcgtcgacccacctgcggccctccacgggggacaccggcggcgactcccatagcgccagctgcaggggggacttggtcgtgagggcttgcaccagctcgtgcggagagcacgcgtgcttggtctaagccccgactgccgccagtgttcagcactcactcggcagccgtacctttggtgcaatcattggttcaaaccatcagggcacaacagctgca

SEQ ID NO: 271177 - DNA, 735 bp, Zea mays
gtgttcggctcaccgcagcagccgccaaaggacgacgaggatggctccgccggcacggagattggactatggggtgggccgggaggatcggcacaggacatcacgacgacagaggcaccaaggcgtctgaacagcgtcaccattcgcgccggtattgccgacgactcgatcgagttcacttacactggcaaggacaggcagaggcgcacagctgggcgatgggatggacttggcggcaatgttcgaacgatcgatcttggcgacaacgaacacatcacggaggtgtcaggaacgtacggcacatttgaaggtgctactaccctaacctcgctcaggttcatcaccagcaccagagcctggggcccatggggcaccgagaacgggacacgcttctgcatcaccgcgcccatcggcagcagcgtcgtgggattctacggacgcgcgggaaccaggctcgtcgacgctatcggtgtctacctgcgtcaactttgatttcaacggcatgatgcttgatttcaaatagatatattaattagttcctcgtcacagtcgatcctgtgtcaaataataaagaagctcttgtatgcatgtgtatatgttagtccttcgttctgtatgtgtcaaataaaggttgatcaaaaagacctaaaaaacaaaaaatacagctgagcatattaagacacgtataataaagacgagatatatagaacaatgaataaaaaaaagggcggccgc

SEQ ID NO: 271178 - DNA, 620 bp, Zea mays
atccgcaccgacttgcgtgcacgagcttcgcggcgagggcagcaccggggctgggaatgggaagacacggcagcccagctccagcagcacgacagcagtagcgccaccgaacctgaaaacgccgaccccccacgaaatcgcggaacctacccacgagccgagccatgctcagccgactcgccgcggcgaggcgacagctactgctatccccggccgtcgcgtaccgctcctcctcggcagcggcgacggcgtcggcggtccacgagagagcagcgcccgcctcggcctccgtgctcccggacaccctcgaaaggggctccgacgcgtaccagcgcaacacggccgccgtcggcgggttgctctccgacctgcgcgcccgcgtctcccaggtgctgcgcgggggaggcgcccaggcggtgaggcggaacgcggcgcgggggaagctgctcccgcgggaccgcatcgaccgactgctcgaccccggcgcgtccttcctcgagctctcgcagcttgcaggctcagatgtctatgatgaagcattaccatcagcaggcataacaactggcataggacctggacatggacggctatgtatgttaagggccaatgaccaaccacca

SEQ ID NO: 271179 - DNA, 518 bp, Zea mays
  unsure (1)..(518): unsure at all n locations
gcagaatcaatagctgcactagcgcgtattgacactgtgaaacagcgcatggaagccgcatacacaacattgcaggatgctgctgggttagctcagttgagccagagtgttgaggatgtgttttctagtggcaatcttccaaaagctgcagaaaccctggcaactatgagacattgcttgtcagcagttggagaggttgccgagtttgcaaacgtcagaaaacaacttgaagtattggaagaaaggctagatgaaatggtgcagcctcgattagtagatgcactttctaatcgcaaggttgatgccgtgcaagatcttcgtggtatactgatccgtatcaataggttcaagtcactggaagtgcaatacactaagatccatgttaagcctctaaagaaactctgggatgattttgagctaaagcaaagatccagcaaggtagacatggagaaactcagtggtgaaagcattagtggcctctcattctctangtggctgcctaaattctatgatgagac

SEQ ID NO: 271180 - DNA, 385 bp, Zea mays
caccgcctcaccaccagcgttcattgaggaggaaagggaaggaggaaccgtggaacccgtcgcaccgcaggcacaggcaggcagggcagcagatcgcgagttccgacttccgacgcgtctccgaccaggccgccgccatttctctgtctccacacagcgggatccctccgccgatcgccgcttctcccttggtccaccgtccacccaaccatgtataacaattaccggaatcctccggggacgcatatgcccccgcagaattctcaacctgtccagtttgacaatccattgtacggtgcaagcttgggtctaatccgatctgggattggagtgtacggtgagaagttcttgggctctagttcaaagttcattgcaaagcaacatc

SEQ ID NO: 271181 - DNA, 642 bp, Zea mays
ggaggaggggatttctcggggagcggagggtcggccaggacctgattgggctccagggcgcgatctttgagcgcagatttggtgcccgcgatctgccatggatttgatttaagatttagggagatcggtcgtgttcgcgtcgcgctgcgagattcgattttttatgcctgttttattcacgagattgcaagaacgggactgctaagcaagctaaggtctcattttttttctggatcaatctcaaattaggatttaggaggaggaaataaagcaagaatagaaagcttttttttggggtgaagccatgatgctggaagggaagtcctaccttgttccgcgctccctgctgagctcctgcgagacggagacgcagtgggcgtacctcgctcacgaggtcctcggcggcaagcgcccggcgccggaagacgtcgaggtcgaagactcggacgaagctgacggcggcggcaagcgcagcaagccgccgtctccgcagccgcacacgccggacatctccgagggtcgcggctccagccgccatgcctccggttgcggagagcagcagggcactgggagcaaccccatgaattcaatcggccgtgacctgaccctcaattgcctcctccggctatctcggtccgacta

SEQ ID NO: 271182 - DNA, 535 bp, Zea mays
gccatcagcatcgtcacagacaccagagtcagtgactgcatctaaactgtgagatgtgtgcaagattgggtttgttgtatttggagttcctcatagaaaaatcatacatatgctctagagttcctcatagatttggtgcccgcgatctgccatggatttgatttaagatttggggagatcggtcgtgttcgcgctgcgagattctattttttatgcctgttttattcacgagattgcaggaacgggactgctaggcaagatgagtatacctgaaatttaggtctagaaattcactgctatcagtctcagaataggctaggttgaacttatacatgagatatccacaggtccaggtgcattgtttgaatttgattagaaatgtgtaaaggtaagtcttataaaaaaaccacctaaaaagggccaaaatttggatgtaccttctgggttattgaccccaatatctttattactatatgtgcctggtttgcttaaaaaaaaaaaaaaattaaaaaaaaaaagggccgcccgtttaaaa

SEQ ID NO: 271183 - DNA, 377 bp, Zea mays
gggggacgggagaggccgtctgccaccaggccaactaccgagtgggggaggaccgggaaaccggaggaggggatttctcggggagcggagggtcggccaggacctgattgggctccagggcgcgatctttgagcgcagatttggtgcccgcgatctgccatggatttgatttaagattgcaagaacgggactgctaagcaagctaaggtttcattttttttctggatcaatctcaaattaggatttaggaggaggaaataaagcaagaatagaaagcttttttttgttgggtgaagccatgatgctggaagggaagtcctaccttgttccgcgctctctgctgagctcctgcgagacggagacgcagtgggcgtacc

SEQ ID NO: 271184 - DNA, 414 bp, Zea mays
gaggatgtcaagactccatcactgggctggatgattggattcatgttcgttgttagcttccttgggccgtttagtcttgttgcactacgcatgtgttatggtaattgattacaagctgacttatcccagtgggacagccacggctatgttgataaatagtttccacacaactactggagctgagcttgcagacaagcaagtcaggtgtcttgggaagtacttgagcattagttttatatggaactgctttaaatggttcttcagcggtgttggagattcttgtggtttcgataatttcccttctttgggacttgcagcatttaagaataccttttattttagatttcatatcctaccctattttggatgtggtgttaattgtccacaatattgttaattgttatacactatatt

SEQ ID NO: 271185 - DNA, 1597 bp, Zea mays
ctcagattgcgagactgtacactgtagagagagacgtcgtcggcctgagcgccgtgcaagcaagcaagcggcggcaatggcggcggctcttcaagccacgccgatcaaaaccctagccacctcccgctggcgcgtcgaaggtgcggaggcgcggccgcggccgcggccgattgcggtgagcttccgttgctccgcggcggcgaggagctacaacatcacgctcttacctggggaccgcatcggcccggtggtggtcgccgccgccaaggacgtgctatccttcgccggagccctcgaaggcgtcgagctccggtttcaggagaagctggtgggcggctcggcgctggacgccaccggcgtgccactccctgacgagacgctcgacgaggccaagggttccgacgctgttctcctcggcgccattggaggctataagtgggataccaatgagaagcacctcaagcctgagaccgggctgctgcagctacgtgccggactcggggtctttgccaatctgcgaccagctgcagttttgccgcagttggtagacgcatccactctgaagaaagaggtagctgaagggtgttgacatcatggtctgtcagggagcttactggaggcatctacttcggcaaacccaggggttttggaacaaatgacaagggagacgatattggcttcaacacagaagtttattcagcttctgagattgatcgtatcgcacgagtcgcatttgaggttgctcgcaagagaagagggagactatgctcggttgacaaagcaaatgtcttggaggcatctatgctttggaggaaaagggtgactgcactagcttcggaattccctgatattgagctctcacacatgtatgttgataatgctgcgatgcagcttgttaggaatcctaagcagtttgacacaattgtcacaaacaatatttttggtgacatattatctgatgaagcatcaatgattacgggaagtattggaatgctcccatctgccagtgttggtgaatcgggacctggtctttttgaacctattcatggctctgcccctgatattgctggacaggacaaggccaatccattggctacaattcttagtgcagcgatgctattgagatatggcctaggagaagaaaatgctgcgaacagaattgaagctgcagttactgaaacactgaaccatgggttccgaactggggacatatattctcctggaacaacattggttggatgcaagcggatgggggaagaagtcctgaagacagtgaactcactgaaggaagtggctgctgtaaactgatgcatgttggtacttaatttataaccctacaggatgagatggttgaaagggacttgcattttattagaagttgagcctggtgaaagagagcactgcgtctggttttgaatcgcaactgtagcggctgaaccgacggtcttttttcatttctggtgtttgttggccttcctgtaactcaattttgtacaaggaaggataagcatatgtatgataaaatgggatagtttatgccagttgaataaaatatgttctataacttctattcattataagaatgattaacttaaaa

SEQ ID NO: 271186 - DNA, 466 bp, Zea mays
atacctatcttaaatgaatatcaaaacttgttttgaagcaatattctgtgtgaaatgttatttgaccctttctttgaattgaaattccatcttttggttacaagatataaagactttattttctgctattgatatgcaaatattttttagcattatgctgacactagaaaacacctggaaaaggttaaatgtatatggttgtggaccctttttaattgcacattgttaaaagtcaatacaacccttttggtaccttattattgtaggcatctatgctttggaggaaaagggtgactgcactagcttcggaattccctgatattgagctctacacatgtatgttgataatgctgcgatgcagacttggtaggaatcctaagcagtttgacacaaattggcacaaacaatatttttggtgacatattatctgatgaagcatcaatgataccggaaggattggaatgct

SEQ ID NO: 271187 - DNA, 415 bp, Zea mays
gaaaatgctgcgaggagaattgaagctgcagttacagaaacactgaaccatgggttccgaactggggacatatattctcctggaacaacactggttggatgcaagcggatgggggaggaagtcttgaagacagtggagtcactgaaggaagtggctgctgtgaactgatgcatgctggtacttgattcattgcattttattagaagtcgagccgagcgtaagagagcatggtgtctgggttattgttgatgttgaattgaaagtttagtggctgaaccgatagccacttcgcatttctgtggtttgtttgtctccctgtagttttttctttggtacaaggaaaggataggcatatgtttgctcaataaaatgggatagtttatgccgctttgaataaaagatggagttctgtttt

SEQ ID NO: 271188 - DNA, 280 bp, Zea mays
ctcttcgctgttatcctttctcttttaatttattgaatattgtattgctggtatggataatctgccaagaactctgctgatgtactacactaacatgcccttgccacacaggaagtattttcagacagttctttgcaactccgctgaattcaacaagactgtagttaaccatgacctacactattcaacatgggatgctcgttccaaaaacgagccacgcctactgactatagatgatgtagaaaatatgaccgaaagtggtgcagcctttgggactaga

SEQ ID NO: 271189 - DNA, 1259 bp, Zea mays
cactcatcagctattcttctcttctcctggacaactcaagctcaaaacccaaaatcgaccttgtcgacccggatccgagctaggcacccgcacgaccacccgcctcctgccggtcaccgggacctagcatcgccgggcggcggcgggggaggggaaggtaggcgatgaggaaacgtgagcgggagaatccgtgcgggatctgcgggcactaccacaagtacgaggagggggaggtatgcggggtgtgcggccaccgctggaaaccgtcggacggggagggcgccccgtcgaggcacgagtccgccttccccacagaggtgctcaaggactttctcttcctcgggagctacgacaacgcctcacgctccgaggtcctcaggacgctcagtatctcccacatccttaatactgtgcctgattgccacaatctgtacaagaattcattcacatatcacagtcttcaacgggacaggcctttggattttgatgaggcaaaccagtatctagagaaatgtgaaagagataaatcgcgtgttcttgttcattgcatgactggaaaaaacaggtctgctgctattgttgcagccttcttgatgaagtctagagggtggagacttgcacaatcttttcaatgggtgaaagatcgaagaccacaggttcaactgacagatgcttctcagaaggagcttttggagtatgagctgaagcttttcggacccagtactcaaaccttggttcccactgaatcatttgcttctcttggatttggttatacaaaaccagcaggtgacatgcaaacgcctgtgttcaaccaaacgaccatgccatccatattcgagcgattcaacccaaatgatcgccccgccaatttcacttttggagttgagaggaaagcagaagctaaccctcgagataacaatagtgatggcagggtaaacccaacttcaacggagaacctgatggacagctcttaagatgatttcacgatgtcgctgttcaatctccttgttccagaagtaaacccgctgtaatctgcatgtcgcggaagtaaacctactgctcggtgcctcggtgcaccgaatacttatccggtgtctaggtttcagggaggttttgcccttgtcgcatgagaaatggttctctggaaaccgatctttgctttagaatgactgtatgaaatagatgtttgtggctcatctatctgttcctttctcgtatagtttctgattgctatatatgaataaggcatagtgcttacc

SEQ ID NO: 271190 - DNA, 464 bp, Zea mays
cccacgcgtccgcccacgcgtccgcccacgcgtccgcccacgcgtccgcgacccggatccgagctaggcacccgcacgaccacccgcctcctgccggtcaccgggaccgggcatcgccgggcggcggcgggggaggggaaggtaggcgatgaggaaacgtgagcgggagaatccgtgcgggatctgcgggcactaccacaagtacgaggagggggaggtatgcggggtgtgcggccaccgctggaaaccgtcggacggggagggcgccccgtcgaggcacgagtccgccttccccacagaggtgctcaaggacttcctcttcctcgggagctacgacaacgcctcacgctccgaggtcctcatgacgctcagtatctcccacatccttaatgtacgtatttaagccctcttgtctagatgatgcacatcctattccttgtttgtgatcattaaattcggcgtct

SEQ ID NO: 271191 - DNA, 280 bp, Zea mays
gtctctacccccatctgtagtgtggtctgcggccaagagcccggggaaacgatcgagacgatatgtgtgggggagcaatccttgccggactcatcccagcgcgggtgcaccggccgctgaccgccgccacgctctgggcggcggccctgagtgggaccagtaccgtcggcaagtggaaggccgatgcagccgccgctaccgacgacgacgacgacgaagagttctgggccgagtttcagcttttcgactacgattactagtgcgaggccgtgttccagct

SEQ ID NO: 271192 - DNA, 528 bp, Zea mays
ggtaaaagccatattgctacacgagttatgggtacctttggctatgttgcaccggaatatgctaacagtggacttctaaatgaaaagagtgatgtctatagctttggggttgttctgttggaagctattacaggtagagatccaattgattatgatcgccctacaaatgaggtaaacctggttgactggcttaaaatgatggttgccaacagacgttctgaacaagtggtggacccaaaccttgagagaaggccttcgacaaaggagctgaaacgtgcccttttgactgctctgaggtgtatcgatttgaatgctgagaagaggcctagcatggaccaggtggtccggatgttggattctaacgaactcatacctccagaggaaaggagacaccgaccaatccgaatccctgagagttcagaaaccgagccactgcggggcaagaataacagtggcaggagtgatgctcctgagcatgaagcgaggccaccacgacctaagagccgaacattttcgtccaaatgaaag

SEQ ID NO: 271193 - DNA, 1622 bp, Zea mays
cggctcccctacggcccacgccacgtcaccgcggtccgcacgcgccccacggcttccgccgcctcctaaccctagaatcttcgagaagcacccggcgaagagcgcgctgccacggcgctttccggaaacttcttggagagagagagagagagagagacggccccgcagcggcggaggcggagatgggggcgtcggatctagaccggcagatcgagcagctgaagcggtgcgagccgctcacggaggcggaggtcaaggcactgtgcctcaaggccatggagatcctcatcgaggagagtaacgtgcagcgcgtcgacgcccccgtcaccatttgtggagacatacatggacagttctatgacatgaaggagctgttcaaagttggaggtgactgcccaaagacaaactatttgttccttggggattttgttgaccgaggattttattccgttgaaacttttttgcttcttttggctttaaaggttaggtatccagaccgtattaccttaatacgaagaaaccatgagagcagacagatcacacaggtttatggattctatgatgagtgccttcgcaaatatggctcagtcaatgtctggagatattgcactgatatattcgactatttaagtttgtctgcacttattgagaacaaaatatttagtgtccatggaggcctttctcctgctatcacgacactggatcagataagagtaatagaccgcaagcaagaagtacctcatgatggggctatgtgtgaccttctatggtctgatccagaggacactgtagatggttggggactaagtcctcggggtgcaggattcctctttggtggaaatgtggtctcatcatttaaccattcaaacaacatagattacatttgtcgtgcacatcaacttgtcatggaagggtataaatggatgttcaatagcaagattgtaactgtatggtctgctcctaattactgctacaggtgtggcaatattgctgcaatcctagagctggatgagaacctgaataagcaagttccgcgtatttgaagctgctccacatgaatcaagaggtgttcctgctaagaggccagcaccagattactttctgtgatgctacacagcgaacgcttgagcttactgtgctttcaagcgctggacctcatgttgcaagaagagctcaggccctacagctttccagccaggaggtggttttcaggatgtgtaaattgagtgtcatcttctcccttcaggtccatgatttgtaagagagttggattttggcatccagttttttcacagaacatcacccatttgagctggagaaatacgcccttgcgaaggggtttcatgtgatgtgctaaaagtacacgttgtaagatttttttttgcgattgcataccccctagaaaaaccgttcctggaatatgtggcaatcaggaaatgtgtcgatgctctggaaagtgtaggagatttttgtagtagtcatttgcgcgtgctgttagggactagggagcatgtggtcaggggacactagcactagcttgtcggcatgcaatggtgtattgtaactgtctttatgcagcatctctaattcaaatagccaaccacatttgatgtcttcttctg

SEQ ID NO: 271194 - DNA, 820 bp, Zea mays
ctttgttagagagagagagagagacggtcccgcagcggcggaggcggagatgggggcgtcggatctagaccggcagatcgagcagctgaagcggtgcgagccgctcacggaggcggaggtcaaggcactgtgcctcaaggccatggagatcctcatcgaggagagtaacgtgcagcgcgtcgacgcccccgtcaccatttgtggagacatacatggacagttctatgacatgaaggagctgttcaaagttggaggtgtgttgttgctttttattgttggacttcatttggcattagggtgtcttctcgaaagaacatattcagagcatggttgttttggaacttctgtcctggagaagccaatctagtctgtctggcggcaagcgcttattgatacttaacttccactacataacagtggatcacactaaccgtgaactgatttttctgaatggtatatgtataacactggagcatagaagtgataaaatgttaggtatccagaccgtattaccttaatacgaggaaaccatgagagcagacagatcacacaggtttatggattctatgatgagtgccttcgcaaatatggctcagtcaatgtctggagatattgcactgatatattcgactatttaaggcaatcttcttttgatacttcttttaatccaagcaattccatctttcattaaattagatatatgaaatctgtaagcagctctatctgttttttcagtttgtctgcacttattgagaacaaaattttagtgtccatggaggcctttcttctgctatcacgacactggatcaggcaaaactat

SEQ ID NO: 271195 - DNA, 648 bp, Zea mays
tcgtccaaacatccattggcactgaagtcttgtgacattagctctgtctgttcccatcaaatccttgttggtgggagcgatgcatttgctaggctgtacgatagaagaatgcttccaccattgagctcgtgtcaaaccaaaaggaagccaccaccatgtgttaaaatgttctgcccattgcatcttgctgacagtaagaagacatattcacaccttacacatgttgcattcagcccaaatgggaaggaggttcttttaagttacagtggtgaacatgtttatctgttcgatgttgacccagatggtatgagttctagatacacagcagactatgtaagggaacaattatttgtacctccttttcacaaagtatcagcaaaaggacatgcaaaacaaaagaaggcttcagtaaatacaacttaaagaagtttgtctagggtagatatgtgcaagaaatttatgcaagtcgcaacaagatctctggagacaggtaagaacttaatgcttgggattgaagcatgcagtgaagtccttgaatcaatggaacctgatattgacgatgacacgaggcacgagtttttgtgtactcgagcagcattgtacctagagaggagatggataaatgatgtgtacatggcgattcgagat

SEQ ID NO: 271196 - DNA, 483 bp, Zea mays
gtgaaggggcaccacttctaccactactatttgtgttggttaacatgggattcaggagagtcattactaaacctactaaagatctcctcagcagtcatatcttccttgcttctacattctcagttccgctgtccatctacgctttcactctgccactgccgtatatcggtgcggcgtcatctctgccacctggctttgttgcgggtgcagcggtactcaccaccggcttactactatacagcctaccacaggcacaacattatgggaattctttccacaacaagaatgatgactagtcagcattcatttcttcattggtttataatcacccttcactccaagatggtgcgccatctgggttcgaaaggttggagcagaagttctcctgagggccaccagactgttgtatgttgtatgccgcatatcagagatatatacgtatacccccccctatgggtaacaaaatagcatatggatatgctg

SEQ ID NO: 271197 - DNA, 678 bp, Zea mays
  unsure (1)..(678): unsure at all n locations
gcagttaccctttggtgcatttatntggcacaattacattttggcacgaacaactacaacaactgcgtgcgtggcaaaccttgctgtcttactctcagcaaccagcagttaccttttggtgcatttgttggcacaanaacatcagggcacaacaactacaacaactcgtgctagcaaaccttgctgcctactctcagctccaacagtttctgccattcaaccaactagctgcattgaactctgctgcttattggcagcaacaacaactactaccattcagccagccagctgctgcctacccccggcaatttcttccattcaaccaactagcagcattgaactctcctgcctatgtacagcagcaacaactactaccattcagccagctagctgctgtgagccctgctgccttcttgacacagcaacaattgttgtcgttctacctgcacgctgcgcctaacgttggcaccctcttacaactgcaacaattgctgccattcaaccaacttgctttgacaaacccagcagcgttctaccaacaacccatcattggtggtgccctcttttagattgcttatgagttatagttcaataataaagtttttttgatgatgtctgcggcttcccagagttaaaaaggacattttctagaaaaaaaaaaaaaaaaagggcggccgt

SEQ ID NO: 271198 - DNA, 487 bp, Zea mays
tctcgtcggccggcgagcctcttcctcttcctccggtcgctccccttcccatctccatcttgatttcgattctctggtggctgggaaagcctgcgagagcgcgataaccggaaagatctgagctgctgcaaccgatctccggcgccatggggttcctcgaggacttccaagccagtgttgaagcattgccatctatgctgcatcggaactattcattaatgcgagagttggataaaagtttgcatggtgtgcaactagaaaatgagcagcgctgtcaacaagaaatagaggacattaagcatggacttgaatctggaagtattacatatgacccagcaaaattgaaattttccgaagaagcaatggaggagcagaaacattgtgttagaattgctgacgagaaggtggctttagccactcagacttatgacttagttctgctgcataatcatggctcatgacgcctctgcactgttgctaaattgtg

SEQ ID NO: 271199 - DNA, 384 bp, Zea mays
ccggccggatacccgggcgcgccacgcgtccggtcaaatgccaatctttttcttatcagcaaagatgtaatttccactccgattcatgggtcctcgcggccctaagaggctggggtcccaactggcaccaccaagagcctaagagtaagacaggacacagaggagatgcgaggcacacattactttattatgagttggagctttggggccaagtccttatgtggcctcctgctgtggaaagtggaccaggaaccctgaatccccagtcaccttatctgagcccctagacagggtcaggctagaccaagtctctgtaacagcagccacaggggaaggaagaacagacaggaaatggggcaaggctgtcacgcctgcacgctcccc

SEQ ID NO: 271200 - DNA, 449 bp, Zea mays
gcggctggcttcgctttcccttccaggtgtctctcatggtcttagagacggctctgggggggctgaacctggcctctggaaaacaaaagccctcagtggatattacctctgtggtcttaaactcggcgggctttctgatatgactttacctagaaaggtatgtaatgtggttgctggtttttccttctggaggaaactagaagcggatggcctcaccgagtctgaaatgttctccgatgataatgggtattttggtcaagtgcatctatgtgggatgtgaatgctgtgtttgaatggacattcctattatcctggggcactggtaaaggcagctaaaggcagatgaagggcacggaccaaaagttggatcagaggagctcccttgtctgtccagcgtgctgtggaccctggtctggcttggagagaatgtgggcgttttattttccgtc

SEQ ID NO: 271201 - DNA, 488 bp, Zea mays
accggccggaattcccggtccgcccacgccttccggaaaatccttgcaagacagttaagtgggacctgagacaagttctctagctgcctccacaccacacagacacaatgctgccttccctgggcctccccagactgtcctggatgctgctctcctgcctgatgctactgtctcaggtccaaggggaagattcccagcgctctgaaaggatcagctgtcccagaggttccatagcctatgggtcctcctgttatgtcttgtataaagtagccagaagctggatgagtgcaaatattgcctgccagaggagacactcgggacaccttgcgtctgtgctcagtgggactgagggatccttcctggcctccttggttaggaacaacttgaatacccaatcagatgtctggattgggctccatgaccccacagagggctctgagcctgatgctggtggatgggaatggagtagcactgctatgttcaattat

SEQ ID NO: 271202 - DNA, 381 bp, Zea mays
ggaccattagatcaatatacttcagcacccaaaagaacccaatagacaccatgagggcgtgggggggtggcttggttctcttggttttcggtgtgagcgtgacatcgacacatacaagcatacgatgggggtgtgaggcagcgacgcacggtcatctactgatgtacgggcatctgtgaatttgggatcacctgttaacttgggagcatctgtgaatgtcggaccacctgtcgacgtggggccacctgtcaacgtgggaccatgtgtcgatgtgcggtcatctgttgatgtgacgatgccactatgctactaaactactcaagcgtcagggtcatagccagatacacagatgcacgtgtgaacaggcgaatagaagcatgt

SEQ ID NO: 271203 - DNA, 397 bp, Zea mays
gtgcagctgagggaaccgcaccggcagtgtacgtgtgcgttgccaaataaagctgcgactgggcaccgctcgattgtcgtcgcagccgccctcccgccggagatgggtgcgccggcgctgtcgtccgtcgtcgtggtggccacggcggcagtggtttgcctgtgcggggcctttgcgcgggcgcaggacatggacagcgagtgggcgcggccgccctaccgcgggttcttcggcgccccggccgggtcgctgctgccgcagtcggacgtggacctgctgggggtcccgctgaacctggagtacctggagacggagttcttctgctggtccgctctggggtacggcctcgacgccatcgacgccaacctcaccggcggcgggccgccctccatcggcg

SEQ ID NO: 271204 - DNA, 376 bp, Zea mays
tcgctgggtcttcagaccattagctttatctacttctgagcgcagaagaaccccatccaccccgtgggggtgttgctcgttgccctcgctctcctggctctcgctgcgagcgccaccttcacgcatacaagcgggggctgcggctgccagccaccgccgccggttcatttaccgccgccggtgcatttgccaccttcggttcacctgccaccttcggtgcattttccaccggcggttcacctggcggcgtcggttcacctgccaccgtcggtccatgtgccgccgtcggtttatttgtcgtcgacaccatgccactaccctacttaaccggcccggtcttaggcttattcctagccatactcattcccgtgccaac

SEQ ID NO: 271205 - DNA, 1160 bp, Zea mays
gtccgttacattggcagtagctgctcccttctggtgattgacagaggaaaccaagcaattagagagattcagctccactttgatgactgtgtgtaccagtatgaagctggttttcctctaggagtcgcactacttctcgctgccgctttctttggctacatgcttgcactgctccaacgccgagttttagggatgtattcaaatggagatgagcaggaagacgagagcccagtgaaagctaaactatccagcatcccacctccgtaccagaagccactgaagtcttctcttcgccccccgctgattccaaatgatgacgaacccgtgaaacaagaggaggaagaagggctcttcacgtcgattggcaaactcgtgggtgtagcaagatcatcagtcgcagagatcgtcggcgccgcattctccagaaagaagcgagtgaacgttcatcatcatcagctgggtaggccaacctcctggccagtacaagaaagctatgccatcccgcgggacgagaccccaccgccgctggacacaagggcgccgacccctcgcaaaaactacgccttcatgtccaaggagccggagaagatccaccacatccggcacggccggcctcagttacatggctggaccggagaggcagcacctcagcagcagcagccgcagcaggtgcgtcaccaacagtacgtgcaacaccacaggcagtactcggccgggccgcagacctacttacgagccgagctgcgatgcaacgaaggaagatcgtcttcggagccgtgcaggaaggggacaccagccgccgtcccgtggagatcaaggccgtgaaccatggggacgcggcgccgtacgagcagaacgggctgcgattccgcagtagttatagcgtgcgctacaatggcaataactagtcgaggagcacttctgtagctgtaactgtaaggagaggagcgatagagagagcagtcgaggggagtacaatctcctcattgacaagtgcaacagaaaagctggaattttggtagaagagcttggtgataatggtcattggactctttactggcggtgacatatataaatatagcgtgtatttttcttgttcttcttgggtctacttctatttttaataaatcaccttgcgtataggcctatctttaataaaa

SEQ ID NO: 271206 - DNA, 305 bp, Zea mays
gttcaccaccaccagctgggcaggccgacctcgtggccagtgcaagagagctacgccatcccgcgggacgagaccccgccgccactggacacgagggcgccgaccccacgcaagagctacgccttcatgtcaaaggagccggagaagatccaccacatccggcacggtcggcctcagtcaccgggctggaccggagaagctgctgctgctcctcagcagcaggccgcgtcgctgccgccgcagcagcagcagcagcagcagcatctgcatcaccagcagtaccacaacaggcatactcggccggg

SEQ ID NO: 271207 - DNA, 504 bp, Zea mays
tcgcggacgcgtggctgtcccctgggcgcgaaaagaaaccgcatatcagcgggcgctgctcgttctcatcgccccccctcgtctctcgcggagccgaccccgtccccattcggacctcagctagccaccaccaccatggcttcttcgaagaggagatttggtgctgccggcggcgcggacaagaaggatctattccatgtcgtccacaaggtgcccgccggcgacagcccgtacgtcgtagccaagcacctccagctcgtggagaagcaaccggatgtggcgatcgtgtggttctggaaggcaatcaactcaggggacagggtggacagcgccctgaaggacatggccatggtgatgaagcagcaggaccgttccgaggaggcaatcgaggccatcaggtccttcaggcacctctgctccaagcaggctcaggaatccctcgacaacctcctcattgacctctacaagaaatgcgggaaaagtgaggagcagatcgagctcctg

SEQ ID NO: 271208 - DNA, 910 bp, Zea mays
  unsure (1)..(910): unsure at all n locations
acgcgtncgtgtttagatcgcgagcggccgccttttttttttttttttttttttttgaatcgaagttgacataatcccataagctacatgaaccccagtcgttttttgtccacgcgccagatacccttagatttacaatgtcagtggatcggagcccagccaacaagcacatatgctgcgtaatgcaggaaaggacctacttggtttcagtacacaaaagcacacagcggactggtagtctagcgagagtcgatccaagatctgaagaactcgtggagctatttggtgtgtggaggaatcataaaagggctactgattgcgttacctaagctagatctgttagaagctataactgcaaaactaaacctgagattctagatctacttctgatgcttgtgagagactagtgcgcttcgattcttgcatctccacctcaacagagatcacttgttctggcttgcagttttctgtctccatccgtctgagtttttccttctgtatggcacgtagttcatattgtgagatgtaactcttggcgagcaggaagtatatcctccagaactgcttatccttcaggtgccgagggcacagatcataccgaatcttggcgagttccttagctttggatagcacgagcacggcgtgccgctcctgccagctggtgaggtcgccggcggccgcctccgtggagcctccttggagctggagtgcggcggccttgaaggcgtcgggcgagagcgtccggaggaagtcgaggagctgcggggtcacgcccagctcctcgtcctcctctgccgtggcggcggatttgcttgcgccactgctgccagccccgccccggcggcgaaacggccatgagaaagcggcgaaggacatagggatgtcagttgacgcgctgatccgaaaccgc

SEQ ID NO: 271209 - DNA, 484 bp, Zea mays
cccacgcgtccgcttcttcctccatccgcactactgagagcgacaaagctagctctctccagggatcggattcggatcaccatgccgtccaccgtgaactccgcgtccctcgaccagaaccttgagctcgccaagcaatgctcgcgagaggccgccctcgcagggttcaaggcagcagctgtcgcgaccgtcgcctctgcagttcccaccctggttagcgtcaggatgctgccatgggccaaggccaacatcaaccccgctggccaggccctcatcgtctccacagttgctggcatggcgtacttcatcgcggcggacaagaagatcctctcgctggcgaggcagcactcgtacgagaacgcgccggagcacctcaaggacacctccttccagggcaccggccgtccgcacccagggttcttcaggccttgagcgagagaccatcaaactaccgccctagctagctggacgcactagttcgtca

SEQ ID NO: 271210 - DNA, 447 bp, Zea mays
cccacgcgtccgcccacgcgtccgcccgcgcgccccaaagctagctctcgccagggatcggattcggagcaccatgccgtccaccgtgaactccgcgtccctcgaccagaaccttgagctcgccaagcaatgctcgcgagaggccgccctcgcagggttcaaggcagcagctgtcgcgaccgtcgcctctgcagttcccaccctggttagcgtcaggatgctgccatgggccaaggccaacatcaaccccgctggccaggccctcatcgtctccacaggtcctgccctgaaactctccctgatccctctacgacgacctaactagctattactaccaagatgccttcacatgtctttctgggtgtaactaatggcggaatgcctgctttaatttgctccacgaaaactgggtcgtcgtgcagttgctggcatggcgtacttcatcgc

SEQ ID NO: 271211 - DNA, 174 bp, Zea mays
cctcctgcaggttaccggatccggcaattgcccggggtcgaccgcacgccgtccgagttctagatcggctgagcgagccagctctagagagatcccagagcttatcgtacagcgtagccatagcgatcagtcatatgcttcttctatagtagtcatcctaatattcatattcat

SEQ ID NO: 271212 - DNA, 567 bp, Zea mays
  unsure (1)..(567): unsure at all n locations
acccacgcgtccgcccacgcgtccgcccacgcgtccgcccacgcgtccgcaaccagcggagcggaggaggagagactgatccagacgcaaagggcatcgacagagaccgagcccaagaataaatcttgctggatacatacaggaaacagcgcgagggaacgagaagttagtttccatggagaagaagcagaagaagcacgcgcacgcgaggtcaaggagcttcaccggcggcgggctggcctccttcctcaggtccaccgtctcctccttctcctccgccttcccgcccagcggcaggaggtcctccttcaaccaccgcaacgccttctcgggccccatcgtcgtctccatcgtcccgccggaggctcgcggcggcggcggcaggaggaagcgcccggggtacgtgacgcccgagccgtcgtcgcccaaggtgtcctgcatcggccagatcaagcgcagcaactncaggcgccagaagaaggtcaccccgtcgtgcggcaaggcggcngcccctgcccgcttccgcgaggccgcagcggagacaagaagcctgcagcagacagcagc

SEQ ID NO: 271213 - DNA, 500 bp, Zea mays
tggggcccatgttcttctctgtgaaggagacagacacctctcttcttgaccacaagaagaggcagaagcaagagaagtcggcgatggaggaggagatggagaagctgaggcggcagcaagcagaggccgcgcgcatggagaaggagaaggaacgggagaagagagctaagcagcagcaacaggttgctatgcccggcctgaagaagggtgcgacttatctgaggcccaagagaatgggtctgtagataagacctgatataacttaactgtctccggtgattttgttactaggctgagggaacttgtaatgtgtagcctgctcaagcagcatgtaaaacaacacgtcaatgtgaatgtatacaacatcgacatgtgaaaaaatgaaaagaaaaatagagtgttgtcgacatagagtttgattttttgctgagttagctcttaaaagtatgcagtcattatgtttgatatggtatgtcctcttaatgaaaaatatgattctt

SEQ ID NO: 271214 - DNA, 555 bp, Zea mays
gaaaagatcaaatcagcattagaagctgagaaggaaaaaatatcagaaggaagagaagacggcgatggaggaggagatggagaagctgaggcggcagcaagcagaggccgcgcgcatggagaaggagaaggaacgggagaagagagctaagcagcagcaacaggttgctatgcccggcctgaagaagggtgcgacttatctgaggcccaagagaatgggtctgtacataagacctgatataacttaactgtctccggtgattttgttactacgctgagggaacttgtaatgtgtagcctgtctcaagctagcatgtaaaacaacacgtcaatgtgaatgtatacaacatcgacatgtggttttacgtgctgcttgagcaggctacacattacaagttccctcagcctagtaacaaaatcaccggagacagttaagttatatcaggtcttatctacagacccattctcttgggcctcagataagtcgcacccttcttcaggccgggcatagcaacctgttgctgctgcttagctctcttctcccgttccttctcat

SEQ ID NO: 271215 - DNA, 381 bp, Zea mays
cgccgggccacccagcgcgccggagcgccggtaccgctcgccgccgttctggacctggacgccgtccttctggcacttcgggtcgtagcgccgcacggtcacgcccgtcgtgcggtgaggcgtgtgtgcgcgcccgcgcgcttgccggccggcttccctacgcgccagcgtacgccggagatgatgatgactcggccgcgtctgtgtgggcctctggggcttatatactgtcactgtcagattaatttggctaggaaatggcgctggcgtgacattgtgtgctatgcatgtgtgtgactgtgctggctgtgcacggcgcacctttactgcgcgttgttcatagagagagagagaagaaaacgcacataataaaatcaagtc

SEQ ID NO: 271216 - DNA, 500 bp, Zea mays
agttactcctcagcaccgttgctgcattgtggacatgttagctaaagccggcagagtggaggaagcttatgaatttgtgcaggaactgggggaggagggtgacttcgtttctatttggggaacactgctcgcgtcctgcaaagcacaggacaagcaggaattggtgaatttggtgacagagagattgatctgcattgagaagaagtatggccatgctggttacagcgttttgttgtcacatatttttgctgctgagggcaactggagtagtgctgatagcctgaggaaggagatgaggttgagaggattgagcaagatggcaggttctagttggattaaagtccagcatgcagcattgcaaagctaccctaaaaatggccatgaacactcattactgcatgtagttgattacggtagagatgaaatcatctgacatgaatcagtactgcagcagtggaaagcttgctgatctgggtgttgttcatgtcccatgacgtgat

SEQ ID NO: 271217 - DNA, 273 bp, Zea mays
  unsure (1)..(273): unsure at all n locations
gctcgatgtaccgtacagacgatggtcgggaattaatagaatatttcgtttattgtgtaaagtgcactagctggccatttatttacagtagtaacgcatgaacagcgtgtatatatagccgtatactgatggactgcaggatggaagtgtcatcgtcatcggtatatatgctcatgtatacgacgtggccacgtgtcgcagcgtgtgtgtgtgtgtggtactatatatacaattgtcagctaactgacgccatctnaaaaaaaattattattt

SEQ ID NO: 271218 - DNA, 532 bp, Zea mays
ctttaatctgtccgcacgccgtcttccccatctcgcgcagcgctactgccggctgtccggagtcccgaccaccgtcctcggctccccgccgtgaatccatcatcccgtaatggagacctgcccctcggtgaagaacatcctcttgctggactcggagggaaagcgcgtcgccgtaaagtactacagcgatgactggcctactctatccgcgaagctggccttcgagaagtcggtatttaccaaaacccagaaagcgaatgctggaacggaaggtgagattgaatttacatatgctttttcttatgcggaagtagttgttttccatcgatgatgagccacggtgagcgttgctgtgctcgattgaggtagtccagagtagttgattagcattatcatctcataatgaactcacgtgtgtcagtgtgtgatgtattgttataaatccgtctatatatgctaatgctgggcaagaatgcttctctacagggtagaaccacttttttgatataaattacaccatttgtgttttgat

SEQ ID NO: 271219 - DNA, 1034 bp, Zea mays
cttattctgtccgcacgccgtcttccccatctcgcgcagcgctactgccggctgtcccgagtcccgaccaccgtcctcggctccccgccgtgaatccttcctcctaccgcgatggagacctgcccgtcggtgaagaacatcctcctgctggactccgaggggaagcgcgtcgccgtgaagtactacagcgatggctggcctactctctccgcgaagctggccttcgagaagtcggtcttcgccaaaacccagaaagcgaatgctggaacggatgcagagattgtaatgtttgatggtcaaattgtggtatacaagttcatccaagacctgcacttttttgttactggaggagaagaggagaatgagcttattttagcatcagttcttcagggattctctgatgctgtcgaacgacttctcaagaacatggttgacaaaaggacagcactcgagaatttggacctgatcctattgtgtcttgatgaaattgttgatggagggattgtacttgaaacagaaggaagagagatagctgaaaaggtgtctggtcatggattggagggtgcttcatcagctgagcagactttagtcaacgccctaacgcaagcaagagagcatttggcgaagtctcttctcatgtgatgctatgctttatatattagggcgacgatggagtatctattactgtgtctggataacacagtttttttttttggttagcagtggacccaaaaaaaaaaaaaaggtctgaaatctttgaatgtgtagaatggcatgttgtgtccaaaattttcatttgtaagccttcaaagttgtgtagcatgtttttttcttctaattttgactggtttcgttatcggtcgttttgtttaatctcttcctgttggaaacggtaaaatagcatgcttgatggcatgttgtaacttaacaaattagggctacactttgtttaagatggtaatatgtctccctgaaaccaaaacattattggaatctgccaaaaattcaccttaaaaaaaaaaaaaaaaaaaaaa

SEQ ID NO: 271220 - DNA, 893 bp, Zea mays
ttttgttgcaagctctacgggatctgcgaaggagggctgccttgatttgttaaggcggtcaacctttgtttgatgcaggagacctgcccctccgtgaagaacatcctctggctggactcggagggaaagcgcgtcgccgtaaagtactacagcgaggactggcctactctatccgcgaagctggccttcgagaagtcggtatttaccaaaacccagaaagcgaatgctggaacggaagttgagattgtaatgtttgacggtcaaattgtggtatacaagctcatccaagacctgcacttttttgttactggaggagaagaacagaacgagcttattttagcatcaggtcttcagggattctctgatgctggcgaacgacttctcaagttattttccctctattaaactttatcttttcaaccactgctttggtctgatacatggtggtgtgttaatgctgattgtatatgaatgtgtttccaatcttggtggttttagaaacatggttgacaaaaggacagcactcgagaatttggatatgatcctattgtgccttgatgaaattgttgatggagggattgtacttgaaacagaaggaagagagatagctgaaaaggtgtctggacatggattggagggtgcttcatcagctgagcagactttagtcaacgccctaacgcaagcaagagagcattttgcgaagtctcttctcatgtgatgctatgctttatatattagggcgacgatggagtatctattactgtgtctggataacacaattttttttttttggttagcatggggtccaaaaaaaaaaaaaaatgtttttaaattttctgatatgtgttataattggctttgtttgtgtttcaataatttttattatttttaat

SEQ ID NO: 271221 - DNA, 605 bp, Zea mays
acgtgagcaagcccaccaccttcgagaacatcagccggtggctcaaggagctacgcgaccacgccgactccaacaccaggatcatgctcgtcggcaacaagaccgacctgaggcacctccgggccgtcgccaccgacgacgctcggagcttcgccgaggcggaaggcctgtcctacatcgagacgtccgcgctggaggccaccaacgtggaggaggcgttccagctcatcctgggtgacatttaccgggccgtcagcaagaagcctgtggcgtccgacgaggccggcgccggccagggaggcgtcaaggaaggtaagaccatcgatgtggcgactggtgctgatgccgccgctcacaagaagcagtgctgctcggcttagaagttagaagaacccatgctggtggtctctcgttcagtggcgtatctgttgttgtgatggttgtcgttgttgtttttttttttctcttcttccagtccaaaagtttgttgattcgttttgccagatagtacctttgttggagggataatcatgctcacatatatattctctaaagcaagcagttctatatgattataccatgtcccttatacataaatgattttc

SEQ ID NO: 271222 - DNA, 463 bp, Zea mays
ctaaggttgagagcatcaagagagacaaagcagcatctgagaagttgcttcaagaaacaatagaaagaaatcagactgaacttgcagctcaaaaggagttctacaccaatgctcttaatgcggctaaagaggctgaggcattggctgaagcaagagtcaacagcgaaaccaaaattgaactggagaatcttttaggagaagctggtgaagaagaaaatatgctgattaagacaatcgaggagttgaggcattttctcacccggcaagaacaggaggctgctttcagggaagaaagactaaaaggggactatgatgatcttcaaaagcggtatcaagccagtgaacttcgttataatgaactggtaacgcaagttcctgagtctaccagaccgcttctaagacaaattgaagccatgcaagagacaactgctcgaagggaagatgcttgggctggtgtggagag

SEQ ID NO: 271223 - DNA, 547 bp, Zea mays
gagggacagctcttggcgtaacagctgcagcagcacttgcagctgccaactgccgggacgacgagactgtctggctggtaggagcagcagcaggcttggaaccgcaggcctctgtagcgcagtgagacgtgctcctggagggagccacggcttgcggcacgacgatgcggactgggcttgcagttgccgcgcttgatagatgcggcacgcagggctccggtttctgaactgcgatctgtctagcaccagggaagacctcggccacgttgaccttggcaggggcaggggcaggaacaggcggcgagtccggctcacttgacggggtagcaccaggaacagacgccctgctggccagcatcatgagctctttagccttgtcgaccgggacgttgtcgaaaacattcaccgagccgttgtagaatatcgtgagctgcgtcgaggcctcggtccgtgggttcctaacaaggaggaaggtcgatcaaccgtcgatcaacatgtcgacagggagggagggaaggaactgccgatcgatacctcgccccgtaca

SEQ ID NO: 271224 - DNA, 1143 bp, Zea mays
cccacgcgtccgctccgtccgcttctctctccccatctccatctgcaatcctcgctcgcccacgctcggcagccatggcgtcgtcgcgcaccggagccggagccggagccggcggccgtgtggtggtcttcccgttcccgttccagggccacttcaacccggtgatgcggctggcccgcgcgctgcacgcccggggcctcgcgattaccgtcttccacagcggcgccctggacccggccgactaccccgccgactaccgcttcgtgcccgtgaccgtggaggcggacccgaagctgctggcgtccgaggacatcgccgccatcgtcaccacgctgaacgccagctgcgacgcccccttcagggcccgcctctcggcgctgctggccgccgaggggagggacagcgtccggtgcgtcttcaccgacgtcagctggaacgccgtgctgacggcgtccagcgacctcggcgtgcccgcgctcggcatgatgacggccagcgccgcctcgttacgcgactacatggcgtaccgcaccttgatcgacaagggctacctgccggtgaaaggtgagtccatctccgtctccatccaatcgtcgtcggcgaggttattagcagagggagactagattagatttgcttatcatcacatacctgcagaggagcgcaaggaggatcccgtacccgagctaccctcgtaccgcgtcaaagacctgctccgggtcgacacgtccgacctggaggagttcgccgaactgctggcccgcaccgtcaccgcggcgcggcgcgcctcggggctcatcttcaacaccttcccgctgatcgagacagacacgctggccgagatccacaaggccttgtcggtgccggtgttcgccgtcgccccgctcaacaagctggtgccgacggccacggccagcctgcacggggtggtccaggcggaccggggctgcctgcagtggctggacacgcagcagccgggctccgtgctgtacgtcagcttcgggagcatggccgccatggacccgcacgagttcgtggagctcgcgtgggggctcgccgacagcaagcgccccttcgtgtgggtggtcaggccccatctcatccgcggcttcgagcccggcgcgctgcccgacggggtggagg

SEQ ID NO: 271225 - DNA, 447 bp, Zea mays
ctgaacgccagctgcgatgcccccttcagggcccgcctctcggcgctgctggccgccgaggggagggacagcgtccggtgcgtcttcaccgacgtcagctggaacgccgtgctgacggcgtccagcgacctcggcgtgcccgcgctcggcatgatgacggccagcgccgcctcgttacgcgactacatggcgtaccgcaccttgatcgacaagggctacctgccggtgaaagaggagcgcaaggaggatcccgtacccgagctacccccgtaccgcgtcaaagacctgctccgggtcgacacgtccgacctggaggagttcgccgaactgctggcccgcaccgtcaccgcggcgcggcgcgcctcggtgctcatcttcaacaccttcccgctgatcgagacagacacgctggccgagatccacaaggccttgtcggtgccggtgttc

SEQ ID NO: 271226 - DNA, 573 bp, Zea mays
ctcgacgcgccgccgccgtctcgccgctgcccacccagattgacggctccaattggcgcccatggcggaagaaaccaacataaaaaaggaggaagaggagttcagcaccggtcctctctcggtgctcatgatgagcgtcaagaataatacccaggttcttatcaactgccggaacaacaagaagttgcttggtcgcgtgcgagccttcgatcggcactgcaacatggttcttgagaacgttagggagatgtggaccgaggtaccgaagaccggtaaaggcaagaagaaggctctcccggtgaacaaggacaggttcataagcaagatgttcctccgcggggattcggtcatcatcgtcctcaggaacccgaaatgagtagcctgtacacgtagagagtctgtttgctagcagtacgttgtgctattgggtgtaaggtgtatgccaaatgctcaaagcatgggagtgtaagtcgcggcagaattcgccatgggattcagcttaagacaggatgctagggctgggttttgcttcttgtagcagacttgaacacgatgctcgccatctcttgtacc

SEQ ID NO: 271227 - DNA, 422 bp, Zea mays
ccatcaatggttcaaagcaagagatcttcttttggcaggagaaataacattcgagggggggcttatacccaacggttaatggatgctagtggacaagtgtgtcgggctgagcttggtgaaccggtttaatcccagggaggttagcaaatgctttgtgcactggggaactggtgatgtgaacatggagctctggtcagaggaaagaccagtgtctaatgacacgccgttgaggatttgccaccagtatgaggtgaagcatacaacctaaacacctgcccgaagagcataaataaaaataccaatgtggaggatacttcaattgcttgcacttgttttacggtcttgtattgacggtcgcgcaccaaaacttccatggtatttttggagtcttgcgttagtcattaccctttttggaggacttt

SEQ ID NO: 271228 - DNA, 1364 bp, Zea mays
gaacactccacccaacggcccaacccaaccggggcattcaaccaccccgtgtgctccaaccgctcctcgatttgatcaccgattgggggaggccgactagggtttaccggtgagcgcgcgcgcgagagagagtgagggcggaggaaaggggagatggcgcaggcggtggaggagtggtaccggcagatgcccatcatcacgcgctcctacctcaccgccgccgtcgtcaccaccgtcggctgcaccctcgagatcatttcgccgtatcacctgtacctgaacccgaagctcgtggtgcagcactacgagatctggcgcctcgtcaccaacttcctctacttccgcaagatggatttggattttctgttccacatgttttttctcgcacgatactgcaagcttctggaggagaactcatttagaggaagaactgccgactttttttacatgctcttgtttggtgctactgtcctaactagcattgttctgatcggagggatgataccttacatttccgagacatttgccagaattctgttcctgagcaattcattgacgtttatgatggtttatgtctggagcaagcacaatcctttcatccatatgagctttctgggcctgttcacctttacggctgcatacttaccatgggtcctattgggcttctctatcctggtgggaagcagcacatgggttgatctcttgggtatgattgctggacatgtgtactactttctggaagatgtatacccacggatgactggccgccgccccctgaagacaccgtccttcatcaaggcgctatttgctgatgacaatgttgtggtggcacagccacccaatgctgggattggtgctggtgcaaggttcggtgctattggtgtagatccccaggctcaatgatgaattactttcagtgacctgagggccgaggctgtgactgatctgggatgcggcagtttgtattctctgcgcaaattgcggaactgtacaagccattgttcttgtgtatttatacaggctagatgagagttattgtgcataacaaaagattagtagtatccgaggcggccaaaagtttctcacctgttagcagggcccgaaggaaatggtttctgatgtgccaacaggccaaaacccctgtcgccgaaacttgttcttgcaacggtttaacatctgacctactactctttcatgcatcagtgagtttagtctaggaaactgttccaaccgaagttgaagtttgttgctttggcagcgagaatttgtatggagcgttatgatcgcagaattgtgcaaggaatggctcctaacattgtggatgcttggatggtggttcttttccctcctgctcatgttgtgct

SEQ ID NO: 271229 - DNA, 599 bp, Zea mays
ggacatgtgtactacttcctggaagatgtatacccacgtatgactgggcgtcgccccctaaagacaccgtccttcattaaggcgctatttgctgatgacaatgttgtggtggcacagccacccaatgctgggattggtgctggtgcaaggttcggtgctattggtgtagatccccaggctcaatgatgaattactttcagtgacctgagggccgaggctgtgactgatctgggatgcggcagtttgtattctctgcgcaaactgcggaactggcccggaggaaattggatcgtgatgggcaaacaggccaacccctgttgcagaaacttgttcatcgagaatttggatggagcgctgtaattgcagaatggtgcaaggaatgactcctaacattgtggacgcctggatggtgttcgttttccttcctgattctgctgtgttcaccgatccggatgatctggtctcctggaagcagtctttgtccatttttccttcatcagctgctctttaaccgtaaaatcggcgttcgtcatttcaactgctgtgaccgtatcccttccctgttatataaataaaatgtttcaggtaataaatcgcga

SEQ ID NO: 271230 - DNA, 319 bp, Zea mays
cgtgtgcttctactgctcctcgatttgatcaccgattaggggaggcggtttaccagtgagcacgcgcgagagataggataggaggaaagggaagctagcggcttcgctctcgcggggagatggcgcaggcggtggaggagtggtaccggcagatgcccatcatcacgcgctcctacctcaccgccgctgtcgtcaccaccgtcggctgcaccctcgaaatcatttcgccgtatcacctgtaccttaacccgaagctcgtggtgcagcactacgagatttggcgcctcgtcactaacttcctctacttccgcaagatgga

SEQ ID NO: 271231 - DNA, 461 bp, Zea mays
aggcaaaggcaacaaaatcgtcagcccctcggaaagccaagccggtgaaacccactcagagcagcgcaaaggtctcgaagagcaaagcaaaacctgaggggcgaagatcaaagagtgacactctgaacaagctgggaactaagctcagtgtggttggatttagagggcgcagctcaggcaaatcagcacaatcttcataaggctttggtatttttttttattattgttatgctaaaaaggttcttggaggatttgcagcctgtaaatatctgagactaagtttcatcatttctttttctccttgcgggtttataagtgaagaccacaatctgagatatgaacgcagcactgctatgtaatattgtactgcactcagcagaatgttggaagaatacttttcattaccgcctcgtttggatcattggaattgaattccattctaataatagtaatttaggcat

SEQ ID NO: 271232 - DNA, 688 bp, Zea mays
caattcatgtcaggttttgtaagatgcttgcttggtgcatagctgttgctcagagtcttcttattatatgttctcgcaagcattacagtgttgacgttgttgttgcatggtatactgtgaatttggtcgttttctttgtggataagaagcttacagaacttcctgatcgatcagtgggatccacatcagtacttcctgtgagtgcaagggataaagataccaagttgaaagaagaaaataccagattgctgaatggtaactctatggattcagctgatcggaggccacgaacacaaatgaatggaaagcaaattgagaatgaaagccatgttgatagtgaaactgtgaaaacatgatcaactatcatggagggggttttgttagctaagagacgtttcagacgactaaagaagaaatatgggatgccatccgctttggtgcctactagctccttgatgacttcatgaaatatagctacgaaggaaatagttttacatctcgctgttctaggcagcagaagttttgtttgcaaaactgtacatcttcctcagctctctcattgtaaccccttttctttctggtttctttcatttatttaccagcttggaattcagattatttatactagttgtgtatagatagcacacgttctttgcatgtgaacaggaatcatatggacaatataaga

SEQ ID NO: 271233 - DNA, 907 bp, Zea mays
  unsure (1)..(907): unsure at all n locations
gtactacgctggtagtcacgggatggacatagtgacatctgcagcagcacatgctgctgagggggtttccaagtgcctcatggaggtcacgagttcaattgaaggtgcaagggtggagaacaacaagttctgtgtatctgtacattaccgcaacgtagcagagaaggactggaaagtggtcgcaggactcgtgaaacaagtcttggaggccttccctcgtctcaaagtaaccaacgggcgaatggttttagaggttcgcccggtgatcgactgggacaagggaaaggctgtcgagttcctgcttcggtcgctcggcctaagcgactccgaagatgtggttcctatctacatcggagacgatcgaacagacgaagacgccttcaaggtactgcgagagcaagctgtggatacggaatcctagtctcgcaggtgcccaaggacactgaagccttctactcgctgagagacccgtctgaagtgatggggttcctcaattccttggtgagatggaagaagcacccgctgtgacgcaactgaaaacacaacgactgattcagaagccgtaaagcgactgtacttcgtgcggcggcaattttgtagagtttttggctcaccgggtggctcattctttcatgcgtttttattttttatttttttaactgtcacagtccttcgtcactgagaaataacaagtggttggcccacaccctcttgcaactgtaatctgtaagcaagaggccctccctgttcggtctatatatatatattgaataaaaccgggacgcttttgccttgccctgnaaaaaaaaaaaaaaaaaaaaaaaaaaaaaaaaaaaaaaaaaaaaaaaaaaaaaaaaaaaaaaaaataaaaaaaaattatgggaaaaaattctatagcaaaaagggt

SEQ ID NO: 271234 - DNA, 475 bp, Zea mays
tgctcttctgcgctggcctccttcaagcacatagtagccaacgcaaaaggcaggaggatcgctgtgttcttggattacgacggcaccctgtcgccgatcgtcgacgatcccgacaaagcgttcatgtcccctgtgatgagagctgctgttagaaatgtcgcgaagtacttccctaccgcgattgtcagcggaaggtcccgtaagaaggtgtttgaatttgtaaaactgacggaactgtactacgctggtagtcacgggatggacatagtgacatctgcagcagcacatgctactgaaaagtgcaaagaagccaatctcttccaacctgcttgcgagtttctccctatgattaatgaggtttccaagtgcctcgtggaggtcacgagttcaattgaaggtgcaagagttgagaacaacaagttctgtgtatctgtacattaccgcaacgtagcagataatgactggctagtggtcg

SEQ ID NO: 271235 - DNA, 672 bp, Zea mays
cttgagactgttggaagcatcaaacaccggtatcttgtaagccttcaggggtactccctgtctccggcgcggaatctcctcttctatgattacatggaaaatggcagcctctgggacgctttacatgcagcttcatcgaagaaaaagaaactcgattgggaggctcgcctcaagattgccctcggtgctgctcaaggcctggcttatcttcaccatgagtgcagtccacgaataatccacagggatgtgaagtcaaagaatatcctcctagacaaagactacgaggctcatcttgctgactttggtattgccaagagcttgtgtgtgtcgaagacgcacacatcaacgtacgtgatgggcaccattggctacattgacccggagtatgcacggacatcccggatcaacgagaaatcggatgtgtacagctacggcattgtcttgctggagctgcttaccggcaatgagcctgtcgacgacgagtgcaaccttcaccacttgatcctatccaaagccgcagagaacacggtcatggagacggtcgaccaggacatcaccgacacgtgcaaggtgctcggcgaggtcaagaaggtgttccagctggcgctcctttgcagcaagaggcagccgtcggatcgaccgaccatgcacgaggtcgcgcgcgtcctggac

SEQ ID NO: 271236 - DNA, 493 bp, Zea mays
gcgctggtctcctccctacgtgcgcgcagggcacctggatgccggcgtggagctcgctccctcgttcttatctccaattacatactcatgtctcctttcatctgctacacgcgtgcgtccctggcgctcacctcctacttctctttcctgccccatctgcctgttgatcgctgtccgctccagctcgcggatgctgcgcgcctaggtgatgctcgtcctccccttcgcacggttggccgggtggccctgtcgccgttcctcaggccgtctcagcttcgctcgatgctgagttcctctccagcgcgcggattcctccctgcgtcgcgcgtgagttcggcgtcgaactccccaacgcgcaactcactgagctcgtccctgcgcgccatgatcaccagtcgtccgcgcttgctcggattctcgtccctgcatgcaagctgtctgtcgggcgaccttcatccccagttgtgctcgcgccaactcctgggttacgcac

SEQ ID NO: 271237 - DNA, 488 bp, Zea mays
atcacctgtgtctaggttgggagcaaagcaaagagagagaggaaagctagctagctagcatggagagtggcagcaagaaggtcgcagccggtgtgttggtgctgctgcttctccagctgatggtagctccgacgacggcgacagcccgcctcctgcaggcggatacctcccccgtgtttggcctggacttcatcgcgagggagtttggccatccagatggagccatctcctgtggtgaatcatgtgtcatcataccatgcgtttcgtcagtctttggttgccgatgcgaaaacaaagtctgcgtgcacgactgaagaaaccttcttcagtctctgatctttctctctcgtcatttgcgtgtgaagaaccagctccatctttgtaacgaatttgtgttgggagaaacagaaagacggtggtgttcaacttattgtgtatggtgatttaataataatatataataaacgggatacgttggatgtgtaagc

SEQ ID NO: 271238 - DNA, 277 bp, Zea mays
ctgtgattggcctgtaccaagttgcgcggagatcatggagatgcatctggagcagtcggtgcgggcgaagctcccgtacgggtatgactcggtttccaggcagtcgctgtcgagcactgaggatgacatgggtacctgatctgtaccacttaccgcgttccttggtttgatgctatacagctatgctatgctcggtgtttgctgatctcagccgcgagctgtcgtttcgtgattacatacattgcatgggcttctaaatctgattacgcgagctgtc

SEQ ID NO: 271239 - DNA, 478 bp, Zea mays
cggctcgagggaaagctagctagctagcatggagagtggcagcaagacggtcgcagccggtgttttggcgctgctgcttctccagctgatggtagctccgacgacggcgacagccgcctcctgcaggcggatacctcccccgtgtttggcctggacatcatcgcgagggagtttggccatccagatggagccatctcctgtggtgaaacctgtttcctcataccatgcgtttcgtcagcctggggttgccgatgcgaaaaccaaatgtgcgtgaaataaactctctgctcgtcatttgcgtgctatacgttgctgtttaatttccatgacgacccgttacgtgtgaagaaccagccccctcatatctttgtaacaaatttgtgttgggagaaacagaaagacgggggtgttcagtttattgtgtatggtgatttaataataacccataataaacgggatacgctgcatgtgtgtgccc

SEQ ID NO: 271240 - DNA, 282 bp, Zea mays
gtgtcttcgtaccatgcatttcgtcagccgtgggttgccgatgcgaaaacaatgtctgcgtgaaataaactcgtgacgccgctgctacagtcgggacgaggccatatatctctgatcccgttacgtgtgaagaaccagctccatctttgtaacaaatttgtgttgggagaaacagaaagacggtggtgtttaacttattgtgaaaggtgatttaataataatatataataaacgggatacgttggatgtggtgtacccaatattttattaataatttttatt

SEQ ID NO: 271241 - DNA, 943 bp, Zea mays
attcggctctcgtctacatctcctcgcttccggcagaccgcaatgaagtctctgacccccaccgccgctggctccgccgcagatttttccgactctctgcgctccccgatctcccctgcggcggtgccatgccattccagccccggccgccactactacctcgccgtcgaccgcacccagttcaaaataggacactcttggagctcctgggggttgtcgcggatcgccgtggtgggctgccgattgcaacatgtgtttcctcccgtgatgagcttgatgccgtctgtgctgccgtcgcaaacctcccctttgtgtcagcgtcacctctgtatagtgatcaagctgaagcagagcgtgcatctattcttgagaactttcgtcaagaaacaactcagtggaataaaactgctaaagctaccaatattgccgaaagttctaagcttgaaagtactggctctaaaataagcattatagttgcaacagatgcttgcttgcctcaggcagcgatggcagaggcaccccttatggctcgagtgctgataaactatgagcttcccacaaagaaggaagcttacttaagacgcatgtcaacatgtttggcggcagacggaattgtgattaacatggtcgttggtggtgaggtggttacactcaaggctttagaagagaacagtggtctgcttattgctgagatgccaatacatgtttcagaaatattatgaccgttccagttgtacaacatttcagaagttactgttctgattgcacactaactactcatgggttacttctactttaatttttgaattgcttttcatggttcagaatgttctcaaattatatctcttaagccttagaaataagctcaatggttctttttttctctgggtaagaaatggtagaatataggcatgggtcaacattcagcggcatgttttttttt

SEQ ID NO: 271242 - DNA, 1633 bp, Zea mays
cggactcgtgggcggacgcgtgggtgcgatatgtgggaaggatattatgctgacgctgattgctagacgctccaggcattatgctggcaccaggtatctaaagaggggtgtgaatgaggagggcagagtagcaaatgatgttgagactgagcaaattgtttatgaaaacatgcttggaccatggcaaataagctctgttgtgcagaacaggggttcgattccactattctggtcccaggagacatcaaagctgaatcttaagcctgatatcatattgcatgaaaaggacaaaaattatgaggctaccaggcttcattttgaaaatcttaggaagagatatggaaatcctatcatcatcttaaacttgattaagacacgtgagaagagaccacgtgaaatcatactccgtcgggaatttgacagagcaataaagattattaatagtggtctaccaggcgaagatcatttgagatatttacattgggatcttcataagaactctcaaagcaaaagtacaaatgcccttcaagtgcttttgaaggtggcatttgaagctttgaacttgacagaattcttttatcgtcaagtttccccagatcaaagggcaaagagctcccctaatttaagccctacattgaaaattggttttggtcatcatgcgtgtgatgacaaaaattgtggcaatgcagattatgttgatgatcttgatgacatttcccaagaagatacctgtggtagttctgatcctggcaatggaattgcggaagataaatctgaggtcaatggatctactcaaataaagcctccaaaatttcaaaagggtgtcttacgtacaaactgtatagattgtttggatcgcacaaatgttgctcaatatgcctatggcctagctgctctaggataccagttacatgcacttggttctgtagaatctccagaagttcatttagactcccctttgtctcgacatttgatgcatttttatgaacggatgggtgacacacttgctttacagtatggtggttctgctgctcacaataagatattctctgcaaaaagagggcacttgaagtttgccattcaatctcaagagttctttaggacactgcaacggtactacagtaatgcatatatggatgcttacaaacaagctgcgataaacttatttctaggatacttccaaccgcagtgggaaaacctgcactttgggagccagaatctggtgacgagcatgtacttgatgacgagacaagtaaattgatgaagagggcaagatcagatggcagcattcttaataaaagcaaactatcaatgtccagtaatggcccaaatggagttttaaactcagcacttactggttcaaaaaatgaagggcaacatccaaactggagttctgattcagtgcatgggatgtcttcagcctctgacaattccatgtcaaagtcaaggtatactccgacagtgtctcacattaagcatataagctgtgaactagactattacaatggttctggtgattcaaatttcctggatcttgactggctctcagcttcagacaatgaaaggtcaaaagccttaatgttcatgctgttcttttccttttgtggtctatcaggcgtcctgttttttgtgc

SEQ ID NO: 271243 - DNA, 923 bp, Zea mays
cggacggtgggctccgacactgtctcacattaagcatataagctgtgaactagactattacaatggttctggtgattcaaatttcctggatcttgactggcttgcagcttcagacaatgaaaggtcaaaagccataagcactcctgatgtgaatatttcaactgatggtggtgttcgtgatgtaatatctgggacaacggacgatcaagcttctgggatccacgcccaggggttttcaaaggatttcgtgcagtggctcaatcaaggagaggcgttttggtactgacatcgcaaggtgggcgtaccatgtaaatccaagccacatgatggttgcacttgcaaaaaggggggaaaataagggagaagtctacatgatggcagtccagacctcatttcaaagcatattaactcttaaagaccattgcaaggagggaccatcaatgtgcatgagattgtttgtcaaccatcagcaattcagcattctcttttcggtatacgaatatgatgatgggcttagagtcacacgcactgttagaagacttgtctagggaagtgtaccattctgttcatttattgaagcttgctcaccaggctggtagatagtgcattgttattattttttcttaaaaggaatgaaagaatgtaggtagtttattctttttaagatgtaccattgtccaggcatgatccccatctctccatcgtgtaaatatatatgtcccaagtgttccacttttcccttttccttccatgagagttgaggtgggcatgaaagcaccatttttccctcagtctctttgtatgggttttctgaaatcatgtacatttatattttgtggcaagcggagagattgttgtgtaatttccattgtaccaaacgtccaaacccctcttaccaatagaagtctcttggactgtttgtc

SEQ ID NO: 271244 - DNA, 576 bp, Zea mays
gggtcggggaggtattttctgggacaccggacaatcaaccttttgggatccacgcccaggggttttcaaaggatttcgtgcagtggctcaatcaaggagaggcgttttggtactgacatcgtaaggtgggcttaccatgtaaaaccaacccacacgatggttgcacttacaaaaaaaaaaaagaagggagaagtctacatgatggctgcagcccaaacctggttccaaaagcatcacaactctcaaaggccattgcaagcaaggagggcaccatcgacgtccacgagatttgcttgtcaaccatcagcattctcctcgcggccaaatatgatgacgggacttaagagtcgcacacactgttagcagacttgtctagggaagtgtaccattctgttcattgattggagcttgctcaccaggcgggtagatagcgcatcgctgttgttcttctttaaaaaaaaaggaaagaaagaaggtggtaggtagtagtatattcttttgaagatgtaccattgtccagacatcatcgtctccatctccattgtgtaaatatatatatatgtcccaggtgctccc

SEQ ID NO: 271245 - DNA, 560 bp, Zea mays
ataaatactcaggtatactccgacactgtctcacattaagcatataagctgtgaactagactattacaatggttctggtgattcaaatttcttggatcttgactggcttacagcttcagacaatgaaaggttgttcatattgtgctttcccttttttggtctatcaggtgtcgtgtctttttgtgcatggtatggtatacacagaaataacagtcagaagtaattagtttgccatttttttattaactccttgacatcttttctcagatgtctaagcagattatcaggagacctgagcatcattgcattaactaggaaatagttcaagtggaacatacactcactccagaacacatagaaacacatacacccatgaaagcacacacatgggttaccaaatcgtgccacaaaaacacaaacatgcacgaagcacacacatggattacaaatcgtgccacaaaaatgccgctgtgtatgggtgttagtggtttaagggttttctcgacctgtgtgagaaggtttcttcttaatataatgcctgggggctgtcttaccccctg

SEQ ID NO: 271246 - DNA, 802 bp, Zea mays
gccgcgctgcgcgggaggctcgccgtggagctgggccccgacgacgtcccgccgtgcgtggcggcgcccgagtggtacccggcgttcaccgagtccgcgctgagccagttcgacgggctggagcacgccgacgacgtgctcgtcaactcgttccgtgacctggagccaatggaagcggattacctggagtcgacgtggcgcgcgaagaccgtcggcccgacactgccgtcgttctacctcgacgacggccgcttgccatgcgacaagacatacggcgtggacctcttctcgagcaccgactccgaggcggcgccgtgcatgacgtggcttgacaagcaggagccctgctccgtcgtcctcgcgtcgtacgggaccgtcgccaacctcaacaaggagcagctggacctcggcaacggactgtgcgattccggcaagcctttcgtttgggtgctgaggtccaacgaggcagagaagctgtctcgacagctcggtggcaggtgcaaggagaggggcctcattgtccccttctgtcctcagctcgaggtgctggcacacaaggccacaggttgcttcctgacgcactgcgggtggaactcgacgattgaatccatcgctagtggtgttccaatggtggcgatgccgcagtgggcggaccagccgacgacggccaagtatgtggagagcgcgtgggggattggggtgcgcatgcggaagggttccttggtgaggaacgacgttgagaggtgcataagggaggtaatgggcggggagaggaagcatgtgtactggaggaatccgctcg

SEQ ID NO: 271247 - DNA, 391 bp, Zea mays
gcgggatgaaccggaagccgggttacggtgccaactgttgaaggaggatgttattgggcgagaaggattatgctctgcccaaattctcagataaaattctgaagtttcaagtgaacccagtggctgcactttcactttgaagacttgcagaggaaattcatggtcacttcattttgtgaggttaattatagagaaagggtagaaattatatgaagaaacatagtaaaaaatcattgttaggaacaaactccaatagcaggctctacttgtacgtcgcagacataagctgagactgagctgcgattgcaacagattatactcttctatcaggttgactgaagttccctcagtggccaatcttggatctttctgcaggtgttgtgcacatctt

SEQ ID NO: 271248 - DNA, 406 bp, Zea mays
ggctttttcaacagtacgaagcaagtcatctgtcccgctggccttccgtttgttgatgggcgtaaatccccgtgccgtgattattctttctcttttggtcttcagtggtgtgctgtatgtgggagccagtacatcaccaattctggtctttgtgttctgtatatgtactctcagtctattcttctctctctaccttacaaagtgggttcttgctaaggacgaaggacctccagaaatgtccgagatatctgatgccataagagatggcgctgaagggttttttaggacacactatggaactatttctaaaatgacatttattctggcctttgtcatccttggcatttatctctttcgcacttactaccccacagcaggaggcttctggctttgggaagggcaacac

SEQ ID NO: 271249 - DNA, 498 bp, Zea mays
atatttctctggatccttgtagctttggccaggctaatactctgtcatttaactctttgttgcataagctgaacaagtatgtaccacgtagttcaacagttgttgatttgtactctggggctggtgttattggcctatcagttgctgcttcaaggaaatgtaggtctgtgaaatgtatcgagattaacaaacagtcaaagatgtcttttgagacatcagcaagccgacttccagcgaacctgggttgcaccattacttggcacaataccgatgcttcagttgaaccttcgcactggcttgaagggtcaagtgttgttattgtggatccaccaaggaaaggattgcacccatctgttatcagcgctttacagaaagttgctttgtctgagcgcaaggcatacaaggctaaaagttcgcttgcaaaggtcaaggatgagaagagaccatggatcttacgggcaaaggaggctgcagttcatgttgataatacaacaactg

SEQ ID NO: 271250 - DNA, 702 bp, Zea mays
ccgctggcccggcaggggacattggcacggcggcgttggcatccgtcgctgcccgcatcaagggcgccgtcgagcggatggatgacgagctggtgcggtccgcgattgactactacgagatggccgagacgaacaagagacggactgggacaggcatcttaccacggacggacctgaatattaccagctggttgggtaggccacagcacgacgcagattttggctggggaaagccgcaatccatgtcgcgggcggagtctgtccgcggcggctctatgcacttgatgaacgacgacggtggtaccggcaacgtccgcgtgctcgtgtgcttggaggctgaaaatataaaggagctaggacggctgctttatgcaaagctctagcaagctgctagtgctatgctctaaaaataataatattaataataaggtttgttactatgcttaaggggaaccatactttttccctcgcgatttattattattatggcagtttcaataatgaaaaccatttgtaattcctgtgacaattaatttatgcgtccaccctagcaataaaaacttgtttgtaatactacagtttttttttgttatggcagtttcaataatgaaatccgtatgtaattcctgtgactattactttatgtctccgcactacaaataaaaacttgtttgtgataaaaaaaaaaaaaaaaaaaaacaa

SEQ ID NO: 271251 - DNA, 669 bp, Zea mays
gcatttatgagcaacttcgaattggctacaaacttgtggcgaaaagggagttgaatgatccagagaatgcactatatcggtgcttttgctggcgccatcactggagctataacaactccccttgatgtcatgaagacaagattgatggttcagggacaagggaaccaatacactggaattgtaagctgtgctcagacaatcctcagagaggaaggccctaaggcattcttgaagggcattgagccgcgagtgctgtggattggcatcggtgggtccatcttctttggcatgctggagaaaaccaagtcgatgctagccgagaggaggaaccgcgagcttcgggccgtcaaggacgaatgagtggagatcagctcttttttggcgttgagtccttaccctgaaacaaaatacacatttttacttgccggggacaacctcgccggcccgtacttgtactccacggcgttcacgttatcacgtacgtagaaattatgagcatgactgacggtttctacagattgaaaaccaaaacctattacatgcgctggaaacctgccgctcactgtttacgttgggagtttttacaagtattttcagttcataacactatgctacatttggttgggggacaagtagtacaatgaacgcctcttttatctttccaatttt

SEQ ID NO: 271252 - DNA, 769 bp, Zea mays
gggaggaccaagtacagtcacgatattatcattaaacattactacatgtgttactctctgaggggcgaccacgcggttaaccacttatcaagtcgcagcacagtccagtccttagttctagtatcatacataaacaactatttctgctattagcagctcggaaaaatacaagtttgctctcagagttcatcaaccatacaaaaactcaagggaaaaaaaagtgcctcgatcttcccatgtggccatcaccgagtgccttcatcgagtgctctagagcgccttgttctcctgtgcctcttcaacgagcgctcttatcatccttgtcattaccctggcctgtggacgacggggagtagcccggtgcagtgggggagtagcttccgctagggctgtaatttggagaggtcgggctgtagtctgggctgggtcctccagaggtgttgaacgggctcgttgggctgtacgatggacttggttgtgaatatgatggtgatgtaggagagtaagtcggtgacgttggactgtagcttggagaagtctggctgtatggactcatcctggggctgcttggagagtatgcatgtgaagggctgtacttggctgatgaaggattgtagctcggagatgtaggactgtagctcggagatgtagggctgtagctcggtgacgttgggctgtatcctggtgatgtcgggctgtaagcaggtgatgtcgggctgtaggagggagaggtagggctgtatgagggggaggtagggctgtatgaagg

SEQ ID NO: 271253 - DNA, 547 bp, Zea mays
cggacgcgtgggcggctacggtggctccccgtcccacggcggcggcgcgtacggtgggtcgccgtccactcccggcagcggtggcgcctacggaggcgggtctccctcgccggcccatggtggcggcgcctacgggagctccccgacgcccgcgtacggagacgccccctcgcacggcggcatagggacctcgtcgccgacgccgttcgacccccacagcttcggctctctcccgggctcctgcgactactggaggtcgcacccgatggagatctggtcggcgatcggcgggcggttcccgggcacgtcgtcgtcgatggggacgatgggccacttcttcggcgcggctggcagggtgggcgggacggacgtgagcatgcaggacgcgctggcgaacacgcggtcggacggcgcgggcgcgctgctgcgcgagggcgccgccgcgctgctcaactccatgacccgttcgggcttcccctacacgacggagcaggtgcgcgacgcgttcgccgcggcggcggcgggcgggtccgacgggtccgacggc

SEQ ID NO: 271254 - DNA, 1066 bp, Zea mays
cccgcgcgtccgcccacgcgtccgcccactcgtccgcccacgcgtccgcggatctcgctccaagcacaccaccactccacagtgcacttcactctacagcaacgacagaaaagtgagcagcagacagcagcagctgctgccatggaggcgtggagatctctcctcgcgagcttcgtgctcgccgtgctggccgcgcaggccttggtggccgtggtcgagtccaggaccggccccgtggagcaggcgagccaaggtgacgacgtgaagaagccggactgcgtgccggggatggacccgcgctcgttcccggggaccggcggcggccacggcatcacgcccgtgacgccatcgcacggaggctccagctccccgacgccgtcccacggcggcggcggcgggtacgttccaacgccgtcgcatggcgggacgctgcctttcccgtcccacggcggctccggctccggctcctcttcgacgtcgccctccaccggtggcggctcgtacggtgggtctccgtccacccccggcggcggcgcgtacggagggtctgctccgtccacccccagcggcggcagcgcgtacagtgggtctacgtctacccccagcggtggcggcgcctacggaggcgggtccccttcgcctgctcatggtgctggtggcgcctacaggagctgtccgacgcccgcgtacggtgattcccccttgcacggcggcatcgggacctcgtcaccgacgacatttgtccccatggacccccacagcttcggcacctgcgactactggaggtcgcacccgatggagatctggtcggcggtcggcggccggttcccgagcacgtcatcgtcgatgggccacttcttcggcccggcggcgggcaagcgtgggcggggcggacgtgatgagcatccaggacgcggtgggcaacacgcgggcggacggcacgggcgcgctgctgcgcgagggcgccgccgcgctgctcaactccatgacccgcgccgggttcccctacaccacggagcaggtccgcgacgcgttcgcggaggcggcggcggccgggtccgacggc

SEQ ID NO: 271255 - DNA, 495 bp, Zea mays
cttcgttccaagcagtagcacacaccgccgctcgctccacagcagaggacaggaggaggagcaagcgagcagaggcagcagctgctatggaggcgcggaggacgggcagagatctcctcgcgagcttcgtgctcgcggcgttggccgcgcaggcattcgtggccgtggtggagtccagggccagccccgcggagaaggctagccaaggcgacgacgtgaagaagccggactgcgtgccggggatggacccgcgctcgttcccggggatcggcagcggtagccacggcggcggcatcacgcccgtgacgccgtcgcacttgcaggaggctccaccgggaccgccgtctcacggagggacaacgctgccttccccgtcccacggcggcagcggtggggacttgccgtcgccgtcgcacggagggacaacgctgccttccccgtcccacggcggcagcggtggggacttgccatcgccgtctcacggagggacaacgc

SEQ ID NO: 271256 - DNA, 335 bp, Zea mays
gacgacatttgtccccatggacccccacagcttcggcacctgcgactactggaggtcgcacccgatggagatctggtcggcggtcggcggccggttcccgagcacgtcatcgtcgatgggccacttcttcggcgcggcggcgggcagcgtgggcggggctgacgtgatgagcatccaggacgcggtgggcaacacgcgggcggacggcacgggcgcgctgctgcgcgagggcgccgccgcgctgctcaactccatgacccgcgccgggttcccctacaccacggagcaggtccgcgacgctttcgcggcggcggcggcggccggatccgacggcc

SEQ ID NO: 271257 - DNA, 439 bp, Zea mays
  unsure (1)..(439): unsure at all n locations
ccggnctggaaaaaccgggccgaccgcacgcgtccgtctcgctccaancacacctccactctatagttcacttcactctacagcaaccacagacgaaggagcagtatacagcagcagctgctcccatgaaggcgtggacatctctcctcgcgagcttcgtgctcgccgtgctggccgcgcaggctttggtggccgtggtcgagtccagggccggccccgcggagcaggctagccaaggcgacgacgtgaagaagccggactgcgtgccggggatggacccgagctcggacacgggggaccgccaagtcctcggcagggagagggaggcgcagacctccaggcaggggggctacatcggaactattgtcaaggggaggaccattatcctatagacccgcccgccctacaccattaccatgatcgagcgccttaagcacga

SEQ ID NO: 271258 - DNA, 1078 bp, Zea mays
tggtcgcgtgcgcggacgcatgggcggacgcgtgggcggacgcgtgggctgctacacgttctcacatcggggatggcgacactgctctctcatatcttgcttctcaggcatatgacccaaatgcccctgttcaacacggccggagcaactcatccacccccagggccagaaaccctgctgggtggaacggcgaccagcgcagcgtgcgctcgcctaaccatcattctccagacccgcggcgcagagaccctgcgggggcatccaagtatggagcagaggttagcaggactagctctaccagcgactctggccggcgatcaggcctggatgacatggacctgaccgggtcgcaagtgggaagcccagcgcaaaccggaagaagaagagaagctccaaggggcaccgacagacagcgtgctgtcgcagaggccaggacatggggggagaattcaagggagcgaacaaatggccatggcagcttcgacagcacccatgagtgaagccgtcaggttctgttccagtcatcattccagaacccccaccatgggttgagtccactcattcatcagcaccagtcagatccgatcttgggacatggcgtcggtccaagtgtctgtgaataaggcttttcttgccctcctgtggcgaatgcaattctcctggcgcccattccttgccaatgcgacctgtgtgtgtcatgcctctggcgactgggagcctcaggaggagcctgtaggattcagtcagaggtagacaggtcagtgaagaaagaggaggggcgcggagtcacattggcgagtgttttgttttttttggcggctaaatgctgagtatgttcagctgcatgtgtcctttttgtgtatgtgtacgtgtaagacgtgtaatagcaaccgtgtcaggtttggctacctgagaggcctttgaagcttctgctgctgcttccttccccttgggaattgggagttcagagttgaaatgtaggataggcgatgttgttgagtacatcaactgtttttatccttccatgttgtacggcgacgcttccctgaacaatatgaccatgatgtgcccccctgtc

SEQ ID NO: 271259 - DNA, 1086 bp, Zea mays
ctctcgtttccgcccacgcgtccgcccacgcgtccggttggcctggggcttcgtttggatttagccagacccttgggatgaagcttgctgtatatggacaggttcttctgactagagttggtatcctttggttttttgctcttccaattctttgcagtcagttcatgggtcttgtaactgaacagtgtttatttgtatagatctgccaccagataaagagcctcttgattggaacacacggatgaagatagctgcaggtgcagctaagggcttagaacaccttcacgacaaggcgagtcctcctgtgatttaccgggattttaagtcatcaaacattcttcttggagaaggatttcatccgaagctatcggactttggccttgcaaaacttggtccggttggtgacaagacccatgtttcaacacgtgtgatgggtacatatggctactgtgccccagaatatgcaatgactgggcagctgacggttaaatccgatgtgtatagctttggtgttgtgttccttgaacttatcacggggcgtaaagcaattgacaatactaagacccaaggggagcaaaatttagtggcatgggctcgtccactgttcaaggaccgcaggaaattccctaaaatggctgatccaatgcttcagggccgcttccctatgaggggtctatatcaggccttagctgttgctgccatgtgcttgcaagagcaagctgctacacgccctcacatcggggatgttgtcactgctctctcatatctcgcttctcaggcttatgacccaaacgcccctgttcaacacagccggagcaacgcatctacccccaggtccagaaaccctgctgcatggaacggtgatcagcgcagtgtgcgctcgcctaatcatcaccattctccagacccgcggcggagggaccctgccagggcatccaagtatggagcagaggttagcaggactagctctgccagcgattctggccggcggtcaggtctggatgacatggacccgaccgggtcgcaggtgggaagcccagctcaaacccgaagaagaagagaagctccaatggccaccgacagaca

SEQ ID NO: 271260 - DNA, 388 bp, Zea mays
gggcgacccacgccttcggtccatgacctcgcattggtatagttgcaaggttatgtatgcatgcttacggatgtttgcatggcttaatggcgccgcgtaggaaatgacatagatatgcctgtttatctcctatcatccctggtttgatgaccaggggataggagaggagaggaaatcccttgctattcaaaaaattttcttcaccatggatcccctctaattctcttgtcgccaaactagctctcggttatcaggttgccacttgtgcataatgttgttcagttgtattgtgctggaaatcgcaagtaaactgctcatccagttctatgaagaaaaaaaaaaaaaaaaaaaacaaaaaaaaaaataaacaaaaaaaaaaccccccccc

SEQ ID NO: 271261 - DNA, 584 bp, Zea mays
actccaacatctgttgctggtggtccagcgccgggtgaatcaaataaaaataagcggaaggcttccctcaagggatcaaaaggaagcttaggtagtctggatgttgttgcagtaaaaaataacaagtcaccggcaaagccttcaacttcttcctccaatgaaggttcttcacaaagtgagagtggaagcgggagttcttctgaaggaagcagtacaaattcaaaaagtggttcaagggtgaaggataattctgagcaaggacagggtaatgatgctaggagtaaatgtactcaaagctctgtcgttgagcccacacaaccatcttcagggtctgttgtgcttaaccctatgatgccattttggcctgtgccccctcccatggctggcccagcaactactctgaatatgggagtggattactggggtactcctgcttctgtacccatgcatggtaaagttattgcagcaccgacatcagctccttcgtcaaattcacgtgatattgttctcagtgatccgactatacaggatgggagagaactgaagagacataaacggaagcaatcaaatagggaatcagctcg

SEQ ID NO: 271262 - DNA, 846 bp, Zea mays
gtttgatggatgtgctccgccatattctcgatccaacggccaggtcgttcagccgcagattagcaggccgcctgcgctcctcctttcccctcagcctcccctcctctccggtgtacgtctccgccgagatggccgccccgctccggcggagcttcccctcccttggccgcgcgcttctcacgccggcgccggcgcggatgctctccgcggaggcctctgatgccctcgttgagatcaagcccggggagatcgggatggtctccggcatccctgaggagcatctccgccgtaaggttctaatttattcaccagctaggactgcatcccagcaaggttcaggcaaagtcgggaggtggaaaattaattttttgtcaacccaaaagtgggagaacccgttgatgggatggacatctactggggatccatatgctaatgtcggtgaagcaggacttacgtttgacagtgcagagtcagcaaaggcgtttgccgaaaaacatggatggaattatgtggttcggaaacgccatgcacctcttctgaggcctaaggcctacgctgagaacttcaagtggagaggccctccgaaagcggagcaagcatgagctcgagacatctgtgatgctgacattggcacgatgtcgttttcctcctggctcgattttattttgctttcaaccgtgcccattgtttaagtacgaactagagtatgcatctatcaaacttgtaataagcatgatgtgcaatcaaacaaaatggtgtacttgtacttccaaaacgttaattcgtggatgacattgcttttgcaaaaaaaaaaaaaaagggaaagaaaagaaaagaaacaaacaa

SEQ ID NO: 271263 - DNA, 731 bp, Zea mays
ctcagcctcccctcctctccggtgtacgtctccgccgagatggccgccccgctccggcggacctcccctcccttggtcgcgcgcttctcacgccggcctctgatgccctcgttgagatcaagcccggggagatcgggatggtctccggcatccctgaggagcatctccgccgtaaggttctaatttattcaccagctaggactgcatcccagcaaggttcaggcaaagtcgggaggtggaaaattaattttttgtcaacccaaaagtgggagaattcactgatgggatggacatctactgagggtccatatgctaatggcagagaagcaggacttacattcaacagtgcggagtcagcaaaagcatattgctgtaaaacatggatggaattatgtggtacggaaacggcatacacctcttctgaagcctaaggcctacgctgagaactccaagtggaaaggccccccgaaggcggagcaagcatgagctctaggcctccaccagcatgtgaccctgtcactggaatgatgcgattctcctcctgagctctagagtctagacctcttgtccgtgagccttttctttcaacagtgtccgtcgtgaaagtacgagctagaatacgcatctatcaaacttgtaataagcatgatctgtaatcaaacaaaaatccttccaaaacgtttgttccttgatgacattgtatctcaatcctgtgtgcttccttggccggt

SEQ ID NO: 271264 - DNA, 483 bp, Zea mays
ggtctccataaggagtcccctgtattgggtctgacctctttcagacctttgtttccttccttcttaatataatgagacgcagctctcctgcgtgttcgagaaaaaaacgtaatgctgttggagataatatccatgccggtgggacagactggtgcttgaaacatgcacagttacaacgtcttcgtcacacctggacttcaaccaaagaaatgtaaagacactggtctctggtgatgcaactggtctctggtgatgcaactggtgcatcacaagttcacaatagaatactagaaagctaagtagataattggttttttctgtgatgaactgcatgaagctttattatgttgttattgactggtccttcatcccaagcttgctgtgtctgtgtatcacattcttattttaaagagacatgtactgttgaggttaaccaacataatctgggaaaataaagggattacaattaagcatgtgtatcac

SEQ ID NO: 271265 - DNA, 916 bp, Zea mays
gggcgtttcgagataatgtcgctgtccggctctttcctgctcgcggaggatggtgacactcgcagcaggactggtggcttgagcgtcgcgctcgcgggatctgacggccgagttcttggagggtgtgtcgctggaatgcttatggctgcaactcctgtccaggtcgtggtggctagttttatcgcagaggggaagaaatctaagccagccgaagcgcggaaggtcgaaccgatggctgctcctccgccgccgccgccacagatggctgccttcgtgccggctccggtggccaccagccctccgtcggaggggacgtccagcgcgtcgtctgatgactccggcagcccgatcaaccacggtgcgatgccgttcagccactccagtcagcaccagcaccctcaccagcaccagcagcacatgccgcctgcctacgcgtccgggggctggtccctctcggtgcaccagcagaacaggcatgattctgacatgaagatgatgtcgaactaacaggcgccccattcgttggtgtttgggctggagaggaaggaaaggaacctgctgatggttaggttggtactgctgctatgaaacggtcctcttgcgcgtcgtctgtgctctggtcagtgacgacgtgtcgatctgctacttaagctaagctagctaggagagttagggttcatggtctcaccccccgctgttgtgcccctgagtaagattaatttaatttgaattagtcgctctcataatgctgcgagttgtgatggtttcctgatcagatcttcaccttctaggctagttaaaacatcgtgtctctagtacgatggatcatggatttacttggatacttgggtttaattcaggaatttgttcgtaaaaacaaaaaaaaaaaaaaaagggcggccgctcgagataacgc

SEQ ID NO: 271266 - DNA, 367 bp, Zea mays
attgattttgattctcctgcagctggatgactgggtgctgtgccgcctgtacaacaagaagaacgagtgggagaagatgcagcagcagaaggagaaggagaaggagaagaaggcgatggagtcggaggcgtcgctctcgcactcccactccgacacgcggacgccggagtcggagatcgacgacgacccgttcccggagctgggctctctgccggcgttcgacgacatgggcccaggcgcagcccagcccctgccggcgtcgtcctgcccaaggaggaggcggaggacttcggcgacctcggcggcgacgactggctcgcgggcatcaacctcgacgacctgcagatgccgggggacgccgccgatt

SEQ ID NO: 271267 - DNA, 504 bp, Zea mays
ggtctcgtcaccagggagcagtatgtcgtgaagagggttaacattcgaaccaagagcgcgaggaagagaaagagaaacttcaaaagctgcaacaagaagaagaagaattgcaaatgcagaaaaggaaaaagaggagagtgaagagtgatccacgcttatctttctgtgatgacattgagaatggaagtgacgaagatgattttgagaatcaagaaaccaagaaaaatggccctgccaaacttgggaaggatccaactgtggagacaagttttctacctgatagagtgatccttcagagaaagggaggcagaggaacaagcagaacgagaacgactgaagaagcagtggtcgcatgagcaggaattgattaaaaatgaacctctttcaattacttacagttactgggatgggactgggcacagaagagcaatccaggtccgtaaaggtgacaccattggagaatttctaagggctgttcaacagcagcttgcccctgaattccgt

SEQ ID NO: 271268 - DNA, 554 bp, Zea mays
  unsure (1)..(554): unsure at all n locations
accggnccggaattcccgggtcgacccaagccttccgaaaaaaccggaggtggacctagctaacaagagggcaaccgtaaaaagaaggggaaggggagagctcctgtcacagaaagcagtgctgctaatgatgtgaatagtgcactagcagataacattctggagactgtaagaaggcttcaatcaaaccagcaggctcgggaaggaggagctgaggtgctgtcgaaggatgggtatcgaccttccaagggggtccaaccggcagctggatcttcatctaatctggacagtgatactagttccaactcaaaatcatctggtgcaaaagataacataggcaagggaggaggcaataagcaaccgaagaagacagcaaagtttctcagagctcgtttaggtgacaactcattagccacacttgatttaagtcgtccaagtgcaagccctgaacgtccagaaagggaattgcaaggccctgagacagggttgccagcgcgaggtgcttggaagaatggcggggggcagaaactcttttcgagcaatggacggaaata

SEQ ID NO: 271269 - DNA, 627 bp, Zea mays
atcctgatgagcgatgacacacacacatgctgccttgttggctgcagcagcagcagcagctctataaatacctcaccaccgcgcatactcgcttcacacaaagaagctccataattaattattgccctttcagttcgccatcggcagccgagcaccatgagctccacaggcggcggcgacgatggcgccaagaagtcttggccggaagtggtcgggctcagcctggaagaagccaagagggtgatcctgtgcgacaagcccgacgccgacatcgtcgtgctgcccgtcggcacgccggtgaccatggatttccgccccaaccgcgtccgcatcttcgtcgacaccgtcgcggaggcaccccacatcggctgaggtttaaatctacaaaatgaataactcggacatgccatgcgtacatgtccgtcgccgaataatggatgtgtgtgtgcttcgttccaataaattgctagtaaaaataatggcatcgtcggtatgcatgaataaaatgtatcagaatgttcatcctttcacgattggatatatgaaaatgtgctcagttgtttggtttccaaaaaaaaaaaaaataaaaaagggtaatgataaaataaaaaaagggcggccgctcta

SEQ ID NO: 271270 - DNA, 472 bp, Zea mays
ggtcgacccacgccttcgctgaaaccttggccgcaacccaattccattaacttcaaaagccggaaccattggccccaggaggttttgcccggagggggtcggcctaatcctgaaaaaacccaaaagggtgatcctgtgcgacaagcccgacgccgacatcgatcgtgctgcccgtcggcacgccggtgaccatggatttccgccccaaccgcgtccgcatcttcgtcgacaccgtcgcggaggcaccccacatcggctgaggttcaaatctacaaaatgaataactcgggcatgccatgcgtgcctgtccgtccccgaataatggatgtgtgtgtgcttcgtgttcctataaattgctagtaaaaataatggcatcgtcggtatgcatgaattaaaggtatcagaatgctcgtcctttcaaaaaaaaaaacaaaaaggatgaatacatgataacacaacatgaatacataat

SEQ ID NO: 271271 - DNA, 428 bp, Zea mays
taaaacttatcaacatggctctctcatccccaatcagggttatttgcctgttgaggcttcagtgcttgatgttgaggtatgggggctgggtggagaagcaacgaaacgacagcagaatatgtacaagaagagggaggtcatcttctcagagcagcgaagaaaggttgatctcaaaacttttgctagctgggaagactctccagagaagatgatgatggacatgatgtcggacccaaacacggttcgacgggaagaccggtgattttggtttgcagcctccggggatgtacagacgacagcgtttgttgcacataggagtattttgcttgcgcatttggctgggtcacacgctttatttaggttgaagtactaaaagaagatttgtacagaacgtaattcccaataaatgaaatggagcttctggccag

SEQ ID NO: 271272 - DNA, 1036 bp, Zea mays
ctcaaatgattagctctgcaactggagtacgtgttgaaaatatactctatcttggaggaccaaacatcgcctcggaaatttataacaaagaatatgcaaacgctcgaatctgtggatccaacaagtggaggaagcctcttgctaagtttttgaggcagccacatttcattgtctgggacaacagtgatcttgtcacccatgaggtgatgggtggcctgaagaatgtctatgcaatcggtgctggaatggtggcagctttaacaaacgagagtgcaacaagcaaatctgtatattttgctcattgcacgtcagagatgatattcattactcatttgctgacagagcaacctgagaaactcgctggtcctctgctggctgacacgtatgtaactctcttaaaaggtcgcaatgcatggtatgggcaaatgcttgccaagggagagttgagtcctgacatgggtgatagtatcaaggggaagggaatgattcagggtatctctgcagttggtgcattttttgagctgcttagtcaacccagcttaagtgtgcagcacccagaagaaaacaagcaggttgctccagctgagctatgcccaatcctgaagaggctttacagaatactgataaaaagggagctcccagcaagggacattcttcaagccctgagggacgaaacgatgaatgatcctcgggaaaggattgagatggcacaaagccatgcattctaccgcccgtctctccttggaaaaccatgatctagttagtcttgtagattagtagaatataaacggacgctgtgctgcaggtttctccactgtgcttgctgtccttgtgtccgagctacatggggatggggctttgtcagttgtcgaattctttgtgcttcctcgttgccatggtgtacaagagattactgaaccaataaatgttctaagtgcatattatatgaaaaaaaaaaaaaaaaaaaaaaaaaaaaaaaataaaaataaaaaaaaaaaaaataaaaaaaaatactaaagaaaaaaaaaaacaaaaa

SEQ ID NO: 271273 - DNA, 847 bp, Zea mays
  unsure (1)..(847): unsure at all n locations
tctacaggtatatctagaactgaaccctcagcagacattccattggactattccccattaaatccagtatgtgatattatggatccatccctgaactgccgaagtatcccaacaaacaactgtgaaaatagaactctggtagagaagtcagaacattgtccggatgattataatttggaaatgaagaggaaaagaaacgatggtacaaaaggtacagttgttctaaatagcggttctaaagtagagggattgttatgtcttttggaacaggccattcacagtggcagggcacttgttctgagtgaagatgagcttgctgattcagatctggtctatgaaaagtctgttgcttttacaaagtcaattccgcgaagactggtttttgagaatactcgaaggaagtccagtgccaggagaaatgtgccagacaatcatgcaagaactaaaacacatcttgtagaaaataaaatgttgagcagtcctgttgaaaataaatttatcgttaatggaggatctgcaatgcagacaagaccatggacaagagtttctttctgatgttgttcatcaaggtaccttaagagtagatgaactagcaaagttactagcttgagaggtgattgctcttttatcaaccacatagaccagtatcaacatcctttgaaacatatgcaagatttgcatgaactctgaatttggttaaaacaggtctcaggtctgttgcgtcgtggtgagtcctttttaaccttgaaatactgaactataatcctgtgcgatgtacaaaccaccttcagaatacatattctctgatttgtctgttgtcaccataattggccactgatnaataaaa

SEQ ID NO: 271274 - DNA, 573 bp, Zea mays
  unsure (1)..(573): unsure at all n locations
ggaannnccggggcgacgcacgcgtccgggccgtttcacgggcgaccgccctttcttcatcgccgtccagaccaccgtcgtctgcgctgtcgccttcgacgccggctacgccatggccagggccgtgcagtccatatgacgatgatgattaatgaggcagctcgtagtgaaaagtccgctcgccggccggtcgccacatgtcgtatcattcttcaccggccggctaggatggcgaagaaaaataagggcagctactagcctactacgcatacgtggtagccaaactgtactgtacaacgtgtagtgtgcttgtactatcacagtactagtactagtgtgtactttgtttgatggctgcctgcgtgtcgcacatgtcgtgtttggatgatttaggtgaagccaaactgtggcccgctgggcttttcttgtgtaatttggcaagcggaggcccaaattgggtgccctttgggctctgtctctaaaaaaaaaaaaaaataagctgcaaaaagtctatagcatcccgaatcaatgtgaacaagcagattgtcgtatcgcctttcgcgtaatagattt

SEQ ID NO: 271275 - DNA, 426 bp, Zea mays
cgataatgttcatgaggatcatgttcgagatattgaggaagactggtgtggcagtataggctcggtagaagaaatgaaagctaagacattaaaaaggcaagaggctgctgctaagcgggaaagggcgatggcatatgctttaacccatcagtggcaggcaagttcaaggaaacagaaagcagcaagcctccaaggccaaggactcgccggggacgagaaccagtggggacgaaactggctcgagaggtggatggccgcgcgcccgtgggagaacaggttacttgacagcaacgccagggacagtgtcactgccggcgacgacgacgacaaaccagcggaggaaggcaaggcaaaagctccggacctgagcaaaccaaaaggaaaagctcccgttttggcctctcagtctaacgggtcgcggcaaga

SEQ ID NO: 271276 - DNA, 1564 bp, Zea mays
cgttcgcgtgggatcgtctcccggcaggggaacgagaactggacaggatgctgcggcaggggaagcagaggagaagaagagcatgctggtggtgtccgagttcatcggatgctcgccgtctctaagcggcgccatcagggtgaacccgtggaacatcgaggccgtggctgacgccatggagaccgcccttgtgctgcctgagaacgagaagaggctgcgccacgataagcacttccgctacgtgagcacccacgacgtcgggtactgggctaacagcttcctcctggaccttgagaggacctgcaagtatcattctcagaagaggtgctggggcattggcttcggcctgcggttcagagtggtctcgctcgacctgaccttcaggaagctttccttggagaacatccttatggcataccggagagccaagacacgggcaattctgctggactacgatggcacgctgatgccacaggcgattaacaagagcccgtccactgaatctgtgcggatcctgaacagcttgtgccgagacaaggacaatgtggtgtacctatgcagcgggtatgaccggcgcacccttcatgagtggttcccttgtgagaaccttggcatagccgcggagcatggctacttcctgaggtgtaagagggacgcggaatggaagacctgtgtcgctgccacagactgcagctggaagcagatcgcggagccggtgatgtgcctgtacagggagacgacggacggctcaaccatcgaggacagggagacggtgctcgtgtggaactacgaggacgcggaccccgacttcgggtcgtgccaggccaaggagctcgtcgaccaccttgagagcgtgctcgcgaacgagcctgtgtcggtgaagaccacgcctcactcagttgaagtgaaaccgcagggcgtgagcaagggcttggtggctcggcgcatgcttgtgtcgatgaaggagcggggccagtgcccggacttcgtcctgtgcatcggcgacgacaagtccgacgaggacatgttccagctgatcgccaccgctgcctgcggggactcgctggcgtccaaggcggaggtgttcgcgtgcaccgtcggccgcaagcccagcaaggccaagtactacctcgacgacccggcggaggtggtgaggctgatgcaggggctctcctacgtctccgaggagctggcgctggcgaaccagcgggatgaagacgaggactcctctttggacgacgtgtgggaataggaaggagcgttcccttcccgtgctgctcctgcggtaatgtctgtttgtgttgttggctcggctggagctttcgccgagtagtttaggtgtgtaaatgaggtatgcttttcagcgtaatgtattgccagtggtctagtctcgagagctggcttgaatctagtgatgctctagtactttggtttgtggtgctatttacctgatccgtggaaggcagtactatgagctatacaagatgcagacctgaaatctcattcatctgaagaccatgccctttctcctaggcgtgtgtatacgtctttggattttggaact

SEQ ID NO: 271277 - DNA, 493 bp, Zea mays
  unsure (1)..(493): unsure at all n locations
cccacgcgtccgcattcatcttgcaatgctaaatgccgtcctgtcgtgaagaaatgtttgatttggtggaacttcacatagtantgttggaatggaatcgtcttccagttgaattcgttgggatttcttgactcttgaaatgtgttatatattactgaatataaaggtgtaagagggacgcggaatggaagacctgtgtcgctgccacagactgcagctggaagcagatcgcggagccggtgatgtgcctgtacagggagacgccggacggctcaaccatcgaggacagggagacggtgctcgtgtggaactacgaggacgcggaccccgacttcgggtcgtgccaggccaaggagctcgtcgaccaccttgagagcgtgctcgcgaacgagcctgtgtcggtgaaagaccacgcctcactcagttgaagtgaaaccgcagtgaagcctcgatcctccatctcccatcttctttgcattgggaaatagaccag

SEQ ID NO: 271278 - DNA, 487 bp, Zea mays
ctggctgccatctcctccacgaggtgtcttcttcgtcgccgctccctgcgtgattaccgtgggcagcgccctcgactactcagccatggaggtcgctgccccttcttttcctgatctccctccatcggttcaaagctcggcgtccctgctcctgtccctcccatggacgccgcccctccctcagctcactccctctagccgccatggagctcgcccctgtccaaattcggttgcctctgtttccccctctctctgttggtggctggcatcccatctcccctgcgttggacggctgccgcttcgttctcgtcgctggcgttcgtccctgctccagctagttctcatggccatgcctctgttccctaggtccgagctcgcccaactccctagccatctctgctcgcccctctctgtctctgtgcgagcagcagcacgacggggcacacctatgtcctccacgcgcaccagatgtttgatgggaggtttg

SEQ ID NO: 271279 - DNA, 1753 bp, Zea mays
cccacgcgtccgcccacgcgtccgcggacgcgtccgcccacgcgtcaacaaacagagctccaactctaaaagcatccgtcccttggcagcagcaacaagctactagctatgtgtgtttagagcgagcgagggaaaaaaaagaaaacatctaagatatactccatcatcttcgtttgattaacccgcccagtaaagccatgggtactaatgatagagcggtcatttctctagtactcctcgtgtgcatcgctagccgctcgtccttgggtgccgctgaaactgacgttgagcagaagcgctcgtcagtcccgttgatgtttgtgttcggtgattcgctggtcgatgtcggaaacaataacttcctgccgccgcctgcaccccgtgctgcatctccgtacggcatcgacttcccttctggcacccccggcgccgtctcaggacggttcacgaatggctacaaccttgccgatttagtcgcgcgacgtctggggttcaagatgagtccacctgcttacctctcgttgacaccggtatcaaagtttgacctgttcacgtgccgaattggtgccaattacgcgtctggcggatctggcattctcaacaccacgggaaacgggacactcacgctgcagaaacaaatcacgctgttctcgaaaactaaagcaagaatgtcgtggggccgctgcaagctcagctctatggtatcgaggtccttgttccttgtcagcgccggcggcaatgacttctccgccttcagtgaaatgggcatgggcgaacaagacgccccagcctacatcagtagcatggtctcaacctatgtccagcatatcgacgcgttgtacaagttgggagcacggaggttggggatcctagacgtgccagcgatcggctgtaccccaggctccagagtccccatggccaacggcggatgcaacgacgctgccaactctatggcgcagaacttcaacaaactcctaaggctcgaggtggcgaaagccgtcgcatcctccatgcccggcatgagatactccattgcaagcacctacaattttgtcaccgacttgatggacagccatctagtggctgggctccgggtggtcgacagggcatgctgcggatcgggaaaactgaacgccgcggtcatgtgcgcccagccaaacacgacttactgttcggatcgcgacgactacatgttctgggacatgctacatcctacgcaggcaacaaatgaacgtggggtggtcgccatcttctacggcccgcaggagtacgcggatcccatcaactttgcacagttggccgctgccacagcaaatgatgatggtgatataaatactgctatgaccgcaggcgtctatgccgccatatgataatcactatttatgtcgattggcatgcagctgcgacatgtcactacctgagtgctatatacgtaattcagttggaataatgtacgttgtgtgcatcatcagtctctctatatatatgctggaaataaaatgaggacaagagaccacagtgttagtatataatcagctgcatatgcatgcatgggaagcagttggtgttggagaatgtggcaggcagtatgtttattcgcgtcctatggatgaccttttacttccaaattctgttttcaatcggttttattttatacactatcggaatcagcttttttggtcgagtgtctgaagcactcggtaaccaagaaagctcggcgaactgtacatcgacagcggcttctttgccaagt

SEQ ID NO: 271280 - DNA, 540 bp, Zea mays
agatccagccgccggacgagggggtgcggtgcggtgcggccgtgaccatgaagcagccgaggggccggcaggagccgcgccgggtgggcaacgccgccatggtcgtcaccatggtcgtctccctctgcgtcctcacctacatcaaggcgcgatactgctccaaccctttccccaaggcggcggcggaggtggaggtggacgaggactacgacagcacgcggtacaagctgacgggccccgtcggcgaggaggacttcgacccgtcccgccccacctgctacaacaccagcaagcggtccgagcggtgcgccgccgtgggcgacatccgcgtggacggcaaccactcgcggatctacatcagcccgctgtcccgcgagtggcggaccaagccgtacgcgcggcggcacgacgccgtggccatggacgacgtgcgcgagttcacgctggtccccttcggcggccccaacgacacggccgtgccgccgttctgaacgcgcacccactccgtcccgggctttcttttttccagcgggggtttcg

SEQ ID NO: 271281 - DNA, 556 bp, Zea mays
gtgttgtccaaggatgggtatcgatcttccatggaggtccaaccggccgccgctggaccttcatctaatctggatagtgaaagtcatctagtgcaacggagacggaaataagcaaccaaagaagacatcaaggtttctaagagctcgttcagagtgacaactcgttagccatgcttggtttcagacggccaagtgcaagccctgaatgtccacaaagggaattacaaggtccagagacgtggttgccagcgcgaggtgcttggaagacgaagtattgtgggggatagaaactctttttgatcaatggacggaagagtcattgcaactgcatttagacgtgtccatatactatgtattttttgaattttgagataaagtcgtggtactgaaaaatattatagtatttttccaagtgtttggctaccttgtaaaagctctcttttgaatactataatttagtagttccatggtttagtagataccatggtatttatttttggagtatttaaaactccactccaatctaattttttttaatctatgactggattttggt

SEQ ID NO: 271282 - DNA, 442 bp, Zea mays
ttgtaaaaaggcttcaatcaaaccatcttgcttagaaaggagaagctgaggtgttgtgcagggatgggtatcgatcttccatggggtccaaccggtcgccgctggaccttcatctaatatggatagtgaaagtcaactagtgcaacggaggaggcaataaggaaccgaagaagacatcaaggtttctcagagctcgttcaagtgacaactcgttagccatgcttgatttaagacagccaagtgcaagccatgaatgtccacaaagggaattacaaggcctagagacgtgattggtgcttggaagaagaagaatggtggggggcagaaactctttttgatcaattgacggaagagttattgcaactgtatttagacgtagtattttttggattttgagatagagtcgtggtattgaaaattattacagtatttttttccaaga

SEQ ID NO: 271283 - DNA, 744 bp, Zea mays
ttctcacgccttcgagcactcgcaacgctggcggacggagtggtacacttgggcccgggattagtgcgtttgaggatggaaagaaatctagtgacgttctaaaaactgccaagactctgggttctacagaacacagatccacgcgatgatctctggtggaatggatgtggctagaaaggcattgatcctggctaggcttcttgggcaacagataagcatggagagtatcaacgttgttgagagtttatatcctagtgaattaggacctgatgcagtgtccacaaaggacttccttgaaagtggtttagtgcaacttgacaagagcatggaagaaagaatcagagcagcatcttcgagaggaaacgttcttcgctacgtctgtgagattgaaagcgcagggtgccaagtaggccttaaagagctcccaaaggattctgcgctgggtagattgaggggaagtgacaatgtggtcgagatatacagcagatgttaccagagctcccctctggtgatccagggcgcaggagctggcaacgacaccactgccgccggcgtccttgctgacataatcgacctccaagacctgttccagacgatggcttgatcgttgatcggcatccacaccagtacaccatcttgatttttgcaaggcaccagagcgtttgatactttgatcggtgccagtggaatccctcactgcccactggttggcttcgcttcttgtcatgtgtgcatttttgtcac

SEQ ID NO: 271284 - DNA, 595 bp, Zea mays
atcgaagcctggacgacgcgaccgcgcggcggcggctcgacgcaaccagcacggcggcggcgcacagccccgacgacgactctccccgctgccttctcgcctgtgaggatctgctctcttccttccctctcctatcctctgctctcgctgcccccaaactctcgccctcgatctcgctcctctacgctctcgcaccgcggcgctttgttcaaggtgtggccgccgccagtcgcctgcgtcgttgaagcagttgctgtcgaggttgaggtcctcctgggggagacgcgcggcgcggccgaggcgcagcgcggtcaggttcgggtatgacctgcatagctactcccagaacttcgacgatggcgttgcctagtcagcccggcggccacggctagcttcttcagtacgtgtagctagttaggagtctaggatattcgtgtaactagctacggccaggatattagtgtggctttaattagtgctttttgtcctgaccactgagatttcagtccagtgttaacttccggtgattatctgtgctctctagctggttcatccagttatattgtataaagaaattacttcatcttataattag

SEQ ID NO: 271285 - DNA, 869 bp, Zea mays
acttctcactcttacgcccacgcgtccgcttccgcatcgcatcgagagcggggctgtaccgtgcgagactctactgctcgatcgccatggccgccgcgctcaggtgcccggcatccgtcagggtctcgggccccgccgccgcggggctcgccaaggtgcgccaggcgtccagagtcgtcgcggtgagcggggcccggcagagccgcggcggcggcgtcgccgtgcgggcgtcgctgttctcgcccaagcccgcggcggccaaggacgcgcggccgaccaaggtgcaggagctgtacgtgtacgagatcaacgagcgggaccgcgagagccccgcgtacctgcgcctcagcgccaagcagacggagaacgcgctgggcgacctcgtccccttcaccaacaaggtgtacaacggcagcctggacaagcggctgggcgtcaccgcgggcatctgcgtgctcatccagcacgtccccgaccgcaacggcgaccgctacgaggccatctacagcttctacttcggagactacggccacatctcggtgcagggcccgtacctgacctacgaggagtcgtacctggcggtcaccggcggctccggcgtcttcgagggcgcctacggccaggtcaagctccaccagatcgtcttccccttcaagatcttctacaccttctacctccggggcatcccggacctgcccagggacctgctctgcacgcccgtcccgccgtcgcccaccgtcgagcccacccccgccgccagggccgccgagccgcacgcctgcgtcaacaactacaccaactgactgatcaattccagcccaggaaccatctctgtctgccgtgcctgtccccccctgcccctcactcga

SEQ ID NO: 271286 - DNA, 530 bp, Zea mays
cccacgcgtccgtcaagatcttctacaccttctacctccggggaatcccggacctgccaagggacctgctctgcacgcccgtcccgccgtcgcccaccgtcgagcccacccccgccgccagggccgccgagccgcacgcctccctcgacaactacaccaactgatgattgatgaatccattatcatccatctctgctctgtctgtcgcggctgtcagaacttgacgagacaagctcccctgctactcatcagtactcctcactcgtagcccaagggtttttcatttttccatgggaaattagttcatttttccttgggaaattgaaaatcccatagaaaaatgtggttgacaaactagcctttatgtgtgtatggctagtttcttcaattcgtgagtgcgtggtagtaccaataagcaataagacgcagagggatcgatcaaaaaaaaaaataaaaaaaaaaaataaaaaaaaaataaaaaacaaaataaaatataataaaattaaaaaatttttaaaaatatataatct

SEQ ID NO: 271287 - DNA, 382 bp, Zea mays
gggcatcccggacctgcccagggacctgctttgcacgcccgttccgccgtcgcccgccgtcgagcccacccccgccgccagggccgccgagccgcacgcatccctcgacaactacaccaactgaactgatgattgatgaatccattatcatccatctctgctctgtctgtcgcggctgtcagaacttgaccagacaagctcccctgcttctcgtcaggactcctcactcgtagccgtagtttggctactcttatgtgtgtagggctggtttcttcaattcgtgagtgcgtggtagtaccaataagcaataagacgcagagggatcgatcaagctgtgtgcttcacttggctgcttctgattacaattgatcaatggtaacgt

SEQ ID NO: 271288 - DNA, 379 bp, Zea mays
cgttgtgttccttgctttgcttttgcttttgcttttgcttttgcttgatcggtgcctccgcttagccgctcttcctccccacccacccatgcacccaggtttacaacggcagcctggacaagcggctgggcatcaccgccggcatctgcgtgctcatccagcacgtccccgaccgcaacggcgaccggtacgaggccatctacagcttctacttcggcgactacggccacatctcggtgcagggcgcgtacctgacctacgaggagtcgtacctggccgtcacgggcggctccggcgtcttcgagggcgcctacggccaggtcaagctccaccagatcgtcttccccttcaagatcttctacaccttctacctccgggg

SEQ ID NO: 271289 - DNA, 577 bp, Zea mays
aataacggcataaccctagtccctaccccatataaaacgaggcaggatcgaggctttccttccaattccacccatcgccgccgaaatcccgttgcgtctctcgcgcgttaccaagctctcaagttttctcgcgccgacggcaatggatgaggtcaccgaggccgtgaacaacctcaacatctcgggcgtaggggccgcgggcgttgccggggcggaagggcacaagaagaatcgcatccaggtctccaacactaagaagcccctcttcttctatgtcaacctcgccaagaggtacatgcagctgcacaacgaagtagagctgtcggccctcggcatggccattgcgacggtggtgacagtagcagaaattctgaaaaataacgggcttgctgtcgcgaagagtatcatgacatctactgttgatatcaaggacgagactaggacccggcctatccagaaggccaagattgaaatattgcttggcaagacggagaagtttgatgagctgatggcagcggctgccgaggagagggaggctaatggggccgaggaacatagctgagtacctgcaaggaag

SEQ ID NO: 271290 - DNA, 328 bp, Zea mays
ggtgcgggcgtgcggcctccctttttttctccagttcctccggcggcggcgtgcttggcggtgcgccaggtgcccagatctccaccatcttagtcgccggcgacgagcatcaccaggttcccgatgaccatggcgcagcgcacgatgtgcctgcttcggcggtccattgggtttacagcgccgcaggcacagagagccctgagtaccactgccgctggggcggagggtgcggccgtggctgaagctacggcgaaggaggcgaagaggaggaggaagaaatctgtttgacgtagtgcagttcctgccagagtggggcattggatacaag

SEQ ID NO: 271291 - DNA, 415 bp, Zea mays
agacgttggctgcgggtggcaagcgatggttgcctacatcaacgtcggatgctactacttcatcggcatacccctcggcgtgctcctcggattcaagttcggtttcgggatcaagggactgtggggaggcatgattgggggtaccctcatccaaacacttgctttgatctggatcacgttaaggactgactggaacaaggaggtaatttttaagccaccgtaaatttccttggttaccgtgccgtgtcactgacagatggtcctcaaatccaccgcgcgtgccgatgtgttcgtcttcgtccatatgctcggttattccttccaagctcaggcttctgttgtgtgggcattttttctctgtgttttgcttccttttttcttgggcactaatttaaccgttttccccccccctttt

SEQ ID NO: 271292 - DNA, 604 bp, Zea mays
gatgcttcctttattttgtggattgatcattacactacaccattcaggaaagcgcaaaccttcgcccgagttttatcttcaagctgcagatcaactcaacgttgatccagcaagctgcgtttttattgatgataggatgataaacattgaagcagctcttagtgtaggaatggttgggttgcagtttaaaagtgctgaggcactacagaaggacttgtgtgctctgggagttgaattatctcctcttgtttgtgaaggtgaagcacaagtacaataaggttgtgtgtgccctatcggaggttatgctcaaccaaactacaatacgaatgtacataatgtatggtgccctttctttgtgagctatgtcaataaattattgtgctaaaaaaaaaaaaaaaaaaaaaaaaaaaaaaaaaataaaaaaaaaaaaaaaaaaaaaaaaaaaaataaaaaaaaaataaaaaaaaaaaataaaaaaattaaattataaatatattaatttataaatactataaaaattaataaacaatattaaggggggaatctttaataatcagaatatattttttattttatttatatatattttattttttttattttt

SEQ ID NO: 271293 - DNA, 1276 bp, Zea mays
cgacccacgcgaacggccggctcccggcccaacgctcgcttccccctcccgcgaatcattcgattcggcccgcctgggctcgcccggcccgatgcgattgggccgtcagggggatcggaacccgcgctaggggtaggggtcccgcgatccccatacctatggggcagctgccgagctcggggaagcggcacgcggagccggccatggctccggcgcggcgcgcggcgaccgtcaagctagaggtggaggagctcggggccgacgagcgctgcccgctcagcaagcgcgccaaggcagctctgccgatgcccccgacgcctccgcagccgcagcaggatatgtaccacaatgtactcgatgaacctagcccattgggtctgcggctgaaaaaaagtccatcactcttggatttgattcagatgagactttctcaagcatccaatgctggcgagtcatccatggacaacagcggttctgagccttccaagaagaaagacaataaatctggtgcttctgcagcaggcgaacggctaaaagcttcgaattttcctgcaagtatattgaagattggttcatgggagtatgtctcacggtacgaaggtgatttggtggcgaagtgttactttgcaaagcataaacttgtgtgggaagttctggaaggtggccttaagagtaagatagagattcaatggtcagatattactgctttgaaggcaacttgccccgaaaatggccaaggaaccttggacgtggcgttggccagaccacctcttttctttaaagagacagatccgcagccaagaaaacacacactgtggcaggctacctcagatttcactggtggtcaagcgagtgtgcacaggcggcattttctgcagtgcccttcaaccttgttgagcaagaattttgagaagcttattcagtgtgatcagcggctatatcaattgagtcaacaaccggaaatcacattagaccctgcgttgtttgaacctaggagctcaatatttgaggatccggttgaatcaaaatgcgctgggtttactaatttgaaagatgaacatgaggctctgcctggctattcaggcccggtgtcaccatgtgccggttcctccatatctgctaagaatgaaaacaatgattccattggaatgacagctgaatatctttctcagacagttggaacaggagttggtgctgtacgtgtacaagctgttggcataaatgttaatggtgcagcaccacaattcactattccccactggtggagtcaactgaa

SEQ ID NO: 271294 - DNA, 573 bp, Zea mays
aagagggtgagccaaatatctgagaaagtggcgactgggattttgtccggagtggtgaaggtcactggttacttcacaagctctctggccaactcgaaagctggcaagaagttcttcaacatgttgcctggagagatcgttcttgcttcgcttgacggatttgggaagatctgcgacgccgtggaggtggccggaaagaacgttttgtccacgtcgtcaactgtgacgaccgggctagtatctcacaggtacggagacaaagccgccgccgcaacgaacgaagggctggacgccgccgggcacgccatcgggacggcatgggccgtgttcaagatccggcaggccttgaaccccaagagcgtcctcaaacccacggcgctggccacgtccaccatcagggccaacgttgccgagcttcgcgcgatgcacggcagcagcaagtagctcgcgcctgccgtccctgtttcgtaaactctctattatctcgctctgtcacgaccaacgatgcactcgctgcttccagcagcagcgttggctgttgcctgttggcctgtaaattcgtgtggctgaaac

SEQ ID NO: 271295 - DNA, 1448 bp, Zea mays
aggactgtggacaactagtcagactctcgggtacgtttcacttgcagggcagtttatcgactctgagtggaaagtacgccgaagaatgcttaacttcatgatggtgtcatctcctcactcagagaatgcacttagtgaggcaattagcccgagcctctcggactggagtatgaaggacaagctattcactatcacattggataatgattgctcttcccatgatatttacagtgcaaatcttagggatcacctctccaacaagaacagcctcatgcttaagggacagctctttgttgtgaggtgctatgcccatatccttaatgctgttgctcaagatgtcattgcttcgattcatggtgttgtatacagcatccgtgaaagcataaagttcataaaagcttcttctgcccgtgaagagaagtttgctgagattgctctgcagctggagattcccagtaccaagaccctctgtctggatgttacaacccagtggaacaccacttatctgatgctgctggctgccttggattataagcaggctttcactacactagaaacatgtgatgataactacaatgaagctccatcagcagaggactggaagaaagttgaggccgcctgtaattacctgaaactgctatacgactctgcacatagtatcatggcggcagcaaacccaactgcaaacatctttttccatgaagcatggaaacttcagctagagctagcaaatggcacaggacatgaagaccccactttcagaagcatcgccaaggatatgcatgagaggtttgacaagtactggaaagattgcagcctcgtgttggccgttgccgttgtcatggatccacgtttcaagatgaagcttgttgagttcagttacacaaaaatttatggggctgaagcagcaaagcatgttaaggtggttaatgatgctgtacatgagctgtacgaggagtatgtggctcatccactcccactgaccccagcctatgtggagcaaggtgaaggggggaataatggaccagccaatgcgaacagcagtcaagggcctcctgcttccactggcgatgggcttctagacttcgatatgtacctttctgagatccagagtagccagccctcgaaacctgaactggaacagtacctggatgagtccctcaccccacgtacccaggagtttgatatcctgaactggtggaagctaaacagagtgaagtttccaaccctctctagaatggcctgtgatatcttggccattccgatgtccatggtaagcagtggcagctccatattcactgctggaacaggaagccgcatgctcgatgactacagaagctctctccgacctgagacggtggaagcactcgtctgtgcaaaagactggctgcagtactctacgaaggctgaaggatcgtaggtttatcgtcgtcgctggtcactgctcc

SEQ ID NO: 271296 - DNA, 294 bp, Zea mays
cgcgtccgccggcgtggacgcgaggggctatgaagagcttgttagtagtattgttttgtatgctgctcctgtcgttatcacgctcaccaatacgctcgcgaaataagccacgccagcagttcgttgacacatactgtatgagtactattatactatacggcacaaacggccaaacgccacacaggcgtggatcaaaattgtactagttcctgtctacaattcgtggcctttatcatcctgattggctgcccgtatattatctatcttaagtcatctatattcttatcttaagta

SEQ ID NO: 271297 - DNA, 386 bp, Zea mays
tcctctcgttatcgtgtttaagtgttctgtttaggccgtggtcctacgccctcttgtcacatagttctggatgtaaagataagtagccagccatgaccgagagaaggttttttttggggggtgttaacacacggcccctctgaattggccatgctaaggaaaatgatagtagtgcaaagagaaggatatgtctttttctttttctgaaagcccagatcgtttggctctagccttgatgtatgcagaacaagtgattgtaatggattctgagtatcctcatcgtctaaaaaaaaaaaaaaaaaaaaaaaaaaaaaaaaaaaaaaaaaaaaaaaaaaaaaaaaataaaaaaaaaaaaaaaataaaaaataaaaatataaaaataaaaa

SEQ ID NO: 271298 - DNA, 1349 bp, Zea mays
tctcgagccgattcggctcgagcaatattattcattgttgaaatatagtagttgattcagttagtcaagccttatacttgtggcctaacgtcacttgatattttactggagaggttggatatgtctgtaaggaggatgaaatattgttatattggattaaatagagtattggaggtccaagttttggagctttctttgatagctcatttatgtagactctcaaagattgcagtttgttccaaggtagttctgggtaaggtgctctgggtaattaatcgcttagaggatctgtgtgctgatgggtcctgtgaactgtctgacttcagtggagaaattaagaaggcctgtgataccaaccgtattggcgataatctgattggcaacatcaacaatttgtttcaactcttccatctgaaaccaacaacagactttggaatgcttaaagtgataagtgcaatgttgcgggtctgtgataacgattctgaaaatccattacaatacatttgtggattaccggtgggtgtcagctttaaaatatctctgtggaacatatctggtcaccatcgactgtggctccgcatgaccattggtgaatctgtgcaacataccttcctagaattttctcgttttgaaggcaatgatgaggtgaggagtggctctatggctgttcctttgtatgctactccaaaggcatgttcatttgtgcttcgggtatgtctggtaatggaatgtccatctgcagggatcagcacccaccagggtggacatggaggaccgagtgattgtgtggttcaactctctgatgaactgaatgtttattttgttagtactagccaatggtgatgattaaaataagtgaccatatgctttccatgctcatcatcttacaggcttttgcttgagtggacattcttgatccaggtctcttctgaggaaaagggttcagttgtgctgacatttttgtagctacagcaaaagcttctgaagggttcagttgtgctgaaatttttgtagctatggcaaaagcaatgcagatgagctccatgctccatgaccgtatgcatagtgtggagtgcaagtggtttttaacctggtcgaagccctttgagttcgttaggagctacagcttcagacggaaagtgaagctccccaaatgacgatggagaaagtgcagcgtgggggtgaagctgacgatggagaaggtgcagcggaccaccctgcgcgcgttttttttgtccccaatttgtgtggccttggcctgcggtgagtctaggatgagaaacagctgggtcagaaattcggaatcctacggtacggttcatagtatattaataatacttccgttttcg

SEQ ID NO: 271299 - DNA, 1132 bp, Zea mays
accacgtgctcgtgcggcgactccttacacccagtgccaaccgccgtgccctcaccctctctatctgcgccgtctctcactctctaccgccgccgccgccgccctacgccacgcaaaaagcgccacaagattcgcccctgctgaaaacgcactcgatggcgtccgcgacgggggtttcctcctcggagatggcggtggaccacgcgacggggccgggcgccgtggacaagccgcggttcgatgctctgacgccgaatgagatgagcggcgggaggccccagttccggaaagtgcccgtcccgcagcaccggttcgcgccgctcaagcgatgctggatggaaatctacacacccgtttacgagcatatgaagatcgacatacgcatgaatctcaaggcgaggagggtggagctaaagacaaggcaagacacaccagatgtcagcaaccttcagaaatgtgctgactttgtgcatgcttttatgctcgggttcgacattgctgatgccgtcgccttgctgcgtcttgatgatctgtatgtggattcctttgagatcaaggacgtgaagaccttgcgaggggagcatctgtcgcgcgctattggccgcttatcagggaaaggaggcaagaccaagtacgccattgagaactcaaccaggacccgcattgtcatcgctgatacaaagatccacatacttggatccttcgttaacatcaaggtcgcacgggattcactttgcagtctcatcttgggttctcctgctggcaaagtgtattctaaactaagggctgtatcagctaggttggcggaaaggtattaaattaaatggggtttgcccgcaccgtataagggcatgttcggttcccgctcaattcatatggattggaggggtttgagtgggattaattccatatcaagtcaaaatccttcataatttttttcaatgctttccaatcccatgaggtataggaataactgaacaaggcctaattgttgcagttttggtcacattcacacagtgtgttatagtagcagtttgtgtgctcgggacactggggaagtttaatgtatccttaccttatgaatagcggactatgatgaagggagatttaaattgatatgtattcggggttt

SEQ ID NO: 271300 - DNA, 343 bp, Zea mays
atatacttggatcctttgttaacatcaaggtcgcccgggattcgctttgcagtctcatcttgggttcacctgctggcaaagtgtattctaagctaagggctgtatcagctaggttggcggaaagggattaaattagattggttttgcttgtaccatgtaacgggtgcagttttgctctcagtatgttttactaccggatttgtgtgctcggggatgctgggagatttaaattggggtgtacatgtgctcttgtgcccccccaatctatgtgggggggtttattttgatgaaaaatagttattttcttatcctaaccccctataaatcgataaaatatggcttg

SEQ ID NO: 271301 - DNA, 643 bp, Zea mays
  unsure (1)..(643): unsure at all n locations
cccacgcgtccgctcccgtttgcgacgactgggtgggctacgccgccgccgccgccgctgccgctgctctacggtgctgagtcctttgccgatttcttcccggcgaagagcgccaccagccttttgcataaatcatcgggtatacatccatcttcatttagtagatccgcccctgctgaaaacgcactcgatggcgtccgcgacggggggttcctcctcggagatggcggtggaccacgcgacggggctgggcaccgtggagaagccgcggtttgatgctctgatgccgagtgagatgagcggcgggaggccccagttccggaaagtgcccgtgccgcagcaccggttcgcgccgctcaagcgatgctggatggaaatctacaaacccgtatacgagcacatgaagatcgatatacgcatgaacctcaaggtactggactggagtctacccatattgggctttcttgttttatgtgaatgagcttttcgtgctctattccttgcaagaaccatagattgtatacttcagatcgccgtcaagaagctcaacccggagagcgtccaaggcctgcagagtggcaggataacatggagaacttcaaccctttcggtgagaatggagagtanggtacagggtcaccat

SEQ ID NO: 271302 - DNA, 531 bp, Zea mays
  unsure (1)..(531): unsure at all n locations
gaaaagtatagacaatttttttccaaaaaaaagaaaagaggaaaaaaatgttatcttctacctccttagctgctcttctccatggccgcccccattatcctttccctccgtcgaaggcgcatcttttcctagctctccccaacaaccctacccgtttcctggcctccgcctccgtccgggtcgcctatcctccccggtggcctctccgcgccgccgacggggagcgggacaaccgcgtgcaggagctgagggtgcccgattcttggctgacgcctgcaggagcaacgcaggaatctgaatggctgagggagacactgcgcaagtggctcgacgacgagtactgcccggagccggccaacgtggacatcagcagcaccgccgcgcggtcgtatcgcgaatccctgatagcgcggcagtctgatctgggagagatcttgctgaggatggtgggcgacctggacaagctgtcgtacagggagagcttncacggccccttctcggccgccaacgctgcagtccgtttgatcgctc

SEQ ID NO: 271303 - DNA, 513 bp, Zea mays
gctttgcacgggcggcagaaagccgtagacagagcagtgacggtcgtcgtacagatcacgatgctgctcccacactcttcgtcagcctctgcaactgctaccactcgtgggctagcactagcagcaccaccaccgccgccgcgtccgaccgctcgcccccggcgcgcgcgcctcctgcctccacgcgcgcgggccgagacgcatgcggcgggcgttggcgccgaccgcgcggccgaggcgcttctccagagcgggctgcgccgtgagtcgctgccgcggcacgtcgcggtggtgatggacgggaactcgcggtgggcgcgcgagcgggggctgacgcccgcggacggccacaaggccgggggccgcaacctggagcgggtcgttgcgctgtcgcgcgcctggggcatccgcgcgctcaccgccttcgtctgctcccgcgagaacttgagccgccccaggcaccgccctcgatccctgcttttcataaactcgcgtacacatcggacgacgacc

SEQ ID NO: 271304 - DNA, 1192 bp, Zea mays
cctcctttctccaccgtaccagtcgagatcaagacgggaataatagacaagaacaaggtgcgcggcacagcactcgacgatattaatggagctgctctgcacaggacggtaaaaaagccagtgcaccaggcctgacctgggccatacagatcacgtggacgcttccacactcttcgtgagcctccataactgctaccactcgtgggcgctcactagcaataccaccacctgtcgccgtcgaccgatcgcccccagatcacgcacctcctgcctacacgcgcgcgggactagacacatgcggcgggcgttggcgccgaccatgcggccgaggtgcttctccagagcgggctgcgccgtgagtcgctgccgcggcacgtcgcggtggtgatggacgggaactcgcggtgggcgcgcgagcgggggctgacgcccgcggacggccacgaggccgggggccgcaacctggagcgggtcgttgcgctgtcgcgcgcctggggcatccgcgcgctcaccgccttcgtctgctcccgcgagaacttgagccgccccaaggccgaggtcgactacatgatgggcttgtccgagtggctgataggcgacaacatcgacaagctctcgaggcaggggatccgactgcaggtgatcggcgacgccgcgaagatgccagcctctctgcggagcgcagcggcgcaggccgacgaggccacgaggcaaaactcgcagctgcacgtgatgctggccatctgctacagcgggcgatgggacatggtccaggcgtgccgggagctggcccgggaggcgcaggcgaaccggctcagtccggacgacatcgacgagtcggtcatcgccggcaagctcgcgacgagcgccgccggcgagttctcctgtcccgacctggtcatcagaaccagcggcgagatgaggctcagcaacttcttgctgtggcagtcggcgtactcggagttgttcttcaccggcaagatgtggcctgactttggggaggctgagtacctggaagcgttgcgctccttccagggcagagaccgccgcttcggccaatcaaaattactctaacagtctaactcgatggagccatgaagtggagcgccagtatatctgaagagttatggcttgttcggttagctttcaacaaaaaaaaaaaaccggaccgctcgcgatctagaactagtcc

SEQ ID NO: 271305 - DNA, 447 bp, Zea mays
ctcaactccatggtgctcgccaacaactcggagaacgtgctgctcccgctcaacgagccggtgctcggcaccaagcgccgcagccagatacaaacgttcctggaccaccacggcggccccggcgtgcagcacatggcgctggccagcgacgacgtgctcaggacgctgagggagatgcaggcgcgctcggccatgggcggcttcgagttcatggcgcctcccacatccgactactatgacggcgtgaggcggcgcgccggggacgtgctcacggaagcacagattaaggagtgccaggagctaggggtgctggtggacagggatgaccagggcgtgctgctccaaatcttcaccaagccagtgggggacaggccaacgctgttcttggaaatcatccaaaggatcgggtgcatggagaaggatgagaaggggcaagaataccagaag

SEQ ID NO: 271306 - DNA, 342 bp, Zea mays
cattgaaatgcgccgcatcatttattcgggtggtgcgttaccctggtgaagtacatgactctgatagtggaaactatggtgcgtcagctcactcggactatggtatgataactcttttagtgacagatggcactcctggcctgcagatatgcagggagaaggataggaatccccaactatgggaagatgttcatcatattgatggggcccttattattaatattggtgatttgctagagaggtggacgaattgtgctttcagatcaactttgcatcgtgttgttgcaatcggttaaaagcggtattcggtggctttctttcttgatccaaatcctaacacac

SEQ ID NO: 271307 - DNA, 616 bp, Zea mays
caagggacaaggatggtgaggtgggagatgatgtgtttgatgaagaactggaggctgaggaaactgacaacccagagctagctgttaagcctgtttatgtcaaggacgacttctttgattccctctctagtggaacgtttggacgtggagggccaaatggaaggggaagaccttctgaacggcgcagagtagacacagagacgtttggtgaatttccgaggcacaggcagccctaccgtggtggcggccgaggctaccgtggcggtgggcgttcccgtggttcatattacggtggcagaggctatggaaacacggggaggggtggccctgggaattcttatcctcactggggcaatgggagagattgattatagcagcagcagccatacttgcgggtgttgtagtcttttgccacatgcatgaagcgcatccattactatctaaacaaataaatggaaccttaccaccatgtcactcgtcggtgtgccttgtccagacaaggcctgtagcgtttggtcattgatgtggtgcacccctgtcctgtaagaaagttaccagtacatgaacaaatgagatgatgcttgataggtataaacttgttggcccttgatgtgca

SEQ ID NO: 271308 - DNA, 1089 bp, Zea mays
tcgtccgcgcacgcgcgctcctgttcagtgtggtgcaggagaacggacgagctcgtggacggccccaacgcgtcccacatctcggcgctggcgctggaccggtgggagtcgcggctggaggacatcttcgccggccggccgttcgacatgctcgacgccgccctgtccgacaccgtcgccaggttccccgtcgacatccagccgttcagggacatgatcgaggggatgcgcatggacctgaagaagtcccggtacaggagcttcgacgagctgtacctctactgctactacgtggccggcaccgtggggctgatgagcgtcccggtgatgggcatctcgccggcgtccagggcggccaccgagacggtgtacaagggggcgctggcgctgggcctggcgaaccagctcaccaacatcctcagggacgtcggcgaggacgccaggaggggacggatctacctcccgcaggacgagctggagatggcggggctctccgacgccgacgtcctggacggccgcgtcaccgacgagtggaggggcttcatgaggggccagatcgcgagggccagagccttcttcaggcaggcggaggaaggcgccaccgagctcaaccaggagagccgatggccggtgtggtcttctctgctcctgtaccggcagatcctcgacgagatcgaggccaacgactacgacaacttcacccggagggcctacgttccgaagacgaagaagctgatggcgctgcccaaggcgtacctgagatcactggtggtgccctcctcctcttctcaggctgagagccggagacgctattccaccctaacatagaccggtctctctctcactgtcggtacatagcagcagcagcagtgaatgatcgatatgatgtacaaatttctggccaggccacatgcatgagtagtacgtacatggttggcaattggcatgtggtggtggtcgatcggtgttacatacttgttgtactcctctgtactatacaaaacatgccggagactcgcgcgtaagtgagaagcgataaatggagatagatgtttgtctcataaaatgaactaatttacgttaaggtgc

SEQ ID NO: 271309 - DNA, 1181 bp, Zea mays
ggagctcatcgaaaacccggacgggagcctgtcgcggcgggatgagtccaactcggaggaactgggcacctctctttgcgccaatcatcgcagcggttatgttgctgtattggggaagccaaatgttggcaagagcacacttattaaccaaatggttggtcagaaactttcaattgtaacagataaaccgcaaacgacaagacatcgcattcttggtatatgttctgaaccagagtaccagattatactttatgacactcctggtgttattaaaaaggagatgcataagctggacagtatgatgatgaagaatgttaggagcgctatcggcagtgcggactgtgtgcttgttgttgctgatgcttgcaaaactcctgaaaagattgatgaaatgcttgaagaaggtgttggaaacaaagatattggacttcctgtactgctggtattgaacaagaaagatctcataaaacccggagaaatcgcaaagaaacttgagtggtaccaaaaatttactaatgttgatgatgttataccaataagtgctaaatttggtcatggagtggatgatatcaaggagtggatattgtcaaagctccctctgggtcctgcttactaccccaaggatatagctagcgaacaccctgagagattttttgttggtgaaatagtgagggaaaagatttttgttcagtacaggcaggaaattccttattcatgccaggttaatgttgtcagttacaaaagtcggcctgctgccaaggacttcattcaagttgagatacttgtggagaaagaatcacaaagaggcattatactagggaaggatggcaaaagcataaagatgctggcaaccgcatcgaggcttgacatcgaggactttctacagaagaaagtctaccttgaggtggaggtcaaagtgaaggaaaactggcggcaggacgagcgactcctgaagcggtatggctacggcggcgagatccaagcgctgtgactgtgactgtgactatgaccggtgcgctctagctcactgtcagctgccgcgagcgtggaatgacctggttttttttcaattcctctcgtgtgttgttgctgtcgatgcgaatgagtagcagttatttaacctggtgtcgaactcaactagcagctcagttgtgttaattagtcagcaagttatgtgctct

SEQ ID NO: 271310 - DNA, 517 bp, Zea mays
caatccagaagcgaagataatatcttccccgttctcgccgatggctgcaacaccaacacccactgccgccgttttgctcgcgcgcccgctcatcgcactgtccagtgctttcacctcccctcatcgtgcgcgggtgccgagcggtccctcctccatctcggtgccgccactgaggagtcgatggtgccagtggcgcggcccgctccgatcgctgccccccgaaggatctccggccgagctgatggaagaggactccaagtttgtgccgttgaacgcggacgatcccatgtacggcccaccggcgctactgctcatcggatttgagaaaggcgaaactgtcacgattcaggccttcctgaaagagcttgaaggtgaattcctcaaggtgatccattgtacagaggagatgacaaagcaaaccttatgggatgccatgcacactgagcagcctgatttggaagctgtcaagaatgcaggaccactgccaaggatatgcatattttctggtctaactggg

SEQ ID NO: 271311 - DNA, 1387 bp, Zea mays
agcacctagctagctagcgctagtaccatcgtgcgagtgtgagcaagctactgagagaactcggaacgttgcttgacagcttgagtaggtaaataatctatggcgcgccaacagtggagcagcggcggcctcgcggtcgcggtgctggccgtgctgtcgtccgtgctcatctgctcgggccacccggtgccgggcgggctccccctgctgccgcacttctacggccacgcgtgcccgcagatggaggccatcgtggggtccctcgtggcgaaggcgcacgcggaggacccgcgcatggcggcgtccctgctgcggatgcacttccacgactgcttcgtgcagggctgcgacgcctccgtgctgctggacgccgacggcagcggcaggttcgtcaccgagaaacggtccaaccccaacaaggactcgctccgggggttcgaggtcatcgacgagatcaaggccgcgctcgagcacgcctgcccgcacaccgtctcctgcgccgacatcgtcgccgtcgccgccagggactccgtcgtcctgaccggcggacctggctgggaggtgccactggggaggagggactcgctgacggccagcctgagcggctccaacaacctcatccctgctcccaacgactccctccccaccatcatcggcaagttcgccaaccaaggcctcgacatcgtcgacctcgtcgcactctcaggggggcacaccatcggcgactcgcggtgcgtgagcttccggcagcggctgtacggccagaacaacaacgggcaggtggaccgcacgctgaacccggcgtacgcggcggagctgcggggccggtgcccgcggtcgggcggcgaccagaacctgttcgcgctggacctggtgacccagttccggttcgacaaccagtactaccacaacatcctggccatgaacgggctgctcagctccgacgagatcctgctcacgcagagccgcgagaccatggacctcgtccaccgctacgccgccgaccagggcctcttcttcgaccacttcgccaagtccatggtcaagatgggcaacatctcgccgctcaccgggagcgccggcgagatcaggcacaactgcaggagggtcaaccacttctagcttccatggagtggccatccgtgcagtggtgttcttgctttggtttcatttctggatgcatgcgtcatctttcatacttggatttaagtgtgcagtagtcgtaaatgattggaatttctgttttagtttggtgcccattcgatctcgagtcgattttcactcatgtaatttgcaaatcttgtacgaagaaatgatccaataaaattcagcatttgtgtcaaaaaaaaaaaaaaaaaaaaaagaaaaaaaaaaaaaaaaagggcgg

SEQ ID NO: 271312 - DNA, 723 bp, Zea mays
ttttgcactttcaggagggcacaccatcggcgactcgcgctgcgtgagcttccggcagcggctgtacgggcagaacaacaacgggcaggtggaccggacgctgaacccggcgtacgcggcggagctgcgggggcggtgcccgcggtcgggcggcgaccagaacctgttcgcgctggacccggcgagccagttccggttcgacaaccagtactaccacaacatcctggccatgaacgggcggctcagctccgacgagatcctgctcacgcagagccgccagaccatgggcctcgtccaccgctacgccgccgaccaggggctcttcttcgaccacttcgccaagtccatggtcaagatgggcaacatctcgccgctcaccgggagcgccggcgagatcaggcacaactgcaggagggtcaaccactagtaattctaaggagggatgcatatatacggcaatccgtgtggtgcacatcctttgatgattttcatatgtggatgcttcgtatttcatgcttggatttaagtgtgcagtagtatttaaatggctggaatttctgctttattttggttggatttaagtgcgcagtagaaaatggtcgcaatgtctgttttaatttggctacgttctggagtggatttttcactatgtaactcgccattcatgtaccaagaaacgattcaatgaaattcatatttcttgtcagtgccgaactactcagg

SEQ ID NO: 271313 - DNA, 347 bp, Zea mays
gcacctagctagctagcgctagtaccatcgtgcgagtgtgtgagcaagttactgagagatctcggaacgttgcttgacagtttgagtaggtaaataatctatggcgcgccgacagtggagcagcggcggcctcgcggtcgcggtgctcgccgtgctgtcgtccgtgctcatctgctcatcgggccacccggtgccgggcgggcacggcggcgggctccccctgaagctgcacttctacggccacgcgtgcccgcagatggaggccatcgtggggtccctcgtggcgaaggcgcacgcggaggacccgcgcatggcggcgtccctgctgcggatgcacttccacgact

SEQ ID NO: 271314 - DNA, 502 bp, Zea mays
  unsure (1)..(502): unsure at all n locations
cgggccgacccacgcgtacggcttaactgacggtttcgaccttggtgttgattatgctgntgggaggagacaaggaagaggggggctgttcaagcaagtcgcatggcaagagcggaaaccgaaagaagcacctgaagagcagcaagaagaggaagaggcattagccctggacccacactgctgtagcacttcaacatactgatacagcctagagacggttcaagcaatccacacggaaagttgaagctggagaaaataccaagaaaccaagtagagaaaaaaagctttggttcctgtaggaaagttgaagctggagaaaatacaagaaaccaagtagagaaaaaaagctttggttcctgtaggcgtattatttctgaaacagagaacttgatctgagcgactgatcctgagccaatggaacagtatgaattatatggcttgaacatggtaggtgtaccaagttttgttcatcaaagagccaccccagatgtgatcggctacg

SEQ ID NO: 271315 - DNA, 343 bp, Zea mays
agagcagcaagaagaggaagaggcattagccttggacccacactgctgtagcacttcaacataccgatacagcctggagacggttcaagcaagccacacggaaagttgaagccggagaaaatcccaagaaaccaagtagagaaaaaaagctttggttcctgtaggcgtattatttctgaaacacaaaacttgatctgcgcgactgatcctgagccaatggaacagtatgaattatatggcttgaacatggtaggtgtaccaagttttgttctgatagtcgaatgattgttgtattattgattaacaagaccaacaatatatagactaggctccaaccggttcc

SEQ ID NO: 271316 - DNA, 315 bp, Zea mays
ggccgaggcagcaaagtccaaagaggaagacgaggcaaaggaaggcagcggttaagacgatggcgacaaaccttcagaatcgatgagcaacgtacgaacacacatcaaaagagatgacaaatgacaagtctaggctcgtgattctaataggagtcatcattaaaaaaaggcttaaattgtagaatcgttgaaattagggaacaatgtacactgtctctggaaatttgttgcaactcttccacttgcctatagattggtaatggctatataaatgtttattcacgagtcgtttgatctcttaattaattttagttt

SEQ ID NO: 271317 - DNA, 647 bp, Zea mays
tcctcgcagtcgcagcccctcaccatggctgccacactctcctccgtggctgccccttccctccccaagcacgtctccgttaccagagctcagcagcaggcgcctccttccatcatctcggcatcaactaagactgccttccatggggtgtcgctggtggtggacaggaggtgggcggccggccaccggagaggcagcggccggcggaggctgctgcaggtgaacgcgaggaccgccgccaagaacatcgaggtggaggtcgagaagccgcttggcttagccttgggccagaagcccggtggtggcgtcgtcatcacttctgtggagtctggagggaatgcagccagagccggtctgaaaaccggggaccaggtcctgtacacaagcagcttcttcggagacgagctgtggcctgcggataagcttgggttcaccaagacagccatccaagcgaagtcagactccgtctacttcgtcgtgagcaggggtgcccaagctgacgtgaagcgcctacctaagaggccggcgccaccccggcttggacggaagctgactgattcacaaaaagagagagcaacgcacgttttgcttgattgtgggtacatatacttactacccaagccttttgacgaacagaccgacgacta

SEQ ID NO: 271318 - DNA, 514 bp, Zea mays
accgggccgacccacgcgttcgattctcccaaattcccacacaacaagaaccctaggaggagggggtcctcccctcccggattcaagcttctctcttggtttcctctgcagttgcgattctgcagagcgcagaataatactacggtaatgggttccaagaagatgtatgtttgctccctgcctttgatgccacacgtcgtcttcggattcgtcagctccctactggcgtcagctcccaactggcagtcctataaagtggatgatccgaatgcgccgagaatgattcttctcgttattttctacgcgaacgtcatcttgctggctgaaattaagaacgtcaggatctacattgagactgcaactgccgtggggatatcttacgtgtcactacttaaaatcagctggagctacatctggctcgttctatctcccattgtggggatcggcttgatcgttgccctgtgcaaggagctcattaacgaggacgaggtcagtggatcacaggagccggagc

SEQ ID NO: 271319 - DNA, 849 bp, Zea mays
gcgaaagacccattcgatctttcttcgagtgccaatgtcggaaaaacacctttggcagctcccaagatcgacgcatctgatttcggtgcatttgtatctagcaccgaggaagcagccaaggaccctctcgatctttcttcgggtagcaaccttggaaagacaggccaagcacccgcggcagcctccaagcctagcgcaaagaaagacaattttcaggtcaagtccggcatatgggcagactcgctgagccggggattgattgatctgaacataactgcaccgaagaaggtgaacctagctgatattggcatcgtcggtggccttggcgatgggtccgatgagaaggccctgccctcttggaccatgggcgccggatccggcctaggaatgtctggtattccaccgtcaacacaacaagctggtggcatcgagagcttggccaactacaacaagcatcatttcggcttcaaataggcctcgatctttcatactggaaaatacccgtcatctgcggtttcctcctctgtcggcctgcttcttacacgtgctgccctattgatttaatcacttttttgtttttggttttggtgatcacattacatggtgtcgaccaatcttggccccgtcttgtcacacgtgtatgttatttgtcgggtttgtgggtaagcatgcaactacatacacatcacaccccctgtgttccagctcgatgataggtggtatgttggccatgcagtttgtgtaaattccgtggcctgccttttctacttgatacagtactctacgcagcgatttgcagtgcttgagtttatattcaataataagagaacctatgccctttatgtcttg

SEQ ID NO: 271320 - DNA, 828 bp, Zea mays
  unsure (1)..(828): unsure at all n locations
tcgcgatcagagataaaaaatgtattaaaggagcatctaaatttattgagagcaaacaacaaaaggatggtacatggtttggcacttggggtgtatgttacacttatgggacattatttgcagtgcaaggattagttgttgctggaagaacttatgaaaacagttcttctattaggaaagcatgtaggtttctattgtcaaagcagctaatcacgggtggatggggtgagacatatccgtctaatggaactgcggtctatgcagaggccagtagtcctcatgtagtgaatacagcttgggcaatgttggctttaatttatgctggacaggttcagcgagatccaacaccattgtatggtgctgcaaaagaactgatcaatatgcaacaagagtcaggcgagtttccccaacaagaacacattgggagcttcaattgttccttttacttcaactatggaaactaccgtaacttgttcccaatatgggctcttggagagtttcggagacgaattgttgcagaaaagaagaggaaccaacaaacatgattgttttaggcatcaacaaattcggggtgaaagcttgtaaggggctcaagtttaacatgtggtgaaagacatgtcaatatactaaagctgatgtccatctggctaaaccatatgtacatatttttactatggaaacaacgatccatatgtatatatggaataaagggccccatataaaaaaaaaaaaaaaaaaaaaaaaaaaaaaaaaaaaaaaaaaaaaaaaaaaaaaaaaaaaaaaaaaaaanngggggcggccgatatggggggtccttttttacgttcc

SEQ ID NO: 271321 - DNA, 439 bp, Zea mays
  unsure (1)..(439): unsure at all n locations
ctccttcctagtatagtggcagcaagcgtattttgcttcctttcggggctgctagcaggcgtgaacctaccaatcaaagcgtaagacagaaatgccggcttcgattcactaacaaggaggaggcagggaaaaaagacctaaaagatcctctccacttgaagttgtaccaaatggtatatgatatcgcctttccctttccgatcttttgttcaaaggtgctttaattgcaaggatatggtaagcaataacctgctcatgctcctccatctttcaatgccccctatgagtgtgagtgatggagagagggagctgctaaaagagtctggcatgctctcataatgtttctttccggtctgtagtgcactagccatacactttgtggtgggggggctgttttttctgtagtgggtgtatatggactaatcaaangggactgatg

SEQ ID NO: 271322 - DNA, 1067 bp, Zea mays
gctgaaaatttgtctgaagatgaaattgcaggattgaaagagatgttcaaaatgctggacactgacaatagtgggcagatcacgttggaggaactaaaaattggtttgaagagagttggtgctaacttaaaggactcagaaattacaacactaatggaagcggcagatattgataacagtggttccatcgactatggagagttcctagctgcaactttacatctgaacaaagtcgagcgagaagacaacctcttcgcagcattctcatactttgataaagacggcagcggttatattactcatgatgagctacaaaaagcatgcgaggaattcggtatagaagatgcacacctagaagatatcatccatgacgttgatcaggacaatgatggtcggatcgactacaacgagtttgtaacaatgatgcagaagggaaataacccactagggaaaaaggggcactgccagatgagctttggtcttagagaagcattgaagcttggctaagtggcatgatcaatcctgtgtgaagtgccattcggcttcatatgccaactttagctgatgaaactaagtccgtgaatttgggacgccggtaccaaaggtggagcaagtgcgcgatacgattagctttgggataccaactaagcagtgagcatgcaggaacacattggtgatctttcgtcgttaaccccccatgtacatggcttttttgaggtgggataggaatggcggttgtgtttcccatggccattctttgcacgttatgaagctcagctgcaggatgctcttatatagagagaaatgttagtcacatcacatcgcgtgtccatactgtatagcgaaacttaacatgttgtaatatcggtcggacaatgtgtgcgtgttgtatgttatctttcttagatagatgcgcaggcttagcgttgtcatatatgtattgcaagaatatgcaggctgtatattaatcaaatgatttttttgtgtacatttcagtgcaaaaaaaaaaaaaaaaaaaaaaaaaaaaaaaaaaaaaaaaaaaaaaaaaaaaaaaaaaaaggggcggc

SEQ ID NO: 271323 - DNA, 504 bp, Zea mays
gtttggggaccttcctgaccccaggatgggaaacaggttcgatgaaaacgagatgttccatatgataggagctgcggctgcatgcattcggcattctgcagcaatgaggccacggatggggcaggtggttagagcactagatagtttagccgactctaatctgaacaacggcctccaacccggacgcagcgaggtgttcttagagccacagacggaggagattcgacggttccagctgagggagttcggcagccgggactgtagcgacgagctgagccaagcgagctggagaagccgaagagatttgtgaacagattcggtacaagatcattaacattcttttttttttgctcattctttacatgtaattatctcttttacatgattctttttttttggttttactcctccctgaggcaattcttgttccccggtggaataaattttgcgtgagataagtaaattgaaccctctttttgcagtgaagagagttcggttcctggc

SEQ ID NO: 271324 - DNA, 420 bp, Zea mays
gtggagtgccggggcctggaccacgcggacgcgctggggctcatcgccatcggcaaccggctccggtgcatcaccaactggctggtggtggccctgcagaagctgcggcacccgcacgccgacaacgggcacccgctggtgaggctgtacggcccgcgcgtcaagttcgaccggggcccctcgctggcgttcaacgtgttcgactggaagggcgagcgggtgtcgccgctgctggtgcagaagctcgccgaccgccacaacatctccctcacctgcggcttcctgtgcaacatctggttctcagacaagtacgaggccgagagaggcaccgtcctggagcacaggatcgccggcaattccgttgctgtgggcgccagagggaagaagagaaaggacgccggcggcgacgtggggattctc

SEQ ID NO: 271325 - DNA, 622 bp, Zea mays
gtctagctcgcgcccacggtgcagtgcctcgccacgctgcaggccaggcccggggaggtggcgcaggccatcgccaagttcccccagatactgttccacagcgtcgaggagaagctctgcccgctcctcgccttcttccagacgctcggcgtctccgagaggcagctcgccaagctgctcatggtcaacccgcgcctcatcagctacagcatcgaggccaagttctcgcagaccgtcggcttcctcgccggcctcggcgtcgacagggaaggcatgatcggcaagatcctcaccaaggagccgtatatcatggggtacagcgtcgacaagcggttgcgccccactgccgagttcctcaagtcggaagtcgggttacaggggccagatctccagagggtggtcatgaccttccccgatatactgtcgcgagacgtggataagatcctgcggcccaatctggcgttcctacagagccgcggattcagcagggatcaggtcacggcactggtagctggttaccctcctgttctcatcaagagcatcaaacattgcctggagccaaggatcaagttcctggtcgaagagatggggcgggacattggcgaggtggtagattaccccc

SEQ ID NO: 271326 - DNA, 1275 bp, Zea mays
tgctgattgtgcgcacttgacatttggtagttttggggatggaacacttgatgcgtccttgacaacaaaacctcttgagagtcatggggatatcgtaacaattcctgacgatgattatgaccaatcagagggcaggatccatgacgatgaaggcaaggtgacattagcgcctgctgctaatgaatatgttacttctgcggcaaacagcaacgtggagaatcttgatattacatcagtacagcaatctgaagtcactagagccgatttcttggatgtcacaagcaatactgaatacaacctaacatcaactccagattatgcaacttcaagtgcaccgctgcaggattctgcttcacagagttatctacaggaaaatcgacaattccagagcatttctcctctcccaagcttcatgcaaatacaaaatggtctcatgtcaccagcaattccaccattgcgcgaatttgatccagcattctcactattgctcactaatcctcctattatgcatggtacaacgtcatcatccatgagcagtgcaactgtttctacgcagccccaagagaatgccaatccagttggtttacccaaccctcaattgactcaatctcagccaagcaccagcattgctccagggcctccactccctcagcatcttcttcatccctatgctcaaacaacccttcctcttggatacgcaagcatgattggctatccatctcttccaccaagctatgcatatctcccgcctgccgcttttcagcaaccatacatgaacagtggcttgttcctccaccaggcagcagcagcagttcccacctcaagtgtgaaataccctctaccgcagtacaaaagcaacattgcccttgctagcttaccacagccaggctctttgctctcaagctacgttgggggctttggaactgcaagcaacatgcctggaaatttccctctgaatcaaagcacaacagcagcaacaacaactcttgggtttgatgggacggtcccttcacatttcaaagatggaaatcaatttatttctcttcagcagaatgagaaccctgcaatgtggatgcatggtgctagttcacgagggatgcccccacttgcagccagtaccatgtatggctatcaagggcagagtcatcaggccggccttcggcagggccaactaccttcacaatttggctctgcgctagggcagtcacagccaggcctgggccctgaaacaccgaaccctagcgatagtaacctaagtggcgctgctcaagctaa

SEQ ID NO: 271327 - DNA, 1619 bp, Zea mays
tcgccctcgcgtccgcccacgcgtccgcccacgcgtccgtttgtgtccctgttcatcatatactcggtcctagcccatgtcgccggcattttctcttcgaccggaaacacagcctacatggagatcgtttaccatgtcctcagcatgtttgcgctcatcagcctgcacgtcttcctgtacgggtgcaacctctccatgtggaagggcaccaggatcaaccacaacttcatcttcgacttctccagcaccgccctgaccgcaccgggacgccttcctcatgtcggcgtccatcatgtgcaccgtcgtcgcggcgctggtcgtcaacctcttcctcagcaacgccggggcgacctacgccaacgcgctgcccggcgcacttctgctgctgtcagcagcggctctcttctgcccattcaacattttctaccgctccacgcgcttctgcttcatgcgcgtcatgcgcaacatcgtgctgtcgccattctacaaggttctgatggcggatttcttcatggctgaccagctaaccagccagatcccgctgctaagacacctcgagttcacggggtgctacttcatggctgaaactttcagaactcacgcgtatggaagctgtaccagcagctcccaatacaagaacctggcatacgtgctctctttcctgccatactattggcgagcaatgcagtgtctgagaaggtacctggaagaaggccacgacatgaaccagcttgctaacgccggcaagtacgtatcagcgatggtggcagctgcggttaggttcaagtacgccgcgacgcctacgccgttctggatgtggatggtcattgcatcatctaccggcgccaccatctaccagctctactgggatttcgtcatggactggggcttcctgaacccaaaatccaagaacttttggctccgggatcagctcatcctcaagaacaagtccatctactatgcttccatgatgctcaacctcgtgctgcgcctagcctgggccgagagcgtgatgaaactccggcttggtatggtggagtctcgcctgctggatttctcgctcgcttcgctggaaatcatccgacgagggcactggaacttctacaggctggagaatgaacacttgaacaacgctggaaagttcagagcagtgaagactgtcccgttaccattccgtgagcttgaaactgactgatgaagacggagctccatgttgaacagcaggaatttagggggaagaattccaggaatggatacactgtcccctgcaagaactggtgtttaagtggtaataaaacgaatcggagagcgtaactgcacaagaccgagacgctgcagattttaggatggaataagctcaggcgggtgcgccagggtacaacatgaggcgttctggtcaggagagatgatgtgcatttaactagctactggtcgattgagaaagaattgttgcatgtcaatcgactaacaagatcttaattttgtcgatcgtttaagttgtgaaaatgtatctgggaattggtgactgaaaaaatattgcatggaaggaaacatgtggtcgttaactaaaaaaaaaaaaaaaaaaaaaaaaataataaaaaagggcggccacgcgtctg

SEQ ID NO: 271328 - DNA, 643 bp, Zea mays
gtgcaattttgctcagtagatcatggcgaaagctatgcgatatttggagggaaaggcatagaagtgaacttgtgggatatcacatctagtagtaagacatggtctgctaaatctccccgagcaaatagtcttggcatattcactcgaccttggttcactgctggaaccttcttgtgcaagaatgatcatcgtaaaattgttgcctgcacaaataatcatcaggtccgcttatatgatactgcattgcaaagaagacctgccgtctctgttgattttagggagtcaccaatcaaggcagttgctgctgatccaaatgggcatgatgtctatattggcacaggaacaggggaccttgcttctttcgacatgagaacagggaaattgctgggatgctatattggcaaatgcagtggaagtattagatctattgttaggcatccagagctacctttgatagcatcttgcggactggatagctacttacgtatctgggacacaaacacaagacagttgctatctgctgtctttctgaagcagcaccttacaacggtggcccttgattcacatttttctgttgaagagcctgaagagatgaaatccaagcaactggagacttcagtggtgactgacgactgaagtccga

SEQ ID NO: 271329 - DNA, 783 bp, Zea mays
cgtgggtcgacccaagcctctaaaattagtcatattatgcccctgactgttgactggctagctgcgggttaccgcttcatctgaacctgtaagctctacgcatatctcgtgttctagacacaaaaactggtcacgttgggtcaataatggactatacatgcatatttggatatatattctagctgcatatacaaagtaagttttgatctgtgctatatatatacctgaaataaatggagatttagcgtcgtcactcttgtctacacccgaaggaaaaggcggtgaatgtggtagagttcagcgcgagagcactgaagatactgacggggaagctcaccatcgaggcttcgtacagagttaccagccaaacaagagtggacatcaagctcgagagctcaaccatcacccctgagcagctgatgaacatatttcagaagaactacgacatgctcctggacatattcaatccagagggctggctggagataacatatgttgatgaatcgctacggattggacgagacgacaaagaaaacatattcgtgctggagagagcagacctgccagacgtctgatgacgcgcagttcatgcgcacagaggcgatccgtaattttgtgacgaggagcgagtgtatgtaacacgcagaaaacatagcctgcaaatatataaatatggtatatccgacagctaggactcttgcatggttattggcggttcggtgcgggcaatctacccctggaagtgaaaacaaccggaaaaaaactttaattctccccaaggac

SEQ ID NO: 271330 - DNA, 712 bp, Zea mays
  unsure (1)..(712): unsure at all n locations
accgggtcggaatacccggtncggaagaagcacagcctcactagaggggcgcgcgcgcagcgaagcatggagcatggagctgagggcgccgcgccggcgaccgtgagcacgctctgtagccagccgggtccggctgggcggccatggcagccaccgttctcttcactccggcgcagtgccaccgcgccaccgcgacgacgagcgggcgaggagccccctcgcattgcgccctggcccctgggcaccggcgcccggggcggggatcggtgagggcggtgcctcccgagcagagcagcttgcctcaggcggcggctgctgtctacgggactgctggcgacgtcaaggccgcgctgtaccgagcgctggacggcgccaacagggggatattcgggatgacgtccgccaagcgctcggagatccatggcctggtggagctgctcgagtccaggaaccccacgccggagcccaccgccaagctgcaggacaaggtggatggatgctggaagctcatctacagcacgatctccatactggggaagaagagaaccaagttagggctgcgagatttcatcagcctaggggacttcctccagataattgacgtcaaacaggaaaaggcggtgaatgtggtagagttcagcgcgagagcactgaagatactgacggggaagctcaccatcgaggcttcgtacagagttaccagccaaacaag

SEQ ID NO: 271331 - DNA, 614 bp, Zea mays
cggctcgagagaagcgcagattctgttgcccgcactaccgtgagccctccaaggtcagaggatgctgacatggatgatgtgaaacccacaagcttaagctctcggagctacctgaagagtgcaagcataagcgcttccaagtgcgtcgttgtcagaaataaacacccagagccagaggatgatggaatacctgaggagatggaaggcaccgtcgatggattgtctgaaaaggtctccaggatgcactcctaaggcaggactgtccatggcgacagcaatctcgacacaagatttctgtctggtgcactgtaatgccgacgacacactgtttggatcttgtgtacacccacagctagttcaactaagatgtagcactagttcgtccatggaggaagcagaatggacgatgaagtgtggtcagcctgtcgaccatgaggtgttttcttccaatggagtctagggtatgtttgagttctacaacggcttgtgccgtacgaagtgtcagcagtgtacgaggaggaggatatcgttgtcagtacacattttgcctgtctagaaaattatgagtactttctccgatcacaagtacatgtacaaccatgtttgtcttagat

SEQ ID NO: 271332 - DNA, 547 bp, Zea mays
tttacgcgttcggcgcacgggtagagcacgcagtagtgcagcagcactgaagcactacttcctgcactcactgtgctagctgctcaaaccgtagtagtaacagtccatcaccatcaccatcaccaccaatggctcccaaggttgcgctcttccttgccctaagcctcctgttcgctgccaccgcgcatggctgcgaaccctactgttccggcccagtcgtcccaacgccaccagtcgtgccgactccgtcgtcgcacagccacgggcgctgcccgatcgacgcgctcaagctcaaggtgtgcgccaacgtgctgggcctcgtcaaggtcggcctaccccaatacgagcaatgctgcccgttgctggaggggctggtggacctcgacgccgcattgtgcctctgcaccgccatcaaggccaacgtcctcggcatccacctcaacgtgccccttagcctcaacctcatcctcaacaattgcggcaagatttgcccaaaggactttacttgccccaactaattgagctgaatatggagataaagccagca

SEQ ID NO: 271333 - DNA, 649 bp, Zea mays
cccacgcgtccgagaaaacgcactgcagcaccacttcctgcgctgctgctcatcacacaccgtagtactaacactccatcgccacaatggctcccaaggttgcgctcttccttgccctcagcctcctcttcgctgccgccgcgcatggctgcgaaccctactgtcccggcccagtcgtcccaacgccgcccgtcgtgccgtcgcacagccacgggcgctgcccgatcgacgcactaaagctcaaggtgtgcgccaacgtgctggacctcgtcaaggtcggcctaccccagcacgagcaatgttgcccgctgctggacgggctggtggacctcgacgccgcattgtgcctctgcaccgccatcaaggccaacgtcctcggcatccacctcaacgtgccccttagcctcaacctcatccccaacaactgcggcaggatttgcccagaggacttcacttgccccaactaagcttgggatcccttgtgtgctccatctcgcgattctatttacgagcatgtcggcctcttccaatattagcgaataagtttgtcatttcaaattctctcgctgtaccattgacgattgtatttgtgtggagttatatttgaaattttaatgatccataagaaatattcgtgttttttattttg

SEQ ID NO: 271334 - DNA, 2215 bp, Zea mays
cgctcctctgctcctgctaggaggactgctatatatcaatgatactagctggaccctttccactcccctcacctctcactaccaccaccactgccccggatccataccagctgcagcagcagcgcgcgcgagctagcttcggtcggtcgatagatcgatcgatcgctcggccatcatggcgcgggaggagcaggcgctgctgtcgacggagatcgtgaaccgcggcgtggagccgtcgggcccggacgccggctcgccggccttctcggtgcgcgtgcgccgccgcctgccggacttcctgcagtcggtgaacctcaagtacgtgcgcctcgggtaccactacctcatcagccacggcgtgtacctggccaccatccccgtcatcgtgctggtgtgcggcgccgagctgggcagcctcagccgcgacgagctgtggcgcaaggtgtggggggaggccacctacgacctcgccaccgtgctcgccttcctcgccgtcctcgccttcaccatctccgtctacatcatgtccaggcccaggcccgtgtacctcatcgacttcgcatgctacaagccggccgacgagctcaaggtgtccaaggcggagttcatcgacctggcgcgcaagtccggcaagttcgacgaggacagcctggcgttccagtcgcgtctgctggccaagtccggcatcggcgacgagtcgtacatgccgcgctgcgtgttcgagcccaacgccagctgcgccaccatgaaggagggccgcgccgaggcgtccacggccatgttcgcggcgctggacgagctgttcgacaagtgccgcgtccggcccaaggacgtgggcgtgctggtggtcaactgcagcctcttcaacccgacgccctccctgtccgccatgatcgtcaaccactacaagatgcgcggcaacatcctgagctacaacctggggggcatgggctgcagcgcgggcgtcatcgccatcgatctggcccgcgacatgctccaggccagcggcgcgggcctggccgtggtggtcagcacggaggccgtctccttcacgtggtaccccgggaagcggcgctccatgctcatcccgaacgccttcttccgggccggctgcgcggcggtgctgctgtccaaccggcgccgcgacttccaccgcgccaagtaccagctggagcacgtggtgcgcacgcacaagggcgcggacgaccgcgccttccgctccgtgtaccaggaggaggacgagcagcggatcaagggcctgtccatcagccgcgacctgctggaggtgggcggccacgcgctcaagaccaacatcaccacgctggggcccctggtgctgcccttctccgagcagctgctcttcttcgcgggcgtgctgttccgccacctgttcccgtccaaggcctccacgccggcgccgccgaccaccccaggggacgcctcggccgccgcgccctacatcccggacttcaagcgcgcgttcgagcacttctgcatgcacgcggccagccgcgacgtgctggagcacctgcagagcaacctgggcctgcgcaacgccgacctggaggcctcccgcgccgcgctgcaccgcttcggcaacacctcaagcagcagcatctggtacgagctggcgtacctggaggccaagggccgcgtccgccgcggcgaccgcgtctggcagctcgccttcgggtcgggcttcaagtgcaacagcgcggtgtggcgcgccgtccgccgcgtgcgccgccccgcgcgcagcccctggctggactgcgtcgaccagtacccggcgcgcatggacgcctagcacgtacctgcaatgcagtggctgctatctatctatcgctcgcttcgctaccactaccagtgcagtgctgcacttcaccgatggatgatggatcggatatgatatggtataggacgcggtcggtcgatttgcatgcatgcacaagtgttagtataccgttctgaaggtacgtttgaactttgttcgtttgtattgcactattgcttgttgtttaagtagcggttaagggaggcatacgtacgctgtactaccataatggaagtactccggtccggtcctgtcctgtgtgagccttatgtacgtgcaattttaatgtgttttgatattacaagacttgacggttggcaatagatgttgctgttgtgtttcgattgatcaaaataagccccggccgatgcttctgatatt

SEQ ID NO: 271335 - DNA, 978 bp, Zea mays
ccatgccccccaggttgagctcagattgttcccgcgcatctggtagtggttgacgatcatgccgcacaggaaggccgtcgggttgaagaggctgcagttgaccaccagcacgcccacgtctctgggccggacgcgggcacttgtcgaacagctcgtccagcgccgcgaacatggccgtggacgcctcggcgcggccctccttcatggtggcgcagctggcgttgggctcgaacacgcagcgcggcatgtacgactcgtcgccgatgccggacttggccagcagacgcgactggaacgccaggctgtcctcgtcgaacttgccggacttgcgcgccaggtcgatgaactccgccttggacaccttgagctcgtcggccggcttgtagcatgcgaagtcgatgaggtacacgggcctgggcctggacatgatgtagacggagatggtgaaggcgagcccacgcgtccgcccacgcgtccgcccacgcgtccgcccacgcgtccggcgccgtccgccgcgtgcgccgccccgcgcgcagcccctggctggactgcatcgaccagtacccggcgcgcatggacgcctagcacgtacctgcaatgcaatggctgctatctatctatcgctcgcttcgctatctaccagtgcagtgctgcacttcaccgatgcatgatggatcggatatgatatggtataggacgcagtcggtcgatttgcatgcatgcaccaagtgttactatcccgttctgaaggtacgtttgaactttgttcgtttgttttcccctattccttggtgtttaagtaccggttaagggagggggtcgtcccctggcctaccataatggaagtactccgctccggcccggtcctgtgtgagccttatggacgtgcaattttaatgtcttttgatattacaagaactcgacggttggcaatagatgtaccacccaaaaaaaaaaaaaaataaaaaaatataaaaa

SEQ ID NO: 271336 - DNA, 692 bp, Zea mays
gagagctgagacgtcgtggacgacaatccacatcgtcgtcttcacagtcgtcccgttcacgatcagcagcccatgagatagagcttgcggtgttgcgtcaacaggcagagtaccatcaatcagtcttgagggaacaattggagtaccagaggcaacaatctgaataccagagacaacaaccgagtaccagctcaagagggacgagtattatccaagcctccaggcccaaaatcaagctcttctctcgcaactagcccaacaagcgggcgtcccgatgccgacatatgggatgccgcctccggactttgcactgccaatgccaatgttggcgcctccaccaccgcctccgcctccgtcacaattccctatgggatttcagacaccacccgcttcagttgccgcacctggagatgggtctggtcaggacgacacaacacattcgtgggtgaacaatcttttcagcacgcatagtccagccggaggaggtggcgatggatatgagtgatactgatgtaaaacacttgttgaaacctttcatgtgaaagcctacccgtcgaataatgtttattttggagtttggacaactatgtttatgtaaacacttattgcaaccatttggaactatgttgttatgttaaattttgtgaatgtgaatgcttatgtgattatatttgtgaatgtgtatacttatg

SEQ ID NO: 271337 - DNA, 593 bp, Zea mays
  unsure (1)..(593): unsure at all n locations
gatcctggaaaaacgaagagatgcagcagatgttgcggctcctgagcatgggcggtgccggaaccagcctagccgaagacggcttcaatttccctccgtaacatgcctgctgccttcgccgaacgtcgagctacgaggacgaccgcacccgcgcgcccgggaaagccgtcgtcgggtggctcaagatcaaggctgccatgcggtggggcatctttgtgaggaagaaggcgactgacaaaagagctcagcttgttgagctagacgactagaaagtattgaaccctcgagctgttcatgtaccagagctttcattgttgatggtgtttgtggatccggacggggctcagctatggccctgccccttaggaggacagcagttctggtcctgagcttaattctggacaaaactattttccgtttcccccctttttgtatgtatagctttttttttgcttaccattttaaatgcgttgcttgtttagtgtgatgccggtagtcctgttgtgaaccttagcctgagctctgtacatccatctgttacagaattcaaatcgaaacaggtaaacattggctnataaaaaacacaatgcaaa

SEQ ID NO: 271338 - DNA, 344 bp, Zea mays
  unsure (1)..(344): unsure at all n locations
tggcttcagtttcccttcgtacatgcctgcaccttcaccaaaattgagctacgaggatgaccngcacccgtgcacctgggaaagccgttgttgggtggctcaagatcaaggctgctatgcggtggggcatctttgtcaggaagaaggcagctgagagaagagctcagcttgttgagctagacgactagaaagtattgcagctggaagcatgtgcactccagatgttcatgtaccaaagtttcgttgatgtttgtggatccggatggactcagccttgttcgatgcatataagttgatttgtccaggctgttcttttaattactatggaaaaaaatccctttctt

SEQ ID NO: 271339 - DNA, 550 bp, Zea mays
gtccgcttcttcacgtcgcctcctccctaggcgccgatcctacagagcctcgctggtcatccctgctctctcgacgtctctcccatggcgccctccccttcctgccatggtcgcccctccctgctgcagcttgacgctcctccctggagctcgcccctgccctctgtccagcgccctccctgctgcccatggtatggacgcacagccccaacgtcggctgccctgttccttcccttcctgttgatgagcacgacgtctcccttcatctttctctccatgccggtgctgccctctcctgctcgtcgagccgctccctaatggttgctcgcaagttcccaatgctgccagccgtgcagagccttcatcagccatggccgccgacctcctcttccatggatgacgattttctttcctgcagcaagaagccatggcgccccttctcctcttgttttccatggaaaacccacgcatctactcctccccatggctgcgtctcccgtagggtttcgtacaatcgcagcagcagcggatatagaatcacctctatgta

SEQ ID NO: 271340 - DNA, 420 bp, Zea mays
ccggggtcgacgccacgcgtccggccgctttctttctttctttctcccttccttccttcgttgcactggtgcttcttctcgatcatcatcatcagaggaggagctacctacctaccttttgatgcaggttgccatggccaccaccaccagcagcagcttggtcaccggcttgaggtgcaggacaggtgcagcagtggcattgatcagacccactagtgccgctggggatcgccggggctggaggacgacggcgtccggccgtggagcccgcaggggcaaggtcacggtcgctgcggcctgcaagacatgcaaaggaaagggggcagtagaatgcccagggtgcaagggcaccggcaagaacaagaagaacggcaacatcttcgagagatggaagtgctttgactgccaggggttcgggct

SEQ ID NO: 271341 - DNA, 429 bp, Zea mays
  unsure (1)..(429): unsure at all n locations
agttcccgggtgttcgtgatgcaatgaaggctcttaatgcagcggggaaggtcgtaaatccgtcttcagaccctaaggtgaagaaataccacgatgcgaaatatcagatattcagatccctgtatgagcaacaactctctcatcgcgcaaccatggcacaggcattgcagtagggctctatggccactttggctcttcactcttggttattgatacccttggtttcatcgccatgttttattggcttatttacatgtaatcaatatcgccttgagtgatttgatagaatagaaaccatgataagatgcatgtatacacatataagaaaactggtaagatgatctttctcacagggacgtgaaatccccaaagcctgtgcaatgttaataaaagaaaaagaggttcttaaaggaaaaaaannnnnnaaaa

SEQ ID NO: 271342 - DNA, 1791 bp, Zea mays
atcaaatttaaaggattccatgaagattatcatatctggaaaaaacaatgggatgaataatgagctacacaacagcatcagctcagcaattcttcatactcgcagaattcttggcatcttggaagccgttttctccctgaagccatcatcagttggtacctcatggagctatagctcaaatgaaatagttgcagcagctatggttgctgctcatgtttctgagttatttcgtcggtccaggccatgccttaatgcactctctgcactaatgagatgcaagtgggatgctgagatttcgaccagggcatcatctctctaccatttgattgacttgcatggtaaaacagtttcctccattgtgaacaaagctgagcctcttgaagctcacctgacccttacaccagtaaagagggataatcaacatcaccgtgaggaaagcaataccagctcattggatagtgtcaagttggaaaacaagaatggttcaacatcacacaagaaaaacggtttctcaagaccactcttgaaatgtgcagaagaggtcctactgaatggcgatgttgcaagtacatctgggaaatccattgcaagcttacaggtggaagcatctgatttggcaaacttccttaccatggatcggaatgggggttaccgaggttcacaaactcttctaagatctgtattatcagagaaacaagagctgtgcttctctgttgtctcattgctctggcagaagctcatagcttctcctgaaatgcagatgtctgcagaaagtacatcagctcaccaaggatggaggaaggttgttgatgcactttgtgatgtcgtttcagcctcaccaaccaaggcatcagctgctatcgttctccaggccgagaaggacttgcagccttggattgctagagatgacgaacaaggtcagaagatgtggagagtcaaccagcgtatagtgaagcttatagctgagcttatgaggaaccatgacagccctgaagcgttggtgatactcgctagtgcctccgaccttctacttcgtgctaccgatggaatgctcgtcgatggtgaagcttgtactttgccacagcttgagcttctggaagtgaccgctcgggctgtccatcttatcatcgaatggggagattcaggtttatcagttgcagatggtctttcaaatctgctgaagtgccgtctatcaaccaccatccgctgcctttctcacccaagtgcacacgtgcgcgcactcagcatgtctgtcctccgcgacatcctgagcaacggatccgtgaaccccaacaagacaatccaaggggaacagcagcggaacggcatccagagcccgtcctaccggtgcctggccgcaggcatcatcaactggcaagcggacgtcgagaggtgcatagagtgggaagcccacagccgccgcgccactgggctgacgctcgccttcctcagtgccgcagcgaaggagctcggctgccctctcccgtcatgacaaggccattcctggatctgacatcggcttccaattgacggtcagtgctggcacagctgctgcagggtccgcgagtaggacggctctaatctctccatcacgtgttattatctggtgtttccataatgcgatttgatttcaatttggcgttagatgttgtacacgtgtatttaactgcttgagttgtacgtaatttgtatacttgtaactttgtttaataatatggctattactcaaaaaaaaaaaaaaaaaaaaaaagacaaaaaaagaaaagagaacacaaaaaaaaaaagggcggc

SEQ ID NO: 271343 - DNA, 651 bp, Zea mays
  unsure (1)..(651): unsure at all n locations
cggacgcgtgggatcgtaccggtgcgtggccgcaggcatcctcaactggcaagcggacgtggagaggtgcatagagtgggaagcccacagccgccgcgccaccgggctgacgctcgccttcctcagtacggcggcgaaggagctcggctgccctctcccgtgctgacgaggccgctcccggatctgatctgacatcggcggccacttgacggccagtgctggcagcttgctgcgggaccggcgagtaggacgctaatctctcgaccaaggacgactcgccggtttgttcacgtgatatgtgatcaaactgatattagatggtgtttccaaagtatatatctactgaggggcttgctcccatgatgcgattttattccaatctgacgtcagatgctttacgagcatatttaactgcttgagctgtacgtagcttgtattacttgtaactttgtgtaatatggttattattgccgaagaagcagaacatagcttttttctttttctcttttagactgctactagatccttatccatgcgttgcaacggagcgccatatagattaaagtttcccgtgcagggctccttgttgtacggtctataacatgaacataaagatggcatccagtagtcaaancaaaggaagaccctata

SEQ ID NO: 271344 - DNA, 469 bp, Zea mays
cccacgcgtccgcccacgcgtccccccccccgtccgcccacgcgtccgcccacgcgtccgcaggccgagaaggacttgcagccttggattgctagagatgacgaacaaggtcagaagatgtggagagtcaaccagcgtatagtgaagcttatagctgagcttatgaggaaccatgacagccctgaagcgttggtgatactcgctagtgcctccgaccttctacttcgtgctaccgatggaatgctcgtcgatggtgaagcttgtactttgccacagcttgagcttctggaagtgaccgctcgggctgtccatcttatcatcgaatggggagattcaggtttatcagttgcagatggtctttcaaatctgctgaaggcatgccccgtcttcatctgccttcgttctcactcattcaaacgccacccatgcatccttcgtaactcagcaggttaactgaatattgtgatct

SEQ ID NO: 271345 - DNA, 252 bp, Zea mays
ctcgagccgctgcaacagtgtcggcttgcagccagccgaacccgcccggtgtttccaaagtatatatctactgggggcttgctcccatgatgcgattttattccaatctgacgtcagatgctttacgagcatatttaactgcttcggctgtacgtagcttgtattacttgtaactttgtgtaatatggttattattaccgaagaagtagaacaagctacgtacagatcaagcagttaaatatgctcgtaaag

SEQ ID NO: 271346 - DNA, 636 bp, Zea mays
atcggatcagcaatgccgtactcctggtttctgatttcggcaggttgcgcagcgaccaggcatctctcgtcaaggatgtcatcctgccctactcacatcgaatcaactccttcaagggtgaggtcggggtggatggtcgcccctctttgctgttcttcatgggcaataggtaccgcaaggagggagggaaggttcgtgatgcactttttcagattcttgaaaacgaggatgatgtaaccataaaacatggaacacaatcgagggagagtcggcgtgcagctacacaaggaatgcactcatctaaattttgcctgcatcctgccggagatactccctcagcatgcagattatttgatgcacttgtcagtctgtgtgttcctgttatagccagtgattacattgaacttccattcgaagatattatagactacaataaaatatcaatatttgttgggacaagcaaagcagtacagcctggatacttaacttcaactcttcgaagaatcagttcagagaggattctggagtaccagagggaaataaaaaaggtcagacattactttgagtacgaggatccgaatggaccagtgaacgagatttggcgccaagtatcccttaaagcaccactgataaagt

SEQ ID NO: 271347 - DNA, 503 bp, Zea mays
gaactcatgagttgtatggctcgagtttttgtaataggggggataatagggggcaccgatctaacaagcgagaccgggtagatgccaatggcggtggtgatgcactttttgatctcaatgtgccagccgaattggtggacaagatctgaagcttcattatctgatgggtgatggcacatccctttgaactgtacagctgacttaagcttcctcaccaacataaaggcaaaaaatactgttcttagcccccttgccaccatagagtatacctccatgtcaaaaaaaatttaccctggtgttaggatcccaagatatagagtagcttttaagttctatatgtcgcatttcatgacgtgatttgaagccaatgttcataattctgataaaactagttctactcctcaagcaagatgaggggatattttggaatgtaacttgaccatgcatgtgttgcggattccagatataatgtatgcagcatggtgaagggaattgtttgttga

SEQ ID NO: 271348 - DNA, 235 bp, Zea mays
gagacgttagatccatctctagctaagtgccttggggattggtctgtgcagaggtggtaggagatgtaaatctacatggccatcgtcgtggctgccatggcgatgctgtaattataccgttgtacgtgtatttccgattagcttgactcggttgctgttgtatttcaggaagttgacgatgctaatccttttaaagtcgaaagttactttttgttgtaaaaaaaagaggaaaaga

SEQ ID NO: 271349 - DNA, 575 bp, Zea mays
  unsure (1)..(575): unsure at all n locations
cgggncggaaatcccgggtccacccaacccgtccggtgattatttttcagatgggttccaagtttttgaaatcactggtctcggagaacgtgagggagtcgctgcacagctggtgcaagagggttaaggacaggagccgacacaatccgctcttctcgcggaacgggaccctcacgaccagatccgtgtgctccctagacgcctcctacgagacggatcacgagacgaacacggtgtgcacgctgtcgaggacggcgtcggcaacgtcgctggacgaccagttgaccgtggtcaccgtcgatgacgagccgtcctgcattgagaaggatgtctgacgcagttgctgattcgccaaaactacatactgcatcgacctgtgtgttaggaggtactctaggactgaaatgaatgtatatgtgcagtggttgcccctatcgtggcagtgaccatgtgtatatatagaactaaaaaaactataatgtctcttagctgagagtgagaggctgtacatggaaatacttgaggcagcttggaccaaatacaaaactgcggccccgtttgtttcggcttctggc

SEQ ID NO: 271350 - DNA, 659 bp, Zea mays
gcgacaactgccgcgcgggcttcgagacccccgcatccacctacattgccggagctaaggtgagagtcgactgcaaatcgaagaccaccggggcaaatacatgcagcttcgaggggcatactgaccgcaccggcacctacaacatccttgtcattgatgagcatgagcatgagctctgcgagtccgtccttgtgagcagcccggacaaggggtgtgccaatgttgtggctggtcgtgagagggcccccgtcttccttaccagcaacaacggtgttgcatccaacgttcgtttggcaaatgctctggggttccagaaggacgttgcccttcctagatgcgcgcagatcctcaagatgtaccaggatgaggatgaccgtgtctaattacgcctgagtttagatgtacttggcgagttacaatatatttatgtggtgtctgaaatgttctagaacctctaaatctattactaagagcaacgatattgtcgcttcttaaaccttagtactacggatgttatgagctaataaatatatttcgctaatgtgatgcacttagggcatagtctgctattgctgcggttaaaaaagcaaaaaactgtccgtaggtctggacttgcttacccttgaaaaaactatacgatgggtcgctcctttaaaaga

SEQ ID NO: 271351 - DNA, 441 bp, Zea mays
  unsure (1)..(441): unsure at all n locations
gaaaaaccgggncgaaccaagcgttcggaagaatcaacccggaacaaccgaacgttttttcctctctctacaccggccaccgtaacaggaataatccagctcgtgattgaagaatccgatgacgacgccatgcctgggcgccgcggccttaagcgccagctggacggcgcgctccctgacgggggcgtttctcgatctgacgctcgcctgggcctgcctctgcctcgccgcgctcgccgccgccgccgcgcgcctcctcgcgctcctcggcctcccgctcccctgcacctgtgcgcgcccgcacctgccctgcctcctcgccttcctggcgcgctaccctccccgcgccgtcggatcccttcaacgccagcctccgcgcccgcttccccttcgccggccccaccgacgacgaggcacgccttcagaaaggggtggaggaag

SEQ ID NO: 271352 - DNA, 484 bp, Zea mays
  unsure (1)..(484): unsure at all n locations
cggnccggaattcccgggtcgacccaacccgtccgaaactgtctcttcctccggcgccctctctctctctcactcagactctcgttctccagtctctccatagaagaggcgtgccaggtttggcccaccgcgccatgggatcgggatcgtgctgctgcatagggtgcaacggcggcggcgacgacggcggagttgacgccggcggcggcctcgaccccaaggggttcctgctggcgatgatgattgccctggtgcttctaatgctctgccacgtacgcccgcctcgccggaactcgtacgtcgtgtaccgcagctactgatcgccgacgggtgccaagctgaaaggtctctccatccggccccttcgtcgttccgattcctccttggccgacatgctttggtaaactcactcgattctttgtccgtcgtctgcagtggcgcgcgcgcaattggctgggtttttaatatatatatatatatatat

SEQ ID NO: 271353 - DNA, 485 bp, Zea mays
attcctcacaacttcacccggctccatccacgcggctccaacgccagccacagcacgagccatggactcgcgcgtcgtggacggcgcaggtgggggtgccgacgcctccttgccggccgatccgccgagccccgtgcccgatccggccgcgggcgggatggatgcgcgcctcccatcggacctgcttcgtgcagtgctgcaaaggctgccgccgatcgacctcgcgcggtccgcctgcgtctgccgagcgtggcgcgcggttgcctccgaccgcgccgtggtcgaggccgccttctgtgcgccctggggagtgcggcgcgtcgtcggagagccggcgacgggggccttctggcgggccgcctcccttgggagatttgcgctgtcgcatgcgatccgccgcggggataccgtccccggtgtcgctctcaagtactccgtgcaggtgaccgatatcaaacgattcaacaacatgatgagtgaccatg

SEQ ID NO: 271354 - DNA, 489 bp, Zea mays
  unsure (1)..(489): unsure at all n locations
gtccgcaccactgggtggtagaaaggttctttttcttggatctgagatgaggattattgataacctgtctcgcaagaacagctccaccgctcctgatcaagctggggaagttgaacagaaggatgataatatgtctgacggactgatgggcagtgccatgtcccttggtgacatcatcaactcagaggattacactcgtgttgtctcccgtggccctaatcctaggactacccacttttttggagatcgtgtttttgagcttcaagctgagcagctgatgcctgttgagatgagaagctcaaagaagccgaagacatctacatctatcagggtgacaaatccttttgcagcgtggagtgcagggaaaatttcatggtagattatgagatggaagaagcatatcatcctgcgtctcctangagcccaccctctgacggtggtcggattttccaactgatccgttgagtcagcatcagtaacaactcgata

SEQ ID NO: 271355 - DNA, 612 bp, Zea mays
cacaaattaagtagtggagtgtcagaacttgggaggcacaaattaagtacaaagcagtctaattaatgacgggcccgatggagattccggtgatcgacctcgccgccgccgacctctacgaggacgacgaagaggaggcgctcgagaaggtcgccgacttcttccagtccaagtacttcaagccgggctccgtcgtcaccttccacttcccggcaccggcctccgcctccccgggacccgcggcggagatcaccttcgcgacggagggcaagggcgacgccaggatcgcggtggagaacgggaacgtcgccgggatgatccagacctggtacctcggcggcgactccgcggtgtcccccagcaccgtccgcagcctggccaaccgtttcgccgcgctgctcgccgtcgccgcgtgatttataccggtcggcgggccggttggtcgagttgcgttggatttgagttcgtgaatgtccgtcctgtacgcgtgttgtctcgtgtgtgttgtcgtttgcagcgaatttgcaagtaataataataaaaattatgtccggtaggttgtgcaaattgtcgttgtggaaactgtaatatgagatagaaaatttgacggtc

SEQ ID NO: 271356 - DNA, 492 bp, Zea mays
cccacgcgtcccacaaattaagtagtggagtgtcagaacttgggaggcacaaattaagtacaaagcagtctaattaatgacgggcccgatggagattccggtgatcgatctcggcggcctcaacggcggcggcgaggagaggtcgcggaccttggcggagctccacgacgcctgcaaagactggggcttcttctgggtggagaaccacggcgtggacgcgccgctgatggacgaggtcaagcgcttcgtctacggccactacgaggagcacctggaggccaagttctacgcctccgccctcgccatggacctcgaggccgccaccagaggtgacactgatgaggagccctccgacgaggtggactgggagtccacctacttcatccagcaccaccccaagaccaacgtcgccgacttcccagagatcacgccgccgacacgagagacgctggacgcgtacgtcgcccagatggtgtccctcgcggacgtctg

SEQ ID NO: 271357 - DNA, 1062 bp, Zea mays
cggacttttgggtcttaatttagcttcctcctcctcacctactagcaggcacagcaggcagcagcatcgatcggatcggagcagcacagcgcgcgtcaccgcaagctcaagtgtcttcttccttgcttgcttgcctgctgcttacctctcagttccccactcacgtcccttgccgtacgtacgtgcgtccaacacaccaggtgaaaatgggctcggagacggagacggtcaacgtggaaggcatcccgttcccggcggagatcaccgtcggcaaccctctctccctcctaggcacaggtatcacggacatcgagatccacttcctgcagatcaagtacaacgccatcggagtctacctccacaacgccggcggcggcgacagcaccacgcccacgctgctgggccacctcggggcctggaagggcaagacggcggaggagctcctagcggacgccgccttctgggccgcgctggtcgcggcccccgtcgagaagctgttccgcgtcgtggtcatcaaggagatcaagggctcgcagtacggcgtgcagcttgagagctccgtccgcgaccgcctcgccgccgccgacctctacgaggacgacgaagaggaggcgctcgagaaggtcgccgacttcttccagtccaagtacttcaagccgggctccgtcgtcaccttccacttcccggcaccggcctccgcctccccgggacccgcggcggagatcaccttcgcgacggagggcaagggcgacgccaggatcgcggtggagaacgggaacgtcgccgggatgatccagacctggtacctcggcggcgactccgcggtgtcccccagcaccgtccgcagcctggccgaccgtttcgccgcgctgctcgccgtcgcagcgtgatttatatgatgctcagtctgctttaatctaatttccggccggttggtcgggctgcgttggatttgagttcgtcaatgtccggtctggacgcgtcttgtatcgtgtgtgtcgtcgcaaccatcgaatttgcaagtaataataataaaaataagtatgtcctgtgtggttgtgc

SEQ ID NO: 271358 - DNA, 1195 bp, Zea mays
ctgtaattcagatgccagaaggagaaatagaagagttgccatatgcacttaagaaagtagaacctggagaccggttggaggtcagccaggagaacggtacagagttatccgaaaaggcttctttctataaaggagtattctacaactaccttagcattgggatggatgctcaggttgcatatggcttccatcatcttcgtgatgaaaagccatatcttgcacaaggaccagttgcaaataagttgatttatgctggatatagctgcactcaggggtggttttgtacaccttgcactgcgagtccacagctaagggggcttaagaacattttgcgactttccattaaaaaggccaattgttcagagtgggagcaagtgaaaatgccttcaagcgttagatccctagttgtgttaaatttatacaatcatggcagtggaaggcatccatggggtgatctaagacctgagtatctcgaaaagaaaggctttgttgaagcccattcagatgatggtttgcttgaaatatttggtctgaaggaaggttggcatgcttcatttgtcatggccgagcttatcaaagcaaagcacattgcccaggctgcggctatcaagttcgaaatgaggggtggcgagtggaaccgagcatatgttcagatggacggagagccgtggaaacaaccgctgctacaggagcactcaaccatcgtggaaataaacaaagttccgtatcattctctcatgataaacggagagtaatgagattttcctctgtcaaccagatcgttaggatcgtgtacagttcaggagcagcgggcactagatccttagaactgggtcggacggactgcagcgaggatggcatgcatgttcgttggccttttgtcgtgctatggtcgaagccatggccggagcgtgatgtggcaccatgcattgttgtattcgtaccataatatgtgcgttgttgtatcctaagttctttttgaaggaaacatgatttatttgtttgtattgtaacgttgtgtcattgcaaaagaataacctggtgtaaaactgtaaaatgggacagtctgccgtttgcacagccctgtagcattttttttttgttcttgttaactttttttttgatgaaagtattaactgaaaaaaaaaaaaaaaaaaaaaaaaaaaagggcggcagctcgcgatctagaactagt

SEQ ID NO: 271359 - DNA, 539 bp, Zea mays
  unsure (1)..(539): unsure at all n locations
tcgtttcgactacccgaactacatggccaacacggtgtcgttccgcgccaaggcgcggtcgcagagcgcgcccaagcagaggccgcagtacgagcggtccagctccctacgcagggcgtcggcggcgcagaggtcggcggcggcggcggcggcggcctcctccctgcacgccaagttcaccaacaaggcgtacccgggctctggcaggctggatcggcttggcttgccggccaggtactgatcctgatcctgatcctgcctaattcgcgccagggatgatgtgctgccgctgtgtctcgagcgaggacgacgacgaagaagtgcaatcgactagtggtagttaggttccgtgccttggttgtgctattaccatcaacagtttttctgtttcttgctttgtgtagctagccatgtctaaagttgctggtagctgtaatgatgctataatgcgtgcttaactgctgacgaaccttttcctctacatttccgtggtatatatatatgggccgtccaatcatgcatgggaaaaaacccanatt

SEQ ID NO: 271360 - DNA, 969 bp, Zea mays
gctgtcttgacaacaatgttggagaagcacggaacccgaaacagttgctttttgactgcgcagaagcgatatccgaaaatagcatcgatgaagcacagtcaatcatagcagaactacggcagaaggtggcaattcaaggagacccttctcagagacttgcggcctatctcgtggagggccttgctgccacactacagtcttcaggaaagggcatctacagggccctgaggtgcaaggaggcccctactttgtaccagctttcagccatgcagatcctctttgaaatctgcccatgcttcaggctaggcttcatggctgctaactatgctattctcgaagcctgcaaaggcgaagatgtcgtgcacatcattgactttgacatcaaccagggtagccagtacataactcttatccagttcctaaagaataacagtaacaagccacgccttttgaggataactggtgtcgatgatccagagtcagtgcacagagctgttggaggactgaatgttgttgggcagcgactagagaagcttgcagaggactgtgaggtacggtttgagttcagggcagtggctgctaacattgaagatttgactcctggaatgctaggtcgccgtcccggagaggccctcattgttaactttgcattcctgctgcaccaccttcctgatgaaagtgtctcaattatgaaccaaagggatcggcttctccgtatggtgaagggtctccgaccaaaactagtgacgttggtggagcaggacgcaaatactaacactaccccattcccttccaggttccgggaggtctatgactactattcggcactttttgattcactggatgccacccttccaagggaaagcccagatagaatgaacgtggagcgccagtgcctcgcacgggaaatcgtcaacatcttagcttgtgaaggccctgaccgtgtggaaaggtatgaagtggctggga

SEQ ID NO: 271361 - DNA, 1357 bp, Zea mays
cggacgcgtgggcggtcgcgtgggcggatgcgttttcggacgcgtgggtgaatcttgcagttccatttgatgttttgtccagaatcctttctcgcacacctaagctagaggatttaggcacaggatcctttttacaaggcaatgaccctgctgcatatgccagtttatgtagagctcttgagaactgcacttcactgaagagtatatctggtttttgggatgctccaggcttttatgttcaaggaattttgtcaaattgcaagatcagaaatcttacatgcttgaatctcagctatgctacattgattcagagtacccagcttatcggtattattcgtcattgtaagaagctccatgtcttatgggtgttagatcacattggtgatgagggcttgaaggctgtgtccttttcttgtcctgatcttcaggagttgagggtatatccaagtgttgttgcaccaagaggtactgtgacggaggaagggttggtagccctatcttcgtgtcggaagttacagcgtgtgctcttctcttgtgttcgaatgacaaacacggcgctgatgacaatagcaaggtactgcccacggctaacgtccttcagactatgcattcgcaagcccaggtcagcagacgccgtcacaggacagccactggacgaatgctttggggcgatagtgcggtcctgcggaggcctgaggcgtcttgccatgtccggcctcctcacggacagcgtgttcctgtacatcggcatgtacgcggagaagctggagatgctctcggcaacgtgcgcgggggacaccgacgacggcatggtctatgtgctcaatggctgcaggaacctcaagaagctggtaatcaaggagagccccttcggtgacgccgctctcctcgcgggcgcgcacaggtacgagtcaatgcgcagtctctggatgtcgtcctgccagatcaccctgggtggctgcaaggcccttgcggccaccatgccaaacatcaatgtcgaggtcatcggtggggcgagctttggtgcgatggatggtggtgtcagcggtgcgaggaaggtggacatgctctacctctaccgtactctggctggacctagatgcgatacgccaggattcgtctcgatattgtgagctgtatctatggctactgttggtggcgttcagggaaacccgatgttcttaaccgtgcctgctgtgggctgtggctgtgctactctgtctggtagtgtttcggaaacacgatgtttatttgcgtaaggtagtgtttggttctggaaccattttaagccttgttcagatattcctatacctcatggattggaagtgattatgaacaaatatgaatagttttgccc

SEQ ID NO: 271362 - DNA, 540 bp, Zea mays
tattttgaggcatggcagacaactgaggtcgaaatagcgtggtagcttggatctgcacatctatatgattgagggcctggtgtttaggattataatctgcccagattatataacctatcttattttgaactaagtgttagttcaaaataagttagattatataatctggacaaattatattcccaatcaaacaggctatgattggacttactgatacccatttgagtagaactgatcttgacaggtatccgagaaaacgatgaccttgattgaaaattttgctgatacgctgatgcagcacttaaggtctactattgatattggtgtagccaagggatagcaaatgggaaaaatggtgtaaaaacgctgcatatttttttttgcctaagctacagctgtgctacagcaaattttgattaaaaaaaaaagcgttttcaaaaaaaatttaaaataagggtatatttttttgggaatcccttaagaaaaaaattttttaaaaaagggggttaaaaaaagccaaatattccccttttaaaaagg

SEQ ID NO: 271363 - DNA, 1077 bp, Zea mays
  unsure (1)..(1077): unsure at all n locations
ccccaacccgtcgtcggctgccggctgcggcactctgggaggaaggccccaagggcttgccgtctgagacgaaccgaaacgatggtgggcgccaatgaagtgggcggtctggagtgcgagcggaagccgctggcggaggtggtcggcgactgcgtccagcgctggttccaggacgcgtacatggaggcgcgcaaaggcgacgtcgccaaccaagtgcttgtagcgcagatgttcttctcgggttatggaacccccaagaacgagtataagggaaaacaatggatggatagggcgtcaaggttcaggtcttcagctttgaaggttggcatgaaacgtccaggatactatgcaagtgactcggactccgatgatgccaaccaatgacagtcagttacaaattgagttatgattagttaggagattcacatggtaagaaagtttggtataagctgttgctcaccttttcatgatttctaatattcccccgccctcgcgttcgggacttcacgaccgaatttcttggtggtttatgcatttatctctacgttgaatcactgtcacactgagcttgtggtgattagccagattaggtgtcctgacctttgttgttccgtgtgtcactgttgcttgctctatggcgcaatggaattcctcaggtgtttaatgacaggactgaatttatattttgaggtaattacaaggttgtggttactatagtgtcagtcccagcaacttgggagttggttatatttattaattcatttttagacccgttttttcgtttccctgtcgaagcaagcattgctgttttgtggtcttattttaaatcacgctgtaattcgacttagagccattctatctaatttttggagtataaaaaggctgtcatgatattgctattttgcatctaaatcccattgttttttgttattacaaattggaagctatcaggatattgctgtttattaattcatcaagcttgttcgctgctgctgctgcttgctgtggctttaatnccgctgcggcttctacagtattttgtttctatagatgacagtctgaacagttgcagtaact

SEQ ID NO: 271364 - DNA, 648 bp, Zea mays
gcggcactcctgaagggaggaagccccaagcccttgccgccgcagctgccgcagccagcaacgaaccgtacataggcagggacgaagcgatggagggagccaatggagtcggtgggtcggagtccgagcggaagccgctgtcagaggtggtcggcgactgcgtccagcgctggttccaggacgcgtacaaggaggcgcgcaaaggagacatcgccaaccaggtgcttgtagcgcagatgttcttctcgggttatgggacccccaagaacgagtacaagggaaaacaatggatggatagagcatcaaggttcaggtcttccgctttgaaggttggcatgaaacgtccaggatacaatgcaagtgactcagactctgatgacgatgcaaatgatgacgccaaccaataacactcaattacaaattgagttattagttaggagattcacagggaattttccttggtgctgggacttcagggtcgaattacttggtggtttatgcatttattagcactgtgtttgaattgtgactgtcacattgagcttatggtgattagatatcctggcctttgtcgttccgtgtgccactgttgcatggtctatagtgcaatggggttcgccatgtgattaatgacaaaattgaatttat

SEQ ID NO: 271365 - DNA, 335 bp, Zea mays
cggacggtgggcaactcagcagaagcacaccactacggccggttcgtcgtccctagataagctggtgcgtctcgcggcgtggtggatcggaggagaggtgggacaggcaggcacccatggcggggctacagaggtcggcgaccacgttcagaaggtccgggtcctcgggcctggtctgggacgagcggttcctgaccgaggccgaggccgaggcgaaggcgaaggccggcggtggcgccgccgccgccgaggacccccagccggagcttcggcactccaggagcgtcgggagcatcggcatgctgctccgtggtggagacagcgacgacggcaat

SEQ ID NO: 271366 - DNA, 599 bp, Zea mays
cggttttaatccaaaaacactttttcttttttttttaagaatttccatgctcgggcaattttccattcttcatatatgcacctagcaccacctcggtccatgtcgggtcgtcgtcgctgctgcatgccccccccccccccccctttttttgattcgttgctgtggtaattatagtggtcgcctctttagatgttacacgcaaaaaatattggcggtgatgcggttatttattgatttgttctggtaattaataagaaccctcaagctttggggtgttcacggagaggttgagttgatgcggtgaaaacagcacgtgaaagggtaatgagagatcgatcgcgcggttaaggagacaaggtgacaagaaaggcagatgacgcagtgggtgtttgcactgttactgcggtaaattttgtgcatgcggctactactctacagtgggctagtttgttgcaagggagctgcggaaaaaaatggaaaagaagagcttgctcgtcatgtgccatgaagaacagtcagtttgatgcatgcgggatttttatatttatccttgttttcccctctttttcatttttcaccatttcttttatgttctgcaa

SEQ ID NO: 271367 - DNA, 451 bp, Zea mays
  unsure (1)..(451): unsure at all n locations
gaatncccgggtgcgacccacgcgtacggtccagtgatcgatacgtctgcgcgcacccagtcattatcccccggtgactctcatcctactgcacttctccatggcttctctcctttctctcgctcgcatgtgacatttgtgtctacccacctgtcgcctccatgcatgctcgtccatatctctagttctctacacctctaaaccaaaaatcacaagaactatctccctcagctcctccatgctccggcaattctccattcctcatatatgcacctagcaacacctcgatccatgtcgtgtcgtcgtccctgctgcatgcctacccccctttttttgattcgttgctgtgttaattatagtggtcgcctctttagatgttacagtaaaaaaatatttgcggtgntgcggctatttattgatttggtctggtaattaataagaaccctcaagc

SEQ ID NO: 271368 - DNA, 987 bp, Zea mays
cggacgcgtggcgagacgcgtgggcggacgcgtgggcggaccgtgggcggaccgtgggcggacgcgtagggtcgccacccaacccgccgagtccccaagcaagttgagcatccatccatccatggcgggaggcaagtccaccggcaatgccgcgcgcagcaggaagcgcgtcgaggcaaccgtcctcaagcgctccagggacgggagcgccttcaccagatgcgaggcctgcaacaaggacgtccccgtcgtcctcatcgacatgcacagctgcagcctcgacgagaagatcaggatgacgctcgaggcgcaggtcgtcgagaagaccgtcgaggtcgccagtgcggaccgcaagaagtcctccgccaagggaggtggtaacaaggacgccaagcgcaagcgctcgcccaccgccttcttcctcttcatggacgacttcaggaaggagttcaaggccacccatcctgacaacaagagtgtcgccaccgttgcaaaggaaggaggggagaggtggaagtccatgacagacgaggagaagaagccttacattgaaaaggccgcggactcaaggctgaggccgagaatggcgagggcagtggtgagaacaatgttgccactaagaaagccaagacagatgaccaggaggtggatcagccagcaaagaagctcagaaagtgcaaggctcttcacgaggacgaggatgacgatggtgaccaggaagacgaggatgagaagaacgagttggatgacgacatgtagatggcagaggccactctcccatctctgtaaatggatggcagatgtgagcgtctagttagaaatgtcacttgtttcaagctagagggaagagggagagtagtcagtagtgaatatcccccgttatcgttgctacatgaatgaactattttttggaaaaaaaaaaaaaaaaaaaaaaaaaaaaaaaaaaacaaaaacaaaaaaaaagggcggccgctcgcgatcaaaaac

SEQ ID NO: 271369 - DNA, 347 bp, Zea mays
gacgccacgcgtaacggtgcaatggctcttcacgaggcacgaggtatgactattgtgaccagggaagacgaggatgagaagaacgagttggatgacgacatgtagatggcagaggccactctcccatctttgaaaatggatggccgatgtgagcgaatagttagaaatgtcacttgcttcaagctagagggaagacggagagctactcagtactgaatatcccccgttgtcgctgctacatgaatgaactattctatgacgcaggtctgtctgctttcatctccatccaacacatgtactcaatgccttttcctttcctggctttcctatattacatccattgctcc

SEQ ID NO: 271370 - DNA, 433 bp, Zea mays
ctagttctctttatatcactggacctgcttttttttctgatgattcgagcaagaagagaaaagcgtctgcatctagtgtagagctcaaagatttttctggacggtcgatgttatgtgtgtgtatagtccatttctgcttctaaggaaaaaatggcggctgcatactatggttgcatcggtgttctggacacgttcaaatcatgtggtgtggtctagttaagtgttaactgtgtcaaatcacatggcctacttgcaagtgtgctctgtaagtttccattccagcttgcttcattctgaacagtgaaacatatctatcttgcatcatctgctcaacttattccattgtaaactgtgtcggttgtcctcacctaacttaagattgtgctcccttttgatttgtgagcccacaaaaaaaaaagcacttttttttttt

SEQ ID NO: 271371 - DNA, 1123 bp, Zea mays
gtccattagaaatgttgaaaggtaaggagaagattgatggagctgctactgaagtcttggatccatatgtgaggttaataagggatgagaaatatggatggaaatatggatgtggagccaagggctgcacgaaacttttccatgccgctgagtttgtccagaagcatcttaaactgaagcacgcagacttggtggttgatctaacttcaaaagcgagagaggatatttactttgagaactatatgaatgacccaaaggcgcctggtggtacgcctatcatgcagcaacctgctccaaggggaaaaggcagacaaaggccaccaatagagagtcggctgagggatgagcgtggtaatcataggctcgacagtgatgggtccggtgaaaatcccgacgatccctgtttatgattcgtttggtgatccaactatgcatggcgccttccctccagatattcctgctccccctgttctaatgcctgtgcctggtgccggtccgcttggaccgtttattcccgcaccgccggaagttgccatgcatatgttgagggatcagggtgcgccacctccttttgagcccagtggaggtccacatcctaggaaagcagggacgggcagcggcggtcctccaatgcgtggtccgtccccagtcttcagtgctcctccgcctcatcatatgcatgaccctcgtcgaatacgaagctaccaagacctggatgctcccgaggacgaagtgaccgtcatggactaccgaagcttgtatgcttgcctccagatactcgtttaggtaaacattacagtgcgaaatcaaaacatcttgctctgtctaaaatcaccccggaggaaccccagcaggcatctcagcacctgtgtctcgactcctgagctgtcatcttctcactgtttgtgaaacgaaacacactacaggacgctcgacaaaaataggccaccgtgaaacccggtgttagctcagtctgtgcaacgcgaaagattttcgtccatgtttgagctctgtaaaacactgttcccaacataacgtccagctggacagagtagagtttaaatatggttagtgagatggatagtttgatggagataagatttattaggggattatctcttcc

SEQ ID NO: 271372 - DNA, 931 bp, Zea mays
gaccctccaatcccagaaactgtaagaaatgctattgctgtgcttcaggatcttggtgctttaacacaagacgaacaattaacagaattaggagaaaagctgggttccctgccagtccatccatccaccaccaagatgctcctgtttgctatattcatgaactgcctggatccagcattgacattggcatgtgcagctgattacagagatccatttgtccttccagtagcgcctgatgagaggaaaagggcagctgcagcgaaagttgagcttgcttcgttgtatggtgggttcagcgaccaacttgctgttgtcgcggcatttgactgctggaggcatgccaaagatagaggccaagattctcaattttgtgcgaagtactttgtctcttcaaacatcatgaatatgctatcaagcatgaggaaacaacttcagaatgaactgtctcaaagagggtttgtccctgcagatgcatctgcctgcagcttaaactctaaagatccaggtatcatgcgtgctgttcttatggctggtgcttacccaatggtagggaaaatgctccctcctcgcaaaaatgctagaaaatcagttctggaaacagcgagtggtgccaaagttcgtctgcacccacactcctgcaactttaacctatctttcagtaaatcttctgggaatccactgctgatatacgatgagatcactcgaggtgatggtggaatgtatataaaaaattcttcagttgttgggtcatatcctttgcttctaatagctgcagaaatggttgttgctccacctgatgatgatagtgatgaagatgaggaagattctagtgaggatgaagctgaggaaagcacattggtacagcacaaagaagagattatgtcttcacctgacagcattgtttcagttgttgttgatcggtggctccggt

SEQ ID NO: 271373 - DNA, 424 bp, Zea mays
agctcatcaacgccacctactacgtgcgcgtgccgccatgcctcctcctcctccgcacgtcgtcggcctcgtcgccgccgcccaccctcgccgtcgcgccgctcaagctcgtcctgcgcaccatcgtcatcatgttcacaacgctcgtcgccatgctggtgcccttcttcaacgccgtgctgggcctcatcggcgcgctcggcttctggccgctctccgtctacttccccgtcagcatgcacatggcaaggctcaacatccgacgcggagagatccgctggtggatgctgcaggccatgagcttcgtctgcctcctcatctccgtcgcagccagcatcggatccgtgcacgacatcgtgcacaacctcaaggccgccgcgccattcaacactgcaaactgattaataaacatgcatttactagt

SEQ ID NO: 271374 - DNA, 758 bp, Zea mays
cggagagaaggatgatgaagggctttggcaatcgccgctgcactcaacccacttaccgctgttaattttgcactggatattgcaagaggaatggcatatcttcataatgagcctaatgttgtgattcaccgagatttaaaaccaagaaacattcttctggtgaattctgctgccaaccacttgaaggttggagacttcggccttagcaagatcatcaaagctcagcatgcgaatgatgtatacaagatgactggagagacaggaagctatcggtacatggcccctgaagttttcaagcaccggaaatatgacaagaaagttgatatcttctcttttgccatgattctatatgagatgctggaaggtgattcacccttctccaactacgaaccttatgaggctgctaagtacgtggcagatgggcatcgtccggttttccgtaaaaatcataccactgagttgaaggatttggttgagctatgttggtctggggatatcagtctgagaccatctttcttggagatcctcaagaggcttgagaagctcaaggagcattattcacacgagaaccactggcatttgttccagtagcagtgcgcatataatcatacagtatatttttttactatgactgttgtcatgattggggctttctcgggagatctgacattgatgaatgtacaaaattgggtgcctctagaaaggtccactgagactgaaaaatcttcttgctgttttacgtcgatgctatttctggt

SEQ ID NO: 271375 - DNA, 293 bp, Zea mays
gttcaccacttcaccagtttcacactcaggagcgtgaatacaattgttactgcggttgtttttgaggtttgtaaacagttttgggtcttgcagcactggactcggtctgcgattgttgttttttgttgcccttgctcagtccgcggtgtgtatgtcctgcatgcacgtggttcctttctgttggtgtttttgtgtgccaacaaaccaccaaacttggtttgtatgtctttagctgatcattctttgacactgaatctcattatatttgtattcatttggacgcttgctttttt

SEQ ID NO: 271376 - DNA, 408 bp, Zea mays
aaagatggtgccttcaatatagaactagaagcaacggtggcatttttctcctaattttgattcagcagaaatgaagtggtacttatggggtcatccagacatccatgcctggcatactgcttacgacaccatcgaccccgagttaactgttcatgaatttccgaaggcttgttttatcccccgtctggggcgagttttgttagtctgtaacaccctgggaaactctcctaacttaattgcaatcccttgtgctcctcaacttgactggagctgtgacatttgctgacagccaaaaaaaaaaacccggcaaaaagggtgctggtgatacctgtacgtattttccacggcgacttggcataaatcaatgcctagtgaatgtaataatccgcccgttcccgttagtcttag

SEQ ID NO: 271377 - DNA, 1074 bp, Zea mays
cccacgcgttttgatatgccgaggggtgtactggaccctatcccacctgaacaggtgatgcaatgccaatctgaagaggactgtgctcgcgtagcgaaatgccttccaccagctgaagcagctttgcttgactgggctgtgaatctgatggccgacgtagtccaagaagaacacataaacaagatgaacgatcgcaatattgctatggtcttcgcaccaaatatgactcagatggcagatcctttgactgcactgatgtatgcagtccaagtgatgaattttctcaagatgctggtacaaaagaccctcaaggatagagaggagtcgaccccagaggatgctttgctgccccagaaggacccatctgatgaaaacgggcatcagaagcccaccgtgacacttgattctctcctcgaggaaggctccaggcgcccttctttcgccaaggaagagcccctacctgaacagccctggccacagcactgatgacaagtctaacgaaactaacaccgatttaggagccactgctgctttcactgcccagacaagcgaggtagcaacgggtgtggaggactccactagtagtggctcacagcctgcacctgctggcccagctgctatcgctgatgcttccggcacgacagccacaaattctctccaggcaggcaaggggagccgaagcctgaaccggaggaggactagaaagggcaagggccagtctggcacgcgcaccacgcctgcagctgagaaatcaagaggtgcgagcatcgtgagccgcataaactccagagttgagcggatcgaagcgtggagatgagaccgaaagccatttccatcgctgttgtgtactagatgatgactgacccagcgtttcctgaaaatagcaccccccgaactgcttgcttgcacattttacatttttctctctctctctctatgcgcttatcatttcttgctgtatcatggccatggtattttgagattcgatcttcctgtctttactaacttctgtatctttcttatggttaattctgtgagtcaatgaaagatgcttgtgctttcctttgtacgtta

SEQ ID NO: 271378 - DNA, 1301 bp, Zea mays
agctcacagtcacaaaagaaacgatgtccactggcgaactgacggctccgtcatgcggcgatcgataaaaatgccgcgaggccaccacgcgagacgaacgcaaacgaagtgcggaaaataggcctattttttcttcttcctcgtagagatatttcggaagagggagtgcgtgccttcctctcagctgattcgccgaggacacgagatcctctagagggttgtgctgtttggcgtgaggctttgggggcgatttgctttgctcgcatgggggatcatgtcgctgtggatgttggggagctcgttgcgtcccgagtcggtgaggcagcggggctattgtccggcggcaaggaggaaacgaaggcgctggctgggatggtggagtgccgcatttgccaggaggaggacctcgcaaagaacctcgagagcccctgtgcttgcagcggcagcctcaagtatgctcacagggaatgtgtgcaacgttggtgcaatgagaaaggagatataatctgtgaaatctgccatgagtcgtacaagcctggttacactgccccaacccaggtgcatcatgatgaaactaccatagagataagtggtggagattggaccatctctggcaacccgttggatttacatgatcctagaatattggcaatggttgttgctcaacaccttctacttgaagacgactatgatgaatatactgcaacaaacaacaacgctgctgcattttgccgctctatatttctgattttgatggcccttttgctcctgaggcatacactgaccattactaacagcgatgatgaagatgatgcatctgctattttctcgctatttcttttgagagcggctggatttttgctgccatgctatattatggcttgggctattagtatcatgcagcgtcaaagacaaagacaggaagaagcaatgctattaccaacggaagtggcgatcattctgcatcggaacggaagaacaatgcaatttgcggtggcaccaccagaaacccctatctcacctcaccccgagctaaaccaatagaatacatcatcgacagggtcacagtcctcgcctcgggagtgcataacaggtggaaactcgaggacattgtgcaaagcatgtgttgcatcggccacctcgaacggccatgttgcagcaaaaatgttgtgccttcgaattgagttaactttctagcttcagattcaatgcttgttttatggcctctcagcatcttctgtacataaagagatttctctaataaatgaatataagttacatccacacaaatttcgattttg

SEQ ID NO: 271379 - DNA, 512 bp, Zea mays
  unsure (1)..(512): unsure at all n locations
ctgacgcgtgggcggcgatcgataaaaatgccgcgaggtcaccacgcgagacgaacgcaaacgaaacgagggcttcgattcgatccaggagtcgcccaaatcgtcttgtcttcgacttcggttcaacccccgaaacgaaatttctagggttttagtgtcaattttgtcccccttcattacatttgattggcggtggattggttcccgttttgatgattccctgggttcgttggacggcaggacacgagatcctctagagggttgtgctgtttggcgtgaggctttgggggcgatttgctttgctcgcatgggggatcatgtcgctgtggatgttggggagctcgttgcgtcccgagtcggtgaggcagcggggctattgtccggcggcaaggaggaaatgaaggcgctggctgggatggtggagtgccgcatttgccaggaggaggacctcgncaagaacctcgagagcccctgtgcttgcagcggcagcctcaagtatgctcacagggaat

SEQ ID NO: 271380 - DNA, 453 bp, Zea mays
gatgaagatgatgcatctgctattttctcgctatttcttttgagagccgctggatttttgctgccatgctatattatggcttgggctattagtatcatgcagcgtcaattgatatgtcaggaagaagcaatgctgttaccaacggaagtggcgatcattctgcacccggacggaagaacaatgcaatttgcggtggcaccagcggaatctcctgcatcacatcagtgacaggctcacaggcctgcctcggaatctcagcatctggtcttaaaggtggaaagacgaggacgttgtgcaattcatgttgtgccttcgaatttagttaactttcaagcggagattcaatgtttgttcgatgggctctcagcaccttctgtacataaagagatttatctaataactaataagtgaatataagttaaatcaacacaaagtttgattttgtattgtggt

SEQ ID NO: 271381 - DNA, 1072 bp, Zea mays
acgggacatatgctctcaagaaagttcttgttcagagtgatcagcacttagagcttgttcagcaagagatccgagtgtcctctcaattcagccatccaaatttacttcctcttcttgaacatgccatcgctgctgccaagggtgttcaggatggatcccagaactatgaggcctacttattattcccagttcatttagaaggaacattacatgatataactaaaaccatgcttgaaaagaaggaattcttcccaacaattactgttctccagatatttcgccagctttgttctggattaaagcacatgcacagttttgatccaccatatgcgcacaatggggttaaaccagataatgtcctcataacacagaggaagcagtctcatctagcaattttgatggattttgagagtgctggtccagcaagaaagactattagatcacaagctgaagctttgcagttacaggaatgggcttcagagcactgttcttctcattaccgtgcccccgaactatgggagtgtccaagtcatgctgacattgatgagaggacagatatatggtctttgggatgcactttgtatgctatgatgtatggaaagtctccatttgattatgagcttgatgagtcttctggtgaaagcttgcacagtgttattaaaaatgtacagattaaatggcctgaagaagcgggatctacaataccctgattccctccgccagtttataacttggatgctgcagccacatcccgcagttcgtcctcatattgatgatatcataattcatgttgataaacttgtcatgaagtactctaattaaccgctacaccaagccgcttctccaccagaaaaaagaatcattattatgtaagtctacacgattcattagcaaaatgtgatatgtatgttccttgatagctattactgtattaaacgagaaaaggacattctgctgtagtcttcaaccattcgtggactcgccattgttcatgagtatgttatctatagatgttttttttgtatgcccgacagtgttaccgggttaataaatgatacagtacctcttttat

SEQ ID NO: 271382 - DNA, 1953 bp, Zea mays
cggtacgcgcggtcgcgactggcttctcgtagcagcttatctacagtaataatcacaagagcctactaggtggtgggagcagagcagcacttgcaattgcaaccagcaagcgcaagagaggagggggctcaagagtcttgacgcgtctagccttcgcagaaaagggttcaagcgagaagagggggggagagggcacgggttcagagctggaggagatggagagcccgcgcagccccgaggcggagatcggccaccgggtggaggacctctgggaggtggcggagccgcagctctcgccgtcggagaagctcaactcctgcttcgaggacatccccgtcgcgtccttcccgcgcacgcacccgtcccaagtcattgagattccttcagatgcaagtcttgctgaaactgtagaaatattatccaaaaacaaaatcttgagtgcacccataagaaatgttgaggctccagaagatgctagttggatggacaaatacatcggcattgtggaatttgctggtattgccatgtggttgctcagtcagtctgatgctgcagttaatgggacggttggttcgggaccaggatcgcctgtctccagtctagtttcgaggttgggttcttttacattcagaaggacatcatctggaagggtagaaactgctactgattctgaatcagacgaagcagcatcggttggtgggagcttttttgaaaccctgacttcctctgaattctacaagaatacaaaggttggcgatatctcagggagcttccgctgggcaccatttcttgcactgcagacatctgacacattccttaccatgttgctgcttctatccaagtacagaatgaagagccttccagttgtagaagtgggaggagataagattgagaacattatcacacaatcctctgtcgtacacatgcttgcagagtgtgttgggctctcctggtttgagaactggggaactaagaaactctctgaactggggcttcctgtcatgaaaccatcgaaacttgtcaaggtaagcgaagatcagccagttctgaaagctttccaactgatgagggaaaagggagttggtggcttgccagtcatggacacaagtggagcaaatgccattggtaatattagcatcagagatgtccagtatcttttaactgctcccaagatatacaaagagcacaggtcaatcacgacaaaggatttccttagtgctgttcgacaccacctccaggagcagcgtgaggcctcaccgttgctgcatgatgtcatcacttgcaaaaaggatgatacaatcaaggacatcatactgaagctggactctgagaagatccacaggatctacgttgtggatgacaaagggaacaccgagggagtcatcaccttgagggacataatctccaagctggtgcatgagccacgccattactttggggatttctttgatggtgttgttcccctgcctgcaaacagcaccgtatgacacatcttcgcggtccaatcacactgatgtatctgtgcaaatgtacattttgagctattctcttctgaagttgcttctagtgtattccttttctcagccttctcggttctcaggtaaacagaccattgcctacatggagaaaaggactaatgctctaatggatggatggcaatgttgtacattgaataatctgtgaacttacctgagtttctttttcatgttctcatgatggcaattgttatctgtcttccttcttgctgaagatgctgttcactagattcagctttgtcatgctgcaaagcaaaattctgcgggagaagatgtattttatcttgtttttaaccttggagtcagactctttcgctgtcatatacctgggtaacttcatcattcacctggtggagtctactacatgtcgtagggtcaaccaaaatatcctcgtgctgcagtgcatccatatattttt

SEQ ID NO: 271383 - DNA, 425 bp, Zea mays
taccatgttgctgcttctatccaagtacagaatgaagagccttccagttgtaggagggggaggagataagattgagaacattatcacacaatcctctgtcgtacacatgcttgcagagtgtgttgggctctcctggtttgagaactggggaactaagaaactctctgaactggggcttcctgtcatgaaaccatcgaaacttgtcaagggactcttaatgatccgttgttggtcctcattggaaatctaagtagaacatttcactttcagtttttcatttctaattaacccataacagactcaagttcaagttatcaatacctaaagaaagatcaatttcatcaaagccatgctaacacgtcactggggcctactcttttcaaggtaagcgaagatcagccagttctgaaagctttccaactgat

SEQ ID NO: 271384 - DNA, 415 bp, Zea mays
cgctgggcgccggcaagcgcgggcagtggacgtggaaggacccgcgccgcgccgcctgcctgcccaggcttggcccgctcttcgaggacctgcgcggcccgcccaagtacacgcgtggcggtggaggcggcaagcgccgcgccgaaggcggcggaccagagcggcgggtcatcgcgtcggaggacgagaacgaggggtcgagggcgcccttggtgcagcagctcctcggcgtgctccgcatctacttgacgctgctggagtcggtgaagcgcgtggcggtgggcatcgtggccggcgcgcacgcgtcgtcggggcggtcgtcccgcgcgcacgccgtggcggtgctgtccgtcgcctcgttccagctcctgttcatgctgctcgggaagcccttcgtcaagaagcgggtgcagct

SEQ ID NO: 271385 - DNA, 794 bp, Zea mays
cccacgcgtccgcccacgcgtccgcccacgcgtccgcccacgcgtccgcccacgcgtccggaccaccatccacgcactagtacgtagtaagcgagcttagctactgatcgtcgtcaagcactctcgagctcgatctctcgaagcggctagctgctagcagccaattaatggcgaagccttcgcaggtgctggtgtcggcgctcgccgcctgggcggtggtcctgctgctgctgtgcgccgccgcgccgcggggcgccgacgcggccacggcgtgcgacgccgcgcagctgaccccgtgcgcgggcgccatcatcgggagctcgccgcccaccgcggcgtgctgcagcaggctcagggagcagcagccgtgcctgtgcacgtacgcgcgcgaccccaagctgcagcgctacgtcagctcgcccaacggcaagaacgccatggccgcgtgcaaggtgcccgtgccgtcgtgctaatttaaacttctgttagcgccgccgccgccgcgcgcgtacgtacgtggcgtgaggcgtacctgtgtcggtagcagcgtggcccactggacagggacagagtgtggcgtcgctcttttctgtttccgtacgtacgtacttggatcgcgcatgcccgtgtatgcgtgttccgttgtggtgttgctgtactcgatctgctgcctgtgtgtatctaccgagctcttcggacagatacgcgtgcgtatgaataaatgatgtaataacgacgtgtgcatccgctatatatatgcatatctaaaataaaaagatatcatatcttatatt

SEQ ID NO: 271386 - DNA, 413 bp, Zea mays
  unsure (1)..(413): unsure at all n locations
aactccagcggcaacattaagatcttagaaatggactgaggattggagttaggcatctgctgagtctcagctataaatggactgaacttcttaccaagttgtgtgcgtgtgtggcttcaaaatttgtggcgacggagttgccaacggtgcgtggtgcagagttgggagaggtaggagtacctgtaacaggtttagcatggtttgataggattaaactagcgtggtagcaaaagtagcataaataggaaacagaattgaggtgtggggtagtactgcaaggaaaggttttgtacatcattggttcgaggtatacttgtacagccaatcaatccagtttttacctagcaaaaaaaaaaaaaaaacananaaaaaaaaaaaaaaataaaaaaaaaaatattattttaaaaattatt

SEQ ID NO: 271387 - DNA, 648 bp, Zea mays
gcttcttgaagcattgacatcatttattgtcgtggaaagagatggctcaatcatagcgtgtgctgccctcttcccttttcttgaggataaatctggggaagttgctgctattgctgtatctgaagaatgtcgaggccaaggtcaaggagacaaattacttgattacgttgagaagaaggctttgtcccttggacttgagaaactattcttgcttaccacaaggacagcggattggtttgttcgtcgcggctttaaggagtgctcgttcgattccctgcctttggtgaggagaaaacgtatcgacctctcgcgcgggtcaaaatattacatgaagtggctccaggcagcagaggttgggcatatggctgccgacggttttgccatgagatgatgagtgctgcaaacaagcatctctacgaatctagtcgatggacgtgaggtttctttatgagctgtgcagtcgcttatacatcgtagaaatgtatatttattgtgcaagaaaataatcagtcaataatcgaagatgtggttgtgtttcttgagttgatttcttcttgagcatagcaatgctcaaaagagttgttgatctgcacactgctgacaaagcctgcacgactgcgctttttaacctgataaatacttagctgc

SEQ ID NO: 271388 - DNA, 658 bp, Zea mays
gtcatgatggagttagtaagaatacaagtcatgatgaagtggcaagtgtccaacctagcagagaagcggaaatgagacccagatctgcacctccaagccaatcaacccaagcggacaattcaggttggtctgtggaaactctgatggaactcttagatttcactccacaggaaataaccaaggccatttcggcgaccgagagtaaccgtttcgtagcatctgtcgtcattgctttcctggtggttctgtcaaactggggccttgacattggtggtgccatcaccagagtattagttggtacaaggcctcttctatttctcattgtaaccaacatcaccattgtcttcacattgttgatggagaacaaagaccccaatgtgagaagcagacccgttggcgtcaatctgggttcagctgatagcttagggcagatgctagagatcgggttgctgctacagaaagcactaggtgctctgctgattgactgcagcgtttgcgctgttattatgatatgttttcttggattctgagggagcctgggtagaagtctcacagaaacctttgtaattttttttgtctcatgctctggactgttattccattttgtaacatctcattttggctgagttctaatttatgcacccatgttttctgtttt

SEQ ID NO: 271389 - DNA, 688 bp, Zea mays
gcgacgggcactccgacgactctgcgagctcggcgactctcctgacggcggcaacgtccagagctcatcggatgctgcccttagctccatgagggaccaggacgacggcacgaagcacctagcggctctggacgattccttgacgtacttcgaggtggagagactctccatcctggaggaactcaagacgttggaggagaggctcttcacactggaagacgacgatatcaacaccagcaaagaagttactggccattcctcgagtgacatggatttaccacacgatggccttcagtcgccggagtacattctcaccggtgacaggccaagattcggaggaagggcctctatcagcagagggaagagccttctgcctctgttcgatgcagtcggcgacgaggcctgtgaccgaatgccgccatctgctggagcaggagaggcagaccaggccgacgatgcagcaacgaagccggtttccgtgcttgtcaaagagcaggagaggctggcgatcatagaggaggtcgaccatgtctacgaaaggttgcaggcgctggaggcggacaaggaattcctgaggcactgcatcaagtccctgaagaaaggagacaagggcatggaccttctccaggagatcttgcagcaccttcgcgatctccgcagtgtggagcttcacgtcaagaatgccggt

SEQ ID NO: 271390 - DNA, 343 bp, Zea mays
ccgacatcttggaaaacgctgagagcagtggcattatctcagccttgcagaagaggactttgctccaggagatagcgtctaggcttttgtaggacacagttctaacgccagtagttgtgtgtagctcaccctatagctctctcacgtcttcagcagccagaggcttgcttctgggctactagagaattgcgcctggtcgttgtacatacaccatcatgggattttaccctgattcggattgtgtgttgtgtatgattctgtaaaattttgtacaccctattgggtgagcacacactgacactgttgcggtcggaaattctggtaccagttgtctggattgctg

SEQ ID NO: 271391 - DNA, 1049 bp, Zea mays
ggcagaagccctacaaccacgccggctgcaaggcctccaagtcgtcccggcccttctgctcgcgcaagagccctcacgcgccctggtacgacaagatggaggcctgcataacgccgctgccggagatctccaaggccagcgacgtcgccggcggcgcggtgaagagatggccgcagcggctcacggccgtgccgcccagggtctcccgcggcactgtcaggggcgtcacggccaggtcgttcgcgcaggacacggagctgtggcggaggagggtccggcactacaagtcggtggccagccagctcgagcagaaggggcggtaccgcaacgtgctggacatgaacgcgcgcctgggcgggttcgccgcggcgctggcgctggccggcgacccgctgtgggtcatgaacatggtcccgaccgtggcgaacgcgaccactctcggggccatctacgagcgcggcctcatcggaagctaccaggactggtgcgagggcatgtctacctacccgaggacctacgacctcatccatgcggattcggtgttccccctgtacaaggacaggtgtgagatggaccgcatcctcctggagatggacaggatcctgaggcccaggggcacggtgatcgtcagggaagacgtggacatgctggtgaaggtcaagagcctggcggacgggatgaggtgggagagccagatcgtcgaccacgaagacggcccgctcgtcagggagaagatcctcctggtcgtcaagacgtactggactgcccaggaccaagaccagtagcaggaccggacttgtcaagcgaagttcagcaatgttgataagcatttttcttgcttccaattgcattggatcgccatttctagctccttgagctagtagtgttctctgtttgtttgctgttccttttggactgtacttgctcagataggaaatttgtatcctaaggccttgttcggttattcccaatcccactcaatccacatggattgagagctaaccgaacaagccctaaggtgtaacagggggaaatccaagggcttaggt

SEQ ID NO: 271392 - DNA, 789 bp, Zea mays
acgaaacgcggtagtcagcacaacccactagagcgcgactcgactcgaatcgaatagtgccgtcctttcggttatacctttccctcccgcgccgccgcagccgcctccagggccgcggaggccctagccacctcgtcagtgccgcgcgccgggtgtctcgccgccgcccgtcactgccgctgacaccgccggagcgatcgggtctcgagaccgtcaggagacacgatggaggattgggattctgaagatttccagcccgttgctcctgttgtgaaagtcgagccacttaaaaatcagtgggctgatgaagatgtcgatgccgacgacgtaaaagattcatgggaggaagaagaggaagaggagaaacctaagccagcggttgtgcaaaagaacgcgacgaaacctagcgctaaggctcctgctaaaaagggaaaacagcaagcatcaacaagtgccgaggaaccagacgagcctttgagtcccacttcagagaaaattcgccaacagaggcttgtggaagaagctgacttcaagtcaactacagacctttttgcaaagaagagcggtgaacaaaagtcactagatacttttatcccaaagtccgagagcgactttgcggaatatgcggagcttattgcaaataaactgctcccctacgataaaagttttcactacatggctctcctcaagaatgtcatgagactttccatgacaccgttgaaaggctcggacgcgaaagacatatcttcctccgtgacggcgattgctaacgagaagatcaaggctgag

SEQ ID NO: 271393 - DNA, 499 bp, Zea mays
taaagaagacgcccccgaatccgtctccgcctcctgtcgctcgctctccctgtctcccgcacgccgacccgcagccgccgccgttcgccatgggtttcctcgacgcgctctaccgtgtggtgatgcgccgcaacgccgtctacgttaccttcgtcgtcgccggcgctttcgcgggcgagcgggcggtggactacggcgttcacaagatctgggagatgaacaacctcgggaaaaggtacgaagacatatcggttttggggcagaggccagctgaggaatgataaattttggtcaccagtttgcttcggtttgaccgtttcattttggcacagtaataaacgatgtaaacttacgctgctcctatgacctccttctcattcgtttactctgaaaatgcttttgtggggatttcgtggtgcatgattgaaacctgttagggcgtgttcggttagctctcaatccacatccatgtggattgagtgggattggatagttttga

SEQ ID NO: 271394 - DNA, 356 bp, Zea mays
tgctcgctctccccgtctcccgcacgcccacccgccgccgccgttcgccggtgcctttgcgggcgagcgggttgtagactacggagttcacaagatctgggagatgaacaacctcgggaaaaggtacgaagacataccagttttggggcagaggccagccgaagaatgatatactttggtcgccatttagctccggttgaaccgtttcatttgcgcacaataataagctgtgtagacttcttactctgctgctgagagctgcttcccattcattttactctgaacatgctgtgagggaatttcgtggtgcatggctgagatctgttatacagagcatatgcaaatacgtctagagg

SEQ ID NO: 271395 - DNA, 421 bp, Zea mays
ccctcgtcagctgtctcctctcgtggctgagcatccgccggcctggcctgcgcagccgcctcaccccttcttcgtcttcacaaaccatgagatgagtgcatcaggagatctccacaggaggcctgcagcggctgttcccagctgggcatggcaggtggcagcagcagctcctcctcctgccgccctgccgtcgtccgctgcagcatcatcaggattctccaactccgccacgacagctgccaccaccgccccatcggcctcctccctccggtactgcccgccgccgccgccgccgccgtcgagccatcaccatccccgctgagagaatcaagaagccgcactgtaaatctgccgggaatgaagctagcattttccccccggccctcccctctccgggcgttgcgaacttttcagttttgcg

SEQ ID NO: 271396 - DNA, 904 bp, Zea mays
cccacgcgtccgcccacgcgtccgcagcagcccatccccccagtctgcggtctccccctcccctgcctcctcgtctcctcggtctcccctccctgtcttccagagacacagagcagggcgctcttcggtcggaggagaagcgcgaccacgaccatgggctttatctcgttcgtcggccgggttctcttcgcctccctcttcctcctctcggcctaccaagagttcattgaatttggaaatgacggtggacctgcagcgaagaccttgaagccaaagttcaatttgttcgtcaagctagtgtccaagaatactggactggggctgccgcatatggatataaaaactgtcattgcagctaccatgtttcttaaaggctttggtggtcttctgttcatagtcagcagctcatttggagcattcctcctgctcatttacttggcgtttataacccctattgtgtatgacttctacaaccatgaaatggagtcaacactgtttgtcgatctttttttcaagttcatacagaacttggcgtttatgggtgccctgcttttcttccttgggatgaagaactcaattccaaaacgtcgctccaagggaaggacaacaaaaaccaagacaaactgatgtcagtggttgtaggaggggaagcaattgggctcattatgtttgcatactatacaggaatagatgtcccccttttgttcttggtgcgccaattgaattgtgaattgggacttacagaacttagcatgtaggatatttaagttatcttccgcaattttattttcttatgttgcgatgtgttcttatgtcacattccattttgctacaagacctgctttgccagtaaaaaaatatattaagtcgcatagtctaaaaaaaaaaaaaaaaaaaaaaaaaa

SEQ ID NO: 271397 - DNA, 2094 bp, Zea mays
tttgtcgcgtgggcggacgcgtgggcggacgcgtgggcaggttcccaagtcaactgtcaagaaggatggccgtgaagggactgttacgaaagatccggagtacttggagtttcttgagtttatttcaaagcctactgagcatctgcctagtgctgaaattcagctcgaaaggaaagaagccgaaagggcagctgctggaaaggaggcacctgttgtgacacctcttatgatgtatgtccgccagcaaagggcagctaagagtatggctcatagacctggaagtaggcttagcagaaaagttgcaggtgttgtaactagcagttccagtcctaaaaggtcttctgagaagcgcagatcctccacgtatgttgtacgagacaacactaaggagaaaccaacctatatcatggtgccaaagagagaggagcatacacaaagggaaaaagttgttgctggaaattcaggcgatgccacaagtgggggaacatctggatctggtcaggttgctgagtttaaaagggataaaattgtcatattgaaaggaagaggaaggattgattctaacacacctaatggagcaactcagcagtcatcaacccctgtgaagaatataccaccatcgagttctagactagacaagcgatctgaagctaatggaagaattattaaaactgttctttcaaacaaggaagttcgcagttcaaatccatctcaacatgagcaggaaggtcacatgtttaatactgagaaggataagcgtccaccacgggctctcaaccctcggactattgtgaaagatcaggtagttgaaaatgctgagagaagccattttgatgagaagaataattatctccacagctctgctccaattggtgagaaggttgaaaggcatgccagaaacagagatagacctgatcgcagtgtatgggcacctcgccgctatgacaaatctccgcctgggggtgtttcacatgccttgtcgtcagatttttctcaaatgcagtcacattctggagataatgtctcacaactaacagatggtcatggagacagaaagacagacacaaggggtcatggaggtagccgtggtgttcctgttgaaaatggacataggcatgccaaccgtcgtggtaccccatgtgatccaaaggaaaccaaaatatctgctagcgtgcctgatggaaagaattcaaagaggggctctgctagctatggtgctcatgagagacaagtatgggttcagaagtcaagttcaggctcgtgagtttgtccattgatgatactcccataaaaaacaggtattgaagtcgtggagaagtcttggattctgcagcgcattcttctttgttagctgttgatcctgtgaagtatggtaacgaaatgtccaatggtcaaatgctaccatgaagtgcaatctcagatctgtcagtcgaagtctcagctgaaaagagagctcggctgatttgattcacagaaatagtgaagtaacataacccggcatgtaggtagctctccgacaactttgggcaagatttgatttgtgcccaatgttgatctttctggagcattggatggagattaggttggcatcactacctcattacctcgtgatagtggtcacatatttccaagacccctggaggttacacgcaccctcggcaattcgtcagagatggatgtaaatatctctagagaaagaagaggtctggttccgattgctgtttacaggttagaggtgcaacgtatttacaaagagagataagagttatcacttatcagattacctggtttgttaaataaaggtgaatttagctactagattatgagaccccgtgttttgacttctgcaatcgtggttcacgacagcagaaaggttacctaggagtgtaaaagtgacatctcattttgatgctatggttctgactcaatgggatgtgactttgtgcggttgttttggacgcctggtgtgttttgctaccatgttccaccagacgacccgggggttctgtagtgtcagggatggatgatgtgtttggtgtacagcatcactggtgcttactgttttaaatcttaaaagtgatgttgccttgcctt

SEQ ID NO: 271398 - DNA, 569 bp, Zea mays
tgacttttctaccacatagttaaatgattcctgttagatgacacaacttactaagttgctcttgttccatgcattataccaggtatgtggtaactaggtgacatacctacttatttgtacatatttgtttttttagatggtacaactcgctaaattgctcttgcatactgaattaccagtctaaatctattcttttagacttcgcatcattcccagatatggggcaaatgagagatttcacacatattgacgcctgggccacttactgctgactaggtgcatacatggtgctccacattagctaggtgacctgattgagccaaagacaactttgtgggacttggtttaaccatttagaaccttagggaagaaagtgaatctgtagtggaacttcagggaagaattcacccattctttcaacattgttaatgaatgccatttttccgaaagtggtcttgaattatctggaatctccaccagtttcccgctaaattgttaactcttgcagatactcccataaaaaacaggtattgaagtcgtggagaagtcttggattctgcaacgcattc

SEQ ID NO: 271399 - DNA, 319 bp, Zea mays
cccacgcgtccggagtttgctgaggtcttcaatggacacatatttgtgaatgaaaagggtgctcagtttaaagctttcgtggaatatgcaccatcacaacaggttcccaagtcaactgtcaagaaggatggccgtgaagggactgttacgaaagatccggagtacttggagtttcttgagtttatttcaaagcctactgagcatctgcctagtgctgaaattcagctcgaaaggaaagaagccgaaagggcagctgctggaaaggaggcacctgttgtgacacctcttatgatgtatgtccgccagcaaagggcagcta

SEQ ID NO: 271400 - DNA, 822 bp, Zea mays
gtccttattacatggctccagaggtgctaaagagaaactatggcccagaggttgatgtttggagtgcaggagtgattctgtacattcttctttgtggtgtccccccattctgggcagaaacggaacagggtgttgctcaggcaatcattcgatctgtcattgatttcaaaagagatccatggccaagggtgtctgataacgccaaagaccttgtcagagaaatgctgaatccggacccaaaacgacgattgacagctcaccaagtgcttggtcacccatggttgcagaacattaagaaggctccaaatgttaatttgggtgaaactgttaaggccagactccaacaattctctgtgatgaacaagttcaagaagcatgcacttagggttatagctgagcatctttcggtagaagaggctgctgacataaaggatatgtttgagaagatggatcttaacaaggatcaaatgcttagtttcgaggagctgaagcttggtctgcataagtttggtcaccagatgcctgatgcagatgttcaaacactaatggaagcggcggatgctgatggaaatgggtccttgaattatggagaatttgttacattatttgttcatctaagaaagattggaaatgatgagcatctgcataaggcatttgcatacttcgaccgtaaccagagtggttttattgaaattgatgaactccgtgagtcattagctgatgaccttggacaaaaccgtgaaccgattatcaatgccatcatccgtgatgtagacaccgataaggatggcaagataagctacgtgagtttgcgacgatgat

SEQ ID NO: 271401 - DNA, 861 bp, Zea mays
ttccacgcgtccgaagttaacgatcataggtatcatccaccacggaattggacaattgctgcacgtgagcacctcaacagagagtgcaagtgtggaaggcatcgtgtcatcggctatgttgtcaaaacctgtatcgtttcttgcccacccattgccagagtgctcttgcagaacaccaaagtcacctgctgttcaaccggtaaaagacagcaatggcagatccctatttggaggtgaggtagagtgtcctgattggatggcacgcagcctggcaatggcatctgctaggaatagcgaacctcaaaatgaggactatgaggatgagttgcgtgaagatggctctagccaagacacgcaggaatctaatacaagtgactcgaataaatcttcggagcaagatgaagagatggatccggatgattagagatatgcggagcacctttttaactgctaccaggtccaggctactcaagcaagaaaagcaggaatcatcttgcatcgcagcagcgcatcaccatctggagtagccccagcatgacaagctggtcatccatcgtgggggcttgcctggatcgtactctggtatacaaccaggctgaatacgaaactaacactttgttctcttcttccttcacgtcttactcatttttttgtttacgcgaaattgtttctgtacaaatgtcttaactgaaaatacattaatttttgagtgggtttgatatgtagccatttgttaggtaatgagattggcttacggtgggcagatgtgcacccgtaaaataccggacagtacaggcattgccattttgtcccacgttaattgttgagttttgttggtgaccgaacaccctgcttagcccc

SEQ ID NO: 271402 - DNA, 538 bp, Zea mays
  unsure (1)..(538): unsure at all n locations
gttaaagatagcaatggcagattcctatttggaggtgaggaagagtgtgctggttggatggcacgcagccctgcgatggcgtctgccaggaataatgaacctcaaattgaggactatgaggataagttgcctgaagaaggctctagtccagacacgcaggaatctgacagaagtgactcgaataaatcttcggagcaagatgaggagatggatctggatgattagagatatgtggagcatggatgtatggcacacctttcaaccgctaccagctccaggtccaggctactcgaggaagacaagcatacatacgctcagaatctcctggacaggtgggaatcatcttgcatcgcgcagcgacacatcagcatctggattagtcccaggatcacaattcacaaggtcatccagcgtgggagcttgcctggaccgtactcggtatacaacaaggctttaatacgaaactaacactttgttcccttcttcattcacgtgtcattttttgtgggtacagncctaaaaactgttatgtacaatg

SEQ ID NO: 271403 - DNA, 638 bp, Zea mays
agctgttggtttagcaatatgggtcccatctgttgtaaatcaatctggtagcaaagatacagtcgaggcaacatcacctcgtcatggctattcgtcattgttacctcccacagataggaatgagacagattggaggcgacaagatggagacgatgtggaactcacaattctagacgttgatccctaccactatggtagtaacaatgaggagatgcttcttgatgacttgaaggtatcacaagcaatgacaaagcattatgtgaaggtcacacctacattcaccatcgaggagacaacaaggcttatgcaagagaagcagcaaagctgtgttgttgttgtagataatgaagattttcttgagggaattgtaacattaggtgaccttcgtcgtaaaggatttgtgccaagtgaaaactctgatagtacccaggcaaattcatcgaccgtggatgcaaattcttctcttgtgtcatcatgccttactcgaggttttcagttccatggcaatgaaagaggactggtgacctgctttccagatacagacctgagtactgccaaggttctcatggaagttaaaggtattaaacagcttccagtggtcaaacgtggtgctggccgtagaaatgatgggaggcgta

SEQ ID NO: 271404 - DNA, 740 bp, Zea mays
cgtacacgcagttcaccatcgaacagaacccaatgtcgagcaagctgtgagtcgatgaggcggcggccgactattccaaccaatggggattcgagaagctggttttccggaactcgatcaccggggtgaggagggacaggaagtacgcgatccaggcgaagaacgcgtacgccacaggcgtccacatgtccgagaacgtgatcggcaacaccacgcacaagacggagcacctcatccggtactaccactaccacaacaccatcaacgtcctcggcgaggtgtgccgcgagttcgtctccgttccaccgaagaagggcggcggcctgacgtggtccgagaagacgccctggtactacgacggcagcatgaagcgcgtcgccggcgctgtgcgcgagttcgagagggagaccatcggcgacgtgcggctatgacggaccagcaggagtgctgctgatgtacagtttttgtggtatggctgtgagccattcaggaaggagctaggctgccttggcttactgcgttacctgttgggttcggagctatctgagctgacagagatgcagcgaaagcgaagctgctgcaaccttgtgtgccggtggtgttgtgttggcccgtgattctgatgtgatgatgatgagaggcaaagatgacgttcttgtaaaacatatatatgccccccctctgcagtgtaccctccattgcatttttgttgttaaaaaaaaaaaaaaaaagagggcgcc

SEQ ID NO: 271405 - DNA, 487 bp, Zea mays
gcggagcgccgccatggtgtacatacaggacgtgatagtaagcccctcatagccaaccccccgccataccagtgtatgttttgtaccatacccagcatgtcaatgtaaggatagtagaaaagccactttaggtccctccctggctccctccccttgcaaaccaaacacctacattccttgtgtgcctagttagatatgttgtttgccatatagcctttcccttagtaaattattgttgtcgactgtgattaagcctcctaattgtacccgccacgtggcccgtgctgccagaatcaagaagttttggctgtaccttctgtatgtaaatgcaatgggggaaaaatgatgaatggaagcttttgtccagcctgcaggcaaaagcatgcaggcacctgttcttgccgagcacttgattgattgcatatacagatgtgtgtttctggctggtgggttttttattttatcttatgtggagtgctctttgttc

SEQ ID NO: 271406 - DNA, 409 bp, Zea mays
gcctcctgctagctcagttgggcgacgaggcctcctgctagctcagttgggccttcagtgctaaaagtaccttttgcctgtgtgtatatatgtcttaacgaaacatcatcgtctccccgatgcttcatgtagtttgggctttcctgatatctccaggctgaatgggggagcttccgtgcaatgaaaatctgaacttgtcgcaacactgcaagcgatttattctttttcgtcaaagaaaagagtaagatatgatgtgccttccacagagaagcgcaaacgtatgcatgtaactgttgttaggaacggttctcttgatttctttatttttcattgaaattctactcggtttcatggaacagctgtagtgtctcaagagcatgaaattgatttaaaggcaaggcagttgaag

SEQ ID NO: 271407 - DNA, 650 bp, Zea mays
cggacgcgtgggttctgcgcgcggcgagctagggaggaggcggagggaggagagagatggacgcggagaaggagcgccagcacgacggcgacggcggcgcggtggaggcggacatcgagcggctccccgtcgacctcctcgcgcacatcctctccctcctgtcgcccttccgcgacctgtccatggcggggggagtgagccggaggtggcgctgggcggtggagcggtcgctggcgtcgcggcggcggctgagcttcgcgggccagcgcaccggcgacgacaccgtcgcgcgcctcgtccgcgccgccgtcaacctccgcgacctcgacatttcacgaagctgctggggctgccgaatcaccgacgatggcctcatcaagatttcgtccgcggattgcgtcggcaatctgacgtccatatcgctctggggattggccggggtcaccgataagggcgtggtccgtctggtttcgagggcttattctctgcagcacctcaatatcggtggaacgttcatcacagatgaatccctctacgcagtcgcaaacagctgcgcaaatcttaagagcatcatcctgtggagctgccgccacgtgacggagggcgggctggtggcgctggtgaacaagtgccggcggctggagtgcatc

SEQ ID NO: 271408 - DNA, 707 bp, Zea mays
aggtggagggcacaggctcgggattcgtgtgggactccacgggccacattgtcacgaattaccacgtggttgcgaagttagctggagacggatctgcatctcatcgctgcaaggtgtttttggagggttctggtggcaaaagttactcaaaggaagcgaggctaatagggtgtgatccagcatatgatcttgcggttctgaagatagatgctgacagggaccagctgaggcctgctctgattggcacatcacggagtttgcgagttgggcaaagctgctttgccattgggaacccttatggatatgaacacactctaactactggggttattagtggattggggagggaaataccatctcccaatgggagagcgatccgtggggctatacagacagatactgctataaatgctggtaactcaggaggcccacttattgactcttatggccatgtaattggtgtcaatactgctacattcacacgtaaaggatctgggatctcgtccggggtgaacttcgccatccccatcgacacggtggtgcagtcggtccccaacctgatagtgtacgggacctccgtgagcaacaggttttattaactgtgttgtacatcatcatgatccgttccagtgcgtgtcctcactctgtctttgtacgctctcgttactccatatatgcgtacttgtgtgtgttaattactactactc

SEQ ID NO: 271409 - DNA, 439 bp, Zea mays
cccacgcgtccgcccacgcgtccggtttgggaagctgctaagtgggttgcaaaagtaagagatgtcgcgtgcccatcctgttcccgggcagttattctcaaaactaatatgcaaagtggccattttggtgagggtgggcgtttcacgcactgtgatgaaacagcctttgagtatgcatttctcatgaaggccttgggtttggatgacgtagctatgatgtagcggactcatgcctgaggattttcacggaacagatttttttgtggctctggaagcaaaaactgagataattaccttttgtgatatgctcagggataagattgtatcctcataattattgattaaaagagctcgcaatggaaggtgatgcacccttgaggtgtgttcttgatggcattggcttttaatattcaagttgtggatttctacatgcatatta

SEQ ID NO: 271410 - DNA, 613 bp, Zea mays
gacagaacatgattaccatgttgacatatggagcctgggtattctgtgttatgagttcctttacggggtcccaccttttgaagctaaggagcactcagaaacatacagaaggatagtaaaagtcgacttgaagttcccactgaaaccattcgtttcgcccgccgcaaaggatttgatttcccagatgctggtcaagaactcggcccagcggctgcctctccacaaggttcttgagcacccatggatcgtccagaacgccgacccttccggtgtgtgcagaggatagaaccaccaccaccggctgaagggagtgcgattctttccactctccccatttcgaggggagtgcgattctttcgactgtttatggcttctgtcgcccgaattgccccaccccgaactgtatcttgtagcaccgtgtactgtgtgtagttggggccgtgggcaaattgccctaaacccttgaacaaccttctttactcgtagtctcgtatgagagagccttgtagagtctcgtccgtccaattatgaactcgagggcaatgtgcaggaaaatgttgaaggtatcgtccataaccagcaaaacttatgtagcgagctcaatttagaattt

SEQ ID NO: 271411 - DNA, 191 bp, Zea mays
cctggagctagcagctggtttgatccactgagagatgaccatttcgaaattagataggtgctgtggctcgtagaacatatgccatctagggagcatggtaagctcaaaagtcaaaatattgtgattctgctgaatgtactactctttttttttaaaaaaaaaatccttcacgaaatgagtttgttgaaaaa

SEQ ID NO: 271412 - DNA, 642 bp, Zea mays
cggacgcgtgggctggtgcaggtccagggccaggtggtcgtgtcgccgcctccgctcccgcgccggcgccgctccgcgtgtcactcgccgcttctcttccattccaccccgcccccattctccctcctcgcgcgtcgcgatgaaagaggcgcaggcttgagcgagaggaccgcgctggacaccaccgcatgctagggaggcagggaggggagccgagccgaggacgatggcgctgggcgtgttgttccacggcgcgcagctagcgctggatctggcggtggccgggatgtcgctggcggtggcgctcgggttcttcgccctcatcactaccttgctctgctccgcggcgttcctccaccactccaagcccgccgcgtagtcatagcctccacagcgaccaacgcgtctcaatctctggggatcgtaatactgttgctggtataattcctccacatcaattgcagaggaggtgctttaatcaactgctttatagcacttacagatgcaaagagtagtcgattgcacacatcaggtgatagctataggctcttggaccacgtgtatgtttctgtatgctggtttgtacacgagatgtttgtacgttgtactatagtttttgtaatcagtctctctttcaagatt

SEQ ID NO: 271413 - DNA, 599 bp, Zea mays
ctcaaccttcccagggtcgtcgaggagacgacgaccaagaccatcaccatcccgcctgcgcaggctgtcatgctcaagctcgtcctgcacttctggagcgacgacgactgcgtcaagatcctggagctgtgcaggaaggccatcccttcccgccaagaaggagggaaggtgatcatcattgagatactcctgggcccgtacatggggccggtcatgtacgaggcccagctgctgatggacatgctcatgatggtgaacaccaagggcaggcagcgcggcgaagacgactggcgccacatctttaccaaggctggcttctccgactacaaggttgtcaagaaaatcggagctcgtggtgtcatcgaggtctacccatgatccatgatcgatgtcatgtgactgtgagaggacgatactgtacaattaaataaacggggtatctagctactactcagcttttgtacctcgagatccatgcatgttaattacttgcttccatctgttttcaaaatgcatctatgtaatgtacttcgcttcttcgttcaaaaaagaaaaaaaaaaaaaaaaaaaagggcggctgctcgcgatctagaactagt

SEQ ID NO: 271414 - DNA, 264 bp, Zea mays
acccgtaagctgctgcatgatcgatgtcatgtgactgtgagaggacgatactgtacaattaaataaccggggtatctacctactactcagcttttgtagtccctcgagatccatgcatgttaattacttgcttccatctgttttcaaaatgcagctatgtaatgtacttcgcttcttcgtccattgtgctcgtagatttggatttattacttcggtacaaaaaaaaaaaaaaaaaaagggcggccgctcgcgatctagaactag

SEQ ID NO: 271415 - DNA, 407 bp, Zea mays
  unsure (1)..(407): unsure at all n locations
atggaaaacccgggccgacccacgcgtncggtgcaagcctataagggcaagcatgattgcttcatctattcagcaactgctcaaaggagggatgcctgaaagaagagataatcagaatcggccatcatttcttcgcagcctgctggttgggaagaatatattggtagtagatgataataaagtcaatcttagagtcgctgcagctgcactcaaaaagtacggtgctaatgttagctgtgttgagagtggcaaagatgctatcagtctacttcaacccccacattgctttgacgcatgttttatggatgttcagatgccacagatggatgggtttgaggcaacaagacaaataagacaaacagaaatgagagttaactacgaaaggaagaataaggttggtgttgatt

SEQ ID NO: 271416 - DNA, 446 bp, Zea mays
cggacgcgtgggcagctacgacggggtcgagctggaggaaatggtccagctggctctgcgatgcacgcagtaccacccgtcccaccggcccagaatgtccgaggtgatcaggatgctggaaggcgagcccgggctcgcggagagatgggaagcgtcgcagggcaacgtggacacgccgaagtccgtctcgtcggagctcctgcctcccaagtacgtggatttcgccgctgcagacgagtcctcgcttggcctggaagccatggagctgtccgggccaaggtgaccgaccatctggtcgcacaggacaggacgcataggaaagcctatggttgtattgcattggagtcggttaggtgtagagagcccccccgacacaagggaaggcgtcaaattttctggtgggttggtgggtgtgatctgtctgtatatagctgtggtggcattca

SEQ ID NO: 271417 - DNA, 281 bp, Zea mays
cccacacgtccgcccacgcgtccggccatggagctgtccgggccaaggtgaccgaccatctggtcgcacaggacaggacgcataggaaagcctatggttgtattgcattggagtcggttaggtgtagagagccccccgacacaagggaaggcgtcaaattttctggtgggttgtagggtgtgatctgtctgtatatagctgtgttggcattcattgtagtgttgtacatacagcagctacttggtcttggtggcaaagagatgagatgaatgagtgtatag

SEQ ID NO: 271418 - DNA, 821 bp, Zea mays
tcgaccgacgcgtgcgaacggggagtgccttccaaggcgaccgccccctctcgcgctccatacgtccatccgtcggcccagagccacaagataacgcagccaagaacaagagacaccgccgagcgagcgaggcggggagaagcaggtccaggaccaggagaaaggaaaggaagcccagctctctctagcctggagccgagaagccgagggggcgaaggagcagcaaggcatggaggagcccgttccggctgatccccccaggattttctggaagtcaaggagatcagccaatggcccgagagatcaatgggctgaacgagcagctagaggaagactcccgcgtgctggagcttctgcagaagcagctggctgacgagcgcaggaagcggacagagatcgagaaggagaactccatgctccatgagcaggtcaccatgctgatgaacatgctcgacgagaacgagggtttcgacgaggacggagaggccccgccgcccgattccttcgattaagcgttgttacagtactatatccgttttctttttcccgtcagtgtgaaatcatacgtctctaggtgctggtttcagagtatccgagagatatgtgctagctagctgtgtagtaggatttcattggtgatcgtattccattacattacatggctttggcttctgtagataaagggtgcattgcatgtctgttgtaccgtactgtacctactccttttctaggcttcaaaagtgtatgtgagaaactagcaacatgttatatttgaatcgaagtgtatgtacatgttacgtaaaaaaaagagagggagcggg

SEQ ID NO: 271419 - DNA, 1177 bp, Zea mays
cggacgcgtgggtccgctttcggcgccgtcgccactcgccaccatctccaccgcctcctctcgacgcgcatcccctcccatacccatggccactgaccgtctcctccaccttctccgagcgccgacaggctctccggctgccgccaccacccgcgcggctggttggggtcgtccacggacgcagcgcgtcgacgtctggcagggtgctgcggggattcgccgcgcgtccgtgtcctgctcgagcactagctctggcgggcaggggggactaacatataaggatgccggcgtggacatagacgccggcgccgagctcgtgcgccgcatcgccaggatggcacccgggattggcggcttcggcggtctcttcccctacaatgacgattatcttgttgctagcaccgatggggtggggacaaagctgaagcttgctttcgaaactggtattcatgatacaatcggcattgacctggtggcaatgagcgtcaatgacattgtaactctaggtgcaaaaccattgttcttcctagattactatgcaacgagcaagcttgatgttgatcttgcagagaaggttatcaaggggattagggatgggtgcgaacaatcagattgtgctctcctaggaggggagacagcagaaatgcctggtttctatgcagagggtgaatatgatctaagtggttttgctgtgggtgttgtgaagaaggataaagtcattgatggaaaaaacattgttaagggagatgtgcttataggtcttccttccagtggtgttcattctaacgggttctctcttgttagaagagtactggagaaaagtggactttctttggatgatcagctcccaagaaatgatggcataacaactacggttggtgaagctctaatggcaccaaccttcatctatgttaagcaggtgcttgagattattagcaaaggtggtgtgaaaggactagcccacatcactggtggtggctttactggcaatatcccaagagtattcccctctggatgcggggcaaaaaatttactgggtcatgggaaatacctccaatcttcagttggcttcaacaggcaagaacaaatgatcttcaaacttcgcctttgattgtcagtagcaactgttctgagaaacatcaggcactgcattggcgtactggtcataaaaatgatt

SEQ ID NO: 271420 - DNA, 663 bp, Zea mays
ttcacgcgtccggttcattctaacgggttctctcttgttagaagagtactggagaaaagtggacgtcccttggatgatcagctcccaagaaatgatcggcataacaactacggttggtgaagctctaatggcaccaaccttcatctatgttaagcaggtgcttgagattattagcaaaggtggtgtgaaaggactagcccacatcactggtggtggctttactgacaatatcccaagagtattcccctccggatgcggggcaaaaatttttactgggtcatgggaaatacctccaatcttcagttgccttcaacaggctggaaacattgatgacgcagagatgcggcgaacattcaatatgggcattggaatggttcttgtggtaagtcgagagtcagcagacagaattattgaagacacccatggatccaatcctgcttatcgcattggagaggtgattgagggtgatggggttcagtatgtctgacctcgtatgccttttatagtggcttgagacttgttggtctgctctgcaaagcagcagagtttatgtaacaacataatcttgtggtgttaagttctgcaccactactcccgctagaaagtgaagggtaaccaaataattatctgattggatcaaaaaaaaaagaagggcggcagaca

SEQ ID NO: 271421 - DNA, 677 bp, Zea mays
cggacgcgtgggttggcctccagacggcggaccggttcttcaagcagatcctcaacagcatcctgcacgcgcccatgtccttcttcgacaccacgccgtccggcaggatcctcagcagggcgtcgtcagatcagacgaacgtcgatctcttcctgccgttcttcgtctggatgagcgtatccatgtacatcaccgtgatcagtgtgctgatcgtcacgtgtcaggtggcgtggccgtccgtcattgccataatccctctggtgatactgaacatctggtaccggggctattacttgtcgacatcgagggagctgactcgcctcgagtcgattaccaaggctccagtgatccaccacttctccgagacggttcaaggtgtcatgaccatcaggtgcttcaggaaggaggaaagcttcttgcaggagaacctgaaccgggtgaactcaagcctgaggatggacttccacaacaatggtgccaacgagtggctcggtttccggctcgagctgattggaagctttgttctctgcttcacagccgtgctcatggtcacattgccgagcaacttcgtgaagccagagtatgttggtctgtcactatcatatggtctatctctcaaccaggtgttgctctgggccatctggatcagttgcttcattgaaaataaaatggtctca

SEQ ID NO: 271422 - DNA, 564 bp, Zea mays
gaacagctcgctagctagcaggctagctggtgcggctgcctcttcgttcgtgagcgccatggaggagaggcggaggccccgcgggagcgccagcggctggaggcgcccgtcgtcgcgcgcggccggtgctgcgctgcgccgaaaggtgcgggagctgcgccgtctcgtgcccggcggggaggaggcgcccgcgggggccctgcttgtccgcacggccgactacatcgtggggctgcgggctagggtggatcttctcagggcactcgcggccgtctacggagtcggcgtgggcgccgtcgtcgccgacgccgccgacgctgatgcgtgcgcttcatgagttgtttatcaaccactagtagtatagtatgccgtagatttgtgcgtgcatataaacacgcacttgaggattcatgcatgcggcttttagttaatttcaaaaatagcatgcaggcatgcagcccagctcgtcgtcccatgcacgtaccacactggtacgtgtgcgcccattcagtttaacttcatttggagaaatgtttgtgaaatttagaaattgcaggaaagatc

SEQ ID NO: 271423 - DNA, 1958 bp, Zea mays
tagaggacggacgggaggaggagaggagagagcccaccacccgcgaccgcgaccgcgaccgcgacctaacccggagacctccctaggctagctcccctcccagaccccaggctctcccacccacctttcccctctccctccctcctccccgtcccacgccgccgcacccccgcctggctgcttgggtggcaatcggccgtagaggaggagggtgtaggagcttgatccgggccacctgccccctgcgccgtcgggatgtacgtgccgccgccgcccaccggcggcgccggcgagcagcctagggtttaccaggtctggcggggaagcaacgaattcttcttgcagggaagattcatatttgggcctgatgtgagatctgtgtttctcactatgttcctcatcatcgcaccagtggttgtcttctgtgtgttcgtcgcaaggcatctcataaatgatttccccgatagctggggaatctcagtgatggtagtagtggctgtcttcactgtttatgatttgacgctgcttctttgtacctctggtagagatcctggtataatacctcggaatactcatcctcctgaacctgaatccattgatgggatcaatgatacaggtgttcagactccacaacaatttcgtttgcctcgcacaaaggaagtacttgtaaatgggatcagtgtacgggtcaaatactgtgatacttgcatgctgtaccgaccacctcgatgctcacactgttccatttgcaataactgtgtggaacggtttgatcatcactgtccatgggtcggccagtgcataggactgcgtaattatcggttcttctatatgtttgtattctcgacgacattgctctgcctctatgtatttgccttctgttgggtgtatgtgatcaagattagagctgctgagcaatcgtcagtttggaaggccttgctgaagacaccagcatcagttgctctgattatctactgttttctctgtgtatggtttgtgggtggtttatctgtcttccatttgtacctgatgggcactaaccagacaacatacgagaatttcaggtatcgctatgaccggcgcgataacccatataacaaaggtgttctgaacaattttctagagatattctgcactgctatccccccttcgaagaacaatttccgggcaagggtgacagtagagcaagggctgcagcaaacgcgctcacagtctaggggtttcatgagccccagcatgggcaagccaaccatcggagagcttgagatgggcaggaagccagtagtaccttgggacgagccaaggacggcagctgatatcagggacttggaagcagggttcgggggcatgtttgacgagaaagagggcagagtagcccacgcatccccagatctgagcagagatctcccagcagagtttgtggaagggcgaactggcatgcactcgaggcagtcaagttgggttcagagaggaggcgatgcgagtgaagcgtcggcggtgcaaatggctactgtccacaccgccgaagatagcaaccatgtcccctggagtggcacacgttagcctgacaaaaaggcggggggaaaaaaaggagaggaactacggtgtgtttcggttgtgtctcgaggtgggtgctggtggcgatgtcgtctcgaagtgaactgccatgtgtttattaccacgtgtgccagggcaaggccctggatcattttgtaatccgaaacacaagcttgctgctgtagtctcatctcatgcctggtagatcaccagatccctgctgtggttgttttttttttgtttttggtttggcttgttttgttttgcttgtttgtctgtttgggtgtgtgtttcaacaaaatgaagtagccgacgagcctaagctcccgacaggtctggataatgtatatgtatataactatattattagcaggttgcgacgaatgctgcgcttggtttgc

SEQ ID NO: 271424 - DNA, 533 bp, Zea mays
cgtcccacgccgccgcacctccgggggagcgcttctcctcgtcgtgacgtcggtgaggcctagctcgggggagggctgcctgcctgcctggctgggtgtcagtcggccgtagaggaggaggggggcggaggagcttgatctggggcacctgccccccctcccctgcgccgtcgggatgtacatgccgccgccgccgcccaccggcggcgccggcgagcagcctaggctttaccaggtctggcggggaagcaacgaattcttcttgcagggaagattcatatttgggcctgatgtgagatctgtgtttctcactatgttcctcatcatcgcaccagtggttgtcttctgtctgttcgccgcaaggcatctcataaatgatttccccgatagctggggaatctcagtgatggtagtagtggttgtcttcactgtttatgatttgacgctgcttctttgtaccttgggacgagccaaggacggcagctgatatcagggacttggaagcagggttcgggggcatgtttgacgagaaa

SEQ ID NO: 271425 - DNA, 703 bp, Zea mays
cgggacggaatggccggatcgacccacgcgtagagtattaaagttctacactttacgatgtaatagtttgtagattcctctattcatattgtgggagtttaggtaattaactttatggatcatcttaagtcctcatggggcgggcgcgtgggctaacaactaaagtcaagactaggcaaaatgaatcaaacaagtaaagcgtgtggctgcctgtagcttactgacaaataaaaacgaatcaagttggcaccatagtaacacaagagaagctgtcattctccttttattccatatgatttccggttatttcacagtttatgatggtaacagaacacttgagggagggggaactgctgaagcgtgtttcatcaagatccaagcagcacatgagctattgattcatgatgaaaggagaagggcatatgatagagaggatcatgtgaacccaatgaagattaccaccgtatcatgattcatcaactctaacatgcgtgagccaacactatgcttctccacttcaggacatggatatgactcttctatgtttaagccactacaacttggtgtatttatgccaaagattttttgagcactaacacaccaaaccagcgcctatgaagtgcttttgtatacaacgatcacctgcttcttgcaccatccatggataatctacgtagctgcaaactgtcttagttacatatta

SEQ ID NO: 271426 - DNA, 476 bp, Zea mays
cgtatcatgattcatcaactctaacatgcgtgagccaacactatgcttctccacttcaggacatggatatgactcttctatgtttaagccactacaacttggtgtatttatgccaaagattttttgagcactaacacaccaaaccagcgcctatgaagtgcttttgaacttcagacatgatgtaaagatgaaccggagcatcaagcagcagctgggtgcctcttcactgatagtagatctctaatatagtgatgtatgttctatactttgaggttagcttttcccctctggtcccctttgttggagaaactgttgtacttcagttaagagataagttttcagagtaatttctcctaatcagtttagtagaggtttcaggttcactaacctgagcagtgatcaagcttttagcttatttatttatgttgtgcaacgctggaatggttttgcatgcaaaattgtcactgttgttgctg

SEQ ID NO: 271427 - DNA, 409 bp, Zea mays
cgctcgacttctcgccggtgctgctgttcccggaccgcatcggccacgtgcagtactcgctcgtcgccggcgacgagttcccgggccacacgctccggaacgtgtccgggaaccaggtcgtggtcgccaccgacaaggccgtctcggccacggtccacgtcttggtggaccagaacagcgactgagataagataagagacactcgagagtgcctgcgtgcacgcagtatgcgtgctgctgcctgctcgcgcggctgctgcggagcaaggcgttattccttcgtttctttcttcttctcggaaatttcagccattcatgtcgtcgggaagatgacaatggggtgatgcgacaaaatgctccaccccgtatcattcttttgctcccccaaatgaaatgattcagaagctcc

SEQ ID NO: 271428 - DNA, 388 bp, Zea mays
tttgttcaaaggcatccggaatttgctcttcagagtgtatgtggatatgttcctagagaatttatcacagatgaaggtttctattcctcaaatccaactaagccctctatggatggggcatttgctgcacgtctgggccggtcaacgccctaagattataggagttgccacaaggccccaactaggtgtgaagttgaacaaggaatcacatgtattgccctaatgttaaagtgcacccagtcattgcttcaatatcttgtatctaaaaaattcttgaactttgctgcgttttcctcttacgcttcacaaaaaaaaagcatatccaaacccataccatattgcttcttgtacggcacgcagattttttgaagcgttttcgctttgtttt

SEQ ID NO: 271429 - DNA, 442 bp, Zea mays
ttagtcaaaacgcatcatcacttcattatggaactctgtaccaaccattgtagcaagcaagcaagcaaacaaacacatcgcacaagcacaatacacaagtcgtagtttatgcaacgcaacgcaacgcaacgcagtgtactgacgtacacgtcccgcgcctctgcatccccgctctgcaaaacagacagattcccgcagaacagacagggcaaacggatcggctcagcttctgcgtgccttcactacacaacagctagcttacactctacaggctacagcagcacagctaaaccaagacgatacatagaatacagcaccacatcgtggggagagagagaggatcaggcacacgcacactggctggcacacaccctatgacactggaggttacagatcaacaaacagatgcagtagtggtggtggtggtggttacttattattg

SEQ ID NO: 271430 - DNA, 584 bp, Zea mays
ccaagcgtccgatcctgaccatgcgcctataacaagtggacgtgttattggtggcttaaaatatattccaccattcataccccagtggagtgggacacttggcttaatttttcagcatgctggtgctcgcgatgactaaagggaatcccgccatcagggaggtctataacagccaattgactgccagtggacatgattatgatgacacactgctggctaaagttgaaagtatctacacagattctggggaccatagctctgcaatgcttgttttcagcgttgagcaaggtctccctgttcttcctgagtggctaagcttcaacagagtgacaacacgtttgaggcagggctatgaaattggtcctgctaggcttcttctaagtgcctttggaggtcacgtggagggaaattgtccacctcatgaagcatttgcaattggtgggacaaatagtgtaaggggatacgaagaatgtgctgttggctctgggcgttcttatgctgtaagtagtggtgaagtgtcatgccgcatgtttgggccactggaaggcgtggtctttggcgactatggtagcgatcttggttat

SEQ ID NO: 271431 - DNA, 529 bp, Zea mays
gaaccttggcgagatgatgacgctcggtagaaatgatgccgcggtaacagcaagtttcattgaagggctgaccttggaaggacctctcggacatgctgctcggaagctcgtgtactgcctcagaatgcccacggatgagcaccgggtgaaggttgggatcagctggttcacaaaggctgcgatcgattcgcttgcctccgtgcaaaacgcggtaagtaacacgctcacaggctcatcatgactgtacgggttcttaggtgtatattgcctgcctgaacggaatgaaatggaggacaaatcgatgtccatcttatgtacgtaatcgaggttcttctcgactagtgtgtaccatactttttaatcatgctgctatgttcctacggtacaagagcagtgatgatttatgtaaaaacacgtgtggctatgctgatgactggcgtgaagggcttctagttgggttggttacgtgttttaagtccgggttcagtccgggttcggctttccgtgggatcaaattctatgtcgtggt

SEQ ID NO: 271432 - DNA, 805 bp, Zea mays
tctgtaccacgttgtgtcgggtttcttcgcggccccgcccccgccgccgccgcgcccacgggaggagcccgagacagagccgctccctcctcccgtgcagatgggggaggtctccgaggaggacctccgccagtacgacggctccgaccctaagaagccgctcctcatggccatcaagggccagatctacgacgtcacccagagcagaatgttctatggacctggcggaccttacgccctgttcgccggcaaagatgccagcagagctctagcgaagatgtcgttcgagccacaggacctcaccggcgacatctcgggcctaggcccgtttgagctcgacgccctgcaggactgggagtacaagttcatgagcaagtacgtgaaggtcggcacggtcaagaagagcgtccctgtggaaggcggcagcaccgcgagcaccactgaggctgagaaggcgccgacaaccgaagagaagccaagcggggcggtggttgaggagaaggaagccgtggctaatgaaggtgcccaggaaaactagagcttttctgtgcatgcggcaataattcgacatggtcccatttgggtcttgtcagggccctgctatcctctcgtgtctcgtgtcgtatatcagcagcaatggcccgtgtgactggatacgtccatctgtgccagcgccgtggtgctctataattgctgttagtcccttgtggccttgtgtgttcgatcggataatcggtgctcttttaaaatgagtaattttctttgcaaaaaaaaaaaaaaaagggcggccgctcgcgatctagaa

SEQ ID NO: 271433 - DNA, 677 bp, Zea mays
gcagaatgttctatggacctggtggaccatacgccctattcgccggcaaagacgccagcagagccctagcgaagatgtccttcgagccacaggatctgaccggcgacatcactggcctaggcccgtttgagctcgatgccctgcaggactgggaatacaagttcatgagcaagtacgtgaaggtgggtactgtcacgaagaacgtcaccgttgaagaccgcagcagcgccgcaagcacagcccctggaaccagcgaggccgccaccgaggccgagaaggcgccgactacgacgaccggcgccgactacgacgaccgcggaggctgtgaaggagaaggaagccgctgccgccgccgcaggctggtgaaggtgcccaggaaaactagagcatttttcagtatgcagcaataattcgacatggtcccattcggttcgtgtcggggccctctcgtatatcgtatcagcagcgtggcctgtgtaattggatatacgtcatctgtacgagcgccatggcccttgaggagctggtgctttgtgttgttattagtcgtccgttgcagattttaaagacatcgggttcaggttgggcgcccctggccctgtttggtcggaaaacaggcgctctttcaaaatgagttatttctttgtaccgtaaagaacgactgacgcgtgctcgaa

SEQ ID NO: 271434 - DNA, 490 bp, Zea mays
agcaccgcgagcaccactgaggctgagaaggcgccgacaaccgaagagaagccaagcgggtcggtggttgagaaggaagccgtggctaatgaaggtgcccaggaaaactagagcttttctgtgcatgcggcaataattcgacatggtcccatttgggtcttgtcagggccctgctatcctctcgtgtctcgtgtcgtatatcagcagcaatggcccgtgtgactggatacgtccatctgtgccagcgccgtggtgctctataattgctgttagtcccttgtggccttgtgtgttcgatcggataatcgagttattttctttgcagtaccctaaggtcatcaggttccttgtaatgtctcgcgcacgtggggatatgccatgaaattgtcgtggaagtcatgttattgtttactgcaatgtgattcctgtcaacgtgcgtggcattgagccaaaaaaaaaaaaaaagggcggccgctcgcgggccgccgcc

SEQ ID NO: 271435 - DNA, 325 bp, Zea mays
gggaatacaagttcatgagcaagtacgtgaaggtgggtactgtcacgaagaacgtcaccgttgaagaccgcagcagcgccgcaagcacagcccctggaaccagtgaggccgccaccgaggccgagaaggcgccgactacgacgacgaccgaagagaagccgagggaagtgccagcggaggctgtgaaggagaaggaagccgccgctgccgccgccgcgggctggtgaaggtgcccaggaaaactagagcatttttcagtatgcagcaataattcgacatggtcccattcggttcgtgtcggggccctctcgtatatcgtatcagc

SEQ ID NO: 271436 - DNA, 2251 bp, Zea mays
aacggcagctacaacagcaacggcaagcccagcttttgcaacggcagcagcagcagcagcaacagcaacaacaaatgatccttgagcaattgttgcagcaacagctgcagggttcacattttggcccaaccagtatggttgatcaagtcttacttcgtgaacatgtattcaatgaactgcaccagcagcctcaccatttgcaaaggcagcatgatgcagctattgaacagctcattcaagcaaaatttggtcatgggcttcatagggagcaccataatgatatgttggatgttctctcgcgttcaaatcagagacagatgcttcctttagagcagcaacttcttttaggccttcaacacgagcagcaacttaagtctcaacaattggcaaatgctctgcggcaacattcaggccaggaagaagaaaggcacttaagtggggtctggccattggatgctgctgcccagtttatccgctcaggaaccagtccaaatcagagacacggtcgtttcgatctcctggagaaccttcagagatcgtcatcgtttgatcatcatgaacatctagaccgcagcttatccttacacgaacggttgcatatgggtggtctaggtattcgctccctagagcggtctggttctttgcctggtggtggtcctggaccaaacccagatgtcataaatgccctatcacgccatcatggacttgggcagttggaaacacatggtgatgtataccctttgggtcaaatgcctatgcttccttcaggtgttcatcctcagcaacataggcatcaggaacagcttcctggttctcacataggaaggcttgctaggcactggtcggatgccaatggtcagttgcaaaacagtctaatgcaatcttcacacatcaaccagttgcagatggaagtggagaagcagaggaggaatgtggaaatgaaccctttctgtggcgagtcacatgcatgggcagccctaatgaataaagagaggaatgcagaacaagatttgagtgatatgattcacaagaaacttgcccttcaatcgcagcagtcccttggttttcctgatgtttctgttgcggcatcatttgggcataaagatcactttgtgcaacctgttgcggagaaccctctgagatcagtggacatgttgtcgtttgaggagtctctttcagaaaggtcactttatgcaaagtcagggcagttggcacaagagggatcagctaatctgggtactttacccaacagtattgagaacactggaaattttaaccttagaccaggatctggatcaatgtttgagcagaagcatttccttggaattgacgatgttcaaagtgacttttcagagaccacaggtggtagaacatcagctaatcaactggttgggagtgtcaatgaattaacaaggggtaaaaggcagggttctagtgcgagtttggctggggatgatcctaatttggctgatgaaggtgttagtaaatggtctgattctggcatgtccaaaggaagctctcactccttactaaagcgctctacaagccaacatagtactacatctcagtctgtttctgcagatctgtcagtgatcaggctgaagaaagcaggacttgcgtcctctgatgagaataagatggaagcaggatttgcctcagtagcccagggtatggaaggctgcgttcctagcaacaaagagacgggggcgtatggcatgccatcagccaccaacaatccagatgcctctggtcagtccttcagcgaagcgttgaagagctcgaggaagcctccgttgcagtacgatgcctccgaatctgcagactgtggcccaggtggtaagggcgcgaagaagaaaacgaagaaaggaaagcagattgacccttctcttcttggcttcaaggtccacagtaaccggatcatgatgggcgagattgttcgagatgattagcacgcatgagtgtacatacccggtaggagttggccttagaatcatgattggcttcaagctctacagtaaaccctaaactctgtacatgccagaaattttgtgccatggcttcacttctgcttagatcttctcttagcctctgttagttatagacttgcccgatttctcaggtttacagaagtgtcatttgtacagaacagccaagatcatcatgtatttagtggcaaagttttgttgatctgtgttaaactgtgaagatgtcgtagtgacggaacatggaacgtttgtcctgttgtttcttt

SEQ ID NO: 271437 - DNA, 464 bp, Zea mays
ccggaatcgaccgcatgcactccacagcgtccgttctagctgccagttcggccggggttgatcctaatttggctgatcaaggtggtagcggatggtctgattctggcatgtccaaaggaagctctcactccttactaaagcgctctacaaaccaacatactactacatctcagtctgttcccacagatctgtcagcaatcaggctgaagaaagcaggacttgcgtcctctgatggtatgtttttgcaaactgtggttaatgttactttgaagttctatgtaaaagtcagctgaattcgcttcacttaaaacaaagctgtcaattgctaaagtaatactgtctagatcacaaacctgaagtgtgagtggcttatacgtatgtcctgtggtagtttgaacgagcacaatgttagtgcgcaacttgttgcacaataacaggcaacctgaagtatttcttttgttact

SEQ ID NO: 271438 - DNA, 527 bp, Zea mays
agcgttgaagagctcgaggaagcctccgttgcagtacgatgcctccgaatctgcagactgtggcccaggtggtaagggcgcgaaaaagaaaacgaagaaaggaaagcagattgacccttctcttcttgggttcaaggtccacagtaaccggatcatgatgggcgagattgttcgagatgattagagtgtacatacgcggtaggaggtggccttagaagaatcaagattggctccaagccaaaccctaacctctgtacatgcccagccctggtgcccgctcacctcggcagaaattttgtgactgcatcttctcttagcctcttcctagctgtagtattgcccgatttctcagatttagaaaaaggagcctttcttatcggtgccccacagaagtgtcacagttttgttgatctgtgaccctatcgtagcactggagcatggaacgtttggtgtgctgttgtttcgctctgttttaataggggtaagggtctcacatgtaggagaggcctcctgctgctttggttggc

SEQ ID NO: 271439 - DNA, 397 bp, Zea mays
tgttccacagcgagcccatcatatggcatacctacgattacgagcccgggttcatggtcgcaggccagacattcaccatagagccgacgctgtcgatggggagcacgcagtgcgtggtgtgggacgacgggtggacggccgtggcggcggacggcagcctcagcgcgcagttcgagcacaccgtgctggtcaccaccgacggcgcggagatcctgaccgggttcccgtagctgcctgcacgcatcacgtgagcggtgagcctgggtgggccactccgtcggcgagggacggaactgcaggagcatgcatgcagctatgcgcacgctgacaattttattaaaaaatctatgttggacggttgccgtatcacccgggccccggcagcacacgaacgctc

SEQ ID NO: 271440 - DNA, 884 bp, Zea mays
  unsure (1)..(884): unsure at all n locations
ttccacgcgtccgcacccgtttccgggaggagagagagggcgggggcgaaggggatggcaaagcgccggcgccacgagttggcgccggtcgtggaggagctgatttcgtcgatgaacagcctggacgacggctgcctcatgcacatcttcagcttcctgagcccaatcccagataggtataacaccgccctcgtttgccacagatggcgcttccttgcatgccaccctcggctatggctgcgtgtcgagaggccaatcagagatgcgatggagcctggagtttatccagatctcgaggctgctgtttctgctgctaggccgggtgacaccattcttattgcggctggtggttcccatgttgcatgtaacatccaaataaagaagcctatttgcataattggcggnggcgatcttcctgatgacactgtattgacctgctcacgtggtttcgacaacgcactggagtttctatcaacatgcaagattgcaaatctgactattagagcagaactcggatgctgcttgctgcatcgaggcggtagattgaccatccaggagtgtctgctgcagtgcgagcaaaaccctttggaccacctgtccttcccaataatcagcacagcgatagagtacgatccattctcatccctcaaggagcaagggcacggagtaacggtcgtccgcaccaggatcgaaggaggcgcgagggccgtcaggacgaacggcacactcgcgctgcgccatgtgcgggccatctattcccgcagctctgttttcttctggttcgaagtangagagaaagtagaagcgcctgtacactagcaaaaagcccgtgttagttcttgtatttcagtgttggtatcaccctagcgtgcgtttggtgaact

SEQ ID NO: 271441 - DNA, 500 bp, Zea mays
gtttttgaatatgggttcaggctatgctaattgcagcagaggccaagcgagaggaggaaaaagcaaagggagtgagtgctgatgaggcagctgataatcaagatattgtgctgtttgatgacaatgaagaggacgaggaagaggaaagcgaggaggaagaaggcaacgcccaagagtctcagggaaggggaagaggaagggggatgatgtggccgcctcaaatgccgatgatgcgtggggcaatgttggcagggcgtggcttccctcccaacatgatgggtgatggctttggttttggcggcggtttcggcatgcctgatccatttggcatgccacgcggcttcccaccattcgttggcccaaggttccctggtgactttgctagaggcccgatgccagggatgggtttccctggcagacctccgcagcctttccctctgggtcttgacatgatgatgggtcctggccgtggtccgctgatgggaggcatgggaatgggt

SEQ ID NO: 271442 - DNA, 414 bp, Zea mays
gggaaattcaggagatccgtacaccaggaggcaaccaaaagtggaagaacaagggcaagaaaacactgaagagggcgaaggataggagaaaatgagactggtgcgcccagctttgtgctccagttgtgagggaaccaaggaacgccttcaagtcgctctagtgcttttctctcaactttgcagtatagattctggttccagtgtagtgttgtggacttcatgatgaattgatttgtatttctataaattttataatattgctgtaacagcggaattcagaaatatgagttggtagactctttcaagttagctagcttcatatatgggagaagcactgtctcagctcatttttcttgctgtgctgtgtctgcttatgatcatatctacagtttcatctttcttttgctttaaaaa

SEQ ID NO: 271443 - DNA, 520 bp, Zea mays
gatgacagtaattttcccataagttattttcatgacggcacattgttacaagttaggaatctgtttttacctgttcatttgaacatactttgatgtaagttgtgctttgtcttattctgattccatacattgtgtgcggatctaggattgcagtttggcagataggcctaacattacaatatggtgttcttgacagaatggacagcatagcgtctgtatttcttcaatgttatggaatatgaatggtgtctggcaaagatcatattatttgcggtagcctgtgctttgttacgtgtgcaggccaccgctgcggcgtctggtggaacctctttactgaactcgtagtgctagttcctaaatgtcaaaatgtcatttctgactatgtaaagttgctttctatttgagtgccagattgtactcttaaaaaggaatttgaaggaatttctgtaggtaccgataatcttgtcacttccgaaccgcgaagatgaaatctttaaaggtcagcacagtttggatgtgt

SEQ ID NO: 271444 - DNA, 613 bp, Zea mays
ggacgcgtggaatggcagggtggcattcctcatcgcggaggcgtgcctgctggcgggatcagtgcgcaacgcgtaccacacccggtacaggggcgtattctacggcgactcgctctcatgtgagacggtgcggaagggcgtgttcgcggctggtgcggccttcaccttcttcacggccatcctgggcgaggtatactacctcagctactccaaatcccgagatgccgctggtggtgctggctccagcattggcatgggcccttacaactaaaggagcttgatcgaggcaggcaggcagcccccgtgttttcaactctgcttcgtggtggaggaatgcagtgttctttttaacattaagggacggtgtaattggttgttggatccgcggttttttttctctctttaggttcttgtatgaggttactcggttgggccgtatactgtttggattattgggctggattctggacatggtatacacgtattcgtagtatgctatgctgtttatatgtatgtgaaagaaataatagaagcgttgcatcgtctaaaaaaaaaacaaagtaaaagaaagaaatgaatgagtgaaatgtgtatggtatatattaagtaaaat

SEQ ID NO: 271445 - DNA, 572 bp, Zea mays
gccgcgggctcaagccggggggctcccgcgcctgcgccctcatcctcttgctcttcacatgggtggcattcctcatcgcggaggcgtgcctgctggcaggatcagtgcgcaacgcgtaccacacccggtacaggggcatattctacggcgactcgctctcatgtgagacggtgcggaagggcgtcttcgcggctggtgcggccttcaccttcttcacggccatcctgggcgaggtgtactacctcagcttctccaagtcccgggacgccgccggtggtgccccctacggcggctccagcattggcatgggcccttacaactaactaatggccgcccccggtcgcttcatgctggaggaatgcagcagcagtgttctttttgacgttaccttagtagggacacggtgtaattggttattggatccgctgctttttgtttaggttcttgtatgaggttactacttgggtgggctgtatactgtttggattgttgggttcgaccctgggcatggatatacacgtatcgtagtatgctatgttttcgctcaaacaaaaaaaaaaaccacgcgtccg

SEQ ID NO: 271446 - DNA, 1321 bp, Zea mays
tctgtcacgcgttcgcccacgcgtccgcccacgcgggcgccctcgtcgtccgcggacgcgtgggttccaaacagaaacagcaccagactcctgtccttttgctctcgctccctcgctctttctcccgcaactcggcgtcggcgaccgctgccgctgccctactacgccaggtgcactgctgctggtctagtagcctcgtcggtcccttcgacaggttttcttcgggtcttcgccggcgacgagcacccgccaggtggccaatgataatgttggcggtcagagggctgaacagtaaaatgctggagaaaagactgcacggatgcctgctcctgctcgtcttccttctggcagacgtatcaggcagccgtgctgaaactgccgtcgatctgggtccagactcggaggacggcagcaagaggaggtcgctggccaccaccatgttctgtgtggcgaaacagggcgcggacgcggcggcgctgcaggcagggctcaactgggcgtgcgggcagggccgagcgaactgtgcgcccatccagcccggcgggccgtgctacaagcagaacgacctggaggcgctagcgtcctacgcctacaacgactactaccagaagaactttgctaccggcggctcctgcggcttcaacggcacagctacgaccaccaccagtgatcccagctcggggcagtgcgtcttcacaggaagctccatggcaggaggcggcacgccggctgcgagcgcccccagcggcctctccccgccgtcgtcgttcacgccgggcattgggagcccctccaacaccctgatccctctggacggcgccgagagcctggtgtccagcgtctggtcggcgatttgcgccccgctgctggcgttgccgctcttcttcctctgaccaccagcggcggcagatgagtggccggtgcttgctagtagagcgcttattatgtttttttgttcttgttcctgggtagatcgctctcgtgtggcggtgttgatgtacatgtcagagtcgtgttggatgcgctgggatgggagattacataagatgctacagagatcgattcatacgtagaaagtggaccggactccgccgtgtttccgtgtgttctggtctcagatctgttcgtggcagaaaccagatgcaaatgtatcatgttcactacgccctgtgcacagaccaagggaagctgcagtccactgaccacacacacaccacgctaggattcagactcagaggctttgtctttgtccgatgccgtcgcgcccagcgtcggcgtggccctggacgctgctgccttctcccggcgaaacctcctgaag

SEQ ID NO: 271447 - DNA, 590 bp, Zea mays
cccacgcgttcgccatttccaaatccacacctggcccggctgccccaaatgcgtcggcatcgcgccgtcgctgctgcacaccgtcgatgactcccgccccttcgaacgccgccggcgacctcttcgctgccaacctcacgggcgcgctccttgcggttgcctcctccgccttcattggcgtcagcttcatcgtcaagaagaagggcctacgccgggccgccaccgccggcgcccgcgcaggtgttggaggctatgggtacctcttggagccactgtggtggattgggatggttacgatgctgattggggagattgccaattttgtggcctacatgtttgcgccagctattcttgtcacccctcttggtgcgctcagcataattgtcagtgctgttctagcccatttcaccctgaatgagaagctgcagcggatgggtgtgttgggctgtgtgctctgtataatcgggtcaaccataatcatcctccatgcacctgaagaagagaccaccaagctagtgacacacatctggcagatggcaccacaacctgcctttttttgccatgcggattctgcattgactatctcactg

SEQ ID NO: 271448 - DNA, 880 bp, Zea mays
cagctgccgcagccgcgggcggagctgcatcagccgccgtcgccagccaagaacctatgaaggctctcggcacaggcatcctccgccgctccgcgccgcactggtccacagccgccgcttccttcttttccccacccttccgcccccgccgctgccgtcgcgcgcccgctcctgcagccgccgcgcgtaccccgcggtcccgcgcgagtgccaaggcccgggcgaagctcctggcggaggttgaggcccgggacccctggctcgcctccctctcgctgcttccgaccgacgacatccccagtgctgacgccaccaccaacgggtgggtgattggggtggatcctgacattggaggcgccatcgccgtcctctcgcctgacggctcgtctcaggtgtttgacaacccggtcgtgcacattggggtgtcagaagtcatccgtaagcgactggacaccaagtcaattatccaactgctccgtggccttgatgcgcctcctggaactacggcatacattgagaagtctagcccatttccaactgatggaaagcagggatggtggagcactggtttctcatatggcttgtggattgcttctctagtggcttcggggttttcggttgtcccgattgcatctcagacatggaaggcttactttgggctaatgcgaagtgaaacaccaaaggatgatagcagacaagctgcttcaattttgttccctgacaaagatcagtccttgaagttggtattacaccatgggcgagcagaggctcttctgttaacagcctatgggaaaaggcttggtctggcctctgggaaggtcaacaaaaccttaatttgatggctattgtgattgccaattgacctgccctttttttgggg

SEQ ID NO: 271449 - DNA, 452 bp, Zea mays
cacggacaaaaaagaaagcatagagagagacagagagaggcatatgctactgcgatggatgcttgggaggtagcacacttaaagctccttgttgatcagtgcaaatcacacccttcaattatccacactccctctctttccttcttcaagtcctatctcctaaggctgggagctcaaattccaaccgacccacggacggatagaggtggcgttaaaatggaagagcctgagcaacactctgatgacaagaaaccctatttttcaaatgaagaacatgatgatattattgagtccgatgtcgagttagataataacggtgttgtggaacctgacaacaatcctccacaaaaaatgggagactcttcggttgaagttacggaggaaaagcgggatgctgctcaatcggaaaaattaaaagccatggatgcgatatctggaggtaagctggatga

SEQ ID NO: 271450 - DNA, 403 bp, Zea mays
tatttctgtctcttgttcagttactgtaacatatcagccttgttcgatctactgaccagagggccaaggtcatgaataatggggttccatcctttgcaaaccaccaacggtctccgctgctagttccagtgggcattcctgagagactacagtgacatgcagatgcttcaactagatagagttaggtaccacgactgttaacatatctggtagccggaactccatgcattagactgagcctagtgataacatctgaatgaagatagtctcactgctgctaaagatgactgtatcaagaacatgcatgactggtgcagacatgagcctctagcgcagaaattatgaactttccctgattattattggtgtgatcagagaaatggcattatctgctgcttagttg

SEQ ID NO: 271451 - DNA, 943 bp, Zea mays
ctgcgccgggctctgccccgtcgccctcggcgccgacggaggcgggtccgtgcgcatgccggcggcgctctgcggcgtcggcgggttcaagcccaccgtcggccggctctccaactccgggcttattactatgaactggaccgtcagcatgccggggatcctagcagcgacggtcgaggacacgctgatcgcgtcggtgccgggcagctagcttcttgtgtctcccataaaccaaatctttcgattcacatgtctgctttgttatcacccatgacgtaatgaaaacaccacgcaaatgttgtctggtttgttttccgagctttctttcaggtatgcggcgattgctgatcagtcaaaacaaagccctttacagcagcctgaactgaacctgcccatgctgacacgcacgaggtccatgcccagcatcaggctcgccaaatacgcaaagtggttcgacgacagctcggaggacatcaggagcctctgcgggaaggcgctgcagatgctgcgcacgcactacggctgggagagcgtggacgtcaccgtccctgagatcgaagagatgcggctggcgcactacgtgaccatgggctcggagtgcactgcctccctcgccgccaagtacctggacagcatggacaggtccgaggtcgggtgggacgtgcggatcgcgctcagcgcctacgggtccttcagcagccgagactacctcagcgcgcagcgtctccgatgccggcagatgtacttccacgagaagatcttcgagactgccgacgccatcgtcacgccgatgacaggggtgaccgggtacccccctgaagaacaagcgctgaaggacggggaactggactacattaacggaactgcgctggtgaaggacttgatcgggggcaacttcctggggctggcggcgatcaccgtgcccgtcgggtatgacagggga

SEQ ID NO: 271452 - DNA, 268 bp, Zea mays
gcgtggacgtcaccgtccctgagatcgaagagatgcggctggcgcactacgtgaccatgggctcggagtgcactgcctccctcgctgccaagtacctggacagcatggacaggtccgacgtcgggtgggacgtgcggatcgcgctcagcgcctacgggtccttcagcagccgagactacctcagcgcgcacgtcgtccggtaggccagtcgccagccgccacatctacatacatgcggacacatcgaatgcatggacaacgtaacgcc

SEQ ID NO: 271453 - DNA, 580 bp, Zea mays
cgtttacacaatgcgtgatcagtgagacgctgcgcgtggctaacttgatcagcggggtgttcaggcgggcgaacgccgacatccatttcaaagattacgttatcccaaagggctgcagaatcttcgcgtcgttccgagccgtgcacctgagccccgagcactacgagaacgctcgcgccttcgacccctggagatggcagcagagcaagaaggagggagtacgagtagtaggccaggacgcgcagcatggggccagggccagcgtgttcactcccttcggcggggggcctcgcctgtgcccgggccacgagcttgcccgcgtggtggtctccgttttcctccaccgtctggtgacgcgcttcagctgggaagaggctgaggaggacagggtcgtcttcttccccaccacccgcaccctctcaaagggtaccccatcatcctgcggcggcgaccgggttgggatgtctgacctagctcatcatgttacaatagagtcgatccatctatagttgttaccctcatctctctctctctctctctgtctggaataacactactatctaatataaacaagcatctc

SEQ ID NO: 271454 - DNA, 237 bp, Zea mays
agaactagtcttcgtttcgtccgtctataacagcatactccgtctcgttcgttcgtgttggtcagattacgttatcccaaagggctgcagaatcttcgcgtcgttccgagccgtgcacctgagccccgagcactacgagaacgctcgagccttcgacccctggagatggcagcagagcaagaaggagggagtactagtagtagggcaggacgcgcacaagggggccagggcaagcgt

SEQ ID NO: 271455 - DNA, 616 bp, Zea mays
ttagcttttgtcgtcgtggagcctccaccagtgccgtgtagcattcaagaacaatggaaccaaaatacaggacattttcctacttcacgtctggatgccatccaattaatatcttctctgcgatattgcaatggaagggactggtcttatgtgttattggtgctattcttgtacagccaatgaaataggtcctactacacaaggtcaaaggatgggagaatgtttaatgcttcttcagatactatttcttggtccgtcaaatctgcttgacccaaatgcaagttttgctcaaatgtggcaaaaaatgattgtctcaccaattgtcagcgcgcctgcttccagcaaagttgtccagagaaggaaaagatggaatggaactcaaattttggtggccgcccaagtgtggagacttgaattcatatatacttagttaggctcaatattagtgcaaacagttgataaccaagtttttcaattagtatttagttttggctttagagtacccttatgtatgagttatttgccaatatttatttatgagatattgaatggtacttatctatattatattagttacaatgttattaaaaatccctgtatgtatatttctcccccc

SEQ ID NO: 271456 - DNA, 475 bp, Zea mays
aaatatctaaaacatagaaccccacagttctaaagccgtgtgacctatattctccatttcagacataattacttactaattccttagttacttgctctcggatgggagagtgtcggatgcttcttcagatactatttcttggtccgtcaaatctgcttgacccaaatgcaagttctgctcaaatgtggcaaaaataattgtctcaccgattgtcagcccgcctgcttccagcaaagtttcagagaaggaaaagatggaatgtaactcaatttttggtggccgcacaagtgtggagacttgaattcatatatacatttagttaggctcaatattagtgcaaacagtcgataaccaagttttgcaattagtatttagttttggctttagagtacacttatgtatgagttatttgacaatatttatttatgagatattgaatggtccccatctatattatattagtaccaatgttatt

SEQ ID NO: 271457 - DNA, 702 bp, Zea mays
cggacgcgtgggcgcggacgccttcgtcttcgggggccgcaccgtggggtccggcctcggttacatcgaccaccagctccggcagcagcgcgcgctgcagcagctcggcatgatgcagggcggcgcctggcggccccagcgcggcctacacgagcgctccgtctccatcctacgcgcctggctcttcgagcacttcctgcacccataccccaaggatccggacaggatcatgctcgccaagcaaaccgggctcaccaggagtcaggtgtccaattggttcatcaatgcgagggtgcggctgtggaagcctatggtggaggagatgtacctggaggagacaaaggaccaggacgctggaggcggcggcaacgacgagggcaagtccggtggcggcggcagcaagagcagcgacaccgtcgacggcgtcatgccgagggcggacgtgatgtccaagtccgcggtgcgcgtgggaggcggcggggcgggggcggagagcgcgtccaccaacaagggcatccatggctcctccctgctcgagctcggcggcggcgatcaccagcagtcccacgcggggttctacgacgacgatgaagacgacggcgacgacgtgatggggcggaggctcaagaaggcgcgcggcaacgagccggcgccggcgttccaccacgtgcacgacatagccacgctgcacgcgcaggccgc

SEQ ID NO: 271458 - DNA, 808 bp, Zea mays
  unsure (1)..(808): unsure at all n locations
gtctggtgtgtggatgattccagtcctcctcctgttctttgtttcccgtcccatcgtgtgtgagcgcgtctgctggtctgccaagaggaggaaaggaaggaggagcaagtagagatggcttgccctgcgcagtccatgctctccgccagcggctgcatcttcctgaggagcaagcctcaggcggcatcccaagtgcgagggggcatcatcggcggtggccgcagcagcaggccgttcctgctcacctgcaacgcttcctcttctccgtccccttcctcgccggcgccggcgcaggaagaccccgactgcaacgaggaggagtgcgccccggagaaggaggtcgggagcctgagcgccgagtggctggccgaggagaggacccaggtcgtcggcactttccctcccaagaagaaagggtggaccggcttagtggagaaggacaccgccggccagaccaacatctactccgtcgagccgatggtgtacgtggccgagagcgccatcagctccggcacggcgggtacgtcggcggagggcgccgagaacacggccgccatcgccgcggggctcgtcctcatcaccgtagccgcggcctcgtccatcctcatccaggtgaacaagagccaggtgccgcaggtgccggaagccgcctacagcggcccgccgctcagctactacgtcaccaagttccagccggcggtggctgcgccggcgcagaccctcgaggcccccgcccccaacgagacacaagacggcgccgccgccaccgtcgcggctccggaggtaccnggcacgcagctgtcgtcgt

SEQ ID NO: 271459 - DNA, 636 bp, Zea mays
gaatttgacccaccctcatcttgctctggtagccgccgcacctgagactctaccaaatgaaataagggttgctgatcaagcaagtcatttggcagagtttacccatccttcaaagttgagaaaattggaggatggaacctcggtgcctggaatggtgaacagcagccatgctgtttatacagttccactgcaagcagtgggccctagcggaccatcagggagctatagtgctggttctgttagcttacagcaaccagggaatgaagagcagcttacgcctgatgtggagtcagctcttctgcagcaagtcttgcagctgacacccgagcagctgagttcgttgccaccagagcaacagcagcaggtgattgagctccagaagatgctttcagttagtaaatagaagcaactgagagctaacgcagcaaaaatgctggttgagaatctggcacatcacataatggcgagttggtaactagtggaaactggaaatgatcctcagatttgtttatgaagtcaccacgccgcctgtaacctgtaagcattgtcggcatcctgatgccatcaggatccatatggttttctttcttcagctcggagataaaagaaatgtgataggagaagagtagtgtggaa

SEQ ID NO: 271460 - DNA, 417 bp, Zea mays
ggccgccgacgccgagcccgcggcgcgcgccatcgaggccgaggccttcgacgccgcggcctccacgggaggcgccgccgccgcctccgtggaggaggggatcgaggcgctgcagttctactccaaggaggtgagccgccgcctcctcgacttcgtcaagtcccgctccgcggacgccaaggccggtgacacgccgtcggaggaggcccgggcccctggcgcgcccgaggccgaggccgcccagcccgcggcgtgagcgccggacagccattcgttccgtttttgtatttcctgcagcctgtgtgtggcttgggtctgagtttgtatgacttgaacgttagctgtttgcacatctatgcaattctggttcttccatgaatagccccgttctagggcgtgttcctgtttttctgggaa

SEQ ID NO: 271461 - DNA, 508 bp, Zea mays
tatggcggctgccggtgctgctcgcgcgccgacgaggtcccggagcccatgtaccgcccggagcccaccgaggtccacagctgaagccgagccacacatcgatctacaaagatgcatggacgacgactcttatcttagctaattaataagcactacatccatgcatgtccacaatagggccctagccctactatactatacgtcgtcagcagaaagtctggttttgatttcaataataagatgcacctatatgtgtgtgttacatgtacgccgttgtcttaattactgtgtggtgattggactcactagtagctattgtcgtcgtgttgtcgtctctcggtgagtcggtgtagcgtagtacttgctcttggaccaaatgctgcgtttaatctgtaaaactaccaaattatactagacacgtgttgcgtttaaaaaaaaaaaaaaaaacaaggaaagggaaaaaaaaaaaaaaaaaaaaaaaaaaaagggggcgccccccttttttttt

SEQ ID NO: 271462 - DNA, 1009 bp, Zea mays
agggagtgcaaagaggcacagttgcttttattagaagtgttagcattgaagcagtaggggttggagtccatttggctgcaggagctcatgatatacttgtgaagacagaacgcgcccttacaactgttccaccacctttagcctcatgtgaagcgaaacgaacaaagcacaacattagagctaaccaacctgaaagtgcacaacaaggaatgaaacaggcatatgaaagtttgactgttggttttggaaggacagcctctgctctcattggcaaccctattaaagtttataaccgaggggcgggtgttggatcagttctagctactgcaatctgtggagcaccagctgctgcagtagctccagtctcggcatctgctcgcgctttacattatgcacttcttgggctaaggaacagccttgatcctgagcacaagaaggaatccatgtacaaataccacggaccctcccaagcatagacgtcattggtggtcggttcattctttggcgagccttacaccatctccctgaaactggttttaggagctcctttgccagtctcgtccaatggtgaggtgcaaacttgcacagtgtgtacagatcgtaagacagattatatttggcatcaaagccacacactaaattgacacataagggtttaattagcactcatattttgcaccacgaaggcacgtggaagttttgtaatccctcttcgttgcatgactgcccccgatgtacataatgtggttgctgtgtgggttgtgcggatgtaaattatcttcatgactgtccccaatgtacataatgtggctgctgcgtgagttgtgcggatgtaaatatctcttttgctttggttgcgtgtgcgcgcgcctctggtccgctgttcaagagtgtgttttgagctgctgctgctggtgtcatttgccgcagcccatgaacctgatcattctggctttctagtgttatcacgctaaaatatctgatatagaagttgtgcaatattaagtct

SEQ ID NO: 271463 - DNA, 1457 bp, Zea mays
tcgcgggtcgacacacgcctctacagtcactcgtgcgaacgcgtgggcggacgcgtgggctatgccttatacgaaacatagctacctactactcaagtatccatccttattgagtacagtgttgatccatggactcggaaggagttgtagcagcaaaggtggcagatgagactactaaaccggcaatccaagaagacggcgccgagagcaaggccgggatgactgatctgctgatgctgaccgacaagtcgcagctgcaggcgctggcgatgctgctgcggaacaacgaggagctcatgatgagccaggcgatcaagtcggagacggagcgcattgagtacctcaagacggtgagcgactgctacacgcggacgatgaagctcctcgacgattccatggcggccaggaccacgtacgagcgttcgggcggaatgaggagcctcgtcgcccgggacatggacgactacgtcgtctacggcctcaacgcgtgcttgcagaacgtccgcaactgctgcgtgcgcctggacgccatcgacaagctgcgggcgcactacgacgccctcgccgacgccgtcgccgacccggccgccaacgtcgagggcctcgccgcggaggcgtccgagtacaaggccgccatgtggcagtactgctacaaccagcggacgcctccgcgcgggcgcactcccgcgcctactcccaggcgctcaagctggagggcatcgacttcgccgagctggtgcggaggcaccagctccggctcgggtacggcagcaagggcgaggagttcgaggacctggacgacacccagaagctggaggtgtacaacagcatcatcgtcgagtcggggcgggcggggctaccggtgcggatgttctcgtcgggccgctctgccggtggccctaagattgcagccacgacgtgggcggaggcggtgagcgtcttcatcatggcggcgggcaacctggcgtgggacgtgttcaccacggagcacgaggtggaggccatcctcaagggcagcctcaacctcctggcggggctagggggcttcgccgtggaggccgtcgtcggcgcggctgtcaccaaggcggtcgcaaacgtcggcgccggcgtctttgcttgctctctcgccggcttcgtcgtgggcgccatagccgggctgatcttcgtcggcgtcagcggcctcctcattaacctcatcatcggctccccaaggaaggtgcctgacatgagcaagctcatgttccacaccgccgtcatgcacgatggaatggcccttgcgtatgcggtatctcattaattacttattatcatcgcagtgactaccaactgcttcagatcctactgttggaacgcgcgtggaaataagaagagagggcacaataaataataattgtaataaaattaataattattacaatgataataattatctatctatctctatttaataatagagc

SEQ ID NO: 271464 - DNA, 365 bp, Zea mays
cgaaacatagctgcctactactcaagtatccatccttattgtaagtgctcttataagctactactagttacaagctggtttatatttaactacaagtagcaacgatttgtcttagtatatatggttcataatacatatatattggaactgagataatatatgcaggagtacagtgttgatccatggactcggaaggagttgtagcagcaaaggtggcagatgagactactaaaccggcaatccaagaagacggcgccgagagcaaggccgggatgactgatctgctgatgctgaccgacaagtcgcagctgcaggcgctggcgatgctgctgcggaacaacgaggagctcatgatgagccaggcg

SEQ ID NO: 271465 - DNA, 431 bp, Zea mays
ggtggcaatttcttattatcactacctgaactttctaggatatgatgttcttccatttctggatagaacaacattcttcctgtacccgattggtctcgtcatcatcctgtctccacttatgatactaatagggttcaatccgacaagatattttctaagcttgtacttcggttaaagtctacggctagaatgccatgtacaagcaaaaatatggtgattggcgataactaatggcagatctggatacatactctgtagtaaagcattttagatatcttgtgtgaacgggggcgagtgaagttcagtaaagctcggagcattctatggatgtatcaggtgcctgtggcaaggctaacaatggaagacatatagtcttttgattgttatcaaatatcctttttgggtgtcaatttgttgttcataatatgagc

SEQ ID NO: 271466 - DNA, 644 bp, Zea mays
cccacgcgtgcgcggaccagtgccctcgacaatggcactccaggcagcctacgagtacctgcagcaggccgtcggccatggcgcgtggtcgtccacgcagacgctgacgctgctgctcatcgccgtacccaccgtactactgctgctagcgtccctcgccaagagcacgtcgtcgtccggtaggggcaagccgccgctccctccctcgccgccgggcaccctccccatcgtggggcacctacaccacatcgggccccagacccacatctcgctccaggagctggtggccaagtacgggcacaacgggttcctgttcctccgcgccggcgccgtgcccaccctgatcgtgtcgtcgcccagcgccgccgaggccgtgatgcgcacccacgaccacatcttcgcgtcccggccgtggtccatggcctcccacatcctccgctacaacacctgcgacgtggccttctcgccgctcggcgaatactggcagcagaccaggaagctgatgaacacgcacctgctcagcaacaagaaggtctactccttccgccatggccgcgaggaagaggtgtgcctcgtcgtggacaacctccgcgaggcggccgccaagtcgccgtcgacggccgtggacatgagcgaggtgctgg

SEQ ID NO: 271467 - DNA, 670 bp, Zea mays
ggggaactattagaattctttttttgcactcacacgtggtggttttgctggagagctccaagttcagcagcaggttgaacagcatgaactacttgcgccaccaaagatagaatcatcaaagtcacctgatggagggaagtccgtcagttcgttcccaaaccaagggtgtatcccacagttctttgagggtctggactggatgatcccgccttcctgctaccaagactccaatggcatccattcagttaccgcgtcggataacatttttaatccatctgaaggtataccttccaccatgaacgctgacgccatggacgcgttccaaacatcttgcctttccgagtgctttcctaattccatccaagaattcatcagcagtccagatataaacacactgacatttatgtcgcctgagatgcaacatctggatgccggcagcaacttgccgagcacatccggctcctatgtgcagatgagtttctcggaggagagccacagcgcatccttgagtggccttcgcatggaagccatccatataaacagctcgtcatgctctcagccactggcgacggggagcttcgatgcaggggcgttcccgaaactgtcaaacataagagaatgccaacccttgcctctgcaagagatccacaccagttccatgggaacacct

SEQ ID NO: 271468 - DNA, 634 bp, Zea mays
gtcgacacttggctcgcgtcgagctcgtcgtgcccggtctgccgcgccgaggtggagccgccgcccccgacggcgtgaggctcagctcggttcgtgcaggagaaagtgcaggacgctgtcaagcaggaagccggcagctccaccccggaccgggggatcggtgcctgtgcgtcgctcatcaagatgttgagcagggagaggccggcgccgcgaaggccccagggcgcctacgccgacgccggggacttggacgacttggaacggcagcagtatgctgttgccgtgaataattaattactctattatttttttctctaaaaaaaagacggcctttttagtttggtcgttttcctcatcatttgtacatcccgcacttgcgtgagtggcgcagccatatcaagacaaggctgtgagctcttaactttttttgatgaatgcaagggcccgtttgacccttgacctcaccaccaaaagggcggcttgggtcaaaagaaagcagaaagggctacactgaggactttgatgacatatcgcttcacgccgagtctcgagaacccaaagaaaaagggggcggcctgtttttagaaacaaaatttaacccccggctttttcagacgaatagttttttttttgg

SEQ ID NO: 271469 - DNA, 1195 bp, Zea mays
  unsure (1)..(1195): unsure at all n locations
ctagcttttcgtcagtacaacgcctccgccgctccttccattagctcagacatggttctcggcctctacaccttcgccgacatcgacgccgacggagcaccccgcctcgaggttgccgatggcgaggagttcgtccgtgtcgatcgcgttgtcgagcttgccctcggtccccgggtgctgaaggcccctggaaccctttacctcaccaccaggagggtgatttgggtcagcgatggcggcgagggctacgctgtggacttcgttgccatctcgctccacgccgtgtcgcgtgatcccgaggcgtatccatacccctgcatctacacacagatcgagacggaagctatttctgacgaggagtctgatgtgtcagattctgaaacaaatggagaactcgagctctcaaaagttatggaaatgcgcatcataccttcagatcctggtcaattggatgaactctttgaagcattctgcaattgcgctgagcttaaccctgatcctagtgctgagagtgatgaagaacatggctgggttcatggtgatgagggttatgaagatacggtagatggaagcgacactgagttttcagatgtcaacccaattggtcaaactggtgagcaggatattaaccatgctgtaatcgagctccagatcaatgaccaacgttttgaggacgcggtagatgaggagagtcacaggaacgggaactagggaccatgtgaattggtcggtcgtcgatgcagcatacttgtctgtaaagacttcacttttctcatgttgtcagatcatgtggaccaacttgaatggcaacaatgggggataacgagctttattatatgagttgtgcctgtaccatacgtgcatgaccatctatggtcatatgactactgactagtattttagagggcgagggggtgcaaatcgatacccggccttgtgcaacacattttccttagcaaaagaaaaaaaatgttgtttggccaagtaaaattgtagtgttgaagggtcgaaagtggaaaggtgtaaagttggttagttccacatcgcactatttctgtctgagtgtctctcttgaaacagtaaacaacaccactcctgtctggttttgtaaacaacattccagcagtagcttgcaaactgttcaataatcactgtagctagatgtctgtaaaaaaaaaaaaaaaaaaaaaaanna

SEQ ID NO: 271470 - DNA, 453 bp, Zea mays
  unsure (1)..(453): unsure at all n locations
ctccggcctcttccacggccgcctccgccgccgccgccgaccaccatagcaacagatatttcggagctcgcgccttacgcgcatggtttgctcgacgtgcaccgtaactaatcgactataagcgtggtgccgattgacgagatgatgccggtggaggaggcggcggcggatgactggtcggagtgcgcgttctcgctgacctgcgaggaagactgcgccgacctcggcgacggcgagctattcccgctctacagtgccggcgacgaggaggaagatgagtacttggagcagctggtgttcaaggagaccagcttctgctcctnctccgactcagctgccgactgcgacggcgatgaagaaggagacgaagaatactcttcgctcaccttaaaggagtggttccgtcaagctcgcctcgccgncgtcaagtggattcttgagacccgcgggtgc

SEQ ID NO: 271471 - DNA, 409 bp, Zea mays
ggacaagtggtggcacgacacggaaagtagcatccccataaggatgaattgttggttcagatcggatgatcaatcaatagggaaaaaggaagggattactgtaagatggaatgctcgcgtcggaattcattcttctcgttaccgtagcctgagaccatctcaagagctcagttagagcctctcaattgatagaggcatgttcatatgaagcgctacgcatatcttattttaccaaaatagggtggcgctggtaattgaagatctgggatctatcagtcaaagtggactactaaaaaaaaacttctgtttgcaaggtaatcttttttttaaagtctatttagcttctttcgtagaaaagaagggatttgctgctttcttagtaacaatattcttatgctatctggctatc

SEQ ID NO: 271472 - DNA, 676 bp, Zea mays
gagagccaattcaacatagaagggatatgtgcttcttggttccagaatcagcagccacagcgacagctgctggtagcaccagacatgtatgacaaggacttgcaaagaatgcaactatcttttgagaatatctaggcattatgttccaccacatggaacagagcagatcagaagaagcagaaactcgtaattttcagagattcgtgggcagaattatgctgaattgctcacatagatacgttaagttgatacagaaatcatcctccacagctgttcctcagttgaagagctggcaatatcaaggaaaggacagccctggcattggaagttgcagcaggatgcataggaaagtatgttctagagtctcctttcctttctcttgaaaattgatgttttccttctgtacacgactgaacttttgcatatttgagtttttgttctctctggtggaaattaaataaatatagatagccataggcaaaaatgcatgtgtcggtagctctcaacgtgcaagtagccccaaactttcaactgctgccatgcatgtccatgcaaattaattattgcatgttgtatttttcatttctttcgataagttgccgacagacggcagttgtatatttgtaaaggaagaaatttgaaatattgacctgagagctactttcgtccccttccc

SEQ ID NO: 271473 - DNA, 373 bp, Zea mays
atctgctctaccctccttcgcgcggccggcctgattcctcacccctgctcgccgcgaacacagctctgtcaccgcggtttgccgtggccggcgaagatgatgtccggcggtgggtactccgccctcgacgaccccaaggcctccggatccgtcccggcggccacggggacagatccgccggccatcaggttcgccgactccaacctccagaccttcccgccgtccgaggccaggggcaagatctccggcgcctaccgcccgcccaccgacgccgatgacaccttctcgtccaagggcggaggagccggaagcggtggcagaggcggcagcgccgggttggatgatgccgcgcagggcggctggttccgcatgt

SEQ ID NO: 271474 - DNA, 320 bp, Zea mays
gtcctcacccctgcttgccgcgaacaaagcacagcagactcactatctctccgtggccggcaaacatgatgtccggcggtgggtactccgccctcgacgaccccaaggcctccggatccgtcccggcggccaccgggacagatccgcaggccatcaggtttgccgactccaacctccagaccttcccgccgtccgaggccaggggcaagatcgctggcgcctaccgcccgcccaccgacgccgacgataccttctcgtccaaggcggagaccgaagcggtggcaagcggcacgaggtcggatatcccgcaggcgtggttc

SEQ ID NO: 271475 - DNA, 612 bp, Zea mays
acgccgcctcctacggtaggtagtagtagcgatggtctataactggatcggacaaggacgacgacgacgaggacgatcgatcgccttcatctgatccctacatcgtgcacgtgcgcatgcagggttcacggtgaccaacgccgggtgctgcggggtcggcaggagcaacgggcaggtgacgtgcctgccctaccaggcgccgtgcgccaacagggaccagcacatcttctgggacgccttccacccgtcggaggcggccaacatcatcgtcggccgccggtcctaccgcgccgagtcgcccaacgacgtctacccgatggacatcagcacgctcgcctccatctgattctgattctcatccctccataaatataaacataaaaatatatgatataatccacccaccactgcgcaaaggctgccatattaaacagggctccaagaggaggtagccgtgccattctttcctggggaccagctcgcgccttatctggaatttttcatgctttcatacatttgcatcgggtacttagaaaatatccgatcgaatcacttttttttttcgttttcaattctcatgcacacctgaattccgcgaaagattccacaagt

SEQ ID NO: 271476 - DNA, 312 bp, Zea mays
tgcacgacaacaaagtcaattacatcatgatcgtaaaccaagaacacacgaaacttcctgaagggtttggattaccactcaatgacaaatctatcacttgaagctcgtgagaaactttccaaggtgcgtccacatacaataggtcaagctagcagactcggcggtgtgagcccagcagacatgacagttctcctcatttggatggagagcaaccgacgcatggagcgccacaggagacagcgagagcagctgggatcagttgcagtcgagtcggatggttcttcagaggaggccgtccaagccagacggcat

SEQ ID NO: 271477 - DNA, 1421 bp, Zea mays
ctgcactgcacggtagtcgcgtcgagtcgacgcgcgattcctgccatttgggtgggccagcctttcctggcaatctcggggggcgtttcgcctcgctgcgtggcagaccggtgtgccgtgcgatgcatcccaaggctcgaatccacgccgacccggtgcgcgaggtcgaccacttcgactgcctgccggattcgctcgtcctgctcatcctgaacaaggtcgaggacgtgcggtcgctcggccggtgctacgccgtgtccaagcggctctgtgggctcgtccccctcgtccatgatgtgtatgtcaagattgaccgcgtcgttgcggtcgacggcgacgccgagggcacgctcaacctgtcctcgccgaagcctcggagcatcttctcgcacttcctgaagctgatgctcttcacaatcatcaagcctttccacaacatgcgcaaccctaatggtactgcgaggccattgttcccgcagctctcgcaccactcgccggcgcaggtgctcaggaacttcacgcacatcaggaatcttcggatcgagctcccttctggggatgtgggtactgaggagggagttctcctgaaatggcgagcagagtatgggagcacacttcagagttgtgtgatcctggggggtacccgggttgaccgcaagcctgttggtggagagcatgagcagtctttggaggataatggaagcatgccagagtctttctataccaatggtgggctgaaacttcgtgtcgtctggacaatcagctctctaattgcggcatcaacgaggcactatcttctccgctcaatcatcaatgaccattccacacttctgagcttggtactgacagatgccgatggccaaggcacattgtgcatgggggcagagcagctggaggagttcagagagaaccagttgtcggcctcggcatgttccaacaggactcaggtcccagcctgcaacatgaagctcaagtatgctccatatcttgaactgcctggtggtatggcgttgcaaggcgccactttggtggctatcaaaccctcacctgacggaagcaatggaagccaccctaaccgtaaagaagccgacgcatttgtctttggagcatttgatgggccatttaaggctgctgtgaaggctttgatgaagaggcgcacttaccttctggagatgaatggcttctagaaatcttgtggtatcgagcttgttggtgctatgcatggcatatttagctaagcttttcatctttgtaatatccaagaaagcaccatctctagttgctgcttttagtctgctgttttagctctttggacagtgttaacatttgattatataaaaatcgtatcaagttctctagtgtaatagcgaatcgctccatagttcaccattctggcccctggtgtaatatccaagaaatca

SEQ ID NO: 271478 - DNA, 656 bp, Zea mays
gatgggataaaacaccctggcgggtagcattctagcaacaaaggcacggggtacaaacacgagggcgaccttgtgtcttctaacagttataaagtagtccaactgggggtacatggaaacgaaatcatcgtcaccaaatagagggcaaccgaaggtacatgaccatccacaaaccagacagcaaatctagctacactgccagtgtgcccagcaactaataaagtcatacgcggtaaacatcactgaacatgactgggaaacacaggacgcccccgtccatgcggttagtggtgtacaaaagctatggcttcaccaaagtctcctaggagataatatttctgagacctcgtccaaggcagagtgctcaaatcaagctgtgccggtaacagcggctgcgtccggcttggagctgtctttgccgttttcccgagctgctgatccaccagacgcttctgcaaaccgggcagctcgggcctttcttttttcttcttccgccttgtcgacatttgcgctctgaccaaatcgttccaaacgggcctttttcttagcttcctcatctgaagaagagggcgaggcaaggccaaacctctcagccctggacttcttcttctcttcctcctttacacttgaagagccagtcccaaatctctcggcgc

SEQ ID NO: 271479 - DNA, 1276 bp, Zea mays
  unsure (1)..(1276): unsure at all n locations
tggncgccctttttttttttttttgaatcaaacattatcttaacaggttcctcatcaatagataaaacccatctcgaggctgtttctagattattaatatgacatttgttttttttttttttgcacagtctcgtatctttggaatcacgagcagctgatgcaaatgcaaaatgtaggaatggattagcagggaaacaggagtatcagaacgcaagggttacatgagactgctgacaatcagccgatgtccagttaattccggaaccgcgcagacggcagaaatcgctatgaagaagaataagggctgaagcaattggacaggctgctgcctctgtgcatagatatagcatccttcataaatatgaggaagtccacttcacttgtatctttattcagtggactcagcaacccatcacggcgcagttatacacgaagttcccagatggccgcctggcaatcaaattccacacgggcggccgctcgtctggggtccatgagttgagctcaatagtacggccagtgtaggtcctcggacctccgatgacaatcaggcagtcaccgcaggctcggaaagcaaggccccaaccattcattgacacagaccgttcaggcagttttccaagggtgatccacctgttgttcttcttgtcatacttcttgaggtcattctcgctgtaatcagcggcgtagagctcgttgctgacaactgcaataaggggaggagcaccagtcactccattgaggccttcagacatgttctcgattatcctccaggaacgcctcttcaagtcatactcctccccacaagtcagcaatttgttgttgttagccacaccacctatcacatagaacttgccatccatgaaaaccccagaacacatcttccttgccctattcatgcttgggaggggcgtccaggtatgtgtctcagagtcatacatctctgcagagctcagtatgttgccaatagaatcagtgcctccagcaacgaaggccttttccccaacacttgttgaaccaaacaggcaccgcggagagttcattggatgagccctggtccatgaattggttaggatgctgtatctgaagacaatacgtgccatcccaaacacaagcagttcagtgcccactgcaagtgattccttgtcagagcacatgaagcattcatcaggcggcatcttgggcacttggatccagcgctctcgccatgggtcataggcatcccattcaagaacgatgcagaagaagtagacccaatgctcccgnacgcgtggtc

SEQ ID NO: 271480 - DNA, 720 bp, Zea mays
gacaatatccattaagttcattgatgatgcatgtatttattaggacatagagagaccacacagttgtgtacaaagaagtcaccattgagataggacacaatgacgggtagaaatagagcacaaatcattgttactatgttttctctgacacataactaacaagtttatattgttacaaactaacagacatatctcaatctggtaccacacttgcatgaatgttgaattgcttcttgattcttcttcggaaataaccaatatagatcgctatcaagaggatggagacaatccctgaaggaagcaagatccgagattggctttccacatgttctttccaaaccgatagcatgaacagctgctaaaagttgcaagcaaataagaacaaaacatcagtgtataacaacaacatcgttaacattgaaacatctggtgtcctttggacgttaaaaattagtataaagtatagatacagtgggcatggtcttctgtggcggcgtcacacttagcttgcattctgaaaatgaccaacttggtttgttgaatcgacaagatatgcagccttgacaaagaatgtgtgctcgccgtggcaatgacaacggcctcaattagtcgcctcttccagtgtcaacaaatcaaacatcatgcattgaactctccctatcttctccagtgctggtcttaaatggcaagaatttatgtgaccagaaaggatatatgagt

SEQ ID NO: 271481 - DNA, 419 bp, Zea mays
ctctagacggaaggagattggatctaggctccaatctcctgcaaacagatcaacattcaaaaaagtcgtcagaagtcatctttgaaatcatgagcatttgattcaaatgcaaatgcagaaatgaattagcagggaaacaggagtatcagaactcaagggttacatgagactgttgacaatcagctgatggccacataattccagaaccgggccagacggcagaaaccgctacgaagaataagggctgaagcaattgggacagtagtgtcttaggcaaaatttctttgtgcccatttggaaacatggcattacaatgtttcttctcttattggtttactccctgtagctggctaattattctatgttgttttttccacttctaggattggcgaactgtcttgcttttctttgagcaatct

SEQ ID NO: 271482 - DNA, 431 bp, Zea mays
gaaatcacgagcagttgattcaaatgcaaatgtagaaatggattagcagggaaacaggagtatcagaactcaagggttacatgagactgctgacaatcagctgatgtccacataattccggaactgggccagacggcagaaaccgctactacgaagaataagggccgaagcaattgggacaggctacctctgtgcataccatccttcataaatatccactgcacttatcttttattcagtggaactcagcaacccatcacggcgcagttgtacacgaagttcccagatggccgcctggcaatcaaattccacacaggcggccgctcgtttggggtccatgagttgagctcaatagtacggccagtgtaggtcctcggacctccgatgacaatcaggcagtcaccgcaggctcggaaagcaaggccccaacc

SEQ ID NO: 271483 - DNA, 829 bp, Zea mays
  unsure (1)..(829): unsure at all n locations
tattnttgatgataccagttcctggtatttactaccagacctctatttataattaatgtatctgcacaagatatttactaccatagcataggaacagttcgctgtcctgatccatactggaagcaacatctaaaaaactggaggacatttgcgtcatgtgaaaagatgagctcacactaagagagattgtctgctggatactgttgtcaggactagttacattgtaaaatgtccattccacatactatgacagatctcatcgttaaaccctggcaagtgcatctccatctcagactaacagccaccaattgttgaactcaattcaaattgcctccaatgccctgagctttccatgtcaaaatcacaaacaagaagttcagtttacaactctatcaagagggcctccagcaattaagagtgtgcatatcagacctggctggtagcatctgagaaatatggcctggtagtggtgctccagatggcaaatgattcagaacagtatgttgatgattcataggattcattgaagatctgtcaatgtttgatcttgaatatccatcatgcacaaatggcccttctgagcaaggtaatgatctgccacttgctatccaattatgctggtcatctggactgaagttaccagatgccatccgccaatgttcttcagatggataatggctctgactgtttggaaaggactgtgcagcataaggattgtgtggaggtgcaacagcttgttggcccatgggattcatgtgtgccatacgagaataggcatgaactggagaagtttcccccgcgtccgcccacgcgtccgcccacgcgacaa

SEQ ID NO: 271484 - DNA, 1313 bp, Zea mays
agaaatgcgacatgagtggaaatttgcggaataatgcaaaccagctctctgaagagatggtgcgctcgatgaaagatatcttccttcatttatctgcatctcccaagatatcacgagaggagccttttgctaattcatcttcatcagcagaacgtctatctggttcaacattgactactttgtcagattcatctataatcgcctcagtgctgcggagtccttcgattgactggaacaacggcgatggtattattgatgatgttagaaactttgacccgtacaacgttaaaggcaaggaagcacggagagacgttgggagctattgttcagtagctgaagtgtcttggatgtatattggcaatgaacaacttgaatatgcatccggagctcttaaaaagttcaggtttcttgtggagcaactatcaaaggttgacccttcttgtatgaactgtgatgaacagatagcattttgggttaacttgtacaatgcattaataatgcatgcttatttggcatacggtgtccctgaaaatgacattaagctgttcgcgctaatgcaaaaggcctgttacacgatcggcgggcagcctgtcagtgcagccgaaatagagtttgtgattctgaagatgaagacaccggtgcaccggccacagctctccttgatgctggcccttcacaagtttaaaacgtcagagaacctcaggagatattcaatcgatggcactgagcctcgcgtcctcttcgcgctctgctgtgggatgttctcttctcctgcggtaaggatcttctctgctgaaaacgttcgagctgagcttcaggagtccatgagagactacatccgagcgtcagttggcataaacgacaagggagagctcgtagtccccaagctactgcagagctacgccaagggcatcgtggaggactccctgctcgccgactggatctgccgccatctgacactagaccaagtcgccgcgatccaggacacgtcgtcgtcgtcgtcgcataagcagcggcttcttggagtgcgcagcttcagcgtcatcccgttcgactcgaggttccggtacctgttcttgtccaacaacaccaggtgccagaattgaaacaagagtacaagactgcattgctatgcgcagacagccacaggagtgggtgcttgacaagttgacacttttttcgagagctgaaaatattagcttttgctgtacattctgtaaatttttccgttgactaggattcttctttgtacgtaacattcagctaactttttgtacatcaagcgaacccagaatacaagtgtagattcggtg

SEQ ID NO: 271485 - DNA, 393 bp, Zea mays
caaaaactcatcttggagaggaagaagctaaacctggagaaacttaggatggatcggcagaaattgaaggaggacaaggaagaggaggtcatgatattgagcatggatctgagtaaatgtaaccccctacttcgacaatactacgaggctaagcaacaagagatattggcaagggttattggaaactcgtcgtcaagcaagtgaggagtgaacgaagttaatttgtgttagtggttgagtaagtcatgttatttgttttcgagaaaaactgcatgtttctgaaccatatttttgttcttgttccaagttgtttgcaaacttgatattctcagtatgtcatgcttgaacattgcaatgttggtcgatgataatggacttgttatgttattacta

SEQ ID NO: 271486 - DNA, 593 bp, Zea mays
ccggccctcaacctcgccgacctctggaagtactgaagcctgggcgacgatcgaccggtggctgggccgcccacccgccccggtcacgtggtctggttggctaatttgcttgatttgattgattatcttggtctcttgtgggatactggggttggtgaccggttcgctgatgcgtcctcgttcgtcacctccgccaggtccggcctctactgacctcgggtctgactagattattatccgtccagaccgccaggggattagggcttccttgttaattaattaatcccccctccccatcctaggttcctttgcctgggtctctgtacatagtactggtaccctactctgattgtgtcattagcagtagcatgattactgataggattaatgaaatggggatagattaagggggcctgcatctgcgtcagcaatgcagtgcatggggggttttacgggtgattagttaatttgggcgcttggtgagccagctagcgctagcttcatatgtacatgtactgccattaattgctgcttgagctcgacataccattatgtgaatttgatgcttcgatgctgggcgctatagaggatcc

SEQ ID NO: 271487 - DNA, 799 bp, Zea mays
acccgccacgcgtccgatttatttgggatgaggaccttggggttgaacattttaatgcagaggagtacatcaaacttgttaagaagcataacttggacatctctcaacctggattagagcctgatcgggggttaacatggcagatgaccaaaagaagaggtgacagtgaggttcacaaggacacagaggagaggcctggctggtgctctgaccctcatcttccaccgtgtgctgcttttgttgaaataatggctccagtcttctcaagagatgcatggagatgtgtgtggcatatgattcagaacgacttggttcatggttggggcttggattttgcgctcaggaaatgtgtggagcctgctcatgaaaagattggagttgtcgattcgcagtggatcgttcaccaagtggttccttctctggggaaccaggggcagtcagaaaacggaagggcgccatgggaaggggtgagggcgcggtgcaggaaggaatggggcatgttccagaccaggatggcggaggcggagaaggcgtattacaagatgatgggcatcacccctccaaactccacgcgtgtctagccgcgcctctcttcttggttttccatccccgccaccctgacctttgtggtggcgggtgagctgatgatactatactatagcactacttgattatagggagttagagatggtgggtgtagctgcttttgatggagaggtccttctgtaagtaaatgcgaggcgaaactgtgatgagaaaacatgtacacgaggatgattacctgatgatgatgatgatg

SEQ ID NO: 271488 - DNA, 778 bp, Zea mays
cttgacaacaaatggaaagcccaaagaattattcttctccagtgatctatgtgctattgtagagcatacgaagaactacttagctcttgaagataatgaaattgttcatattaaggatggtagtgtttcgatcctcaagtttgaccctcacaaagagaagccagcatctgtgcaacgagcattgtctgttcttgagatggaagttgagcaaataaagaaaggaagttatgatcacttcatgcaaaaagaaatccatgaacagccacattcgttgaaaacaacaatgaggggtagattgaaggatggtggggttgttctaggtggactgaaggaatatctcaagacaattaggcgctgtagaagggtggtatttattggttgtggaacaagttacaatgctgccttagctgcaagaccttttgtggaagaactgactggtattcctgtgactatggaggttgcaagtgacttgctggacagacaaggtcccatctacagagaagacactgcagtttttgttagtcaatctggggagacagcagataccctccttgctctagattatgcactagaaaatggagctctctgtgttggcataacaaatactgttggaagcacgctggctagaaaaacacactgtggggttcatatcaatgctggttgtgagattggtgttgccagtacaaaggttggttggcctatataagtttttccctttgcacgtgcttccttttttttgagctatccattctcaccatactgaatctcatcataactg

SEQ ID NO: 271489 - DNA, 472 bp, Zea mays
ctgcgaggactctatggctttcaacttcgccgaaacacctgaccctcccggcgaagtcgccatgtcgaacccgaagggctccaagatgctccagttcatcaactaccgcatgcggctgacgatccaggacggccgccagctcgtgggcaagttcatggcgttcgaccgccacatgaacctcgtcctcggcgactgcgaggagttccgccgcctcccgccctccaagtcctccaaggccaccggcgaacgcgaggagcgccgcacgctcggcctcctcctgctccgcggcgaggaggtcgtctccatgaccgtcgagggcccgccgccgcccgacgagtcgcgcgccaaggccgcggcggcgggcggagccctcgccggccctggcgtgggccgcgccgctgggcgcggcgtgcccaccggcccgctgctccaggcagcttctggccttgctggccctgtgcggggcgtgggt

SEQ ID NO: 271490 - DNA, 1058 bp, Zea mays
gtgtgcccgccgtcgacgcagcctccgtcctcccccgcatccgaatcacgcacgccacgtcccacccctgtcatggccacctccagcgacggcggcggcgaccagcggcgcctcctctccatccccaaggaaggcgagcgcatcatcgcgcccacgcgccgccccgacggcacgctccgcaaggccatccgcatccgcgccggttacgtgccccaggaggaggtcgccatctaccagtccaagggcgccctaatgaggaagtcagggcccgacgtgccgccggggtacgacccggcgctagtggccgacgccaaacccaagacgaaggcggccaaacggaacgagcgacggaaggagaaacggcagcaggccagtttggcaaatgataaaggaaagagtatgaacatagagggaactgatgctggagaaaccgacaaggtcctttcttccaaaacggataagcagaaggattccgtggaaagtgtaacaaagcagatgagtggcattgctatttctgagtcacatgcaatgccgtccacaaatactataaacaattcgcaaccagaatcatctgctccagacatagacaagaagattcgagcactgaaaaagaagatacgcttagctgaagcacaagtacaaggcgaccctgaaaaattgaaatctgaaacgctggaaaagattaaaaagattgatggatggtgtatggaactgaagcttttggaggacagcatagctcctgcggcctagacaaaatcgacttcggctctgatgtagtagaatagacagtagagccatcgcgaccacaccagggggctgagctaaattccaaggtgcactgaatcaccctaggcttttccattacctgtgttggttactggaaaaccagtccggtagatgcgggtttgcgcagaacgatggagtgtttttccctgcacatttgatgtctcatgttcgccaccaagtttcaaggtttgtaccacaagatccatttatcagaaagaccacacagtgagatatttaaaccattattgtgacaaattatatatttaaaatat

SEQ ID NO: 271491 - DNA, 1491 bp, Zea mays
cacatcctgagtatagaatcagcttggccgtcagcttcttgtttaccttcctatcttcccttgtcaacaatgagtcaacaaaggttaatggtcgcaacgggtcatgtagtaatggagccacaaacggtgcccatgagcactcaccagagaagcatcttaagtttgacagcaacgatttgccgatacggtcaagacaagaaatatttttaactgatgaatacaagccagttggaaaaccaattaagaaagcaggtgcagagatccaagcttcaggggaagctgtgtacgttgatgatatccccgctcccaaagattgcctctatggagcatttatctacagcacccaccctaatgcccatgtaaaggctatccgctttaaatcatctttggcctcgcagaaggtcatcacagttatcaccgcaaaggatattcccagtggtggacaaaatattggttccaccttcccgatgatgggagacgaagcactctttgcagatccagttactgaatttgctggtcagaatattggtgttgtgattgctgaaacacagaagtatgcctacatggctgcaaagcaagccattattgagtatagcacagaaaatctgcagccaccaattctgacgatagaagatgcgatccaacgaaacagctacttccaagtccccccatttgtagctcctaagccagttggtgattacaacaaagggatggctgaagctgatcaaaagattctatcagcggaggtaaaacttgaatcccaatactatttctacatggagacacaagtggcgctagctattcctgatgaagataactgcataaccatctattcttcgacacaaattcccgaggtcacacaaaatgtggttgcaaagtgccttggcattccatttcacaatgtccgcctcatcaccagaagagtcggaggaggctttggtggaaaggcaatgaaagcaagacatgttgcatgtgcatgtgcggttgctgcattcaagctgcggcgtccagttcggatgtacctggatcgcaagacagacatgataatggcaggcggtcggcatcctatgaaggtgaagtactctgttgggttcaagtcagatggcaagatcacagccttgcacattgatcttgggatcaatgctggaatatcaccggatgtgagcccaatgttgccacctgctatcataggtgctctcaaaaagtacaactggggcaatcttgcatttgacaccaaggtctgcaagacaaatgtctcatcaaaatcagcaatgaggggtcctggagatgttcagggctctttcatcgctgaagccatcattgagcatgttgcctcagcactttcagtcgacactaacaccataaggaggaagaaccttcatgactttgagagccttgtggtgttctatggagaaagtgcaggtgaagcttctacatacagcctggtttccatgtttgacaagctggccttgtctccagaataccagcaca

SEQ ID NO: 271492 - DNA, 594 bp, Zea mays
aaagtggtgtggaattcacatcaaccagtgagaagcccgctgcccgctgcaactgcaagccgccacgggctgagctgaggctgtgtcgaactgtcgatccatccgtattctcagcaaaacaacgccaatcaatccactccagaggaagggcgatggccgccgctaggatcgccgcctgcaccacctccgcccgcaccgccctcgccttggcagacgaccccgcgccgccggacacgctggacgtggtgcgccggcagcgccagctcctacgccgcgccgcggccctctgcctcgaccccatcgccgaggagtccgacggtggcatcgactctgcctccgacgtccaccccttgggtcggagccggggccagaccgccgccacctccgcactgccggcgcggccctgaggatctgaaccgtcaaagacgagacctttttctccttgccctaggagtggagttttttcccgtgggttttaagaaatactccgtaccatgtatatgttgatactatagtagtattgtagaatatagaccaaaagctgtttcagacaccattgcaaaatagagctttcaatatcatggtttaatccgg

SEQ ID NO: 271493 - DNA, 358 bp, Zea mays
gcgtccctgctcgcgctgctcctcctggtctctgcgaccgccgccgctgccgggacgagcaagggccgcgcgggggtgcggccgtgccaggatctggcgacgcggggccagtgcgcggcgagcggcgggtgccggtggtgccgcagcgaggcgctcgacgacatgtgcttcgaggccatcgaggcgtggcgccttccgcgccaggtgttctcctgcgacccaccctccggcgccgcccacgcccgcttcaactgaagtaatgccgcggccggccgccggcgaagctatgttatgctatcgccttggtcgggatcgctcgatctgatctcgtttgtcgccaggcctccgttgttttctt

SEQ ID NO: 271494 - DNA, 624 bp, Zea mays
ttcttgggatcctcgaaggaggccaactgttgagcaagcattacaacatcctttcttcaatgtgtgcaattgggtaccaagacctgtacatgatgcttaccatacaaaaacaaacggacctaaagctgaaccaagattggaactgaacctgtgggatttcagcacagaacctgataattgtgtccttgatttaactctcagtctgaagccaagtttttctggaacagaccttggtaagcatgttccacgacgtacagaagaggaaattctcctgtacccgggatttgagaatacccctgtgaagtccggtttttggcctctggtgccatctgatcgtcccgttggtgatgttccggccataccatcctggcagcaggcgtacatggttgacagccaaggcgcattttctggctctccgttcttgcagtcgaacctgttggagaaccgttcgttagcacctatccggcaggtgaatttcttctgacggagacaggattaacagattcatacgattcttgatacgtccagcttctcgctgtatacacactatcttgaataaagtgttgccagtagaggaaatgtatatacagttcgttcgtagctcttgagcttctttctttctag

SEQ ID NO: 271495 - DNA, 578 bp, Zea mays
tcttattgggtcaagggctgagcgcatccgtctgaggaatcaggcggcaaatgggtaccggctggtgattcttcaacgcacactgctatgtatccaaacaagaatgggcattgcagcgacactgaaggcaaggcatgggaccctcttgcgacgaagataacaggctcaactgctaggggttctcctgcaccaaccccaagcgtgtgcttctgattgtgttaagcatgtgattcacgcacacctgtgaagagattatacatgaaccagtttatcttatagtgccatgtaattgccttgtgtgtcccagaaaactgagctgcccgtgtgcgataagtagaataagaggtgctaccccactgtttgctgtgttgctatggtcgagattgatgtattgatgctgctgcatttctttctttttgttaatgtgtggtggcgtttctcgcttctgtaaagcagctgaagctgtcacatcatttgatcagttgaagctgtatgttaccatgtgtgtgccatttaatgtttggagttatgaaatgaggcacatgtcccgaccctgaaaaacaaaagtcaaaaaggaa

SEQ ID NO: 271496 - DNA, 345 bp, Zea mays
atgctaaccctctccgactgagactcttgagccgagcgcgcggccaccggccagtgccaggcaacggccagtaccggaggcgggcgtgcacaggccggccgcccggcgcgcgctgtgatgtgagtagccatagctaggatctgtgttatctcgtttgtctgcctgtttgtcccttggctcgctctgcttgtgctgcttttcggtcggtgcctaatctagctatctactactagcactagctagctagcatctcaagactgagctccgtatggtcaatttgtaatgctcgtctgtgactgaactgaagaacaagaccattttaatcggcttcttgcttccagcaac

SEQ ID NO: 271497 - DNA, 445 bp, Zea mays
  unsure (1)..(445): unsure at all n locations
gtcaggctgcaacctgaccctgcaagggtgcaaggaggtggctcangtgctgccacggatggtggtggagttgataaatggccagtctgatgagaacgaaaggaatgaaagcgtggacatcttatacatgtatcggtcactcgatggtccaagggaggatgttccaccgttcgtgaagatcctgtgaagctgcttctgcggagatggctgggtatcgctatctatcagtgggtgcctggctgatatgctggctgagtgcagatcatttaacggaatatatatgtaagttgttgagctgcagatgtggtacatttttatctcttagaaagatttcgaagcactgtactggagcggggcgggcgggggtatcatgtagtaggagttcatcagatgtggtacatttttatctagtaggagttcatcagtgtatccaaagcgttcacgg

SEQ ID NO: 271498 - DNA, 903 bp, Zea mays
ttactgtcacctgcttcaccaccggcgggccacgtcatcgagaacacgatcgagcacacaagcacgaagactcgtttaggagaaaccacaaaccaccaagccgtgcaagcatcatggagtacggtcagcaggggcagcgcggccacggcgccacgggccatgtcgaccagtacggcaacccagtcggcggcgtcgagcacggcaccggcggcatgaggcacggcacgggaaccaccggcggcatgggccagctgggtgagcacggcggcgctggcatgggtggcgggcagttccagcctgcgagggaggagcacaagaccggcggcatcctgcatcgctccggcagctccagctccagctcgtcggaggacgacggcatgggcggaaggaggaagaagggaatcaaggagaagatcaaagagaagctgcccggaggccacaaggacgaccagcacgccacggcgacgaccggcggcgcctacgggcagcagggacacaccggcagcgcctacgggcagcagggacacaccggcggcgcctacgccaccggcaccgagggcaccggcgagaagaaaggcattatggacaagatcaaggagaagctgcccggacagcactgagcgcccccggctgtgctggcgcgtcaaagccgtactgttcagcgttccatagataataagataaacccatgaataagtgtccctaccctttgatcatgtgacagggacagggacagtttcctgtacttgtggggtgaatttgtacgtgtgatacggtaacttggtccgtgtactgtttatgctgctacgttttccttcctaaaagtacgtatatatatacagcacttgcgagtggctttacttgtgtgcactgcctaaaagtgtccatattacctccagcggt

SEQ ID NO: 271499 - DNA, 889 bp, Zea mays
  unsure (1)..(889): unsure at all n locations
cacgattgatcatctacaaccacgaagacccgcaaaatacgagagggcactataaaccaagccgggcgggcctaaaggagnacggacagccagcgcagcgcgccaccgtccacaggccatgcgccaaaccgccaccagcagagcgcagccacaccggggatgggacagaccggaaccccggacgggccagctactgccgcacgaccaacctggcatggacggacctcagaaacagcccgccacagaagagcacaacaccggcggcatcctgcatcgctccggcagctccagctccagctcgtcggaggacgacggcatgggcggaaggaggaagaagggaatcacggagaagatcaaagagaagctgcccggaggccacaaggacgaccagcacgccacggcgacgaccggcggcgcctatgggcagcagggacacaccggcagcgcctacgggcagcagggacacaccggcggcgcctacgccaccggcaccgagggcaccggcgagaagaaaggcattatggacaagatcaaggagaagctgcccggacagcactgagcggcgcctatacgtggctgtgctgtgctgtgctggcgcgtcaaagccgtactcttcagcgttccatagataataagataaacccatgaataagtgtccctaccctttgatcatgtgacagggacagggacagtttcctgtacttgtggggtgaatttgtacgtgtgatacggtaacttggtccgtgtactgtttatgctgctacgttttccttcctaaaagtacgtatatatatacagcacttgcgagtggctttacttgtgtgcactgcctaaaagtgtcgatattacctccagcggtaaataaatgacccttgtaagacggttaagt

SEQ ID NO: 271500 - DNA, 489 bp, Zea mays
ggcgcctacgggcagcagggacacaccggtagcgcctacgggcagcagggacacaccggcggctcctacgccaccggcaccgagggcaccggcgagaagaaaggcattatggacaagatcaaggagaagctgcccggacagcactgagcggcgcctatacgtggctgtgctgggctgtgctggcgcgtcaaagccgtaatgttcagtgttccatagataataagataaacccatgaataagtgtccctacccttgatcatgtgacagggacagggacagtttcctgtacttgtggggtgaatttgtacgtgtgatacggtaactgggtccgtgtactgttcatgctacgttttcctacgtatatagtacagcacttgcgagtggctttacttgtgtgcacttcctaaaagtgtcgatattacctccatcagtaaatatgacccttgtgatgaaacttacacagcatgtcttaccaacagctgttattat

SEQ ID NO: 271501 - DNA, 896 bp, Zea mays
tgtgttctaattgggtcccatgcttgcatcttatgggtgtaattattatggaaacgaggtcctttatagtggagtttttggcactgagatggactgtgagattttcatcggacctgtttattaccaacgtcttcgtcatatggtctcagacaaattccaggtccgcactaccggtcgtatagaccagataacaagacaacccataggaggaaggaagcatggtggagggatccgatttggtgagatggagcgtgatgccctcctcgcccatggttcgtcctacctcttgcatgacaggctccactcctgctcggattaccacatcgcagatgtgtgctccttctgtgggagcctgctgactgcgacaatgatcaaatccgatacccagaagaaagtcaagcacgagatgcttgggctccccactgtgagaccagcgaagaactttgcatgccaggcctgcaaaacaagcaaggggatggagaccgtggcaatgccgtatgtgttcaggtacctggctgctgagttggctgccatgaacataaagctggagctccggttgagcaacaaatcaggattgcctctcagctaagaatcataacaccagaattagcgcttgttcatcgcgggggctgcttcgcaggagaagcttaaatgtaaccattggtccggcgtgtagttgtttcatatgtcggtgtgatgtaccaatgtaacttgtaagaaaaacataaatgacaacacgagttattatagtttgaatggcggttctttttcattgtcatgtcttaactagtgtttgaatataccagaactgagcttagttagctgttaaaattagggagtgtttggtttttagagactattttttagttcctcccttttattctattttagttatt

SEQ ID NO: 271502 - DNA, 456 bp, Zea mays
ctcgttccaggcctgacgtccgtctccaactcgactactatactaccgccgcgctctgctcctgcaccagccgggtcagctgaactgagcatcatatcatggagggaggagccgttcccaagccatcggagaagagggtggccctcgtcacgggcgggaaccggggcatggggttcgagatatgccggcagctggcgtccagcggcctcaccgtcgtcctcaccgcgcggagcgagacgcggggcgccgaggcggcccgcgagcttcacggcttcggcctgcctgacgtcgtgtcccaccagctggacgtcacggagcccaccagcgctgctcgtctggctgatttcgtcaggaccaagttcggcaagctcgatgtgttggtcaacaacgcgggaatcatgggggtgacgatggaggttggcgacgacgaggcagccgtcaaagaaatgatggtag

SEQ ID NO: 271503 - DNA, 488 bp, Zea mays
  unsure (1)..(488): unsure at all n locations
gcccgcccctgccccctcgccccccgccaccgtctcagcgggagaagcagcagtgcccgccaccgcctctgctcccgccgaagaagcagcagtacccgccaccgcctctgctcccgccgaagaagcagctgtacccgccaccgcttcccctcccgccgaagaagcagcagcaccatcacccgccaccgcctctgcccacacttccgccgaagaagcggctggcgtcaccgcctctgctgcctggaagcgagaagcagtgggtcatctcctccccgtcggagccgcggttcgtgccgctgccggtgtgggctctgatgtccggctccgggaagcgcaagaagcggtcaggctgcggcgggcgcgttcccgccctccacaccccagccgtcgtcgaggagaccgggcgcgcctgagaggccgagacgatagacgacaccctccctgttactggtatccatccnctgctcctggatcatgccaatctgatg

SEQ ID NO: 271504 - DNA, 811 bp, Zea mays
ttttgttgctgcaagaattaatgtgaaaaaaaatagattctcctcttcttctttcacttggttggtcgaatggagcaggcagtagtatggcggacgcgtggggccgctgctgccgcgacatgtgacgcccgccggggtggcgtccatgctgctgggggcgtccatggcgcggatgctctgcggctcggtcaccttcatgctcggcttcttcctcatgccctgggttgtcgggctcggtttcctcttcctcttcgtcggcttcatcaccaacctctccgggatctggagggacatcatcctctggccctccgtcgcgtgctccgcatcggactcacccaaggaggcaccctccccatggcatatgttttccaagccttcatccatgtcgacgtgaagccaagtacaaagtaaggctcccacggaggtccacagaagcagggagttgttggagcagcagccattgccaacctatattttccttcctggacaacccttcttttacatgtgacaccgcagcaagttgccaagttttaaatggttttgtactgtgtctaggaggatacgggatacttgcttgtacatacggaaaagaaggtcgcgtctaaacatcacgtgcagcttataattgtttcagaaatgctgttctttgggctgaacatgaagaaatcccatatgttgtgtgccatcgcgccagtattgctggttctttcacctgactgtgctgctgggctccagctttgacttcgagaggaattgctgcgatcaaaaaaaaaaaaaaaaaaaaaaaaaagggcggccgctcgcgatctag

SEQ ID NO: 271505 - DNA, 802 bp, Zea mays
tgcgggagacgtcctccggcgagcggtagtcccggaagacgtcctccggcgagcgggagaccggctgcgtgcccggccggcctgatcagggcgctcaccaccgatgtggagaagttctacgtgatgtgcgacccagagaaggagaacttatgtttatatggacttcctaatgagacatgggaaataaacttgcctgctgaagaggtccctcctgaactgccagagccagctcttggaattaattttgctcgtgatgggatggatgaaaaagattggctatcacttgttgcagtgcatagtgattcttggctaatgtctgttgcattttattttggagcaaggtttggattcgataaagaatccaggaaacgtctcttcaccatgatcaataaccttcccagcatatatgaggttgtcacaggaacagccaagaaagagcccaaagaaaaaactcctaaaagcaacattaagactaacaaatctggctcaaagccctcgcgccatgcggaacccaactcaagggtcccaaagatgccacctccaaaggacgaggagagtgaagaggaggaaggggaaccacaggaagaccaggagagtgcgctgtgtggcgcatgtggcctaggttatgacgacttctggatctgctgcgacctatgcgagacatggttccacggcaagtgtgttaagatcaccccagcttaagcggaccacatctagcagtataagtgcccctcctgccgggaagcatgagggccaggtttgatccacgatccaggagcctttgacagagctgaagctgact

SEQ ID NO: 271506 - DNA, 502 bp, Zea mays
ctcatcggaaggcccgcgactgcggctgcgcctgcgcccgaccaaacgtaggagacccatctcctctcttttctttccaagaaaagtcttctcttctctgtctcagcgccgacgcttcccaactccttccaatcgattcctcgccgtcctcgtgtgcaatccccagctctcctcgcccctccctcccaaactccagcggccccccctgaccaagctccggggacggatggacggaggagccggctttccgggcacgcagccggtctcccgctcgccggaggacgtcttccgggactaccgcgcgcgccaggccggcctgatcagggcgctcaccaccgatgtggagaagttctacgtgatgtgcgacccagagaaggagaacttatgtttatatggacttcctaatgagacatgggaagtaaacttgcctgctgaggaggttcctcctgaactcccagaccagttctcggaataaattttggtcgtgatgggatgaatgaaa

SEQ ID NO: 271507 - DNA, 476 bp, Zea mays
ctggatctgctgcgacttatgcgagacatggttccacggcaagtgtgtcaagatcaccccaaataaagcggagcacatcaagcagtataagtgcccctcgtgcacaggaagcaagaagggccaaggctggatcctatctatctacgagttagatttgaatggcggccaatgctccaagaaccgaggagcctttcacaaaagttgtaaaatgaatcttccgggtagggcagctaatagatttgaatacttcgtgtggatactgtcggcattggggctcgagatgcccctaaatatagtgtcagtactgatcaactgttaactgttgtagtttgtggggcccccaggcatctatgttctgtagtctactgtgtggtggtttagataccgtctatgccatttgtgatgaaccagtcgttttaaagttagatcccagtaatttccctactatacatttaaaaaaaaaaaaagatcaattc

SEQ ID NO: 271508 - DNA, 507 bp, Zea mays
gatcgccattgcgagagctttgcttatgaacccacgagtgcttctcctggacgaagccaccagtgccctggatgctgaaagcgaatatcttgtacaggatgcaatggactccttgatgaaagggaggactgtccttgtgatagcccaccggctctcgaccgtcaagagcgccgacaccgtcgccgtcatctccgacggcctaatcgtggagagcggcacgcacgacgaactcctggaccgcgacggcatatacacggccttggtgaagaggcagctgcaggggccgaagtttgaggccaccagcagcatcagcgaggcctccgaaattgaagcggaacccagcagtaatgggcaatagcggccccgattattaggaagaccacagttgatttgaatccacccaagtgtatgtaaccctgatgttgacgtatgccactgcgaatcacgcaaacccattggatatcacatgatgctacggttgttgtaggagtaatttcccccttggtt

SEQ ID NO: 271509 - DNA, 573 bp, Zea mays
  unsure (1)..(573): unsure at all n locations
aaatttcaccggcccggtggtccagtttccacgtaacccctcgctcttcttcagacgtccatcctgccccgttctcctctcctcttcccccaaatctgcgtgcgccgcggcaaccctagcccccgcgatccgctcgccggagggaaggagggagccccgccggcgtccatggaggtgaagctgtggaacgacaagcgcgagcgggagctcctggagagctacgcggacctgtacgcgatcatcaaggtcacggagaagctggaacgggcctacgtccgcgacctcgtctcagccgccgactacgaggcggagtgcctcaagctcatctcccagttcaactccctctcctcctcgctcgccggcaccgtcgccgtcccgcgcttcgtccaggcgtaccgtctcgattgccccgccgcgctcaaccgcctcctccagtcgggcgtcccggccaccgtcgagctccgcgccgcgtcctgctcatccgcgccggccgccacctccgcctccgccgcagccatcgtgcactctcgnagaccttcatcaccgccatggacgcggtcaagctcaacatgc

SEQ ID NO: 271510 - DNA, 1149 bp, Zea mays
cagacatatttgtctctgatggtgccaaatgtgacatatctcgcttgcaggtcctttttggatctaatgtgacaattgcggtccaagatccatcataccctgcatatgttgattcaagtgttatcatggggcaaactgacttatatcagcaagacgttcagaagtatggaaacattgagtacatgagatgcggtccagaaaatggattttttcctgatctgtcaactgtccctaggacagatattattttcttttgttcacccaacaatcctactggtgctgctgcatctcgggaccaactaaccaaattagtaaaatttgcaaaggacaacgggtccatcatagtctatgattctgcttatgcaatgtacatatcagatgacagcccaaagtctatctttgaaattcctggagcaaaggaggttgctattgagacagcctcattctcgaagtacgctgggttcacaggtgtccgtctaggttggactgttgtccccaaggagctccttttctcggatggacatccagttgctaaagatttcaatcgcatagtttgcacttgcttcaatggtgcatcaaacattgcgcaactggtggtttagcctgcctctctccagacggtctaaaggctatgcaagatgttgttggcttctacaaggagaacactgaaataatcgttgagacatttacatcactcggattcaacgtgtatggcgccaagaacgctccatacgtatgggtgcacttccctggccgcaattcgtgggatgtgttcgctgagatcctggagaaggccaatgtggtcactactcctggcactggatttggaccgggtggcgaaggctttgtgagggtcagcgcgttcgggcacagagagaacatcattgaagccgcaaggaggttaaagcagctgtataagtgagcaccgatgcagcttctgtgccctcctagacagatgtatcaataagaacacatcagggcaccaaaaatcgcttggtgaagctgccagaagatgttagattttgaactttttttttttaattctcgtgcggtgtctacattcaaaccatttcgaactctagacaatgcttgttgtaatcctgagacccttcattcactggtgaagttgtgattgtcttgtctgtgttc

SEQ ID NO: 271511 - DNA, 966 bp, Zea mays
gttgtccccagccaacccaacccagcgcaatcccaaacgaatccagccccacctcagccgctgcgcggacctccgaatcccagcgccggtgcgcgcagggcaccgcagggcgcggcgcggccatggacatggacagcgtggagtgcctctccctcccggacgctgccatggacgtggacgacatcgaaggccgcccgcaccacggccatctcggcctcccgctccaccccgcccacctcccatcctcaggtgccggccgcgcgttccccaaggtgaatgccgggggcgccggggcgggcccggctgtagcgggagcggcgggcgcagcaggagcaggcggggggccgccggcgaccagcgtgcacgagctgctcgagtgccccgtctgcaccaactccatgttcccgcccatccatcagtgtcaaaatggacatactttgtgttcgacatgcaaggccagggtgcacaaccggtgccctacatgcagacaagagcttggtgatatcaggtgcttagcattggaaaaagtagcagagtcacttgagcttccatgtaagtactgctctttaggttgcccagagatcttcccgtactacagcaagataaagcatgaagcacagtgcagcttcaggccatataactgcccctatgctggctctgaatgtgctgtggctggtgatattccattccttgttgcacatttgagggatgatcacaaagttgatatgcacagtggctgcacgttcaaccatagatacgtcaaatccaacccgcgagaggttgaaaatgccacctggatgctaacagtaagattaaactagctctgaattattctttatctgctactattttatatgtacggtgtatgaactaattactggtcctaaacaccatatattaaaagtggagggattatctatttttctattgctgatcttatgaaccatggttaacatgtaaaatatg

SEQ ID NO: 271512 - DNA, 942 bp, Zea mays
ttctttagggtgcacaacaggtgccctacatgcagacaagagcttggtgatatcaggtgcttagcattggaaaaagtagcagagtcacttgagcttccctgtaagtactgctctttagggtgcccagagatcttcccatactacagcaagataaagcacgaagcacagtgcagcttcaggccatatacctgcccctatgctggttctgaatgtgctgtggctggtgatattccattccttgttgcacatttgagggatgatcacaaagtcgatatgcacagcggctgcacgttcaaccatagatatgtcaagtccaacccgcgagaggttgaaaacgccacctggatgcttacggtattccattgttttgggcagtacttctgcctgcacttcgaggcattccagctcggaatggctccagtctacatggctttcctccggttcatgggtgatgagaatgatgcgaggaactacacatatagcctagaggttggtggtaatgggaggaaaatggtgtgggaaggtactcctagaagcatccgtgacagccaccgcaaggtccgtgacagccatgatggcctcatcatccagaggaatatggcgctgttcttctctggtggtgacaggaaggagctgaagctgagggtgactgggcggatctggaaagagcagacgaaccccgatggagcctgcattcctaacctttgcagctgagcaagggagacgattgaaaagaagaagaaaaaaaagaaagaaaatattgtgttatttggctggcttttttaaaaaattgtcatgctatgttttcattatagcctgctgttaaaatattgtaccagtatgtagggtgtaaaatgctcttgtaaagtaattgtgtatatcgaattcatttacaagttgtaccaccaatccctgtgttatgttgatgtgttgtttgagttc

SEQ ID NO: 271513 - DNA, 372 bp, Zea mays
gccatgatggcctcatcatccagaggaacatggcgctgttcttctcgggcggtgacaggaaggagctgaagctgagggtgactgggcggatctggaaggagcagaccaacccggacggggcctgcattcctaacctttgcagctgagcaagggagacgtttggaaagcaaaaaagaaagaaaatacggtgctgtttggctggcttgtctcaaaattgccacgttatgctttcatcatagtgtctgccgttgaaatgttgtagtagtaaaatcgtagggtgtaaaatgttttcttgtaaagtcattgtgtataccaaccaaattcaagaaagcttacaagttggcccataaatgcatgtgctacgttcttgtg

SEQ ID NO: 271514 - DNA, 635 bp, Zea mays
cggacgcgtggctctcctgtgatttcagattggttctagagacatgggcctaaaggtgtttcattggttgaatcggaggatgcatcctaatactgagtactgcagcatccatggtagcaaagccatggaggacaaggactctgtgcctcatagtgtggttgagaaagatactgaagcccttctgctccatgatgtgcttcttaatggtatacttgcaattggcacacttggccatcacgtggactcactttgccctgtggcttgcattgaagaagatgatctctttatcatggatgatgagaaagcaattgtggaagagagagatgatgaggaacccaggaatgatcaggtgaaagaagatgttgcattggaaacagagccatgtgaaccagtatggcctattgttgagcctgctaagatgcattcattgtcaatgaaagaagacaactttacatgctttgtagcagaagaaatcctgatacgtgaggtggaagatgggggaggtgctaatatccaggaacgaccacttctgatgttagaaaaggtggagaaagtaagaactacacttgctgatttatttgcagcagaagtattctcatcaagttctccaagggagtatagttgccaggatatca

SEQ ID NO: 271515 - DNA, 988 bp, Zea mays
aagggccttttacctccaaaggagttaatggctgtggatgggggtccaaatttggctcagtacctagtcaaattctggctcaagggttttgccaagttgggccctgcatttcaaagaggcgatcgtaggtcttattctacgtgctacgggatttgataactcaacatggatttaccttgctcctggcaagctctttggtgggaaacacttcatgaagccattcaaggctatgtttccacgtcttaaaaaccatagtatgatcagaagtggaaagctggaagaaaatatccgagggctagcagggtcagcagttgattacatggtctgtctcctgtcggacatttttatatatgatggtccgagcaacttcgcagacaatctcatgggtcatcgtctatactatggtttccgaaccacgatcacaccaaacaagaaggcccttgctcggatattcatggacagggaggaagggcacacatctgcatttgaggagagggtcaggcaggtcatgctcacccattttggcgccccccacaagcgcatccatccagagtctttctacacaaacccatggccagagtgcttctgccagacgaaagctaggaatcatgctgaccggtgcccacacaacagtgtaaatgatgtccttgaaagttggttccataataaagaagatgtagaagtggaagctactaatcaaactgactccaccagctaaaccgagagttggctggtggaactgagttatcaaaggtttattgattgagaacagattgtttgtcacagacctgcgaatgacatcattggaggaaggattgatggctccagatctctgtaggcgattatgttcgactcaagatttagttgttgagattcttagtctgggagggtcagaaccagattttggataggtttacattgtcatgtagaggtctgtggaagaataatcatacgaacgtcatgaactatgtggctactacaattggag

SEQ ID NO: 271516 - DNA, 858 bp, Zea mays
cctgcacatgtccacgctgtgtaaaggcttttgatgaggatgcactacttgaggggttcaggtgcaagaaccaagcatgtgatggctttttgctgcccaactcaggtaaaaaggcttatacatgccaaaaatgtggtgcttctagagatgtggaagagataaaaaatatgagaagcgaaatactacagttatcggataaagcatcttcatttctttcatcaggaaataaggctgaagcaggttctatctacaagataatcgaacagttagagagaaatctgtaccatgctttctcaactactttgctgcacacgtgcgaaacactattgaagatatatctggaattacaagattggtggactgcattgacatactgtagattgacaattcctgtttatgaaagagtttatccaccttttcatccgatgattggattacaattctatacttgtggaaagcttgaatggttgcttgagttcacagaggatgcactaaaatctttaaccagagcagcagatatacttaaagtaacacatggcgtaaaatcccagttcatgaaagagctctttggcaagttagaggaagcaagagctgaagtttcgtttagactatcctccagacatggacatgatgagtaattttcataactgcaggccagttatgatggaaaataatatattgaaattatgcttctactgttgagatcatatttgaaggtacgataaaaaatgtggagactttgtaggcaaagaattaacactgttgtaaaacgattatgtgctgacacaaaataggccctaatttgttgtataaaaaattcaattttggattaattgtatatcatgtggtaggttgaac

SEQ ID NO: 271517 - DNA, 789 bp, Zea mays
  unsure (1)..(789): unsure at all n locations
gtcctcctgcacgcggggttcggtggcagtgagcgcatcgacggagagacgccggagactgtggcgctgatggagaagctgtggggggtcgtgtgcctcgaggcgacggacggcctggacgacccgcggataaatccgttggctgccgccgcggcgccgagcctgcggaacctgccgtgtgagagggtgctcgtctgcgcggcagagttggacttcctgcggccgaggaacagggcgtactacgaggccctcgcggcaagctggcggagcggcacggtggagtggttcgagtcgaagggcaaggagcacgtcttcttcctctacaaccccggctgcggcgaggccgtggagctcatggatcgactggtcgcgttctttgctgggaactgaaattcgtcatgtgtggatgtgaccgcgaaccacagtccccatccagtgcagtgagacggatggatcaaacgaagatgcagctcatcgctgaatcgaatgattgagctgggtccaggaaaagaaaactaaaagtgactagaataattgagatcggagccttggattgatcagtttgtgctatcaatttactgcacgggtcagcgtctcttgttttctttttcatcgagaataatatactagtaggaccgaaactatctcagcatccgaaagtatcagcttatgtcgatcctttcgtgtaggcgtttttttcctttgcatatattattgtataactcttctgtgtcaatacatgtccaattaatttacaggctcaaaaaaaaaaaaaaaaaangtaattaa

SEQ ID NO: 271518 - DNA, 673 bp, Zea mays
gtatggagatggcattgatacgttacatccgcatctctctgttgaaatcagatcagcaacagactcttctagagtagaagctgtacttcctcttcctctttcatactactttgaagtccgagatttgcccaagggcaagcatcttgttcagcttcgatctggccttccatcacatacacataggtttgaatcggagttagtcgaagtagatctggaaaaggatccccaaatccatgttggtcccctcaaatataaaactgaggagcgtcatcaaaagcaggaactgaccccagcaccagtttttccgcttattgttggagtttctgtggttgcactggtgatcagtatgccaaggttaaatgacttataccagagcgctgtagggatgacttctctgggttcagggatggcaccgaccaaaaaggagccacgcaagaatatattaagaaagagagtgtaaatggcatattagcttagccttaggggtcgagaaatgagacatgacaaattgagcaatttcaacagtggaatagcttctggtttccccctcgggtaattttgccgacgaaaaggaatgccagttttgttgtacgatagcactatgcacagtttttgaagccttagattgtgccgttttggagttgttggctatgaatgaactttctcaccctta

SEQ ID NO: 271519 - DNA, 579 bp, Zea mays
atcaggcagcacctagctagcagcagccaatgacgaagccttcgcaggtgctgttggcggcgctcgccgcctgggcggtggtcctgctgctgctgtgcgccgccgcgccgcggagcgccgacgcggcgacggcgtgcgacgccacgcagctgacgccgtgcgccggcgccatcatcatcgggaggtcgcccagcgcggcgtgatgcagtaggctcaaggagcagcagccgtgcctgtgcacgtgcgcgcgcgaccccaatcttcagcgctacgtcaactcgcccaacggcaagaaggccatggccgcgtgcaaggtgcccgtgccgtcgtgctagttaacttctgtttgcgccgccgccgcgtacgtgtcgtgtcgtgcctgtgtcagtagcagcaaggcccactggacagggacagagtatggcgtcactttctgtttccgtacatacgtacctggatcgtgccgtgtatgcgtgttccctggtggtactcgatccgctgcctgttgtgtctaccgagctctttggacagctacgcgtgcgtatgaataaatgatataccagatcgtttgtgctgaga

SEQ ID NO: 271520 - DNA, 626 bp, Zea mays
tgattagtctgcaaaatggatgtcctgtggaaacatggtacataatatgacaccgtttgataacactgaggcattacagaagaaccctatttccgttcagtttttgcttcgtgctggcaatatcagaatccaggcctcatctttcagtgatggttctgtctgcaatatggactatgtatccaaatccaagtccccgcttcagggaaaacctccttggtgaaacatcatctaatatgatatgaattctggtagacagatacagatatatcgatgcattattgtatcattttttctagtttcaaggaatcataattattttctatttagaaatctttggtttgcatttgcccaatttaagctcaaattctggcttgtgcacttattaagttgcttctgaatcttgcagaagcatatctacagagaggagtcaccaagcccattggacttccgatacgcagctttttctaatagaatggaaaacgaattgtactggaattgtttgtgtactttggctcattcgtccgaccgtatctttgtaatcagtgagaatggcaagcaaatgtccatgacatctattgttattgtaaaaacatgtgttataaccctgattctcagattacatttat

SEQ ID NO: 271521 - DNA, 845 bp, Zea mays
atctgctctcctgcaggagttggaagctcttcgcagttcaggcgccaagagtatcgtgtttagccagtggactgcttttttagatctgttgcaaattccactttctaggaataatttctcatttgctaggctggatgggacgttgaatcttcagcaaagggagaaagttataaaggagttctcagaggacaaaggcattttggttctgcttatgtctctgaaggctggaggtgttggaatcaatcttactgccgcttctaatgcatttgtcatggacccttggtggaatcctgctgtggaagaacaagctgtcatgcgcatccatcgaattggtcaaacgaagactgtttctatcagaagattcatcgtgaagggcactgtcgaagaacgaatggaggctgtgcaggctcgaaagcagcgaatgatttctggagctttgactgaccaagaagtccgcactgcacgtatagaagaactgaagatgcttttctcctgagactacaaaagggctgttgtgcatcggatggtcggcaattcggcatggctaaaacaagatggctggtagccagaatgttggaaggtaagacgagggtaggaaattgcacgcccaaatatcttggcgtttagctgctgttgtgcgcacgatttgtacatcatgaatggttaatggctgacaagagtccaagacgcttcattgagtgaaaatcgaaagcatcatctcaaaattgaatatttctgtttgggttttgtataagtagataaactgaacatttgcagtaatacgaaggcagctacctgctcgatcattaatttaacaataaataaatttggtaaggtggtcaagt

SEQ ID NO: 271522 - DNA, 423 bp, Zea mays
  unsure (1)..(423): unsure at all n locations
gtgatacgtttcttgggctggtgctgtaaagtggtgnctgtgtctttgtagcgtgtacctgtgcaaactacaagatgccctcacctggatgtaaagagagaccctgatgctttgtccaggcaaccatgttcatccataccatgtagtagtaggagtattagggggtgtttgggaacaaagtttttctgcagttttggaagaatactgcagtattctcaaatactgcagtattatatacataatggtgtttggtaagctggctaaaatctatgttttcaaaactgtagtattacaaatactatagttgttttaaggtattctaaacttaggtctggacctcagttttcaaaactgcggtattgtaaactgcggtattgtcatgactaaagtatactgtagtatttcaaaaactgtggttttcaa

SEQ ID NO: 271523 - DNA, 720 bp, Zea mays
gactggtggagcgtgggaatcctgctgtttgaaatgcttacaggcaagcccccatttgttgggaatagggagaaagttcagcagaagattataaaagacaaactgaagcttccttcatttctgtctagtgaagctcattccctcctgagaggcctgctacacaaggaacccaacaagcggctgggcagctgccccggaggcagcaacgagataaaaaaccacaagtggttcaagccaatcaactggaggaagctggaggcccggcagatccagccgagctttcggccaaacgtcgccgggcttacctgtattgccaacttcgacgagtgctggacgaagacgcccgtgctggactctccggtaagcacccccgctggtggcgggcacagcaacttcgcggggttcacctacgtcaggcccgcgccgatccttgaggaggtgaacgcatccggctctaggctcaaggactaaggatgtttagcccattgaagatgtgcttaaaattttgatcgagtgacatgtatggaaacttagggggtgtttgggaacaaagtttttctgcagttttggaagaatactgcagtattctcaaatactgcagtattatatacataatggtgtttggcaagctgggtaaaatctctgttttcaaaactgaagtattgcaaatactatagttgttttaaggcattctaaacttagctctggaccttagttttc

SEQ ID NO: 271524 - DNA, 260 bp, Zea mays
cagagcagcagtctagggggtgtttgggaacaaagtttttctgcagttttggaagaatacaaatactgcagtattctcaaatactgcagtattctcaaatactgcagtattatatacataatggtgtttggcaagctgggtaaaatctatgttttcaaaactgaagtattgcaaatactatagttgttttaaggcattctaaacttagctctggacctcagttttcaaaactgcggtattataaactacggtattgtcat

SEQ ID NO: 271525 - DNA, 526 bp, Zea mays
atgcgcaccaaagtttcttcttcaaacgagggcggcgttgctgcagggtttgccgttttggacagcgttctcctgactgatgagtgagacagcagcgaggtggcagagctatgggtgacacctgacctgcattagtgacagtgcccacagtcaactcaaacgatgacaatatcaactgcaatcgtaggggaaactatgaaattgcttacagaattgcggacagtcggagaagatggcagtgttacgttatgatatagtttcatgtttgtatgctggttgaaaatgtagggaaactcttgttttcactagaaaggaacccctggagggggggagtaacggtgtagaaggtttatgttgtcacagttggcatgcattcatataggaatagctagctgatggcaccgttatgccaacacagttataacaaatatcaattgtaaattttatgattggttatcgactaagcaaaacaattttataagaaaaaaaaaaaaaaaagggcggctgctcgcgatctagaactagt

SEQ ID NO: 271526 - DNA, 373 bp, Zea mays
cggacgcgtggggaaaaacatcaggtcagactaactttctccgggcatggcccgtacccttcacttgccgcctcccttatccaattgtgattcaggaatctgaagatggaagctggcatgtaccaacaacaacaggcgatgatattgaaaagccacggcagtggttgtgcactactagaaaatctttgaggtagatgtgatttaattttggcccagtcaagttgacacagaatggtgccaaggtgccaaccttggtgggaactgggaagggtggtggcgtgacaaaccctgaaaccagcaaagcttaaatgcagcaacttgttggcccgaacgaaagagagctgattggagtacacgtgatgaatatgagcag

SEQ ID NO: 271527 - DNA, 973 bp, Zea mays
agggcttctccggctcgcacgacggcgccgtcaccgtcagcctgggcccctccggcgcgctgggctactcggcggccaaccagagccccctcgtgccaaggttgtttggtgctgggaatgacatcttctgcttgttccaagggcacattgagaacattgccaacctgaagcagcattatggcctgagcaagactgcaaatgaggtgactatcctcatagaggcctacaggaccctgagggacaggggccctgtcccagccagccaggttgtgagagaccttagtgggaagttcgcattcatcctgtatgacaccctgtcgaagtccacctttgttgctgctgacgctgatggtagcatccctttcttctggggcgttgactacgaaaaccaccttgtgttctctgacgatgttgggatcctcaagacaggctgcggcaactcgtacgccccatttcctaaaggttgcttctacaccacctccggtgggctgcagagcttcgagcacccgttgcacgaggtcaaagcggtgccacgcgtggacagccaaggccagatgtgcggctccatcttcaaggtcgacagcgagagcaagaagaagcaggacgctagcatcccccgcgtcggcagtgctgccgactggtccaaccagttctgaccatcttcttgccatccattgtcccggctagtacgaggtgcagagctgtgtatctgatgaatccatgagacgatttctgctacgtttcttgcacgcttgtcgaacactgtgagactcacatcgcgctcatctacgctacgtgtaactgatactaatgatacggagtgttccaggtggtggtagatgtactgcagaatctatctcccatgtttcaataaacctgaataaggtgctcggtttggatctatgcatttctgattcaaaaaaaaaaaaaaaaaaaaaaaaaaaaaaaagggcggcagctcgcgatctagaac

SEQ ID NO: 271528 - DNA, 524 bp, Zea mays
cccacgcgtccgcccacgcgtccgccacgcgtccgcggacggtgggatcgcgctcatctacgctacgtgtaactgatactaatgatacggagtgttccaggtggtggtagatgtactgcagaatctatctcccatgtttcaataaacctgaataaggtgctcggtttggatctatgcaaaagaagatggtcagaactggttggaccagtcggcagcactgccgacgcgggggatgctagcgtcctgcttcttcttgctctcgctgtcgaccttgaagatggagccgcacatctggccttggctgtccacgcgtggcaccgccttgacctcgtgcaacgggtgctcgaagctctgcagcccaccggaggtggtgtagaagcaacctttaggaaatggagcgtacgagttgccgcagcctgtcttgaggatcccaacatcgtcagagaacacaaggtggttttcgtagtcaacgccccagaagaaagggatgctaccatcagcgtcagcagcaataaaggtagact

SEQ ID NO: 271529 - DNA, 431 bp, Zea mays
ggaagagagccttcaagtgttgacctcgtgcctgaattcctccagcacggacgcctccctcgccttcatcggcttcgcggcgaacttgggccagtgggagctggtggaggccgccatcagcagcgtggcgcatctgtaccccaggctgcgagactccggtcggttggaccagctcgatgaggacgtgctcaacatgctgcggacagagcatgtcaggtatttgcagcaccccagtgcaagtaactgaatccttaatgtcatggagggctttttttccccgtccactggtggtcgcataccggtcctgttgtgtggtggtgtatgcccagctgttgcgttaaaaaaaaactgtacagccccttccgttgaagcttatggcgtcatgaacggggctcatctccgttgaaacaggtcctctctccgttcttttt

SEQ ID NO: 271530 - DNA, 219 bp, Zea mays
ctcaactacgaagttctatcgtctctagcttgatgggggtttttttatgagggtgcggttggataagcaaatagcttggtggcttggcgttcgattgttatattgagtgacaactgagatttgaaggcatcttcgagacacttttttgaaggcagtcaaggctgatgaatgacaagctatttgttgttaaaaaaaaaaaatatataaaatataaaataa

SEQ ID NO: 271531 - DNA, 676 bp, Zea mays
cggacgcgtgggcggacgcgtggggtgccaattgcgtggtttttgccgaggaagttgtttactggttaatcttcagctaggatggtgggcgcgcctccgcaaggaccacaatgcctgttctggctacgcgctgatgaacaatgaaaatgaaccactgttacctgcaacagcatcagcagcagcatgtgcaacccaaaaggagccgtattccccagtagaaattttgtactggacagaggcacggttccaaaaggttcggccctaaaaattgctctgcaatgtcagtggtccagcgtagatgatgatgatcgcttctaacatagtctataaaaaatgcatactggagatttggtactagataacaagaggaccttgagtaccgagttttttccggtgaaagattgatgggcgatgccacagcctgaagacgaagaggatgtaaagaaaaaaactcgccaactaagggcttgttcggttattcctatcccatatggattggatgagattggaaaaaattgtgaaagattttgacttgtttgggattgaaacccatccaatcccacccaatccacatggattgagagcaaaacgaacaagccctaagaattgatgatgttgtagtacaaattccaggccttcggttgattttctaagagttagtttggttaattttcta

SEQ ID NO: 271532 - DNA, 358 bp, Zea mays
gagccggtccaccaatctcggtgcggcggcggtgtctgtagcctgctgtacgtgtacgccgggggtatacgtagcgtgcacgctcgccttcgcattcagaattcagatacgtgcagtatacacacacgcacgcacacacaacacgctgtgtgcaccggatctaggttagctaggaatgggaatttgttgattcgttggaggccttcctgccacgcgcgcacggcacggtactcgtacagacagtcatacggttgtgtcgttttgtagttgtagcaacggtccccggtaacgcctgtggggaaaggccgtataccgtatatatagtctgacaaagtcaataaagctgaaaagatcgcgt

SEQ ID NO: 271533 - DNA, 660 bp, Zea mays
ctcaaaataaatgtaaaaagatgtgtacgcttggccatcaagctaaggaagaagtacttgtacaagtcattgaaaggaggctctagtgatgataaagaaagctgaagaacctgcacttcccttgtagaaaaaactagatatttcatgcattgctatctaggtgtgctggatcagtattgacctgaagtatggtacatgtccaagatccggcattattcaggattgcaaggcaatctgtacatattatacttgaaaacaacagatgaagctgtggaattaaagaaaagaaatcaagtccaccgaatggttggtggtgtcattgttttttttattcccatttggcagggtatcatgtcctcaattactgtatttatcgatatcgagggtttgacgatagagtggcttgtgcatggcatgcctaccacgcctataaaagaatgaaaagtgaaagtgtctaggcgtctagctcctagttgagttttggtgattaatagtaatataagattattgaattattatgactaaagtgtgttcgtagaaagaatatgagttaggtcacgataatatagattgattggcttatatggtctttgtgcctaatcaattgttggattttaacggttgaacggaaaggttaaatatttgctagtttctagtgtc

SEQ ID NO: 271534 - DNA, 489 bp, Zea mays
tgtaaaaagatgtgtacgcttggccatcaagctaaggaagaagtacttgtacaaggtggtttctgagtgttctaccttcatgtttgaagcacagtcattgaaaggaggctctagtgatgataaagaaagctgaagaacctgcacttcccttgtagaaaaaaactagatatttctccatcatgcattgctatctaggtgtgctggatcaggattgacctgaagatccggcattattcacgattgcaaggcaatctgtacatattatacttgaaaacaacagatgaagctgtggaattaaagaaaagatatcaagtccaccgaatggttgtatttctggtggtgtcattgcttttttattcccatttggcagggtatcatgtcctcacctactgtatttatcgatatcgagggtttgacggtagagtggctagtgcatggcatgcctaccacgcctataaaagaatgaaaagtgaaagtgtctaggcgtct

SEQ ID NO: 271535 - DNA, 422 bp, Zea mays
cgaagctgaagaaactgcacgatgatttggaatagcagccacattcttggctcttaaaactcgacggtccattccttttttaaaaggaaccgcacataataaagctagttcctggcagtctcatgcaaaaatcaccaagcaggatggtcattctttttgttctgactggcggctgcagagaaaattgtatcctcctgttgaaagatattcatttatacagttaagtcccagcacaaccgatcgttaggttaggaattctgtccgaaatggcaacttgcatttcaaacgtctgccatgaaaatgagaataaattcggcgggctctacagatttttcatctattgtctgaacaaaagtataggcatcaaataaagtatctgggtaagtttatactatttgaataagaatcagctggatttgttt

SEQ ID NO: 271536 - DNA, 544 bp, Zea mays
gcatcagctgcggagataaaacgcgcctacaaaaagctggcgttgcagtggcatccagataaaaacgtggatcaccgggagaaagcagaaaacatgtttcgagaaattgctgctgcttatgaggtgcttggtgatgaagacaaacgtgtaaggtatgaccgtggagaggatgtggaggagatgaatatgggaggcgggggtggcttcaatccttttgggggaggcggccagcagtacacgtttcaatacgacggtggcttccccggcggcggcttccctggaggtggcggctttcagttcaactttggataaactgtgccatgcaccatgacattttcttggcactggaattgttttaggaattcttaacggcagctggtagctattcttaggcaggctgagactgttctcctatgttacataataatgacaagtgttgcgattttttccttcatcatttgtttcctgcttacatacacacgcacacattgtctctctgatacatcagttgaatgtaagaatggaaataaagttactttttttt

SEQ ID NO: 271537 - DNA, 919 bp, Zea mays
  unsure (1)..(919): unsure at all n locations
cgcctgagccaatcattcatgganatttgtcgccanaaaacatcattcgggacgatgaaggacaacttaaggtggctggttttggatcactgagtttgagtacagtttctgaagaggaagtgcaaatggctcagccagttacaaaatttgacaatgtatacatcgctcccgaggtctacaaaaacgaaccatttgacagaagtgtagatgtatttgcatttggtctcattctttatgagatgattgaaggagctcctgcttttcacccaaagccacaagaggaagcagctaagatgatttgcttagaggggctgagaccaccattcaagaataaaccgaaatactaccccagtgatgtgaaagagttgatacaagaatgctgggatccgatgccttccgtcaggccaacattcgcggagataattgtgcgcctgaacaagatacatgcgagctgtgctaagcagggtagctggagagacaccttcaagcttccatggaaacaaactggagagagataattgtaaagccccgcgaggctgccgtgtcaagatttcgccccttcccttcagcaagtgtgagtaaacacgagtcaagaaacgtacagagttacaaacagaaaggcaaagttcctatttagttcaggtttcagaccagtttgtgctttgtagcctgtataactgtatctaggcttatgccaccggcccaatttctcttgagctatcttcatccaaacgggaacagtgaacagagtattaatcagtattctgaacattcagggcgtgcctattccttttgaactcctacgtgaacgttgtaaaaaaaaaaaaaaaaaaaaaaaaaaaaaaaaaaaaaaaaaaaaaaaaaaataaaaaaaaaaaaaataaaaaaaatttatttatttggtataatataaatttat

SEQ ID NO: 271538 - DNA, 549 bp, Zea mays
gcattgctcataaaaggaattgtagcatcatatggaagaatgacatcactaccaagagttcaagaaaaatttgatgtgcaccttcctcccaatccagccaaaaacaaactgataacaacagctgctcaatctccctctacagtcatgtctagactttccacggcggactcaccaagtgtgagtcgaaagctaacctattctccagcaaaggataaacctgagacaaaccctcttgatgctgataaaaatagagctcctgcaacaacacttgaatcacctacaaaaaggatcaaacaagaccctaagaatcaacaagagtagacgttgtgtgcaacacagtaaggaatacttctgaacatcacgcccaaacttcaacaaacgaagcatattcctcactattttgtctataaatattatgtgtgccttcttctatgaagcaaaccttaccctcgatatgctatatataatatctatgtattgtcatgtaagataaccatctataaaccccccagttgctacaatatattttaagcaaaccttccccccgat

SEQ ID NO: 271539 - DNA, 580 bp, Zea mays
cgaaagcaaattcactgccgatgcactgcaaacgttgacctacaaactgtgctacacgtatgtgcgatgcactcgatcagtctctatagttcccccggcgtactacgcacacctggcggccttccgtgcgcgccactacatggacgatgacctctccgaccaggggtcgtcttcagtggcgagctctcgcatgaaagatggcgctgttccggtgaagcagctgccgaaagtgatggagagtgtcaagcagttcatgttctactgctgaaggtggcctttgcaggaaggaccgtcatcgacacttttgttgccatgaaatgaatcgagtaattctgggttggtgtaactatggtgaagtaaccctgaagggcgggccgcacgacctccaaatcatattttgggcctggcgagtcttctatccaaaactcgtcagaaaatgcctattatttttggtggacttcgtagaagtccaaggcaagtgcctgtgattttgggggtttttgtaggttgcaaccttgtggtcattgcttttgaaattttctgctttgacttgatgcattatatataaagtgagcctctc

SEQ ID NO: 271540 - DNA, 546 bp, Zea mays
gtgctgctccacgtcagggtggacggtcgtgtcaagtggaaggtcggcagctgggtctggggcagctaccacctcttcgtcaactgccccgcgctgctcgccaccagcggcagctccggcgccgccggcggaggcgttttcgccgccagcgccgcgtccggggtcgtccccgccggcgtcaacacccaccgtctccctcaagttcacgcacccggccgactgcaccgtcgacgtgtgagtcgtcgctgcgccacgaacgacgacgaccggcgcgcgcttcgttcgttcgttttcgttcgtactggctagtgcggcgcgggggatcaacgtcgccccctcgctcgcgcggttatcgagcagttagtttttcttttgtagcaaatgttcgttctcatatattttcccttccgaagctgtgcagaaataagttaataagctatacatacatatacatgtgtactagatttgctatatattattcccccatatatttttaatatgaaaaaaaaaaccacgcgtccgcccacgcgtctcgcacaccgtctg

SEQ ID NO: 271541 - DNA, 2023 bp, Zea mays
agaccgcctcgtcgccgacggctacgcggaggcgtccgaccccgagttccgcgacaggctcgccgcccatttcggccggctcccgcacagctatcagctggatatcaatgttgacaaagcatccgatgtcttggtccaccagaacgtcttagcggaagcaaaggatcctgataggcgccctgcattctatgtccgtttcttgaggattgaagatatggattcagcatacgactccgatgcatctgaagaaggggatgatgatggtgatgatctctctgtaaggcaggacacaccatatactcacattcatgagatagttttctccacaatcgataagccaaagctccttagtcagctatctgcattgctatctgacattggattgaacatcagagaagcacatgttttctctacccatgatggctattctcttgatgtttttgttgttgatggctggcctgttcaggatgctgatggtttgcacaaagcactggaagcatccattctaagaaatgagggttcatggtctggttcatctcattcctcagccgctgaaagaacactgcccttccaagttaaaggtggtgagtgggaaatcgacaaacgacttctgaagatgggagggatggttgcttctggttcttgtggggacttgtatcacgggacttaccttggtgaggatgtagctgttaaagttataagagctgagcatttgaataagaatgtttggaacgagtttacgcaagaagtatatatactaagagaagttcaacataaaaatgttgtgcgattcattggtgcatgcacaaaaccaccccaattttgcataattacagaatacatgtctggaggaagcctatatgactttgtgcacaagcagcataatgttctaaacctcaggactttattaaagtttgcagttgatgtatgccgagggatgtgctacttgcatgaaaggggtatcatccatagagacttgaagactgcaaaccttctaatggacaaagatcatgttgtgaaagtggctgattttggtgtagctcggttccaggatcaaggaggtgtcatgacagctgaaactggaacatacagatggatggcacctgaggttataaaccatcaaccctatgataacaaagcatgacttccaaagaagacgcatccaaaggtattggacttgatccagagatgctgggaagcagacccatctgcccggcctgctttcccagacattttagccgaactggaggatcttttggcacaggttcagggaacaccgggaaagacggcccatgctccatcaaataactcgaacacgaaagattaacccccatgcacacatacctgacgtttttctgaattcagtgatctgccatgtttaggattcgagtcgctaattacgaggaatgtagcatatcgattttttttccctggatggttttgcttgtgtacatttgaacaatcttcttggggcctattttttatgggcacctcattattcttatacaaaagaaattgggctcgacgcttgggataccacacagattcaggggaaaaaaacaaagacggttcagcaaaacgtatcaaaatgaggctccctgccacaggttcagcaaacaaattccagaagccaaggcatgggtttattaaagctatttgacttcctgaaaggagccgcgccttcaaagttgcgttccgttatcatttcagtttgtcgaagagctttggtgcaacacacttgtcaacgcatgaccagtagtcgaaatattggccggtgcagtgcttctgcccacttccgtcgctctcgactctcttgacgcatttctcataatcatacaatgtttttacacattgcggcttgcaacgttcctcaaggtaattcttctgatcaacaggttcagcatccgccatggattcgtgattgcaagggggaaatccctagtctcgtgcgcccagtaatgccgatacccgatccagcggttggagggtatggccttatgggttgtctagggttacgaggacg

SEQ ID NO: 271542 - DNA, 811 bp, Zea mays
tatcttgccaattgtgcataattacagaatgcatgggtggaggaagcttatatgactttgtgcacaagcagcataacgttctaaacctcacgactctattgaagtttgcagttgatgtatgccgagggatgtgctacttgcatgaaaggggtatcatccatagagacttaaagactgccaaccttctaatggacaacgatcatgctgtgaaagtggctgattttggcgtactcggttccaggatcaaggaggtgtcatgacagctgaaactggaacatacagatggatggcacctgaggttataaaccatcaaccctatgatagcaaagcagatgttttcagctttgctattgtcatctgggagctgataacgtctaagatcccgtatgaaagcatgacccctctccaagcggctgtaggtgtgagacagggattgcgcccaggacttccaaagaagacgcatccaaaggtattggacttgatgcagagatgctgggaagcagacccatctgcccggcctgctttcccagacattttagccgaactggaggatcttttggcacaggttcagggaacaccgggaaagacggcccatgctccatcaaataactcgaacacgaaagattaacccccatgcacacatacctgacgtttttcctcaatccagtgatttgccacatctaggattcgagttgccaattatgaggaaatttgttttgcttgtgtacattcgaacaatcttcttggggccaattttttatgggcacctcattattcttacacaaaagaaattgggctcgacgcttgggat

SEQ ID NO: 271543 - DNA, 409 bp, Zea mays
cggcaggaggctgctgttcgagcgggatgtcctcgcgcgctgcgccgtggaacgccatagcctgcgagggagccggccgtgcgcaccatactcggagctacaagcagtggcaggccaggagccggcgggcagggctgcggcagctgcctctggacggtgacgttgtccggacgctcagggacaaggtgagcagggaataccacgagggtttcgtgatcaccgaggatcagcagtggcttctccagggatggaaagggagggtgctctacgccatttccacgtggacggcagacgatggattggcagggaattgacgatctttgtttgtgcattgcgcttgtcataaaatattaatttatgttcctgatgtactcactctgttcaaaattttaaactgttctggattttt

SEQ ID NO: 271544 - DNA, 416 bp, Zea mays
atcgagtccaccggaagcatgcccccggaggtgctgttcacagaagccgtgaagattttggaagagaagtgcgcgagggtcatatctgagctatcctgagaggccggcggcactgtgcagcactggagttagagtaaaccagctcaggctgcagtatctgctgtttttgatggagactagtgtgcgccattaaacattttttttgtggtgttggatatttgggtcagcaaatgtaagctgtttatatcatgtaacgcagtgtaatgttagattaaactgtggcaggtgatcgaaatggcagctgtatcaaaggtagacgtcggctgttagtccgcaagcactgtatttttgcgtttaggtaggtgactcggcccaggttacatggaaaatgaaatatttccttcttgagattccac

SEQ ID NO: 271545 - DNA, 650 bp, Zea mays
ttatcttagctatttgatggagaaggtggctcctgatgagacagtgaaggaggaggcgagacatgaaacggtgaaaaagagtccaagcccaatgaagggaaagaaagtggggctgaaggtggaaccagggaagcaaaggtctccctctgtgctgaaggaggtgagggcaacgccgccgactccacagcggtttctatccccatcgccaaaccgcattaagaatgttaaacctggagggatgtccacagcaggctcgccactcaaaaagggaccaaaggagaaggggacacctagtaaggacctggagagcaaaaaagatgctgtgaggcaaccctttggtgttaaggatatgaacaatacaagagcatgtgatgcagaagggagctccagcagcatgttttggttcttgaagccctgcactttccttgtggagtagcgtcataacactacaattttttaacgaacaacacttgatatagttagaatccattacttcattcatttccaaatattctctgttcctatttgatcgattcatttcatgggtactctatccgggaagtaaccaaaaagaatcatgtatagtcatacaggttgaaagtcttctccatatgtataattcgagatatagcaaaacgtggttctgctgc

SEQ ID NO: 271546 - DNA, 513 bp, Zea mays
cgagctcaagaacaccgggaggcatggacggacttgctactgtatattgatctgaaaccgtatgttcccagcgaggtataacggatcaagaagtgcaggggcagggtatttgctctgcaggacgaaccggaggtgccgcgggtctggctgccgttcgatgacgcgccaggcctggcaatggcccgggcgtttggggacttctgcctcaaggattatggtgtcatttcggttccagagttcttccactggtcgctcacagagaaggatcagtttgtcatccttgcatcagatggggtgtgggatgtcctcagcaaccaggaggccgttgacatcgtgtcgtcgtccccaagccgatcaaaggccgcaagatccctcgtcgaggccgcgacccgtgaatggaaaaccaagtacccgacatcgaagatcgatgactgcgcagtggtctgcctgtatctggacggcaaaatggaccacgaacgtgactcgacggcctccatggacaacatgagcctc

SEQ ID NO: 271547 - DNA, 507 bp, Zea mays
ttatcaaagcttcgatttgctgctgctgagggagatcatgtaacattcctgaatatctacaaaggatttcaccagtctggaaaatctagccaatggtgttacaagaacttcttgaattaccaagcactgaagaaagttgtcgacattaggggacaacttctcaggatagtgaagagttttggtatacaactgatatcatgtgacagagatatgcaggcagttagaaaggccattattgctggttcatttactaatgcatgtcatctggaggaatacagccagaacggaatgtataaaacaattaggacattacaagaagtctatattcatccatcttcagttctctttagggtcaatccaaagtgggttgtctaccagtctctcgtctcaactgacaggcattatgatgcggaacgttattgccattgagccatcatggcttacggaagctgcaccacatttttatcagttccgaacattcaatcctgcttcccactaacattactg

SEQ ID NO: 271548 - DNA, 385 bp, Zea mays
ttccccaactcgcttgtcaatgccgacgtggtgctgcaccgggacggcgacctggggaagcacattgccgcgctgcggcggcaccggaggacgtccagcttcgtcaaggagagaggggcgtaaaagcgtagcatatagccttcagggtgaattggcaggcatggcgcgtactagtgtttaggagagaatcaacaaaagaaaaatattaatgtgtacatataattaagctagatcatagatgggtgtggcccaacaaggcatacacaaccatgcctcatttggtttggtggccaaaaaattgttcattttttgttcgtgttagtgataattggtgtaactgtccatggtgacatgattatgctcataaattgatgaacacaccccc

SEQ ID NO: 271549 - DNA, 338 bp, Zea mays
caagaaagcaggcggcagcgaccagcggttccgggtcggtgacagtggaagggcgcttgccaagaatgacgatgcaggcagctctggccacaggtcgccgagcaaggaccgggccgactcccccagagagcagttcccgggggctgcgaacaggggccaggacagggagcgaatggtggccgaggcaaagatgtggggcgagaactggcgggagaagcggcgagctgctcaggggagcctggattctccgaccggaggcgggtagcgtcagtcaccaaagactgtttcgcccgtgcgtgctctgtctcagactgttttttgcctttgtgtggtgagga

SEQ ID NO: 271550 - DNA, 664 bp, Zea mays
cccacgcgtccgcccactcctccgcccgcgtgtaccccgacccccacgcgcatagatgaagactaggtcgcagacgtcgccgaagcctctcaagacggtggcgatggctcccaggccgagcagcaccaagcggaagccgaggcccaagccggcggggaagggcgacccccgcgcacccaagaagccacccaccgccttcttctacttcatggaggattttcgcaagatctataagcaagaaaaaccaagtgtaaaatcaatgcaggaaatagggaaggcatgtggcgaaaaatggaatacaatggcatttgaggtcagcattttctccttgcagcctgatagttgtgttccattagttatttaccaccttatgctgcctgctgatgtaaattgcttgattccacaatggtgatgcgaatttgaccacggtgcactggatatgcagtttggtttttgcctatacttctttttttcctgatcaaccattttatgtgggaaacagtatatagggatcagaaggtctttatattatgctttatttggttaatgtccagtctccagttcaaacttcaaagaacatgagctattgccacccttttattctaatggtgaagaagcgatttcccttgggcccatggcccatttcttgtttaagttctttcac

SEQ ID NO: 271551 - DNA, 661 bp, Zea mays
tcccacgcgtccgcagtcctcgggctccaagccttgcgtaaaccccgacccccacgcgcatagatgaagactaggtcgcagacgtcgccgaagcctctcaagacggtggcgatggctcccaggccgagcagcaccaagcggaagccgaggcccaagccggcggggaagggcgacccccgcgcacccaagaagccacccaccgccttcttctacttcatggaggattttcgcaagatctataagcaagaaaaaccaagtgtaaaatcaatgcaggaaatagggaaggcatgtggcgaaaaatggaatacaatgacatttgaggaaaaggtcaagtattatgatatagctactgagaaacgtgcagaatttgagaaggcgatgattgaatataacaagaaaaaggaaagctgaacatttgtctgttccaaattcccgatggttcactgtaactggatgaatcaatcagctgtatattacagaactttgatttctagtggaatttatagataccactattggaaccgtcagctcacgcagatatgtatcttctgtagtcgacttgcatattttgatgacaccgagtcttttactggtggttttcatctggatataatttgtgtttcgtgctaactgctcgttaaattgctccctatagagttgt

SEQ ID NO: 271552 - DNA, 2083 bp, Zea mays
caggatattagagcaggtggttaattgtaaggatgaccttgcacaattctacctgatggactgcataatccaagtctttccagacgaataccatttacaaacattggaaacattattgaatgcatttccccagcttcagccaagtgttgatatcaaaacagtactctctcaacttatggacagattgtctaactatgctgcctcaagtcctgaactgttaccagagttcttgcaagttgaagcttttgctaagttcagtaatgctattggaaaggtgatagaagcccaacctgacatgccagttgttggagccataactctatatgtatcacttctgacctttactctccgtgtacatcctgatcggcttgattatgttgaccaagtgctgggtgcatgtgtcaagaaactttcaggcaaggcaaaacttgaagatagcagggcaacaaagcaaattgttgcacttcttagtgctcccctggaaaaatatagcaatattgttactgcattagaactttcaaactatcctcgggttatggattatcttgataatgctacaaccaaagtgatggctgtggtaataattcaaagcataatgaaaaacacaacctgcatatctacttctgacaagattgaggcactattcgatttaattaaggggctgataaaggatatggatggagctcaagatgatgagcttgatgaagaagactttaaggaggaacaaaactctgtagcgcgtctcattcacatgctgcacaatgatgatcctgaagagatgctgaagatcttatgtactgtacagaagcatatacttcagggaggccccaagcgtctaactttcactgtgccttcgttagtattctcttctcttaagctggtcaggcgattacaaggccaagatggagatgtcactggggaggatgttcctgcaactccaaagaaaatattccagatattgcatcagactattgaagcactttcttgtgttccttccccagagttagctctgagactatatttgcagtgtgcagaggctgccaatgactgtgatttggaaccagttgcttatgagttctttactcaagcgttcattttatatgaagaagaaatcacggattcaaaggctcagatcactgcaattcacctgataattgggacccttcagcggatgaatatatttggggtggaaaatagagacaccctcactcacaagacaacagggtactcagcaaaacttctcaagaagcctgatcaatgccgagcagtctatgcgtgttcacatcttttttggactgatgaccaagatggtataatggatggtgaaagggttctcctttgtttgaagcgtgccttgagaatcgcaaatgctgctcaacagatggctagtgctacaagggggagcagtggatctgtaaccctatttattgaaattttgaacaagtacttgtacttctttgagaaaggaattccacaaatcacaaacaccgtgattcaagatttgattgaattgattagaacggagaagcaaagtgataactctgtagctgatccatctacagaggcattcttttctagcactttgcggtacattgaatttcagaagcagaaaggtgggagcataggcgaaaaatatgaacagataaagacgagttcatgactcggaactagcgcggcgccacgactggttttgattttgttaagagaattggatcatttgtttgacatggttcagtgaaatagaaaccgtcagttttagtagcatccatctaaaggatgtttacacgagctgttattctcaaatctcacggtctgagcgggtttgctcgcccattggcaacattttcaggtttagtcaggtggcaataagctgtcctttggtgagcacaggtctgtacaggattacttgtgttcgtgattggttctactgctacctgagtttcattgttgtatatttccgcccctcatgcaaagcttatggattttagatctctgtaacattcggagtacatgccttcatttctgagttctgactggacattgatgattgtttcagagcatttgaacattttgtttaaccact

SEQ ID NO: 271553 - DNA, 456 bp, Zea mays
cccacgcgtccgggcgccacgactggtttcgattttgttgagaattgggtcgtttgtttggcatggttcagtgaaatagaaaccataagttttagctcgctccatgtaaaagatgtttatacgagctgttaattctcaaatctcacggtctgagcgggtctgttcgcccattggcaacactttcaggtttagtcaggtggcaataagctgtgtcctttggggagcacaggtctgtacaggattacttgtgttcgggatcagttctaccgctacctgaattcctgcggggtgaaaaaaaaaaaaaaattaaaaaaaaaaaaaaaaaaaaaataataaaaaaataaaaaaaaaatataaagaatatgctttataataaataattcatactttctaactggtacaatttttatatgtttattttctaatttttctaatataaatgggggggctggtttt

SEQ ID NO: 271554 - DNA, 502 bp, Zea mays
gtacacaccggcaggacctaaggtttatcctatgtcgcatcactatgcagttcttggtcttgacagatcacgagcgacaccatatacagatgcagaagtgaagactgcttttagaacaaaagcaatggaagtgcatcctgaccaaaatcaaaatgatagagatgctgcagaagagaagttcaaggaggttgtcaagtcttacgaagcaattaaatcggagagaaaaaacggtgtaagttgatgcaaacttccagtgtggtcggatcatgtggtaaagactgggaccggatcatgcgggaatcagttgtgccttgtatatgtaatcaattgttgccggcagcttgataaaatggttcttctgttgctgttgaggacctgtagcacgagttccatttatgagcttgggcgatgtagatttggataggttcaaaagatgtgctttttgttcatttagcccctaacttgacgtgctcacgtcataaatgccataaactgggaagtg

SEQ ID NO: 271555 - DNA, 377 bp, Zea mays
gccggttacctcgtcgcccgcatgatgctggaggacccatcgacactgatgatgatctccatggaggaggaccgccctgtgaagccgaccatgcggcggtcagcatcatggaatgcctgaatgcgtggatagttgtttctgaaccaaggaaattcagaatcagctgttatacggatttgtgatttgtttggaccacaagagtgcagcctgcagcgttggtgtgatttgttgggaccacaaagttcaacattgattatagttggactctgtcaattaggacagagtttggataccatagaggatcataggagttgcacaagattttgccatgcccttttggtttgtttcagaacaatactcaggatactgttcagttg

SEQ ID NO: 271556 - DNA, 541 bp, Zea mays
  unsure (1)..(541): unsure at all n locations
cccacgcgtccgcccacgcgtccggagagcgagagcangagcanaagcangagcgangagcancgagagcgactgcgaggaggcgttcctgccgcacggcggccggacgccgcagggcggcgtgcagcacagctacggctacgggggcggggcgtacaagcacggggctggcaacctcggcggcttgcgccgctaccagtcgtacgagagccgcgaggatctcggcggcggacgccgctacgagacctaccagagcaccgtccagtacaccggctccccgaccaagaaccgccacgtcctacgctacggcgcgtaggcatatatacgctctgatccagttgcattgcagcacgtgcacctacgtatattcctatgccgcgtcgtgtgactcgtgtcgtataggcaggcggcaccgctacttggtgggccttgtgtttgctggtgcagatcgaaaaatctgacaataagatgtacttaatgccaccttgatataataatgtatgaagacgaaactttgaaaactgttttaaaaaaggaaaaa

SEQ ID NO: 271557 - DNA, 1468 bp, Zea mays
ctccttctttagcgtcccagtcacaacgaagatatggggggacttgatgtgcaagtgatgggcgatatccacctgcttcgctgggctcaaactcagttccatcagcaacaaggaggagcagattacctgtgagcagatcatctccgcctgatgtgtcacccagtgtcaccaaaacatatagtccttcatccatcaggaacaagaagctgtcaccgccttcatatcgcaaagcgcgccaagcaaataattgtaactacaaggttgagatagctgttgctccggatgctacaccaatcaaagtggtgacggaggagaagctgctggaaggaggcaatgtgagaggcagactggaggctaggagggcactcttccaaggcagccaggataggtcggccaagctggctggacacaaagcagggtcacgagttgttccatacgagggtggtggtaatttggaagagatttcagaagttgaaggtagatcggaaaggtatgcagttcagaaagatgagagcttgtcagaaataaggacgcagctccttcagattgaaaatcagcaaagcagtttactggatcttctccagaaatttatggggaagtccgagaacggtatgcattctttggagacaagagtgcatgggctggagatggctttggatgagatctctcgtgatttggccttctcttcgggaaggatgtcaagcagagagcctgatgcaaagacgtgctgcattccgagcccaaaattctggagaaggcacaatggtggtaggtcttcctcaaggttttctgtctcagacgcagcaaacagctcagatgggagcagaacttcttacaagtgggagaggcagaggtttgggcttcagggtgggtttgtcacaaacccattagccgagccgaacatttcatctgcagggaaaacaatggttactcatgaaggcaggaagaaggatataactttacaaaagtgaagggcgggttaggcatgatgaagacattctgttccaagcgtgaactgctcgagtttgctactttgcttattatcatggaggcggctgtagttctcttttccaccgcgacctctttttttttctaaggaacgtacgttgaaatttttggaagcttctgaaagcatggcgtgcgcgtgaactatggatgtatgagtcactccgaagctaaactgtttgagtactatgctaagctgaggagctgcattcacatcatgtggtggagcgcgagggaggcttctttatcggacagcctcacttgtcaccgacgcaatcaggcacccccccaagccgtggactacgctgggtttggctttggcatgagaacgaccgctgtgtttgtcgtaagtcatatcgtaactagagaaacaagtagctttataatcacaatgtatcaccatcctacagagctatggatgcgtcttgtacatatgccggataaagcgcttctatgttcccga

SEQ ID NO: 271558 - DNA, 593 bp, Zea mays
  unsure (1)..(593): unsure at all n locations
ttttcgtttatcacagacgacttctgcccagtgctgagcatgcagcaactgtaccggatcagcacgatgtactgcgacgacaagtttgggaccctgggcattccatcagaagtcgtctccagcatgcggaccaagatgatcgagggctcgtcgagcagcccgtcggcgcacgacgacatcaactcgttcctgctagacgatgacttcagcataccgttctccgtggatgacttcacgaagctgatagtgcacgtcgacgtagcggacatggatttgccaccgctcattcaggagagcagcggcggcggcggcggcggctccaaaatgggacattgaggagtgacaatatgcacgccttttttgtgtgtgttgcggtgatgtgcatagtgcgtggacatattgctctgagaccagggttttgttttttttcttcgtcgactggtcttccatttttctcccacatgactaccaccttgagtgagtagtgcctgtttgggtttgcgcgtgtgtatgattgtacagttctcccctgtggcatataaggtaaggaaaaaaagcccccgtgtttgnaaaaaaaaaaaaaaanngtaagg

SEQ ID NO: 271559 - DNA, 1683 bp, Zea mays
cccacgcgtccgcccacgcgtccgcccacgcgtccgcccacgcgtccgagctaagctgcctccgtccatcggcatggcgactaccactactaccatcctcctcctcctcctcgtcgcagccacagccgtctcggcggccgacctctccgtgtaccacaacgtgcacccgccgtccccgtccccgctcgagtccatcatcgcgctcgcccgcgccgacgacgcgcggctcctcttcctctcatccaaggcggcctcgtccggcggcgtcacctccgctcccgtcgcctccggccagactccgccctcgtacgtcgtccgcgcggggctcggcaccccggtccagcagctgctcctcgcgctcgacaccagcgccgacgccacctggtcgcactgcgcgccgtgcgacacgtgccccgccggcagccgcttcatcccggccagctcctcctcgtacgcctccctcccgtgcgcctccgactggtgcccgctcttcgagggccagccgtgcccggcgaaccaggacgcctcggcgccgctgccggcgtgcgccttctccaagccgttcgcggacacctcgttccaggcgtcgctgggcagcgacacgctgcgcctgggcaaggacgccatcgccggctacgcgttcgggtgcgtgggcgcggtggccgggccgacgaccaacctgccgaagcaggggctcctcggcctcggccggggccccatgtctctgctgtcccagaccgggagcaggtacaacggcgtcttctcctactgcctgcccagctacaggtcctactacttctccggctccctccggctgggcgccgccgggcagcccaggaacgtccggtacacgccgctgctgaccaacccgcaccgcccgtcgctctactacgtgaacgtgacggggctcagcgtggggcggacctgggtgaaggtccccgcggggtccggcgttcgttcgacccggccaccggcgccggcacggggatcgactcgggcacggtgatcacgcggtggacagcgcccgtgtacgcggcgctgcgcgaggagttccggcggcaggtggcggcgcccagcgggtacacgtcgctgggagcgttcgacacgtgcttcaacacggacgaggtggcggcgggcggcgcgccgcccgtgacgctgcacatggacggcggcgtggacctgacgctgccgatggagaacacgctgatccacagcagcgccacgccgctggcgtgcctggccatggccgaggcgccgcagaacgtgaacgccgtcgtgaacgtggtggccaaccttcagcagcagaacgtgcgggtcgtcgtcgacgtcgccggctcgcgcgtcgggttcgcgagggagccctgcaactgagcccctgaatccgtccgtgccctatgcacgggaggaaggaggagacgcgctgcggctgccgcatcggtcggtgtgcagttagttgtcctgttagtctatgctacgttgtctgcactctgcaataacggacgtgacccggggaaaaaaactgtttcgtcacgggtagctagagaatcacgtaaggctcttgttttcgtttgtgtcctataatgtatggctattggcctgtttcgagaggttaaaatttggaggtgctgcatcaaattcgtaaaaaaaaaaaaaaaaaaaaaaaaaagggcggccactcgcgat

SEQ ID NO: 271560 - DNA, 474 bp, Zea mays
tcaagggctcattctctttccggcgctgtgtgcctgcgggctggggcattttactcatttctggtctgaccactgttttctctgagagggttttcttgaacaaaacgaggttcaagcagactgttcccattcacatagcgattggcattcatgtgcttgagcatcgcgttacttgagatataccgtggcgaaaagcagttcttgatgcaaataatcagaactttgaagcataatgacaaaagccagtgatttgaagacacagcgcatttcatagcgtattctctctggaacgcctgatgaaagagagctggtagtatagtgggtgggtaatttggtgtgtatgcaggagatcgggagttaacataagaggggggattaatcggtcagatagataaatcggttgcgtatgggaattgctggatttcttgttgacccaatatttatattacacgtttattgagctagtgtttcaat

SEQ ID NO: 271561 - DNA, 518 bp, Zea mays
  unsure (1)..(518): unsure at all n locations
gccttggcaagtggatgattctagattggtggagttgttcagcgagcatggtaaagtagttgatgccagagttgtctatgaccgagaaactgggcgttcgcggggatttggttttgttactatggcatcgcaggacgaattggatgatgctattgctgcccttgatggacagagtttggatggccgtgccttgcgggtgaatgttgcagaggagcggccacggcgaggtttctaatgaggttgtatcgggtggactgcacgcttgttccatgggttgggagcatcatagcatgttctgatactggtttagacctgccattctctttccttgtgttgctgagcttctatcatcgtgtcttattgtgaagagggaactcttcactaatgttttgttatgtacttgttgtgttcaaaagttcttgtactgntcaaaaaaaaaaaaaaataaatacacctcacatcaattcattggcctccggtacacaacgttcaaaactcaaaaaactggtgggtaacac

SEQ ID NO: 271562 - DNA, 274 bp, Zea mays
aggtttctaataaggttgtatcgggtggactgcacgcttgttccatgggttgggagcatcatagcatgttctgatactggtttagaccttccattctctttccttgtgttgctgagcttctatcatcgtgtcttattgtgaagagggaactcttcactaatgttttgttatgtacttgttgtgttcaaaagttcttgtactgtaggctactgttatgatgcgcctagctcaatttgtcgatgcaattcgaaattttgtctaacatatgttcatg

SEQ ID NO: 271563 - DNA, 1115 bp, Zea mays
cctctgggcccacagcggccagcaaactgcctccgtcctccctgcgggctgtgccgcctcttcttcgcgtcggcgccgccctcctcccttctcttctgctgctgatggaactggatcctcgcctctacgagaacgtctctgtcagcgacaatgatgtccgaaacatagttctatcttatcttatgcacaactgttttaaagagacggcagaggcattcctatctagcaccgggttgaatttacctgtcgactatagtgtggatgtggataagcgtaaagcaattcaatttttaattttgtgctagaagggaatgcccttaaagccatagagctgacagaagaaatggcacctaacttgctagagaatgatatggatctacattttgatcttcttagtctccacttcattgagctagttcgctccaaaaaattcacagaagctcttgactttggccagaaaaaattgacatcatttcagaaggttaccaagtatattgagaaactagaggactttatggccctcctggcttatgaagagccggagaagtcacctatgtttcatctactaagcccagagcacaggcagaatgttgcagagggcttgaatcgggctgtccttgcacatgctaatcttccagcatattcatcgttggagagggtggtccagcaagcgactgtggttagacaatacctacagcaggaagttggcaaggcctttctgagcaagtaaatgtgcaaatggtcacttcttcagaacagggtaaccacctctccaggccatcatgtacatgtacccttgtggagtgcatacacgatgaagtagtttatacagttcaggtgttgttgacaccacttatacagttgcaatggtgttgtactttgaaaaggagggtgctgtatgctgtctgcttccttgatttacattctgttttacttgtctctctgccttcgacatggcgaaagcatgtatgtattgacctgttgagctattctgtgcgttcgttcggtgaactcagttcgagtcggtttgtaattggtctttttttattactaccgccatgtgcagaggctaaaggtccgaactctggatgcgtaacgtaacgggttattctgtc

SEQ ID NO: 271564 - DNA, 422 bp, Zea mays
aggactttatggccctcctggcttatgaagagccggagaagtcacctatgtttcatctactaagcccagagcacaggcagaatgttgcagagggcttgaatcgggctgtccttgcacatgctaatcttccagcatattcatcgttggagagggtggtccagcaagcgactgtggttagacaatacctacagcaggaagttggcaaggattcttacccaccattttctttgaaggcctttctgagcaagtaaatgtgcaaatggtcacttcttcagaacagggtaaccacctctccaggccatcatgtacatgtacccttgtggagtgcatacacgatgaagtagtttatacagttgaggtgttgttgacaccacttatacagttgcaatggtgttgtactttgaaaaggagggtgctgtatg

SEQ ID NO: 271565 - DNA, 503 bp, Zea mays
aggacatctatgcgaaatgcagctagccagctacactgatgtagagatcattcaggcagtttaacctctatactgtatcattttgatttcacggtgatctgcaggggcaagcctgacaaattctgcaaagacctcccattactgccagtttcatgtggcatccctgctcgtaccacttatttgttcttgttacgacctggacttgtactttacgcgggataggaacgaagtacagacctagtgtaagaaggcggtactttttaccctcgtactgcttgtaaattgtaatgtgtagcatatattagagcatgatatcacttctgctgcatatattcgtcagtgtgaccacacaaggaagttgtgcagcagaattttgtcatgtcgatgttgtaagttgaaggatcacattgcttgtaaaatttggcagcatgttgtcttatcctcggatgagtatgttgttgtagaaacttgcatttggcctttgatctgcacactcttgtatg

SEQ ID NO: 271566 - DNA, 613 bp, Zea mays
acgcggcaaccgcgttaccagcgccgttatctccatgaccttcctgtccctgtccaagggtatcaccatcggcggcagcttcttcctctactcgggcatcgccgcggtcgggtgggttttcttcttcacgtgccttccggagacccgcggtcgtacgctggaggagatgggcaagctgttcggcatgccagacacggacatggctgaagcacacaacgccgctgccaaggagaaggcggtggaaatgccggcagtgctcgcaacaccaagtaggaaagtagatggaacgaaaatacaatattcggcggtgctcgggcagataggcaatgattggtgcagcgtcgcttacaagagcagagctcaacccaacacaaacaaaataaggaaaaaaaaactgaagcagcgtggcaagattggcctctgagaatcagagatgtcgtggtgcactagtgctgcaggacagagacggcgtggtccagcaagagacttccgcgagacaggctgccaagtgacagctattagtcattgttgtcagagtcgcgtgtgctttgtcatgatcgatgatgttttcgtccttattttacaagaaaattccctctcaacgaatgtaacc

SEQ ID NO: 271567 - DNA, 376 bp, Zea mays
  unsure (1)..(376): unsure at all n locations
gccgccgtcgcgtgggtcttcttcttcacgtgccttccggagacccgcggccggacgctggaggagatgggcaagctgttcggcatgccggacacggacgacgacatggctgaagcagaggacgctactgcagcaagcaaggagaaggtggcggaagtggaaatgtgcatgccaagtaagatgtaaagcgcggctgcggctacagcgtcttcgtccccgggcagagggcaactggaatagacggacaagattttttttttttttttggagcaaatggtaaccagatgggcaggaataagattggcctacgaggtcggtgactcggtgccgtcgtccanaanaaaaaaaaaaaaaaaaaaaaaaaaaaaaaaaataa

SEQ ID NO: 271568 - DNA, 338 bp, Zea mays
  unsure (1)..(338): unsure at all n locations
cacgcgnncgggcaaagaccgccgcaatgccggcagcggtggcggtgatcgctctccttcttattacgactctacccgtcgggcgcggcgaggagaggcccaccgcggcgcacccgcacgggctccccttcgagagcccgctcgcgctgtctccggccgcttacgacttcttccaccccagcgcgcgcgcccgtcgagctcgcggcgtcgcgccggcgccggcgccggcgctcgcgcctcgcgggcagcagcagctgagagagtccgcggtccgaggaggaacatcgtcggcaagcgtggccaaggccgaccgggaagaagggggcgtggtttttttt

SEQ ID NO: 271569 - DNA, 436 bp, Zea mays
  unsure (1)..(436): unsure at all n locations
acaccaaaccccccccccccaggttgtcagcattgcaaccactgctcaggcgaagatgaagctgtggaggagacttccaggagttccaagactacgacgagttctaggtgtgggttagcggcaacccccagtcggctgcctgtgaaggccgcgttatctacgtttcttttccgcactttgatttattgtaagaactatatggacgtctcagacgtatgatgtaatcgactatttcccttattaatactattttgagcactgtgtgatgatgtccatattatgtacctgctgtgtacgtgaataactgatcctggcacgtacatggttcgcattcggtttgccttctaaaaccgggtgtgacagtttggtgttcgaaaaacaaacaaaaatanaaccanaaaaaggaatgcaacacgaggacttcccaggaggtcac

SEQ ID NO: 271570 - DNA, 456 bp, Zea mays
caaaatctttggtgggctttcctgtataacattgatggactacccattgctgctggagcattgcttccagctacggggacgatactgacaccatcaatagctggagctctgatgggttttagttcggtcggtgtgatggccaactcgttgcttttgagggtgaggctgagctcaaggcggaagcgagaaccactgaaagccatctctgatgaggttgagaaaaattactcatccaaatggagtacctgagtagttcggatcttagaccatgttcacgttcactcattcatatgatttggacacacgcatcaaaggcagttgtcagttgaacaaatgaaacagatgtagtatgcaattgctgaggtcagtcagttcctgtggtttggtagatcttcatggtgtgctataatataataccccctctattccaattcataaattttttgactttttttt

SEQ ID NO: 271571 - DNA, 650 bp, Zea mays
  unsure (1)..(650): unsure at all n locations
aggttcatcgggctagatgttgagcatatcgatgaccggagactttgctgtggcactccgcctgattgcgaatggaaagctcaggcggggaacgtctgcgccgcgtcgttcgactggaggtgcagcggcatatgcaactccgagggaaggatctgggaggtccacaataagtgccctcagggcgagaaggcgctgtggaacgccactttttagcacacccacaaaataaaaaaggaagcagcagcagaagctgctatataatagatcaaaccattttggtttgttgtctgtacattgtcccacggtttgtgtgtacgtaattcattgtaggtagctgcgggtttttttttttggttgttgttgtaacgggcgaaagcggaccaccattttaggtagtgtctgtcagccggtgccggtgaagatgatggagaaggatatggtgtgagcggtgatgtattcttttgtgcggtaaatgtgtggaggtggtcatcttgttgtgccgatctcctgtactgcatgtatggctgccgagatacgtgagaccgacaaaccctttcgtgccataaaagtagagctagtaaataaatctggtaaccgctgtccataaaaaaaacccccaaaaaaaaccaaaaaaaaaaaaaaaaaaanaa

SEQ ID NO: 271572 - DNA, 681 bp, Zea mays
  unsure (1)..(681): unsure at all n locations
gtcagatttgagctgttttcatttgcccccctcctatttgttcatgggtggattctgctgtctccgagactcggaggctgtcgagacgctggcccccaacataagtacaggagaatctgacccagcggcagctgttcctgcggagagcccccatggcatcgaggttggtgttgagttcaagccagtggagcgccccgtggaacctatcaatcttgatgagccagtgaaatgcccgcttcctgagccgtctatactgcacgacgggaggatatggaaggagaaaatgtcttcagtcagcacgagggtgagaacagacttgccggtcgtgaaggaagggtcgcagctggagcctgacggtagcagcgctaggtcacgatctgcagttccaaggcgcgccatactgccctccgtaagcgcgcccgagcacaacatcctagcgctgcttgacgagtgcgacgtctccgggagccgtggctctgctgaatgagctcgagttgggcgtcgccagcccattgtaactaaactgcgtttgccacgagctgatctgagcacagcgaaccttacagtatgtctgaaaagaattggaactacgcaacagatcttttgtctggattgtacccataaatacgagtaaaagcctcatggggnnccnnnannnnaaaaaaanaaaannaaannaaa

SEQ ID NO: 271573 - DNA, 431 bp, Zea mays
ggacaggtcaatcactgctactcctacatcgatcagtgctgtgtagacaagaaaagcgggcagcttcgttcaaccccgagaaagcttggagccagagcagggggggcgaagagacgatggtcgggatcttctccaggttctccgccggcgcccaccgccgctccaagagcgtggccgaggctgtcgagacgctggcccccaacataagtacaggagaatctgacccagcggcagctgttcctgcggagagcccccatggcatcgaggttggtgttgagttcaagccagtggagcgccccgtggaacctatcaatcttgatgagccagtgaaatgcccgcttcctgagccgtctatactgcacgacgggaggatttggagggagaaaatgtcttcagtcagcgcgagggtgagaacagacttgccggtcgtg

SEQ ID NO: 271574 - DNA, 756 bp, Zea mays
ggagctggatttacaccttatgttattactgttcaagctggggaggacgtgtcatgaaggatcatgtcgttttctcagcacggaccgcgtgcagtctgtgttctctcagcaaacggtgccatatcaaatgtgacgcttcgtcagactgctacatcaggcggaactgtaacatatgagggtcggttcgagatactgtcactgtcggggtcattcctcttggtggaggatggtggtcaacgcagtcgaactggagggctcagtgtgtcgttggctggtcccgacggtcgtgtgctgggcggtggagttgcagggctcctcgtagcagcttcgccagttcagatagtactgggaagtttcaattctggaggcaaaaaagaggcaaaaaagcatgctccttcagcacccacaccagcgccactgaaggtcgctcctccgacaacaaccaggatgggacccaacagcagcagccctccttcaagaggaggtacattgagcgagtcatccggtggcgccggaagcccaccaccgccgctgcatcaaggcatggctgctagcagtagcaacgaccagccgccgttcctgtccagcatcatgccatggaaatgatcctcttatgtagtagtataagtcagaagctttgagtagggaggtaaatttgtagctctactgtaggtttaaacctgaattcctgtgctacttaggtgtattgagctgtaacggatgtgatcatttgagagctaccaagtgttgtttagt

SEQ ID NO: 271575 - DNA, 1044 bp, Zea mays
aaaatcaagactccttgtaggaagagtgacacctatagctcgtgatgggcttttgaggacaatttgtggaagctcttcatctcctggcggttatgcttctctagcgcaagctaatacctcccataccaatggagtttctgccccaggtgtcactcctaagggctatgaatctgctgtaccaagcttgtcacttggaaattccgaaagtacaggcgtgaaacaagtaaattctgcaccaagaatgacacctgatggccagaagttcctttcgctgggtattgcgccacgaagcccagcactgcgtgatttagtaaaatgccaggccagttcgacactcgttgccatgcctccagcgggcctgggaaaatcacggtccatgaagatcgagggccatgattctctggcaccgagtgtgaaggagccaaaaggcaatggtggtctagcaccaagtaaaacgccaaagctgcatgaacctgtgatagctgatatgagcatcaagagctgtgattctctagcactgggtatcgcaccaaatggccatacccatgatggtccagcatcaggaagtggggaggccaagaaagagcaggcagcactagtaactggctcgcagagtaaatcatctgtaccaagtcttgacgctagcagccatgttaccggggcagcgagcgcccttgtcgcactatcaactctgcgggagaagggcgggcgttagaggagcagcagcagcagcagtgtagttcccgttggatcagatcctttttctctactgtacatgtttctatgtacaggaatcatccccgtcgactctgatccccagtgcgtacggttgctgttggtggccagtcccctatatgttgcttggcagcaaatgttttggttaataattagtttttataaaaggaatattcacccttgttatgttctctacatgtaaattatctgaggtatacttgcattattatgagtgctataatcttttcttttactacatgctctaaactgtatcgtgtattcaataataaaatgttaatttactccctc

SEQ ID NO: 271576 - DNA, 603 bp, Zea mays
accacaaggcatgaacgtgttgtctctattcactggcatcggaggagccgaggtggctctccataggctcggcatacgcatgaacacagtcgtttcagtagagaagtctgaggtgaacaggactattctgaagagctggtgggatcagacgcagactggtaccttgattgagatcaatgatgtgcagacgctgacagctgataggatcgaggcatatattagacgaattggcggctttgatctcgtgatcggtggaagcccatgcaacaatctcgctgggagcaaccgccaccacagagatggcttggagggcgaacattcttccttgttctaccattattttaggatcttggactccgtcaagtccatcatggagcgcctgtagtttttagaatcttttgatgttctggttcgtagaattgtagctgtctttccctgtgatcaaacttgtgaatgatttgaaggtcgactggtgtaatattcatgtcactctaattaagctctttcgtaaaaaaaaaaaaaaaaaaaaaaaaaaaaaaaaaaaaaaaaaaaaaaaaaaaaaaaggggcggcgctctgaggatcaagcttactcgcgtgcatg

SEQ ID NO: 271577 - DNA, 553 bp, Zea mays
tggtagcaatgttccttgcacaagccatgttgtgggatcaaattactgcttcatgaatgtgtatgaggatagaatacctggaagggccatcatcatctctgtcatagataatcttgtgaagggagcatctggtcaggctttgcaaaatcttaatctgatgatgggactgcctgagaatatggggctgcaataccagcccctgttcccttgatcttttgtgtcattatctattattacattatttaggagtccagaaaccaaattatcattactgtcaagaggtggcaaggagcctgacatcagaattcagtcaagtcgaagttagacagttagtgtagcttggtctgtgttgttttagctttattaaaccattaagagaataatgatgatggcaatttagcagtacaatggtagtattatgtgggcagcttggttccaataaaatcataagcctatacacatcttgtgcccgcaatgttgtttgctattttgatcacgaaatcaatattgagcttgaattcagttttgaggcttagtaaaaaaattgataatt

SEQ ID NO: 271578 - DNA, 592 bp, Zea mays
gacgggagagagagataggcgtgccttcgtcgtccgtgccggtgcgtggcgtggtggccgtgccgaccgtccgtccaccccctctcctcttcccggcgccggcgacagcgggagggactccctgggaggaatggccgtggtgagggctccgctcggcgcggtggcggtggccgctctcgtcgtcgccatcttcatgccggccgccgcagcggcgcaggcaccggcgcccgcgcccaccagcgacggcacatcaatcgacctggggatcgcgtacatccttatgctggtggccctggtgctcacctacctgatccacccgctggacgcgtcctccccctacaagctcttttaatccctgctccttttcgtttggtcatgcggttatgggtgctataggaattttaggtgcgcgagatgtttaggtgaggttgggaggttgagaatgatgatgattgcaatcatttgatcttggtatgtatccaaggctccaagccgttggtgttctgattggtttgtaattgtatcggattccattatctttgtgctcagtccctgatttgctcctgctgaaggattctgtttcgtctggtgc

SEQ ID NO: 271579 - DNA, 1633 bp, Zea mays
catcaccatagagcaatgggttcattaagaaacaatagtataggaagttttgacaagaccataagcgtaaataagtatgaaagaagaataatttctgatacgttgtcagagtttaatccatgggatgattcatattcgactgctaacaattttgctaggatgcttagggaatctgaaaataatgatgtccattgcattgcgccttcatggaaatcaggaaccgggatcaaagagtccagattttcatttgctagacaggataaccaaggaaacttgttggattcatctctcagaaactgtggtactggtactgagcagaatttcagtttgctaccccagaattctcgaggaaatatttaccagaatggccttgcattccaatctctagagaatgaattttcaaacaataactctcctggtgtattagatatggcaactactggtacatcgaggtctaaaatatctgcccccccaggattttcggcaccaacaagagtaccccctcctggattttctactgcatttccatcccaggatagtttgaaccccgttactcctgtgtttccttctggaattttgtgccatggcgggtcggtccgccctcctagattctcttcattttcttctggaatttcaactcaggaagtgtctaagcctcctactagaccgccttctccattttcttctagattttcatcacaggacggtcttgacccctcttctagattccctttttcttctggattttcatcacatgatgggtctaatcagtcgtatggctcaacgaacccagaaaatcttctccggggtactgttcagggtggcaacagtaatcattatcaatctcagtttggaaggcactcaagtgacatggagtttgatgatcctgctatattagccatgggcaaagggctgatgcctggaattggcgattcagggctggagatgaaaaatactcctgcttttcaagcacagttgcaaccagcaagtagtgatccaagatttcagttacatgtacagccaaatgtgcagtctcgtcaaaacatgagattcacagaccctatgcaagatggtttgaaccatatgaacgataattacctggcatccagatttttagctcagaaccagggtcctctatctccttatgtgcagattccgcaacaacccagaaactcgcaggttataaatggtcactgggacgggtggagtgatttgagacaagggaataacgctcctatgtcagacatgtccaggatattatatccaagtgaagtgaacaagttgcatatgctgggttcaaatgatgtccataacagagcctttggaatgtgatcgtctcctgggataatgtgcgactttgagctgacatgttcaacttggggcgttttgtgcaagtaactggttgcacaacacatagtatacctgaggtggttaatggtgttgtgctcatgagctggcacacgactatttattgctgttggagttgaccaaaatgaaccttagttttggtccatccatttggaattaccaggttcattctcgtctatgatttgcgaagctcgaatgaaaagaaagattacgtgcctgagaagaacaaggcagctgaagttgaaatagatagagatatgtctat

SEQ ID NO: 271580 - DNA, 494 bp, Zea mays
gtcgacaggatgggtctatgaggggtttgttacattccctgtattctcccgggggtactgttctgggtgtcgacggtatcattatcaatctcagtttggaaggcactcaagtgacatggagtttgatgatcctgctatattagctgtgtgcaaagggctgatgcctggaattggcattcagggctggagatgaaaaatactcgtgcttcacagttgcaaccagcaagttgtgatccaagatttcagctacatgtacagccaaatgtgcagtctcaccaaaacatgagattcgcagaccctgtgcaggatggtttgaaccatatgaatgataatagatttttaggtcagaaccatggtctctatccccttatgtgcagattccgcaacaacccagaaactcgcaggttacaaatggtcactgggatgggtggagtgattcgagacaagggaatagcactcctatgtcagacatgtcgaggatattatatccaagt

SEQ ID NO: 271581 - DNA, 486 bp, Zea mays
gtaccgtggtctcgctcggacgcgtactgtcaagccggttcctgcacgcacgccctggtgcccctgctcgctgttgggccgaccgtcagcagcttcgtcagcagcttcccggcctccgtcgtgctcagcagcgagtaatttatgtcggagcagttactgagacgccctcctttgcgtcgtgctcgccagatcaagcctcgcgtcgtcgatttgcgcagttcatgttcggcaatcggtttagtctccgtcgaacttctatttaccgtgacgccgagctccttcaacactgccccactccgttgtcgttattccgtcgcctcacttcgatgtcagttccttcatgacatctcctacttgtgttcgcgccgacaaaaggatcctaagagaatgtggaaaaacaagccccaagtcgatgcctcaaatactcgacgaaaagcctgaactataaattatcgtggttcttgcagagttcgcgtcgaatttaat

SEQ ID NO: 271582 - DNA, 1184 bp, Zea mays
tgcagtgatgagaaaaaatggccgtgaagaacaattgaaacaaatgcatctggacatggaagcattgcttaagtacctttcatccgtaagttttagaagttcagataacgaagacaaaggaaaagatgaaaggtacttaagcagtgatgagaaaaatggccgtgaagaacaattgaaacaaatgcatctggacatggaagcattgcgtgaagataaatcaaagctggaggcgatattggagaagaagactgatgaagagcgcaaactttgtagcagagtagaagatcttgaattgcaattgaacaaagagaaagatgatttccaaaggatgacctccaaaaccaaaaagctaatcaaagcacatgggcgttatataaaagcacaggaggatttaaagaggtctcaggctcgctttgagaggctagcagatttgcttgcttcagatattttgaagccttataccaaggagcagggttccatcggtattactgccaatgacgatccatataatggtaatgaaatgagcccaagcgaccaaagacaaaaccatgtttcagcatcgagaaagagacctatttccctcccaagaagtgaagaagcaaaaactgggaagagacagagagagaatggtgatgatatgattccaacaccagagaactatagacctgaagatgctctagaacatgtccaagatagcaagggaactgatcgactagaatcatttacagtgaagaagttaagagtgggtgactacgatgatgaaggaaacattgtttcttcaagcaatatttttgcggataggttctagaaacgaagtcctgacactacgccttctgtttttccttcagtacaagggcgatgatgaggaagttgatgttgattagtgacccgatgccgtcggtcgctgataacgatttgagctgtacgaagcaatttcagcagacgacatcgatgtcagcttctaaaaccacttgtatgccttttgcatcgggtaatagggcctggtatatttggtagctatttatgtgcttagactgagttgtgatgctgtcaaacatgattacatgcgatgctagaattttcttcttttctgtgtttcctgagactcgaagaggatattaatctgtattcgcctcatgtattattcttagccagtttgagtatgagatttttggactggtgtt

SEQ ID NO: 271583 - DNA, 731 bp, Zea mays
ggctcgctttgagaggctagcagatttgcttgcttgagatattttgaagccttataccaaggagcagggttccatcggtatgactgccaatgacgatccatataatgctaatgaaatgagcccaagcgaccaaagacaaaaccatgtttcagcatcgagaaagagacctatttccctcccaagaagtgaagaatcaaaaactgggaagagacagagagagaatggtgatgatatgattccaacaccagagaactatatacctgaagatgctctagaacatgtccaagatagcaagggaactgatcgactagaatcatttacagtgaagaagttaagagtgggtgactacgatgatgaacgaaacattgtttcttcaagcaatatttttgcggataggtacacgggcgatgatgaggaagttgatgttgattagtgagcggatgctgtcggtggttgataatgatttgagctgtaggaagctatctcaacagacgacatggatgccagcttctaaaactacttttatgccttttgcattgggtaataggggctggtatatctggtagagctatttatgtgcttagacttgagttgtgatgctgtcaaacatatctatacttctttttcttttgtgtctcctggggctcgaagaggatactaatctgtgctcgcctcatgtattattcttagccagtatgagtattatttgagacttttggattggttgtgtt

SEQ ID NO: 271584 - DNA, 439 bp, Zea mays
aattgaataaccatatggctcaaggttatgggagaagggattacagagataatgacttgagagttaggcctgagagaagacactcaccctatgggaggttttcccctgaaagagatatcaggcgtcgttcatttcgtgataagagacagagagcaagttctgaagataggggatctagtcattcaagatcacctattaggaagagtgagagaaaacatagcaaaagtcctgatggtggaaaaaccgattcatccgtaagttttagaagttcagataacgaagacaaaggaaaagatgaaaggtacttaagcagtgatgagaaaaatggccgtgaagaacaattgaaacaaatgcatctggacatggaagcattgcgtgaagataaatcatagctggaggcgatattggagaagaagactgatgaagagcgcaaactttg

SEQ ID NO: 271585 - DNA, 966 bp, Zea mays
atcatcgtcattgtctgtcagtctcttaaaaaagaaaattttgtgcgtggaaaaaatgtgataaaatgtgtgagaacaggaaatatgtcaagcatcaaccaataagagggaaaactagagaatacggaataactatcttgacagacttaactcatatggataaataataacattccagtatcaaatttatttctacaaagatttcatgtaggtttaccggtttttgcttcttcactttttgggagggaaataggctttttctcgatgttgaaacatggttttgtctttggtcacttgggctcatttcattagaattatatggatcatcattggcagtaataccgatgcaaccctgctccttggtggcttggtataaggcttcaaaatatccgaagcaagcaaatctgctagcctctcaaagcgagcctgagacctctataagtcatcctgtgctttcatataacgcccatgtgctctgattagcttttcggttctggaggacatcctttggcaatcttctttctctttgttcaattgcaattcaagatcttctactctgctacaaagtttgtgctcttcatcagtcttcttctctaatatcatctccagctttgatttgtcttcacgcaatgcttccatgtccagatgcatttgtttcagttgatcttcatgaccatttttctcatcactgcttaagtacctttcatcttttcctctgtcttcgttatcaggacttcgaacacttacggatgaatcggtttctccaccatcaggacttttgctatgttttctctcactcttcctaataggtgatcttgaatgactagatcccctatcttcagaacttgctctctgtctcttatcacgaaatgaacgacgcctgagagaagacactcaccctatgggaggttttcccctgaaagagatatcaggcctaactctaaagtcattatctctgtaatccca

SEQ ID NO: 271586 - DNA, 275 bp, Zea mays
tctggtagaacaggtcccttgctatcttggagatgttctagggcatcttcaggtctatagttctctgatgttgggatcatatcatcaccattctctctctgtctctttccagtttttgcttcttcacttgttgggagggaaataagtctttttctcgatgctgaaacatggttttgtctttggtcacttgggctcatttcattagcattatatggatcttcattggcagtaatccctatggaaccctgctccttggtacaaggcttcaaaatatc

SEQ ID NO: 271587 - DNA, 1304 bp, Zea mays
gcgtccacgcgttcggccactccttcgataaaggcctgcgtcaaccctgcagggtccaacctaaccgatcccattgacaaagacatggcggagcgctccatatcacccaacacggtcacacagaacatcgtcctcagcggctacgggaaggccgggcggttggacgacatggagcgagtgctctccgacatgctcgacagcgtgtcatgcaaaccggacgtttggaccatgaacatcatcctcagcctcttcgggaaccggggcgaggttgaactgatggagagatggtacgagaagttccgaggctacggggtcgagccggagacccgcacgctgaacatcctgattggcgcctacgggaagcggcggatgtatgacaagatgtccgcagtcatggagcacatgcgcaagctcgcgttcccgtggacgaccgcgacgtacaacaacgtgatcgaagcatttgctgaggccggcgacgccgggaacatggagcacgcgttcaaccagatgcgttccgagggcatgaggccggacactaagaccttctgctgcctgatcgacgggttcagcagggcaggccagttccataaggtggtgggcatggtgaagctcgccgagaggctcgacgtgcccgtgaacacgcctttccacaacgctgttcttggcgcgtgcgctagagcggacgatcttgtggagatggagagggtgttcaggcgcatgaagcatacgcagtgcgagcctgatgcttccacgtactctatcttggtggaggcttatcgcaaggagggaatgaccgacaagatctatgctctgcatcaggagaacccggctctggttccagcttgattttgtcatggtgtgaatgacccagtgacttgagtcacggtcctgaaattttagagcttggttgcattggttgagaatcttcttgctatccaccaaacagagtggcggccattcttcaactccattttttttgtctgttggtatgcagagctagtatagacgtctcctccaactcaaggggggtgaaagtgcgtcagcaacgtacgggtattcatctagtttgatatattccaagaaaaacaaagaccaatgcaggagaagatggacaatgtgacacagaataatctctggaaaatagatacctggaagcttcctcgtcaaacaagactattatgaagactacaaaagccgcccgcccgttcgacagcgagctatatatgagctgtctggaacacgatttcccccctctgttcctgcgtttttcatgcacgaataaatctgagctgatttctgtgaaa

SEQ ID NO: 271588 - DNA, 419 bp, Zea mays
aaacacgacgtctgcccacgcgtccggagcggcggccattcttcaactccattttttgttgtctgttggtatgcagagctagtatagacgtctcctccaactcaagggtggtgaaagtgctgtcagcaacgtacgggtattgatcgagtttgacatattccaagaaggacaaagaccaatgcatgagaagatggacaatgtgacacagaataatctctggaaaatagatacctggaagcatcctcgtcaaacaagactattatgaggactacaaaagccgcccgcccgttcgacagcgagctataaagtgacggaagcttcctatagtacccactgagggcctgtctggaacacgatttttcccctctgttcctgcgtttttcatgcacaaataaatctgagctgatttccgtgaattt

SEQ ID NO: 271589 - DNA, 485 bp, Zea mays
tgcaagctccgtaagctgcagctagacggcgaaggcgacggcgacggcgacgggggcggccctttctcccggttccgggacgaggtcgccgctgtgctgcagttcctctaccgcacccagaaggagctcgccgcatgcaccgatgagctgtgcttaaccatggacggctcgccgagctcgtaccagctgctcggcaacttcgccgccggccagcaactgtaccggctggaactgctggaagcggaggaggacggggcttgttccagcatactgttctctgcgcccaacggcggcggcggcatcgctgcgcaaggagcagctcctcgcccccagagagtgaagcttccaacgctgcgtgccacggaccaacatctggtagcgctccagtgtacatacgattatacgtagctataccctagcattcattcatgcgggtccacctgcctgcaaacggcgaagtcataaggataacgcttaataatttt

SEQ ID NO: 271590 - DNA, 854 bp, Zea mays
  unsure (1)..(854): unsure at all n locations
gtacaatgaccacatgatctaggtcattaagtggatgtttaacaaaggtcaagggaagacaatgggaagctattacaccttattgaatgctttgatcgaggatggacggattgaggaagcagaagagttatttggaatggtgttctcacgatatatggagggtttgcctcgtacatttttcatgagaatgatttctttctattacagcgctggaagcgcatgataagatgttcgagatttttgctgatatggaggaactaggcgtaagacctgatggttctattatcaggatgctaggtgatgtatttcagaagttagagatgatggacaaatatgaaaagttaaaaaagaaatacccaccaccgaaatgggaatatcgacacatcaaaggcaagctcataagaatcagagtttatcctgacagtaaccctgaagtggcggcaaaaggagaccctgacactgatgagctcgaagagttagaaagcacacaccttaataacgaattggatgaagcagctagctcaggcctcgacaggagtgtattggacgatgcagcttctggagaccttgaatatatgtagatcagagcttccatttggtttttttttgtgcctgcttaaccaaagcggtctagagcaaattgaactggtaacatactctctgttctgatttgacatcctagaacccgtgtcgtcatacttccnaaaaaaaaaaaaaaaaaaaaaaaaaaaaaaaaaaaaaaaaaaaaattaaaaaaaaaataaaaaaataaattaaaaattaaaaataatttggggcggccgctttagaggatccaagtttacttacccgggcatgcaacgaaaaagtttttt

SEQ ID NO: 271591 - DNA, 450 bp, Zea mays
  unsure (1)..(450): unsure at all n locations
ggccggtccagcgaggacatgctcaggccgtcctgatccggtccagcgaggacatgctcaggccgggatcagcttgctttcttgatgtttggtctggatcggtggagatggaggccgtcgatggatcggagtcagggagaggcttaaattcttgttgtgtttttttaacaagggactggccttgttacaactctgctactaggctggagcctggagggagggacgatgatccatcagatgggctatgttactctgtagatcatcgagatgttaattaggtctcttgtgcagtgcagctcagccaattagcatcttctttcactttttgcctttttgcgctgttacttagatcattatcgttcgttaatagcggtgctaatgagatggcaaaaaattnaaataaagttttctaagaaattaagtaaaaaaaatataaaaaaaatgggcggc

SEQ ID NO: 271592 - DNA, 632 bp, Zea mays
agctgtttcagcaatagtgtcgtacttattggggcctgatagagctgataagattaccatatttgctggagatgtggttcctcacaaaaaacctgacccagcaatctacatattagcagcaactacacttggagttgatccgcaaagctgtgttgttattgaagacagtactatagggctcgcagcggcttatgctgccggcatgaagtgtatcgtagcagaaagcggctacactgcagaagaggacttcgagacagcagatgcagtgttcgattgcattggtgacccgccagaagtgcgcttcgatttggatttctgcgccaagttgctcaagaaacaatatgtgagctgaaagggggctagtgcaagtgatataccaagtacgaggttcctgaatatggagaaagagtccatgggcatgccaatgttggttcttcaagccatgacctgatactaggacttggaagtccacgttctacccaattgtaacttatagaatgacattcactactgcccacccagttggcagttgcaaatgtgttagtcattcaacaaactggaaaccactcgaataagggatcaccaagtccaaactcttcagtcaaagcaatagtaattgaggttacgagtcg

SEQ ID NO: 271593 - DNA, 910 bp, Zea mays
acccacgcgtccgcccaggcgtccgcccacgcgtccgaggctcctatctggtataggacggagctgagcttctagcaacgtacagtgtatccgccatgagtcctttcggggcggtgatcacgccagaaaccctcaagtacatgtccaagtaccagggacgtgagatcacgcaggtggactgcgcacgggaggcgatgaggctgatccacgcggaagacaagaacctcaaggccgaggactcagcgtgggagctgaagaagaagttcggcaacggcgtgagcaccatggtcctcgtctacaacgccaccggggccagcctgagcctggtggacgacgggaaagactggatgggctccgtctacagctcgccgatcccggacaccttccacaacgggcagtggatcgccttcctccacgtcaagcccggctcgctggcgcagggcagccaggccgccagggtgttccgcggcagggacgtcgatggccggactcgggacttcgtcgtcgcctggtacatcccgtgggacaacataccgacacgagcttacactgaaattggcagtgaaaactacttcaagactcggtggagtagtgtcaaaacgagtctaggacattcaaggagagtgacccgtgccaaggacgagaactgtgcgtcaactgtcagcatcggtggctacactacagccttctgcatcgcagtcctacaacaccagttccagccgctgccggaagagcgcgaataatcaatcaatcgatcgatcgagtttgcgatcgtgttacctcctaaataaaagttgtacacgcgaagtactactccagtatttacatgtatgtttctagcaggtgtacgtacgctactcctgaataaattgtggtgcacgcaataaataaataattaatgctcctggat

SEQ ID NO: 271594 - DNA, 634 bp, Zea mays
  unsure (1)..(634): unsure at all n locations
gacctacggtcgccagagcgtccgggacgcgtgggcagaattggctagcaaagcaagagaggacacacatatatctggggtataggagctagatagatagctacctacgtatccgccatgagtcctttcggggcggtgatcacgccagaaacgctcaagtacatgtccaagtaccagggacgtgagatcacgcaggtggattgtgcgcgggaggcgatgaggctgatccacgcggaagacaagaacctgcaagccgagaattccgcatgggaactcaagaagaagttcggcaacggcgtgagcaccatggtgctcgtctacaacgccaccggcgccaccctgagcctggcggacgacggccaggactggacgggctccgtctacagctcgccgatctcggacaccttccacaacgggcagtggatcgccttcctccacgtcaagcccgccgcgttggcgctaggcagccaggcccccagggtgttccgcggcagggacgtcgatggccggactcgggacttcgtcgtcgcctggtacatcccgtgggacatcatatcaacacgtgcttacacttgaaatggcagtgaaaactacttcaagactcngtggagagtgtcaaaacgagtctaggaca

SEQ ID NO: 271595 - DNA, 356 bp, Zea mays
ctcctatctggtataggacggagctgagcttctagcaacgtacagtgtatccgccatgagtcctttcggggcggtgatcacgccagaaaccctcaagtacatcccgtgggacaacataccgacacgagcttacactgaaattggcagtgaaaactacttcaagactcggtggagtagtgtcaaaacgagtctaggacattcaaggagagtgacccgtgccaaggacgagaactgtgcgtcaactgtcagcatcggtggctacactacagccttctgcatcgcagtcctacaacaccagttccagccgctgccggaagagcgcgaataatcaatcaatcgatcgatcgagtgtgcga

SEQ ID NO: 271596 - DNA, 683 bp, Zea mays
gcgctgcgtggcgctgcgacgctgagaggacggcgcagcggcagcggcgggcacggccaggacgagagggcggagcacgcggggccggctctgtctcaggacgacctcgacttcgacttcaaccacgcgaggtccagggcggcgctggccaagggcgacgagatgttcgtcgcgatgccggacgggaagtggaagctccacacggtgtcggcggcgtcgaacaagcgcggcgagatcgtgctgcggatcaagaagacgaacctcgtcatggccttctcccacgcaaaagaaagcgtgatccacgacgtgcagccgtgctccccggagaagccgagcccccacgagggcgcgacatacccagtggaggtctccacgaacaagggcaaggtggagctccgcacggacgactacggcgtctacaagcggtgggttgcgacgctgagccacatgctcgtgatgtccaccgccgtctccgtctccaccaggcacgagccggcgcgccgggactgacccaccggtgcggctcttccctcgaagcaatggaccgaccccacccatcacgacgtaaacgaaaacgttgatctgtgtcgatcccatgtgtatttagtactactactgcccatgaactgtatgagtagcagtatcagcactgcaagctgcaactaaagattcagatactgttt

SEQ ID NO: 271597 - DNA, 513 bp, Zea mays
aaccagcaggtggtcggcgacgcgaagaagtggtgcgagatgtcgtacgacgactacgtccgcaagaagctgcggttggaagcgagggaaaggcggaggaaggcggccgaggcgcaagaggacgaggaggagtacgatgacggcatggacctggacctgaagaagatgaccgatccacgcgccccgcacaaccggttttacatcacgaaatgaaaggttagagatagttgttggttgtgcaaaaggttcgattgccttggttgttgttgttgggccaccgcttccgcctatggtgcaagagttgggggcgcttgatcaggtcgtctgacattctccttgttgacccaaccccattccgattggggcgacctggtcaaacgcgggggcgtgctagctacgctcagtacaagtattcagcatggaatctccagtattttattctagagaacatatcttgtgtatattgaagtttagtgcacatgttacatatattaaatcagtatcactcatttt

SEQ ID NO: 271598 - DNA, 530 bp, Zea mays
cggacgcgtgggcggacgcgtgggcaagaaccgctttgagccggcattcgtgaggaacccgctgcaggcgatgaagaaggacaccctagaacgcgcccgggtgcccaacttggatctgaaggcgtacctggccaactcgtacctgcacccggtgttcaagggggacgaaggcgacgacaggtactcggtgatggacgacgatgggtggatggaggaggaggtgatcgtgccgacgaagcggcattcgaggaggacgacgcccgcgcagagcaagcatgaagggtcggactcgctctctgtgctcgagagttctctacagcggtagtcacagtaggagcttagcctgtacagaatggatgaaaatgatcacggccctgctccattgcttttgctttggttgttggttgttcatgtcacagggggcccccccccccagattgaattcaagaaaactgtggggaggactcaggggaaaaatagtttactgtagcttggacaaagaatctgaatacagccgtttcattgtttcc

SEQ ID NO: 271599 - DNA, 567 bp, Zea mays
  unsure (1)..(567): unsure at all n locations
cggaattcccggggaccnnccaancaagacgtgcggcggaagtgctcctggcactggagtacttgcacatgctcggtatcatataccgcgatctcaagcctgaaaatgtccttgtccgggaggacgggcacatcatgctctcggacttcgacctctctcttcgttgtgctgtcagtccaacactgatcaggtcctcaaaccctgacgcagaactgcagaagcgctcaggaagagcagccaaggctactgtgttgagccagcctgtgttgagccgtcctgcatcactcaaccgtcgtgtgcagccccaaccacctgcttcggcccacgcctgttctcctccaagtccaagaccaagagagaccggtaaccaaaaccagaagttgccaccccgatcagcccttggcctgagctcatagcggagcccagcgatgcacggtcgatgtcgtttgtgtgctatattgtttttccgttggtagatttttttgaggggtacttttacactttcttaaagttcacatctgtaattcagcaagtcctgattgtactgatctcctgcaatgcctttgc

SEQ ID NO: 271600 - DNA, 499 bp, Zea mays
gtaccttgggatgggcatggccgcttcgatggtgcttctgtgtataaactcgacaaggatggtaagatctacgagcataaggtccacaatgttgctatgaatccaccaacgaagttcaaggtcctaccagtccatgagctaatcagatcacttggttgcccctctactgcaaaaccaacttattttgaagcttcatcacaatatctgtgcgctgggccatcttatttgagattagcttggataagatgctacatctcattgtgccgcatgctttcgctcgcaaatctgggagaaggatagcctgggtttagtgatacctccaaattttgtattttcagtatgacagcacacatgttactaagtactattgagtcatgacagttgtatatatgaacactgatagtttatagaataagacctcttagttaaggtgtacaacacttgttattgattgttataagcatcagtcagcaaactagtctgacatgtttctgttccc

SEQ ID NO: 271601 - DNA, 553 bp, Zea mays
ttttcacttgtccgcccacgcgtccgctgggactttggagaggggaacacgttccaaaaccggagcgtttcatcaccagccccagtaactatggtctgttggtatgacctcgctgaggttgttgccctcaccgagagcatcggcaagccgctcgccgaggtgctcaaggagctcgggaagagggttccagactcccttgtgaagacccgcatcgaggatgatggcttcactatcaactcgagaagagggttccagactcccttgtgaagacccacaactagagaaataggatggagagggaaatttactaagagaggacgtgtaacaaataaggccaggaattattagaatgaatggaaaatgtcctcatacacctttggagattttatttccgcttgtgggcacggggtgatcagagtctgtctctatcggcaacttgttggatcactgtttaactaaatcctacaatacataccttgccagtaccaattttgtgaatgacagatacacaaagcttattattttttgtggactgcctgaaagctgtatctct

SEQ ID NO: 271602 - DNA, 443 bp, Zea mays
tcatcgacttgacccgatggacaatgttgacgccgtcccaaaactcacatactggcttctttccggtgaccagctcaagaagcacgacaccaaaggtgtagacatgctcttctcattgaccttaggggtatatgcattcctggagcaatatagccataggagccagcaattgcagacatacactgtgatgcgccatagtcctcagatttgtgcccggtaagcttgctaacataatcttcttgagcacggatatcatggtggaggatgctcctatcacggcttctagaagaaagcaaagaactccatgcaagagcaccaccaatcctatcagcccaaatacctccaagtatccccagatgcctgagaaggtgagggcaggaatgactgatgaggtaagacgaggcgcggcatccagaatgctcccaaccgcttccgggaattca

SEQ ID NO: 271603 - DNA, 1298 bp, Zea mays
aagccagacaaggttcagcattgtcttggtgtccatacatcaacaaacaacaacgaacacacgtttctcgactgtctattacttcgaaacaagccagtcgagggcagaaccagccctccttttcaagacaccaggaacgattccttggttcttgtgctctcatcttacaccgtgccagcatgaatgagaaatgggcgtcacaggtcagtaagcgtttcgaataggttaactgctagcgcactagacacacataccaggtcgacgtttgacccgcaaaatggacaaaaaaataacaacaaaaaaagggggcgtattcttatcagctgggaacaatgccgatgcttgaggcctccgctatgctgcactcctgtaacatgcgcgccgttgttgctctgataaatatgtacactctcggccaaaagagccatgcccggattcgcaagccacttcttccatcgggctgcgccgtggcatctcaaaaattcagctaccttggatggttgacgacctgatggcatggttgtcatgaatgggatgatgctgatgatcatccacatatgctgcaattaccttatgagctcagttcaaactacgtttctgcgggtcaccggatgtagcttctaacaaacgatgtacccccgatgcaacttagactatcagagctctgggactttggagaggggaacacgttccaaaaacggagtgtttcgtcaccggcaccagtaactatggtctggccatcaggggaaatagctaagtacaatactctgtatgtatgccctgtcaaagtggcaagcttcgacattgttggatatctccaaacaattatttggttctgagagtagccgtgggtgctaacaagctcatttacattctttgaccacgcgagattgcagacctggctgccagtgtccacacagctcaagtgtgcatttgtggtcgtattccaaaatcgtatgcatctatctgcagttcctccaccagacgcaagcagaccgtggagatgaggtgaccaggcaatagctttgacagctgctgtgtgctcagtatacttcagtactggttgtactgaatgtggattccaaacaaaaagtccattgtcgttgcctccagatgcaagctgacgattgtcataagaccacttgagtccacaaacctcagatttatgcccggtaagcttgctaacataatcttcttgagcacggatctcatggtggagcacgctctcgtcacggcgttccagaagaaagcaaagaagaaaaccatgcgagagaacttacacgccgtacgcgtcggtc

SEQ ID NO: 271604 - DNA, 283 bp, Zea mays
catcaacttgatccgatggacaatgttgatgtcgtcccaaaactcacctactggcttctttcggtgaccagctcaagaagcacgacaccaaaggtgtagacatgctcttctcattgaccttaggggtatacgttcatgtaaatccacaagataacaatctggagcaatataaccatatgaaagcaattgtagacatacccgggcgcacttctctccacaatgtgtgtgcctccatggatacacgaggctacgaaaacatcactcgccattttttcactttgtc

SEQ ID NO: 271605 - DNA, 415 bp, Zea mays
  unsure (1)..(415): unsure at all n locations
ggcgagatgcagatccagcgatagcgcggcggcggcgggagccttggcgctcagttcctcaccctccgtgcctccgttcactcgccgccgtccggccgggacgatgaacaggccgaggagtgggagtggccagaagaaggggaagcgcgggggaggaggaggcggtgggctcggcgcggcgctgaggaagcaggtggccaggctctgcatcatccgggagtgcgtcatcatgctcctcttctaccacgactgatcccactgacgatgccctttgcggttcttcctggccattgactacctttatcttttttttctcgatgtgcctcgtgtatgtacatacagagggtggtggtggatgttcttgttcttgttcttgctcacgtgtgtgtctgtatctncatcattttttgacact

SEQ ID NO: 271606 - DNA, 494 bp, Zea mays
cccacgcgtccgcccacgcgtccgagctttttgctggttattctaatggcaccatcagggcatgggacataaaaggccagagggcagtagtcatcagggaggtaaaagagcacaggaaggcagtgacatgtttttcactatcagaaactggggagaacctcctgagtggatcagcagacaaatctattcgggtatgggaaacggcacagcgcaagctagagtgcgtggagatgattcagacaagagaggctgtacaaaaacttgatatttgtggtgaccgctgctggggtttgttgacctgcgtagcacttaagattgtgtggctaaagttgcagggattcatgttcatgcgattatgcttggatatacggagtgacatcgtggagcataaagatgatttggacattcgtcatgttcatcgagagtcatgtgacttttatcaaaagaaacaaatacatttgggatatcaatcacgatatatgtttttcatatcc

SEQ ID NO: 271607 - DNA, 486 bp, Zea mays
attttccaaatgcaaagcatctgaggaggatggcttctgttaactccatgaatagagacgcttgtccgggtggagccttgtcctttcagtcacgggatccccagaaaagatttcttggttgtgctgctcttgcagttttgtagtagggtgtccattgtagcaatggcaggggtgaccgttgcttgggtttgttgacctgcgtagcacttaagattgtgtatctaaagttgtagggattcatgttcatgcgattatgcttggatatacggagtgacatcgtggagcataaagatgacttgtacattcgtcttgttcatcgagagtcatgtgacttttatcaaaagaaacaaatacattgtgatatcaatcacgatatatgttttttaaaaaaaaaaaaaaaaaaaaaaaaaattaaaaaaaaaaaaataaaaaaaataaaaaaaaaaaatatataaaaataaatttaaaaaaatataataataattt

SEQ ID NO: 271608 - DNA, 818 bp, Zea mays
gccgccgcggaccggccggatttcggtcgcccatcgtctgtcacgcgtccgattttatgagccaactgttgtagggaatgtcagcaatgatatgcttcttttcagagaagaagtttttggtccagttgcaccccttataccattcaaaactgaggaagaagctgtccatatggccaacgatacaaacgcaggcttagctgcatacatatttaccaagagcatacctcgttcatggcgtgtatccgaatctcttgaatacggcttagttggggtaaacgaggggattatttcaacagaggtggcaccatttggcggagtaaagcagtctggtcttgggagagaaggatcgaagtacggcgtcgacgaatacttggagctcaagtacatctgcatgggcaacttgggttgagttctgaaatctggcctgaggctagaaacgcttggcagatgatgaaccgagagaccaagaaggcaagcgttttgctgcaagaccggaggaacatggctgaaaggggccggccactggttgtgggggagcagttttcgaataaagcgaataagccgcggaacatgaacaaaagaaagccgaaatgagttgtaaatgacgtgaactataaagtatggcttcgcctccggacttttgtatacgtaatcatggcactacttgtctatagtgtctccaaagacgtccatgttacagaataaaagcgtatagggtggatgctacgttacaggctgtcggtggtatgtacccctcgcctgattcctgacgaaataaagctggatactgcattcttgcggctcttgcctgcaggggt

SEQ ID NO: 271609 - DNA, 470 bp, Zea mays
catacatttttaccaagagcatacctcgttcatggcgtgtatctgaatctcttgagtacggcttagttggggtaaacgaggggattatttcaacggaggtggcgccatttggcggagtaaagcagtctggtctagggagagaaggatcgaagtacggcattgacgagtacttggagctcaagtacatctgcatgggcaacttgggttgagtcctgaagtcggcctctagctcgaaacactcggcagatgatgaacggagaaaccaggcgtgcttagaagggcgtgagttgcgtttagctgcaagatcggtcatgatggctgtgggagagcagttttagaataaatcgaataagccgcggagcattaaataaaagaagtggaaatgagatgtaaatggcgtggaactataaagtatggcttcaccttcgaacctgtatacggcctgtttggattctcttctaccgtcgctt

SEQ ID NO: 271610 - DNA, 809 bp, Zea mays
ggccaaggagcttagcgtggaggacatggtcgtcctctccggcgctcacaccgtcggccgctccttctgcgcctccttcttcaagcgcgtctggaacacaagcacgaaccccgctaccgcattcgtggacgcggggctgagcccgtcgtacgcgcgctactacgcgcgctgtgcccgtcaaacacgacgcagacgacgccgatcacgacggccatggacccgggaacgcccaacgtgctggacaacaactactacaagctcctgcctcgcggcatggggctcttcttctccgacaaccagctgcgcgtgaacccgcagatggccgcgctggtgagcagcttcgcgtccaacgagacgctgtggaaggagaaattcgcggcggccatggtaaagatgggacgcatccaggtgcagacagggacgtgcggagaggtccgtctcaactgcggcgtcgtcaacccgagttcgtactcgtcgtcgtcggcggtggagctgggttcgagcgcgccagcagccgtcggtgaagagggctacgccgcgagctagtagctcgcataccagtcttcggccgccgtcgttggcgagatcaatgattttttttctctctctcgcatgcatccctcttctgcttttattttgtcgcgtggactgtggtttttgttgtgtcgatgatctttgttgtgtgccagtgccactaaacgtacgcatgccggccggcgaactcttaacttcggtggcgggtaataataagcatatgtatgagtaaaaaaaaaaaaaaaaaaaaaaccacgcgtccgcggacgcgtggg

SEQ ID NO: 271611 - DNA, 1287 bp, Zea mays
  unsure (1)..(1287): unsure at all n locations
gtgcagtttggacaggcgacaactccgcagactgggatcacttgaaatcttctatcccaatggtcttaactcttggtcttactggcttgcctttctctggcgcggatattggtggattctttggagacccagaaccagacctattggtgcgttggtaccaagtaggagcattttatcctgtctttaggggtcatgctcatcatgacaccaagagacgtgagccatggttatttggagagcgaagaactgccatcataagggaggcgatacatatgcggtattcattgttggcctacttctacacgctgttcagagaggctagtgtaaatggcattcctgtcatgcgtcctttatggctagaatctcctgacgatcaagaaacttataacaatggcgaggcatttatggtggggcccagccttttagctcaaggaatatacgaagagggccagaaatcagtgtcggtctaccttcctgggaaggagtcatggtatgacttgagaaatggatctccatacaagggaagcgcgacacacaagctacaggttttagaagatagcattcccagcttccaaagggctggtacaattgtgccaagaaaggacagattcagacgcagttctactcagatggtgaatgatccatacactctggtgatagcactcaatagctcaggtgctggagaaggcgaactttatgtggatgacgggaaaagttatgattaccagcaaggggcattcatccatcgccgatttgtctttgcagacaataagctaacttcattcaatattgggcctgacgatttgggcaagaaatttacaagtggttgcgtgattgaaagaattatagtcctcggtttacgatccggagtgaagaaggctattattgagcctggaaaccaagaagtagaaattgaatcagggccaattagtttaaggagtggttccagcccagttgtgccaacaatccggaggcccaatgttcgcatcgcagacagttggacaatatggatagcgtaagaggttgtccattcacgtctggagcctgatgtctcttttgtttgctgtcaggttgcgaagttaggccaatctttagaagtttagttgtggcctcgatcattgcgcatatcattatggttttgtggcctcaaaatatttacatgtaactggtacttaagctgttccaactgccaattttgacagaaatactgagagagattgctgatgtatatttgtagctttcatacatgagtatttgagtttattatctaaaaaaaaaatngattta

SEQ ID NO: 271612 - DNA, 347 bp, Zea mays
ctggaaatcaagaactagaaattgaatcatggccaattagtttaaggagtggttccagcccagtcgcgccaacaatccggaggcccaatgtttgcattgcagacagttggactataaggatagcataaaaggtaggccattcacatctggatcctgatgtctgatgtcttcttttggctgctgtcaggttgcaaaattaggccagcctttagaagtttagttgtggccttgaaatatttgcatgtaactggtacttaagctgttccaactgccaattttgacataaatacttatatacattgctgatgtatagggtagcttcgacccatgagctttaaattttcccc

SEQ ID NO: 271613 - DNA, 486 bp, Zea mays
tattgcattcacagaacaaaaataagaagccgccacaggtgtcccacagtggcctgcaagggtagagcagctccggatggaagaaccacttcacgggcatctccctcggggaggtggtggccacagggcgcggggcgagcacgtggagtagcctctcctcccgcttctccctgatcctctccagctccctgaacctctgctgcagcagggcgatggaggagaacatcatctggccctcgctgctctgtacccccatgatgaacaaaaactcctcgttttcagttgatgtgtgtgtgtgtgtgtatctcagccagcgtctgtctacttcgctcgctcgctgtgtggggttttgctgcttgaggtggcggtggtcttggccatgcgcctacttataagctgcaaagttttgtcacggcgcagggcgtccccttgtggtcgtctggcaagttgcgcctttttttttattatttatatttttcccccccc

SEQ ID NO: 271614 - DNA, 380 bp, Zea mays
atttctcatcgggttgtatctggaagccccatgactgcgattatgatgagctcatatatctactgaccgttgtatctgtctgtgatttgagctcgtgtacctgcagtaggccgataaaagaatggtaaggtatcaatacttctgaagttcgaacttggccaagtcccgttgggatccaaattacaggttgtcggagttcgtatttgacgctcagactatgaaatcaagccgggacagaaaatatgatagtgcaccatttaccattacgatccattttgtattgcgtaagtaatgaatattcatggtgatctgaaccttatgtcagtttttcttttacagcacacagcattgcctcaatttgcgtcaaaaccgatgaaaaa

SEQ ID NO: 271615 - DNA, 470 bp, Zea mays
ctagaaaatgttttgagaagaaccaaggtcagaaggttaagtcaccagtcaaagcaattgtggcgaagagaattccttcttctccagccaagacactgccttcatctgcaaagaagttagttatgccttcaaacagtgctggaaagctgaagtctcagaagaaaaggaaggcaagtgatgacaccgacgacgacgacgacgacgatgattttgtagcttctaaagcaaagaccaagaggcacaaggcctagttaggtcctagcatctcattatcctagtaatgagacgtgttcttcagacaatttctagctcgggatgaccttggatgattgttccttccattggtttgctcatttggggcgcgcacaactaaattctgtgaagtagcgtgttgtgttgtgtcaagaagttcctgcaaactttcaattggttagcatttaaaaaaaaaaaaaagggcggccactcgcgat

SEQ ID NO: 271616 - DNA, 642 bp, Zea mays
  unsure (1)..(642): unsure at all n locations
cttcaactaatgcatcagaaacagatctacagaatgccctcaactgggcatgtggtccaggcaacgtagattgttctgccattcagccaagccaaccctgctaccagccggacactttagcttcccatgcttcgtatgcattcaatagctactaccagcaaaatggagccaacgttgtggcctgtgactttggaggtgccggaatacgaacgacgaaagatccaagttatgacacttgcgtctatttggctgccggcaataagatgagcacgacgaactcaacatctcttccagctcgcagcgactccggtccagtcccatgcgccaaatgcttcgccactttgctgcccatgctggccctcgtgatggctgcagttatgctgtgatctatgggaaaaaaatgctccagctagcctccttaagacctgagatgaaaggtgaattgcgtaatgctgctggtaaccatcgaagttctgttttttgccatgagcagtagactagtagtagtctagtagagaggcaccttatgctgtaggaattctctggtcggttaagatgtacatcgtcgcgcggacaatatatatcagctggcattaagaacttgatatcgtattatgctgtgtttcggctctaannnaaaaa

SEQ ID NO: 271617 - DNA, 1295 bp, Zea mays
tcgcgtttactggctgacaattgcactggtcttcaagggtttctggttttcaatgctgcaggtggtggaaccggctctggcctgggttcgctacttctagagcgtctatcagtagattatggtaggaagtcaaagctcggtttcaccatctatccttccccacatatctcgactgctgtggtcgagccgtggaacagcgtgctctccacacattctcttgattgaacatacagatgttgttgtgcttcttgacactgaagctatctatgacatatgcaagaggtccctcgacattgagcgtccaacatacaccaatctgaacaggcttatatcacaagctatatcatctctgactacctctctgaggtttgaaggagctattaatgttgacataactgagttccagaccaaccttgtgccgtatccccgcatacactttatgctctcttcatatgctccaattatctcagtggaaaaggcctaccatgaacaacactctgttcctgagatcacaaattctgtgtttgagccatcaagtgtgatggcaaaatgtgatcccaggcatggaaagtacatggcatgctgtttgatgtaccgtggcgacgttgttccaaaagatgtgaatgctgctgtccattcaatcaagaccaagagagcagtgcagtttgttgattggtgccctactggtttcaagtgtgggataaactaccaaccaccaactgtagtccctggaggggacctggccaaggtgcaacgagcagtctgcatgatcagcaacatcacagtcgtggctgaggtcttctctcgtattgaccgcaagtttgatctcatgtatgccaaacgtgcattcgttcattggcatgtcagtgaagggatggaagaaggggagttctcagaggcaagggaggatcttgcagcactggagaacgattatgaggaagtcggacctgaagttgaagatgaggacgaggaagctgagtattgagtcatcgatctggatgcatggttattttcctttggtgtcagtcaaccaggcgtgcttgagttgcatggttgtacctcccatttattccatgtttgctattgcattacacctgttcatggttggcatagtagaagtgtgaagattggttgaactggtatgatggtttcagatcaaataaattattgttttcaaaatctcatttataaaaccacctaaaattaattaacttgaccttcattaaaaaacttttaaacaggaaaaaccatagaataaaaaaaaatagggggcggcctttttaagggaccaaagt

SEQ ID NO: 271618 - DNA, 576 bp, Zea mays
ttgttattatgttggccatccttggagttgcctacgggtttcttgcggcgactgtggccatccagaggatctggcagcggcactatcacatacttaccaagaaggagctcacgaaggcatatgtggtggaggacctccctgggggttacacgccgccgaagatggatccagaccatgagcagcggttgaaggtgttgcagctcatgtagcttgcactttcgcaggtgatggacatgaagtatcgcatcttttttgttgcattgcatgtatgtacttttgcatgctgtgagcgttattagttggggtaaacatgtattctagtgacggaagtccatgtgcttataatgtacaaatatagaaccacggttaccagtcccaggtggggaatcacatacaggctaggaacaatgcaagttaaattgatcgactgtttcgctacacatactgcattactgccgagagacaatggtaatgctcactgtatcgaaacgttagtttccttttttttcactgctttggcgcctcggtgtttcgtccctttgtatctggatatgttgtacttcacctggaccaagg

SEQ ID NO: 271619 - DNA, 689 bp, Zea mays
ggacgggctcaggaacgtggacgtgcacaaggcgctcggcatcgccatcttggccatggcgtctcttcaggtgatggcgatcctggcgcggccggacaagacgtccaaggtgcggcggttctggaactggtaccaccacaacatcgggcgcgcggcgatcctgctggccatcggcaacatcttcctgggcctctccatcgcgcaggagaccagcgcctacatcgtctcctacggcgtgttcgtcgccgtctgggtgctcgccgtcgccgccttcgagatgaagcgctgctacgccgacgacgactgatgagctagcgacacgtaagagtcacagttcggtcccaacagctgacggcgaagtttggtgtcgttaaactgagcgttccacggccagctgggacgtgacagacacacgagcgccgagcgcgcgcgcgcgcacacacacaccattcttgttgttccgtagctcgcagctggacagtgcattattggttcgaggagggcgtgctttggttggctaattaaaaaaaaaatgtttttttttttaggtataggatgtgaggaaggggacggtctgctgtttctaggctagctggacgctctgattcataaatttgtacattgattggtacgtggtcgtgttgtgttgtaccctttttggacgatagcatgttcttcgcccttaacat

SEQ ID NO: 271620 - DNA, 398 bp, Zea mays
catgagttctgttctccagctgccaagtagctgtatccagatccagtgcatcaaaaccgcaacatcctcgggaactgcatgcaccgcggtatcattcactgtaacttagctagtgtattagattcgtcgccacctgtttcccctgaagcttattgtaaagtgtgccatattggtcttttgaggctagcgtggcttggccatgttgacatctgaacactatcccgagggcctgattgaatgctcacagcctctgctgcctgtatgtacatgtaaattgtgccaagcgcgcaatcctgactactctatatgtaaatacattgtgttcagctcgtacatgattgttataaaaaaaaaaaaaaaacaaaaaaaaaaaagggcggccgctcgcgatctagaac

SEQ ID NO: 271621 - DNA, 349 bp, Zea mays
gagaaggcagaattaacaaagtaattcaaatgtttgataacatccaagataccacaataaggtccgatgcagtgctctacaatgcagttatttcttcgctttgcaaaagaggggaaactgaacgtgctattgagtttttggcatatatggtgtccagtggatgcgtgcccaatgaatcgacctactctatacttattcgaggcttagcaggtgagggttttgtaaaggaggcccatcagatgttgactgtcttgtgctccaaaggtgctctaagaaagcacttgatgaagcattttggtattgtatgaagtataaactgatagttactgtttgcaaaaaaaaaacaact

SEQ ID NO: 271622 - DNA, 402 bp, Zea mays
gggtgcggatcagcgcgagatggatcgagagcattaggagtgagcccaagcttggtcagacagtgcaggagctgctgcaggccgatgcgtaaacatgtggcctggaaggtaccggttcctcagtgtgatcatctcatacgggctgttcgggtcagattaaagtcggttgtttagattgctgcagttataatctatagagataaacattgtagaaacagtagaagtcggtataaattaaacctaaacgaccaggcctataaattcttgaaaaggttcaggtgggcttattctccattgtattggcagttgcctgcgtatgatttgttgagggaaaaaactgatgcaatgacgtttgtttcaaagagtggtgtactgagtccatgattattattatttttatat

SEQ ID NO: 271623 - DNA, 446 bp, Zea mays
gccagatgggattctttctgtgctatctcttcctattctgagtcctgatccagctggtaatgaaacaaaaactgaaggtgtcatcctgttggcctccaatgcaaattatgcatatagtgagaaagatagggcttggataagaacagttgcagacaaatttcaacttgcttaatttagagaaatgttgacagtcaggcagtactggaaaatggaccggaaagattgggaagtgtaaagtagactgactggtccaagaaggatttggagtcttggcaaacgtggacggagcagaataagagagttttgcagttgggaggagatcagcattaagctactgtttattagggttggcgctagttgaagcaaaatagtccagcaatagtttgttcagttggctagagactatgtggtgatgtgtttggtttgtctctgtgcctcttgctttg

SEQ ID NO: 271624 - DNA, 465 bp, Zea mays
gcaagaggaggattgtgctgtttgatagccaagtaggaggtgataaatgtcatggtttgattcaattgatgcgacctgttgtatcggtctctgtgatggacaagctgaaaattttcgcaacgaccgctgctggtgtctctacaggcgttgaagttactcctagatggaacggtggacacgaattcgtactcactttaggtgacgctacgatttgtgtgaaggttacttggtcgatggtagatccacggctttaaatgggttcgcctgttcgttgttaagcatcatcggtggaagtgtagtagtgctcttgctctggtttgttgtctgaggctgttggagtctagataagtataacagtgttcacactatcatgcccgtcctgttatttagtgaaccttaatttgtctaatgttgctactcttgttatttattgaaccttagtttattctagttgcattggaaaaa

SEQ ID NO: 271625 - DNA, 402 bp, Zea mays
gtctctgtgatggacaagctgaaaattttcgcaacgaccgctgctggtgtctctacaggcgttgaagttactcctagatgggacggtggacacgaattcgtactcactttaggtgacgctacgatttgtgtgaaggttacttggtcgatggtagatccacggctgtaaatgggttcgcctgttcgttgttaagcatcatcggtggaagtgtagtagtgttgcattggaagggtttattctactcttgttatttgtctaaatgcatcattttttttgtgtggtggtggtggggttgtgttgctgggttctcaggttatatttttaaataaaacctgaaaatccaggcagagctcattataattccaaattcccattatttaaatataaatttaaaaagggcgg

SEQ ID NO: 271626 - DNA, 1089 bp, Zea mays
  unsure (1)..(1089): unsure at all n locations
tgaaccttgcctccgaggtgccgccctccccgccccgcctgcgccgcttgctcatcgcttctctccccgcggcggcctcccagatccggttggatcgaggggcaaggtcaagagatggggcaggccttccgaaagctgtttgatgccttcttcggcaacaaggagatgcgggtggtgatgcttgggttggatgcagctgggaaaaccaccatactctataagcttcacattggtgaagttctctccactgtccctaccataggtttcaatgttgagaaggttcagtacaagaatgtagtgttcactgtgtgggatgttggtggccaggagaagctcaggcccctgtggaggcactacttcaacaacactgatgctctgatttacgtggttgattcactggatagagagagaattgggagagccagggcggagtttcaggctataatcaatgacccttttatgcttaacagtgtgttattggtgtttgctaacaagcaagacatgaggggagcaatgactccgatggaagtgtgtgagggccttgggctgtatgacctgacgaaccgcatctggcacatccagggcacctgtgctctaaaaggcgatggcctgtatgaagggttggactggctagcgactactctggacgaaatgcgtgcctctggacggttaacctcagcatcatcatcggcatcctgaatcacgtgtaacaggagggacaaacgatttgatcctcgtgatacgcccattgaaggatcatcttgtgattcaggctttgcgcgctttgttttcttttgtgtttccccaattgctgttggctatacatgtgtgctatgaactgggtggtgcatctggcaaggctaggtagtcagagttacagacgccggttccgtggtgacgatgtcagtacggtggtggtgtcgtactcgtctgctagtcggaagcaggcatcatcatccatctcgtcgcttgtgtgtgggagtgcctgtaaatactacccctgatgacatggctctcgcggtttcttcgtctgaaactaaccacacggaatcncattaaaaaaaaaaaaaaaaattaaaaaaaaanaaa

SEQ ID NO: 271627 - DNA, 529 bp, Zea mays
ttagtttattacatgtccagaacaccaccataaagaaaacctgccctcgattagcattattcagtagagagagttgtggagaaataaagttaatttgtttgttggcgcaactaattagaccacgttttcattaacaataatactaacatgtttttgttgtagggagggcacattgcggcggctacgagagaccgattttcctgtgtggtggtgacaacgacaccgtggagccaagtcaatgtcggcaagctgatttttcagattggaacctatggttctttttaaagatcgaatatgttctagcatctttaaaagatttgtcagaatgtaaacatttgttctgaggtcatttaggcctcaaacagaatttcttggacttattttgttggagggaatgggacatctcgagatctaaatgtgtatagaagatccaaatgtgtatagaacatatatttttatgggtatcaaacatggttgtgtgcaccagcacggacatgaaactacaccaataatacgcatatttgttcat

SEQ ID NO: 271628 - DNA, 932 bp, Zea mays
gttcttattgcattcttcaattaatattttctctcagtagcatagcttttaggtactaactgtacaatggcaggaacagcagcaacactaagcatccaacgtcatgttctaggcacctgttccatgtagcatgcatattagtaattgccacagcttaggagtgaatccggtagaataatatgctctagagttgaatgaagtaaatttcaattactcctgaggattaaatgaactgtataaggccgtaatttgttcctggtttagtttcagggtagaaatggacattgctgtaatcagctacacattacatgcgaccggacctgaattattatataagaaacctgaagtgtagtcgatatacatgttttcgggcggggaaacccacttactttttgtaggccattgaggtgcaataatttgatacccatgtatgttaatctgctaacccacatggaatgcaatttcacaagttaaatttgtcgcttgtcatattttgtaggcttcaatgttaaacattgtcacaggttctcatatatgggtggaagataaagatttgtcctgggttgatggtgaggtatttcgaattgatggccaaaacgcccatgttcgcacaaccaaggggaaggcgggatggcgtattgtggcggctacgagggaccgatgttcctgtgtggcagtgacaacgataccgtggagccaaggcaatgtcagcaagctgatttttcagattggaatctatggttctttttaaagatcgaatatgttctagcatcttaaaaagatttgtcagaatgtaaacatttgttctgaggtcatttaggcctcaaacagaatttcttggacttatttcgttggagggaatgggacatcttgagatctaaatgtgtatagaagatccaaatgtgtatagaacatatatttttatgggtatc

SEQ ID NO: 271629 - DNA, 387 bp, Zea mays
attgttttcagtaaatgtcttgactgttgccttttattgctatatgtcgggccgttttgttgcgctgttgtgcacgcggttgtagggagggcgtattgtggcggctacgagggaccgatgttcctgtgtggcgatgacaacgacactgtggagccaaggcaatgtcagcaagctgatttttcagattggaatctatggttctttttaaaggtcggatatgttctagcatctttaaaagatttgtcagaatgtaaacatttgttttgaggtcatttaacccccaaccaaaatttcttggaccgatttcgttggagggaaccagaccccccgagatctaaatgtgtatagaccatatattttttatgggtccccaatatgattgtgtgt

SEQ ID NO: 271630 - DNA, 1172 bp, Zea mays
tttatttgtgggctgacgcctggggggacacgggggcggccgccctgggctggacgcgtgggccgacgcgtgggcctcgacgagcgagtcgaggactcatcctagctagctaagctgtccgacagcgcagcagaccgatacgagtacgacgatgatgagtagcaccggcggcgagagcaagctggagagcccgctgctgggcctgcccgcgccgggctcgtcggccggcagcgggcacagccacggcgaggcggtgagcgggcagctggagagcatcctcagcgacgcctccctgccgtggaggcggcggatgctgtcggcgtccatggtggagatgcggctgctcgtgcgcctggccgcgcccgccgtgctcgtctacatgatcaactacctcatgtccatgtccacgcagatcttctcgggacacctcggcacgctcgagctggccgccgcgtcgctcggcaacaccggcatccaggtcttcgcctatggcctcatgctgggcatggggagcgcggtggagacgctgtgcgggcaggcgtacggcgcgcacaagtacgacatgctgggcatctacctgcagcgctcgaccgtgctgctgatggccacgggcgtgccgctgaccgtggtctacgccttctcggagcgcatcctggtcctcctcggcgagtcggagcgcatctccagggccgccgccgtcttcgtctacgggctcatcccgcagatcttcgcgtacgcgccaacttccccatccagaagttcctgcaggcgcagagcatcgtggcgcccagcgcttacatctccgtggccacgctggcgctgcacctcgccctcagctacctcgtcgtctaccggctcggcctgggcctcctcggcgcctcgctcatgctcagcgccagctggtgggtcatcgtcgccgcccagttcgcctacatcgtcaccagcccgccgctgccgcctcacctggacgggcttctcgtggcaggccttctcgggcctccccggcttcctcaggctcgtccctcgcctcctgccgtcatgctctgcctcgagacctggtacttccagatcctcgtgctcatcgcgggcctcctcaaggaccccgaagcttgccttggcctcactctctgtctgcatgacaatttcagggtgggtgttcatgatctccgttg

SEQ ID NO: 271631 - DNA, 1580 bp, Zea mays
atcgaactggcccttgtggaacccggttggggggcccgggggtgggaaggaccaggacaaacaccttaaggccaaggcgaccccaaactttttgggccaacttggcaacctggaggtcgccgccgcctcgctcggcaacaccggcgtgcagatgttcgcctacggactcatgctgggcatgggcagcgcggtggagacgctgtgcgggcaggcgtacggcgcccacaagtacgacatgctgggcatctacctgcagcgctccgccgtgctgctgatggccacgggggtgccgctggccgtgctctacgccttctcccgccccatcctggtcctcctgggggagtcccccgagatcgcgtccgccgccgccgtcttcgtgtacggcctcgtcccgcagatcttcgcgtacgccgccaacttccccatccagaagttcatgcaggcgcagagcatcatggcccccagcgcgtacatctccgccgccacgctggccgtgcacctcgccctcagctacctcgtcgtgtaccagttcgggctgggcctcctcggcgcctcgctcgtgctcagcttcagctggtgggtcatcgtcgcggcccagttcgggtacatcgtcaccagcgcccggtgcagggacacctggacgggattcaccacgcaggccttctcgggcctcggcaccttcttcaagctctcggcagcgtccgccgtcatgctgtgcttggagacttggtacttccagatcatcgtgctcatcgccggcctgctcaagaacccggagctctccctcgactccctctccatatgcatgaacgtgaacgcatgggtgttcatgatctccgtcgggttcaacgccgcggcgagcgtgcgggtcgggaacgagctcggcgcgggcaacccgagggcggcggcgttctcggtgctcatggtgacgtcgctgtcgttcatcgcggcgacggtgtgtgccgtcgtcgtgctgtgcctccgcgaccagctgagctacttcttcactggcggcgaggccgtggcgcgcgccgtgtccgacctctgcccgctcctcgccgccacgctcgtcctcaacggcatacagccagtcctctccggcgtcgccgtgggctgcgggtggcaggcgttcgtggcgtacgtgaacgtgggttgctactacgtcgtcggcgtgccgctcggcgtcttcctcggcttctacctcgacctcggcgccaagggcgtttggagcggcatggtcatcgggggaaccttgacgcagacgctcatcctgctctgggtcaccgtcagaaccgactggaacaaggaggtggagaacgccaaggcgaggctggacaagtgggacgacaagaagcagcccctcctagtcgaagattgaaggaagaatctagtagatcacgcagtgtagcgcgtgctggtggattttttgtgtgtcgtgtgtgtgttttggagtggattgaatggaccatttggcatttgggttttagagagcatgcatgcactcctatcatgaatgctttggccagcaaatcatgcattgttagaaaattaatagggactaagattaatttgataatgcc

SEQ ID NO: 271632 - DNA, 501 bp, Zea mays
cccacgcgtccgctctccccgtcaactaagcccttgccagtgagtggatgatgggtcggacgggtgacggccgccgccgcgacgtcgacggccggctggaggcgctgctctctggcgccggcggcgaggagccgtggctccggcgcgtggcgctcgcgacggctctggagctgcggctgctggcgcccctggccgcgccggccgtggtggtctacatgctcatcatcgtcatgtcgtcgaccacgcacatcgtgtgcggccagctcggcaacgtccagctcgccgtcgcctccctcggcaacaacggcatccaggtcttcgcctacggcatcatgctgggtatgggcagcgcggtggagacgctgtgcgggcaggcgtacggcgccgggaagtacgagatgctgggcgtgtacctgcagcgctcgacggcgctgctcacggccaccggggtgccgctcgccgccgtgtacgcgctgtccgagcacgtgctgctgctgctgg

SEQ ID NO: 271633 - DNA, 473 bp, Zea mays
cataccaagaccacatcggcacatcgacgtgagctcgtgcgtgagtgccctggtcgacgaccgctcgcgcgccatggactcaacgacgacgacggcgccgctgctgcagccgtccgccgcctcgagcaaggaggggccggcgccggcgccggctcagcacggtgagggcagccgggagctggaggcgatcctggccgacgcgtccaagccgtgggcttggcgggcctgggaaggcgcccgcctggagctgccgctgctgctgcgggtggcgctgccggcggtggccgtctacatgatcaacttcgtcatgtccatgtccacgcagatcttctgcggccagctcggcaacctcgagctcgccgcctcctcgctcggcaacaccggcatccagcccttggcctacggcctcatgctgggcatgggcagcgcggtggagacgctgtgcgggcaggcgtacggcgcgcacaagcacc

SEQ ID NO: 271634 - DNA, 475 bp, Zea mays
ccttaccttatcattattagctcctccaagcaagtcgcacacgacacatcatcatcaacagcctgacatggccggcgacgacggggcgcacggcgcgtcggcgcggctggagggcgtgctgacggacgcgtcgaccccgtgggcgcggcgcgcgtggggcgcggccgccatcgagctgccgctgctgacgcggctggcggcgccggcggtggtgatgtacatgatcaactacctcatgtccatgtcgacgcagatcttctcgggccacctcggcaacctggagctcgccgccgcctcgctcggcaacaccggcgtgcagatgttcgcctacggactcatgctgggcatgggcagcgcggtggagacgctgtgcgggcaggcgtacggcgcccacaagtacgagatgctgggcatctacctgcagcggtcggccgtgctgctgtgcgcgacgggcgtgccgttggccgtgatctta

SEQ ID NO: 271635 - DNA, 328 bp, Zea mays
gtacctggagaaggagttgggcatcgagtcactcaggacgatgaaaagaataaaggcggcgctggatcccaacaacatcatgattccgggaaagctgatcccgcctcacgtctgcatatgaccgtcacctgactggaggatcgatccccccatggccatcagtgggcttgttggctcactcatcaaaagctttggttccgcgaggcgtgacgcggtgctctgctgacagttgcaataatgcgccgaactgctctgtgcctgtatggcatgcgttggaggcaaatgcacgtaggccggtaggcgtcacatcaaaactataccggtaccc

SEQ ID NO: 271636 - DNA, 593 bp, Zea mays
gggaacattattcatccattgatattctcttccaacgggggggttcaaactgattatcccccaaagagactctttggaaataataaaattttgtgttcacacgctcagggagagggggaagtttcctgaaaaagatatcatgatgatgtgtggccaatcccagaggctggacaccagggagctgcgggaagatcacactttcagatcttctggagagccatcacttggtttcagaacccagggataagaaaaaggggaagaaatcttaaacatgtgtcatagtatgcacaagaattgaagggcagcgctaaaattttgggactagaaagcacgccaaatgagcaagggtgcgacaggaggcattctcctacacggaatggaaaagacggaatccgctgaaggtaggatagctccgtagaagttgtaggtgcgctccagatatgattctaccctagaaatggtggaaggataataactgttttaggaggcggctgtaaatatgaacataattagacaggatggtctattcagattctttatgtggatcaaaaacaaaaaaaaaaaaagggcgccgctcgcgatctgagaaaaga

SEQ ID NO: 271637 - DNA, 911 bp, Zea mays
cggaacgacccacgcacccacacgtatcacatacacaatttgacctttatatactattatctagtgaagatggccattactgtgatgctgtgcaccatgaatgatcattattattgaaaaatctcctacgcaagaacaaaattctagttctagacgaggcaacagcatccatcgactctgcaacagatgcaatcctgcagaaagtaatcatgcagcatttctcaagttgcacggttataaccatagctcacagggtaccaactgtgacagacagtgacaaggtcatggtcctgtcctacgggaagcttctagaatatgaaacaccagccaagctgttggaagacaaacaatcagcatttgctaaacttgtggctgagtattgggctaataccaagagaaattcaacatgatctaccattattgcaggacattgataaaagatatgatcattttaatcaagatatcgaaagattcaagggttctcaaattgaatctttaacaagacaaggaatgccatcatgattatttgattgatgtggttactgggagtgaataagatatcaacagaaattcaattttggtaatggaagcaatttttggagtgagggctgatgttcgagagaactccagctggttgattgaacatgtggtattcaatgcaaaatgaaatggaggatccacttctagcatgatcaatggcatttttcatacataagcctttttgaataagagaagcgaagtaccaagtcgtgaattgcaatgaagaatgagtaaagtgcagtgctgagaagaataattttcatgtatcttgtgtactcaataatgataaactttatatgactgagaagcaaatcagcactgcactttactcattcgtcattgcaattcacgacttggtacttcgcttctct

SEQ ID NO: 271638 - DNA, 686 bp, Zea mays
agtcaaggaagctcctgatgaggacgttaatgcaaagaaaactgatgtagccaaagcaagcgagtgaattagcaacatgttggactgagctgatcagagcaattacttgcgaactgaaaacactggagtgtagcctgtgctcagctgccacaagatagcctgaagcaaactgctgtacaataagcaagtgattgttctgccatcaacggtggcatatcactgtacaaatgagcaccattgactaacgcacataagtcgccttgtctgaaactggtcattttctttgaaattcaccctccagttcatgtgctttggtggcagacgtcgtggcatggtatatggtacctgagaacattctttgggtggcaactggttttggctacttagtcttctgttgcctgtaatatgagatgtgatgttatttctagtctagctattgttgtaatttttttggactctacatgtgtcagttcgacttcgaacaatttttttataaagatttgaagacatctaaaacaaaaaaaaaaagaaaaaataaaaaaaaaggcggactttaaaaacaccaactaataaaaaagaaaaggtcttatcacaggcgtgccttcactgaattgaacagaaaagaagtcactgagcgatctcggtctaactagcaaaacaagaagatctgttgctagaaaaactgt

SEQ ID NO: 271639 - DNA, 357 bp, Zea mays
ataagcaagtaattgctctaccatcaaccgtggcatgccactgtacaaatgagcaccactgactaacgcacgtcagtcgccttgtctgaaactggtcattttctttgaagttcaccctccagtccatgtgctttggtggcagtcttcatggcatggtatatgatacctgaaagaacattctttgggtggcaactgggtttggctacttagtcttctgttgctttaggttaactttggaactgtaatatgagatgtgattttatttctagtctagctattgtatttttttttcggactctacatgtgtcagttcgatttgaacatgttatttttttcataaagatttgaagacatctt

SEQ ID NO: 271640 - DNA, 639 bp, Zea mays
gcggtggtgggtacggccccatcggtggaggtggaggtgggatcggtggcggtggcggcagtggcaatgatggcacgagcggctggtacggccattgcccgacaaacgcgctgaagctcggcgtgtgcgccaacgtgctggatctgatcaaggccaaggtcggcgtgccggtgaacgagccgtgctgcccgctgctgaacgggctcgtggagctcgaagccgccgtgtgcctctgcacggccatcaaggccaacgtgctggggctcaacctcaacatccccgtcaacctcagcctcgtcctcaacttctgcggcaagggcgtccccacgggcttcaagtgcctttaaccatgcatgcacatcatgtgtgcgtgcgtgccgtacgtacgtagtatccaagaccacgcgatgcgtgagtatgacgaagaatacgcgcgtgcgccatgcttgccggccggggatacggtgtttgtggtaatgctgttagtttcgtttcttcagtgtagtatgtagctagggcatgcatgtgtccaagtccaagttcgactttgggttgcttgtacttctccatttcataattgaaatcatatttcagatttgggtttaaaaaaaaaaaaaagggcgggctcgcgatctagag

SEQ ID NO: 271641 - DNA, 441 bp, Zea mays
gtgcggcgagaacaagctcctgatgacggcgaacggcacagcagcaaggaggagctgatgaagcacatgcgccggtgcagcggccagctcagcccctcgcttttcgtctgggaggggtgcatcgcaacctcctcctgaacgccgcaccgcagcccagtccacgcgcccgccatcgcccatccgttccgttccatgcatgctttcgacctgctgctgtttgtttgctctgttggttttgtaacgttcgtaacgtagtgctgtcgttgttgctcgcaagtgatgatcgtcacgtcacgtgattggcttagctgtgtgtgtgagagaggtgagggagggacggagagctagcactattggtttggcatgccaccttgtgcgtgccctgcttattgcatctactagactactaaaaaaaggatgtgtgatatggtatttcttttt

SEQ ID NO: 271642 - DNA, 616 bp, Zea mays
ccgaacgaccgaagcatccacttctacagtattttgtttgttgtccgcctggcgcctgcccccataactactctgccaccaatccggggaggaatcaacctagcggtaagcggacatggcggcggcgaagatagcgccgtcgatgctctcgtcggactttgccaacctcgcttcggaggctgagcgcatggtccgcctaggcgccgactggctacatatggacatcatggatgggcacttcgttcctaacctgactattggggctccggtgatccagagcttgaggaaacataccaaagcatatttggactgccatcttatggtcacaaagccttcagattacgtagaaccatttggaaaggctggcgcttctggattcacattccatatagaagttgctagagacaactggcaagatctcatccaaagcattaaatcaaagggtatgcggcctggtgtatcattgaggccaggtactccagtggaggaagtttttcccctggtggaagcagaaaatccggtagatttggttcttgtgatgacagtcgagcctggttttggtggtcagaaatttatgccagatatgatggataaggtgcgcacactgagaaagaag

SEQ ID NO: 271643 - DNA, 1005 bp, Zea mays
ctcttctgccatcgaccatctacctataactttcagaacccttttcagctgtatttcctgttctctgaatgtgtgacatatgtacatttcttgctatggattttgtgaagctaccgacagttgtatcaacacttaattttacaggtggaagcagcaaatccggtagcactggttcttgtgatgacagtcgagcctggttttggtggtcagaaatttatgccagaaatgatggataaggtttgttctcgttgttctatatttctgatcttgaacagttatgttcactttctgcaatctgtgtgaattaggtgcgcacactgagaaagaagtacccttcccttgacatagaggttgatggtggtctaggtccttcaaccatagacgtggccgcatctgctggggccaattgcatcgtcgctggaagctctatatttggcgctgcggacccaggagccatcatatctgtgctgaggaagagcgtcgagggctctcagaacaaaaactgattttggtgtttctgctgtaaagtactccctccgttttttttattcgtcgcgttttagttcaaacatgaactagcggacgactgatattcgagaatggagggagtacttcgaccctgcacgtcagatgagctgatcctcacattgcaccggaactgttcggcgagaataaaatttgatgttagaccttgaacgtcttttgcaatatgcttttttgtctgccctgattatattctaccccttcatataacgcttgatgtgccgtcaagaaatggcgaaacattggcatgactgtaaacaagaaactaaatacgggtataaaaatcgtgtcatgtcatgtccaaaaaaaaaaaaaaaaaaaaaaaaaaaaaaaaaaaataaaaaaaaaataaaaaaaaaaaaaaaaggggcgaccgttcgggaggaagttatatttattccctgttaatactgattttaattttgttaaccttgtaatctcaactaaatctgttattaaaaa

SEQ ID NO: 271644 - DNA, 587 bp, Zea mays
gtcgtctccttacccctcgccggccgtgtgatctgcctgccgcgcggacgccgcgggcgcgacgatgcacgacccgtcggagatccgcaacctccccatcgacatcgcctttggctcgcctccaggagtggctcgtggaccgcaagcgagtgccgcacgactggcggaagcgcctcgccggtattcgcgcccgcatcgcgcccgctttctccgccctgccgcggaacctgcacccctcactcctcgccctcgatccagaagaaattggctaccttgaagcaaagaagatatacagcattctcctagaatccaacaccgagagtcgcaacatatttggccgcctgacgggatccgcgggtgaatgggagtcaattattaaagcttacgagaaggaccatgtcttccttggagaggcagcgcagatcatggttcaaaatgttaactatgacattccatatcagaggaagcagatgcagaagactcagcagcagcttgcagagcttgatcgaagggaggctgacatcaagcgtcttgcggcattgtcagcgactagatatgtagaagcctgccaggaactcggtttacag

SEQ ID NO: 271645 - DNA, 403 bp, Zea mays
ctcgtcgtgcttccgggagaggatgctccccaacagccgccaccagacgttgcagggaagatgtttgagccaccgcttcgtgcgtgggcggctgcaagacctgctcaggaagatgactctgactctggcagcggaaagaaggatccgccattgctgcttaagttttgacggccttcttatgccgatactagttcttaggctccaccatgggtgttgaaagctgaaagatcagatctgatggatgcctgaccttcttcgaacctcagttgtggttcttgtaatttgcaccgcatttcttctgagtatgttttttatgagaagactgggaagatgacagacagatactgtatcacgtgatgctcgtaaattaacactacatgcgaattctcttgctcgattgctc

SEQ ID NO: 271646 - DNA, 554 bp, Zea mays
gcgaaagcttctgaggatcagaagctttctgattcacctccaagcttagatgactacccagagaggatgcgaccttctcccaagaaaccaaggatagatgcattatcaccagattcagagcgcgatacaacacaacctgaattcgaatcccatttgatcggtccgtgggatcacggcattgcattcccagtggaggagttcaaagcagaccctgctatgagcaagtcataaggcaaacttcgccttggcagaaaattttcagagttggcctctccccgagatgagcattctcatgtgaatatatattatcttaacaacagaatgttgtacgggtttttgaccctgcacctgatcccttcagccacgtccagttattcttatcactgtagtatccatcaacaagtcctgtaattatgaggatggtgttacagagtttctagcaagcatttccatcgagggaatggccctgagttgatccatgtagcaagaaagagaacatgcttgcaagcaatatatttgctgtgaaaagggcacgcccctggatcttcctgaaa

SEQ ID NO: 271647 - DNA, 1375 bp, Zea mays
cccacgcgtccggtcgaaggcagcgcagcaggcccgccaggacgccattagcagcggttggccaccagcccaccacccgacgccggaggcccggaggaggaggcggcgatggcggggaagcacgggcgcaacggcttcgacgacgacaacgtcaaccctttcgcgggaggaagtgttccacctgccaccaattctcgtctctcacctctatcacatgaaccggctgatttctacaatgtggacattcctctcgactcatcaaaggatctgaagaaaaaggagaaagaactccaggctatggaggctgagctaaacaaaagagaacgggaattgaaaaggaaggaagaggcggcatcccgagctggcgttgtgatagaagagaaaaactggcctccctttttccccctcatccaccacgacatttccaatgaaatacctatccatctacaaaggatgcagtaccttgcattctcatcattcttgggattgatagcgtgtctcttttggaatgtcatagcaactacaacagcatggattaaaggggaaggtgttatgatctggctgcttgccattatctacttcatatctggtgcgcctggggcttatgtgttatggtatcgacctctttataatgcaatgagaactgagagcgctttgaagtttgggtggtttttcctattttacatgattcatataatcttctgtgtgtgggcagctgtggctcctccattccctttcaaaggaaaatctttggctgggattttaccagcaattgatgtcataagcaagaatgctattgtcgggatattttacttcgttggatttggcttgttctgccttgaatcacttctgagcatcggtgtcattcagcaagtctacatgtatttccgtggaagtggaaaagctgcagagatgaaacgtgaggcagcacgtagtgctctaagttcagccttctgatgaacatagggcggtctgattagagcagtagatggataagggaagggaacgagatgtgccaattaagccacgcggtcttgtacatcactgcagtacgtggatttggatcgctgaaagcgtacagctgatcgtctttttgctcttctgtaaaatatgaacaatcatcatatggtccggatgcgtcagggtgttggtttcatttcttgccatggtttagatgtggttgatagggaaaacggtgaagtatttttttggagcagcgaatataatgtatcttcatcgtacttttacatgtgagtgtaatagcttatttcttgtggtaggaatacagctttgctgtgttttcgggaatgacatttgttgtgtaaggctattcccaatggctatttcataatactcttttcaatactgccccatt

SEQ ID NO: 271648 - DNA, 505 bp, Zea mays
gcggttggccatcagcccaccacccggcccccggggcccggaggaggaggcggcgatggcggggaagcacgggcgcaacggcttcgacgacgacaacgtcaaccctttcgcgggaggaagtgttccacctgccaccaattctcgtctctcacctctatcacatgaaccggctgatttctacaatgtggacattcctctcgactcatcaaaggatctgaagaaaaaggagaaagaactccaggctatggaggctgagctaaacaaaagagaacgggtgtgttggctttcagtctttctgctccttttgccagttatagcagttctgacaaataagatgcaagttcatgtttcacaaactgctatatgtacaatttgtctcttgtacttaatatgttgccaaagcattcctagtactcgaatatttcatatgataggcttatcttgctttgcatattacttgtattgattaagaaaaatcttccttctgcatacaattgcattgaga

SEQ ID NO: 271649 - DNA, 644 bp, Zea mays
ggggaaggtgttatgatctggctgcttgccattatctacttcatatctggtgcgcctggggcttatgtgctatggactgagagcgctttgaagtttgggtggtttttcctgttttacctgctccatatcttcttctgtgtctgggcagctgtggctcctccatttcctttcaaaggaaaatccttggctgggattttgccggctattgatatcataggcaggagtgctattgtggggatattttacttcattggatttggaatgttctgccttgaatcactgctcagcatcgttgtcattcagcaagtatacatgtacttccgtggaagtggaaaagctgcagagatgaagcgagaggcggcccgtggtgctatgaggaatgccttttgatagagcgacctaggcgactggaagagacacggtgtgacaatgggtaactgcgttatgtacatatgctgttcgtctctgagattacttatactagcttatagccttcttgccttcatgcaatgtataccgcctaccaccggagctgtgatctcttacctaggttcagatgtgcttataggtaactggtttttttatacatttcctacatgatttgtactttaactcgcgagacaattgtagttgttccttggatc

SEQ ID NO: 271650 - DNA, 505 bp, Zea mays
gaaaatctttggctgggattttgccagcaattgatgtcataggcaagaatgctattgtggggatattttacttcgttggattcggcttgttctgccttgaatcacttatgagtatcggtgtcattcagcacgtttacatgtatttccgtggaagtggaaaagctgcagagattaaacgtgaggcagcacgtatcgtctaagttcagccttctgatgaacatctttttgtaaggtctggttacagccagtcgatggatcgaagggaacgagatgtgccgattgagccacgggacggtgtcttgtacatcactgcagtacgtggatttggatctctgaaagcgtacagctgatacctgataatctttttgctcttctgtaaaatatgaactttcctcatggatgcgttagggtgctggtgccatttcttgtcatggtttaggtgtggttgatagggaaaacggtgttctttttttttgtagtggcgaatataatgtatcttcatcaa

SEQ ID NO: 271651 - DNA, 435 bp, Zea mays
ttgaatatctgcttcagaactgagagcgctttgaagtttgggtggttcgtcctattttacatggtaagatgtcgagtaaaatagactgaaggtttcacacatcatgtatttgtattgtattcataaagagactgcatgcctcactgccaatctttgaccatttccagattcatataatattctgtgtgtgggcagctgtggctcctccattccctttcaaaggtagatctttggcgtaagtatcctagtttttttatgcattcaagatcataaaagtgctaactgtttctttgctgttttaacagtgggattttaccagcaattgatgtcataagcaagaatgctattgttgggatattttacttcgttggatttggcttgttctgccttgaatcacttctgagcatcggtgtcattcagcaagtctacatgtat

SEQ ID NO: 271652 - DNA, 739 bp, Zea mays
tttcagtggacggatgagggagacgaaggtgatcctgaacaagctcggcaatggcaacgagtcatcgcccaactctgtgaagcggaagtggtggggcaggctgaacacctccaagttttcgtgagtttattatgtattaattggtaatttgtagatgtaaccggtattttacacgccggtgtggttctagcttcctagagtttctactctacgggtgctgtgaaagtccagtgtgttggactggatttgtattcgacggagggcgagttgtatagttctcccacaatggcttccttttgaggggtcaaggaccactgagttgtgatgtaattacttgctgaagtagctgtcgaaggggggagattgtgagtgcttaatattccactatcctcgtgctttactttctgcctgttgtagattcatagatttaaatgttggtatggtgtgacataatctatcatccgatgactctagtagcgtgtttggtttgaggaatgagatagtttattatttctcaaaaaaaaaaaaaaaaaaaaaaaaaaaaaaaaaaaaaaaaaaacaaaaaaaaaaaaaagaatcaaaaaaaacttattgaaaattaataatataaataaaacacataatcgcttccttcttcataaaattactttcatgtctaggaaaaattaaaactggggggcctgcttttaaaaagaccaatttattacctctgatttcaaactattatcttttttttttt

SEQ ID NO: 271653 - DNA, 545 bp, Zea mays
atatttccccatgcagttcttactgcgcaacaaatttcactactgagcagccagatgccaaccactccagctgagctagaaaaggttatagggaaggtgaagacaaggaagtacggcagcaagatcattgagctgatgaggtcacatgacaattcaggaagtggccgaggcaaggaggctggcgatgaacacagagctaagaagatcaaaacgaaggatgaggatgttgtttgtgttgagagtagcgaggaagaatagaatatgcccttcacatacttggctttttagtctatcatctcatggttaattattttgccaatcatttcctccgacgtcatctttctgtaatttagactttcacggattaatgcacagtcatatttcttacagagaaagcctcgagcatccttttgaccggttcatagtcttttgcttcggtagctttgtatcttgttgatgatcggattaatgtgcgaacccctgggattaatgtgcgaatactttgtgtcaaaaaaaaaaaaaaaaaaaaaaaaaaaaaagggcgg

SEQ ID NO: 271654 - DNA, 166 bp, Zea mays
cgggactaatttttagtccctatattttattctattttagttccaaaattgtaaaatatagaaactaaaactttttttatgtcacttagtgggtgtttggtttctagggactaatgtatagtaccatataaattcaagctatacacattatctctattacttattt

SEQ ID NO: 271655 - DNA, 1332 bp, Zea mays
gaactggcgtgttgctttctggggagagtcaatattgatggttccttttgttattcttggttttgttataaagccactagacctcaaaggatttgctcacaacacaggaaaagaatatggccagatgcttaatcctgaggttcaagatcagataaataataatgcgacaaagcatgttttgcctggtggaattgaggatctttcagggaaggttccacaaaagttctccttgtccagtttttgccacggtatcatgactgaaattggtcgcttcagcaaagatatgaaagaactactacaagagaaggtttttgtcatcgttgttttaggttatatatcctacaatttcgtcattggtgcttattcctactggggcccaaaggcaggtcaagagatctacaatatggggagtgcagatcttatgtttggtggaattactatagtgtgtggaattattggatcactagcaggaggtttcatccttgacaagatagggtctactattcctaatgccttcaagcttctttcgggtgcgacatttgtaggggcaatattctgctttggtgctttttgtttcaagagcctttatgggttcataccctcctttgcagttggggagctttcagtgttcgcaactcaggcacctgtaaattttgtatgccttcacgccgtgaagccacatttgccgccattggcaatggccgtatccactgtttcaatccatatatttggcgatgtgccttcttcacctcttgttgggctgcttcaggacaaaatcaataactggagggagacagctcttatattgacatccatccttttcgctgcagttgtgttctggttcattggcatatttgtccccagcgtcgaccgtttcaacgaagagagcgagtatggccttactgccgccgagagatcaagtctcaggccactgcttggtgaaaacgagccacggacatcggactaaaatctgcgcaatccataaccatttattacttggaagggcaattttaggatatgtttgttttcctcctagattatatgagctggattatagtgaaaataagctaaaataagctcgcattgggtaacttatttcagttgcatgccagttgcaatcttagggtacgaggttacaatatcactttggaaggctaaaataagttatcataatccaacttatgtaatctagaagaaacaaacagggccgtagtccgtagtattatcctctgtctgtgccagcaacatgtgaaatgtaaagttgtatgcccaacatgtgaaatgtaaagttgcatgccagttcaatgtagatgtacatatacgaggtctgtt

SEQ ID NO: 271656 - DNA, 447 bp, Zea mays
ctcccggcacctgtaaattttgtatgccttcacgccgtgaagccacatttgcggccattggcaatggctgtatccactgtttcgatccatatatttggtgatgtcccttcttcacctcttgttgggctgcttcaggacaaaatcaataactggagggagacaactcttatattgacatccatccttttcgctgcagttgtgttctggttcattggtgtgtctgaggctgcacaagatgctcttgatcatcttttcaaccaaggccccaatctcgcaacagaaaatgagatttctgatacctttactaggctggttgaaaggctaccccaagtggtacttggaagcgaggagacatccgcactttcacatgctaggatgacgctggcactgaccttatatgctggtccccaagtgatgagtaatcatcttcaccgatctcctgtcatt

SEQ ID NO: 271657 - DNA, 385 bp, Zea mays
agattatataaatggattatagtgaaaataagctaaaataagctagcattgggtgatttatttcagttgcatgcgagttgcaatcttagggtacgagggtacaatatcactttggaaggctaaaataggttatcataatccaacttatataatttagaagaaacaaacagggctgtagtccgtagtactatcctctgtctgtgccagcaacatgtgaaatgtaaagttgcatgccaattcaatgtagatgtattgctttgcgttttttctctctacagctacaggctacagaaacaagcgagagaacgttacaatttattttttggaatgtaaaacattttggattgtgacatgacacaacttactggccacaatattcctttct

SEQ ID NO: 271658 - DNA, 538 bp, Zea mays
tgcaagcaggagtatagacatgtagcgttgcacttgcactgccctcccagctggtttggtttggtttcgttttggttttggttgggttttcacaggcaccgcgcgcgcgccggcgatcgagatggccgactggggccccgtggtggtggcggtggtgctgttcgtgctgctgtcgccgggcctgctgctgcagctgccggccaagggcgggcgcttcgtggagttcggcaacttccagaccagcggcgcctccatcttcgtccacgccatcatcttcttcgccctcgccgccgtcttcctcatcgccatcggggtgcacatcaccacggactagccgtatagccatagccgggaccgggatctttcttcgttacagtctgcctgtatatacatacatacatgctcagtacgtacgctttaccactgtgtcagtgagtatctctttgtatcagcacccctgctgtgtgcataccaagcaagtgtttatatgggctgttatcattcagtggcgcagcaagaaacctgatcgcttgcttcc

SEQ ID NO: 271659 - DNA, 374 bp, Zea mays
gtatagtcggtctcggtcggcgtcagccctcccttgcttgccgatccctaccgctccaaacacccgccagggctgagagctcgactcgagatatggccgactggggccccgtggtggtggcggtggtgctgttcgtgctgctctctccgggcctgctgctgcagctgccggccaagggcgccggccgcttcgtcgagttcggcaacttccagaccagcggcgcctccatcttcgtccacgccatcatcttcttcgccctcgccgccgtcttcctcatcgccatcggcgtgcacatcactacgtactagccttggaatcttacttcatcagtctgcctgcacacccatgtgcagacctagcaagtggtttatatg

SEQ ID NO: 271660 - DNA, 571 bp, Zea mays
gagtgactttcttttgtttgatcttatagagctagcagactattgcaatgcaaagaaagtgcatctgatttatgacaaaagagaacatccgaaacagtccttactgcagcagagtctaggtgacctccagggttcttcgttgacagtggtctttgaaggaaccataatgaatcgcgaagaagtttgcagcttccaacttcctcctccctggaaactgagagggaacatccttaattatggcttgggacttcttagtagttactttgtttgtgatgcattgactattctttctggaggttacttttacatttttgatcccttgggcttgactggtggtacgacttccactgctacctcatcagcaagatacttctctctgttaggtgcggaatataatcactcaatttatttgcatatcaaatagaatcacaagttctactgtgaacacatgacacaaactttagattctcttttactgtaaaagaaataagaatctctttcttatgttgcaatttgtgtcttctgtcaggttgaaattatatatgttgattagttataacatagtgtactc

SEQ ID NO: 271661 - DNA, 358 bp, Zea mays
cggacgcgtgggtccagctacaatacagcacaacacattctccatggtgcgttaaatctgagtagaaagccccaaattggagggttttgctgcactcctgcactagcatttgatgacctgttactcttggcagtgatgcagattggatttagccccaaattaggctaattgaagtgaaatgctgtaatatttatccttttatcaattatccccaagattaatagcaacacttgtggccttttggttcggcgactttgtaaaactcttcgtttcttatgtgccatctcaattttgtacccagagacaaggccaaaaaaaaaagggcggccgctcgcccacgcgtccacgaacgagaggg

SEQ ID NO: 271662 - DNA, 386 bp, Zea mays
ccctccgcggaggctcccccagcccccagcgccgccgttgccggcgcctccccctccgccaagtggtttgccgccgccgcaaccgtggccgccgccgccgccgccttttattgagaaagcgggagatttgcgccgtcccctgctgtaatttatcgctatccgtgctgagccgttgattccttttttttttgttgttcttccctttcatccatattccattcggcattcgattcagtaggactggcatatctgttcgtgttactacagtgtaggatcgtggcttggacagattggtttggctggctggctggttgggtgggcccggtggtgttgtggctttccgttcccccatctgtttaaaccccagttgctttatacttcccccc

SEQ ID NO: 271663 - DNA, 803 bp, Zea mays
cccggcccaggaccacggtgctcggcaacatccccggcaccatggtgtaccggaggatggaccagtacgccgccgcgcagacggtgcccggcgtgctcgtgctgcgcgtcgacgcgcccgtctacttcgccaacgccagctacctgcgagagaggatctcgcggtggatcgacgacgaggaggagcgcaccaagagccagggcgagatgggcgtgcggtacgttgtcctcgacatgggtgccatcggtagcatcgacacgagcgggacgagcatgctggacgagctcaacaagtccttggacaggaggggaatgcagatcgtgctggcgaacccgggcagcgagatcatgaagaagctggacagctccaaggtgctggagcagatcggccacgagtgggtgttcccgacggtgggcgaggcggtggcgtcgtgcgactacgtgctgcactcgcacaagccgggaatggccaaggacagcgccgccgcccacgagagcatggtgtgacgagcaccgccacgccaaccgtatgtgtagtgtgctccggttccggtctgacgtaaccagtcgtcacgcggaccgagatgaattatgtatacacgtgtctcgagtattgtacacctgcaccgtcgcgggaaaaacggagtcaggatcccacccggtttttttggtgaagaaaaaccccatctcgacatggtctctagaacgcgcgcagacatgctgtgcgctcgcatcttcgctaaggccagatgtgagaggttctatgggagatgagagttttatagggatgaaattctatatata

SEQ ID NO: 271664 - DNA, 2331 bp, Zea mays
cttgcttgccagaatgatggcatcaaacttgtactgctctcagattgaggatctcatgtttgagatgtctatgtggcgatgcagtgatgaactgcgcatgctagctgatgtgctgcatctctccactaagaaggatgccaaacattacatagagttttggaagaaggttcctccaaatgagccatatcgggtgatactgagtgatgtcagggataaactgtacaacactcgtgaacggtcacgagagcttttatccagtgggcattctgatattcctgaggaagctacattgacaaatgttgagcagctgttggagcccttggaactatgttacagatcactctgtgcttgtggtgactctgtaattgctgatggaacccttctggatttcttgcgtcaagtgtccacctttggactctcccttgtgaggcttgacattaggcaagagtcagataggcatactgatgtccttgatgccatcactacatacctggggataggaatcttaccgtgaatggactgaagaacgccgccaagaatggttactgtctgaacttaatggcaagcgccctctgtttggctcagaccttcccaagactgaggaaatttctgatgttctagacacattccatgttattgctgagcttccctctgacaattttggtgcgtatatcatttccatggcgacagctccgtcggacgtccttgctgttgaactcctccaacgtgagtgtcatgtgaaaacaccacttagagtagtcccgctgtttgagaagttggccgatcttgaggctgccccggctgcattggccagactgttctcaatagattggtacagacagaggatcaatggcaagcaggaggtcatgattgggtattcagactcgggcaaagatgctggtcgcctctcagcagcttggcagctatacaaagctcaggaggagctcatcaaggttgctaaggactttggtgtgaagttaacgatgttccatggacgtggtgggactgttggaaggggtggtggtcccactcaccttgccatcttgtcccagccaccagacacgatccacggatcactcagggtcactgtgcaaggtgaagtcattgaacagtcatttggtgaggagcacttgtgctttaggacactgcaacgtttcacggctgctaccctggagcatggcatgcacccaccaaatgcaccaaagccagaatggcgagcccttcttgatgagatggcagttgtggcaactgaggaatatcggtccattgtcttcaaagagccacgctttgtcgagtatttccgccttgcaacccctgaaacagagtatggtaggatgaacataggaagcaggccatccaagagaaagccgagcggaggtatcgactcactccgagcaatcccatggatctttgcttggacacagacgcggttccacctcccggtctggctaggatttggagccgcattcaagcatgtcctccagaaggacatcaggaacctccacatgctccaggaaatgtacaatgagtggccatttttcagggtgactattgatctggtggagatggtgttcgccaagggtaatcctggcattgccgcactgtatgacaaactcctcgtttcagaggaactgcatccattgggtgagaagctgagggccaactatgaggaaacccagaagcttctacttcaggttgctgggcacagggatcttctggaaggtgacctctacctgaagcagcggctccgcctgcgtgatgcgtacatcaccaccctgaacgtctgccaggcctacaccctgaagcggatccgtgacccggactaccatgtcgcgctgcgcccccacctctccaaggagatcatggactcgaccaaggctgcggcggagctggtgaagctgaaccctggcagcgaatacgcaccggggctggaggacaccctcatcctgaccatgaagggcatagcagccggcctccagaacaccggttaaaccacgaagaggggatcttttttctcctcctgatcattggctctaggtccttcgtattttcgcggattgtaacttcggccacctctctacaccgtgaggaaataatggtggtttctgcaaaagtggtggtaaataaaagggcgacaagccgacaactatcttgtttttcttagtaacttgtaactttacgatgcgataatggaacatggcctgcgttatctgtttctcgtgaagcatttttgcaggcaggttctgaattggagaaaattgcatttttaacactgccagtgtgcagtcaatattacacagttcagttagaatcttatatattggacggcat

SEQ ID NO: 271665 - DNA, 422 bp, Zea mays
gtcgccatgggtctgcaggaggagttcgaggagcacgccgagaaggccaagaccctgcctgccaccacgacgaacgagagcaagctcgtcctctacggcctctacaagcaggccgccgtcggcgacgtcagcaccggtcgtcctggcatcttcagccttaaagagagagccaaatgggatgcttggaaggctgttgaagggaaatccaaggacgaagcaatggccgactacatcaccaaggtgaagcagctgctggaggccgccgccgcatccacctcctaggctactcaagggaaaacaaaaaccatgatccgcagtcgcatatacgtatacatgttgtcatgatatacgctcgccaataaatcttatcattgttgtactgcttggtatggcttctgatgccatatatactcatcaccctt

SEQ ID NO: 271666 - DNA, 399 bp, Zea mays
ctcgagccggtgtatggctccgtctgttttctgtcctataattgactggctctgcactccccccaatccaatttcagaaaccgaagacgtttgagattgcggggtctgagtctcttgatttgtgcctagagattggtttttcactttccacgaattgttggactgaaagaaaaaagatctataaaagggagtaagttcctgtaaaaaaaaaaaaaaaaaaaaaaaaaaaaaaaaaaaaaaaaaaaaaaaaaaaaaaaaaaaaaaaaaaaaaaaaggaaaaaaaaaaaaaaaaaaaaaaaaaaaaaaaaaaaaaaaaaaaaaaaaaaaaaaaaatggggggggccctttttaagaaaccaaatttaattaccggtggttggcaaaaaaaaattttttttt

SEQ ID NO: 271667 - DNA, 958 bp, Zea mays
acccacgcgtccgcccacgcggccgtgcaggcactgattgctgagggggctgttgagatgattgtgcctggtgtcatgcccacgggctgcttcccagtttacttgaacatgcttgatgagcccaaagaaggatacggcccccacagtggttgtgtccgccggtacaacacattctcctgggtgcacaatgcacatcttaaggccatgcttgagaagctccgggctaagcaccccaatgtgaggatcatatatggcgattactacactccagtcgtccagttcatgcttcagcctgagaagtttggttttgccagacaactgcccagggcatgttgtggggcgccatcgactcctgagagagcagcttacaacttcaatgtcacggccaaatgcggtgagcctggtgcaactgcctgtgctgatccgacaacccattggagctgggacggcattcacctgacggaggctgcctaccgccatatcgccaaaggctggctatacgggcctttcgcggaccaaccgatcatccaatcctcatgatcatgccgttcctgcggtagagtttatcaaagtagcattgagagtgagagaaaaaaaatggagcggggaaagtaggtcttccatacagttccaatgcttgcatacttgtacatctccatttgattgtattcatttgccatgggggtacaaaggtgggatagtaggtcgcacaaaggcctgatttcttgatttgtcaggttggggggtataaatatgaaagttgttacgcacagataatcatgtatattgtgtcccggaaatgtgttacagattctgctcgagcagcttctgattctctggttgcttacacatcatcgagagcccaaagaatttattccctcttgacaaactttaacgacctaggaactttaagcgtgtcgcctaaatgctgaagatggggagcccgtttagagcctcc

SEQ ID NO: 271668 - DNA, 446 bp, Zea mays
gcggtgagcctggtgcgactgcctgtgctgatccgacaacccattggagctgggatggcattcacctgacggaggctgcgtaccgccatatcgctaaaggctggttatacgggccttttgcggaccaaccaatcatccaatcctcatgatcacgccactcctgctgtagagtttcatcaaagtagcgcactggaaaaaaaatggagcgggggaaagtagttcttccatacagtttcaatgtttgcatacatgtacatctccattttgattgtattcatttaacttgggtggtacaaaggtgggatagggaggctgcacaaaggcctgatttcttgatttgtcagggggtataaatatgaaaaatataacgtacatataatcatgtatattgtgtcctggaaatgtgatacagactgtctgcttgagcagcttctgattctctaatt

SEQ ID NO: 271669 - DNA, 524 bp, Zea mays
  unsure (1)..(524): unsure at all n locations
tttcttatcgtccgccggccgctgctccgatggacgcctcgtcattgaccacctcgcgcaagagttcggcctgccgctgctgccgccgtccaaggccaagaacgccagcttcgcgcacggcgccaacttcgccatcaccggcgccaccgcgctcgacacgccctacttcgaggccaaggggctcggtgccgtcatctggaactccggagcgctcatgacccaaatccagtggttccgtgatctcaagcctttcttctgcaacaccacgcaggcatgcaagaaattctttgcgaaggcgctgtttgtggtgggtgagtttggaggcaacgactacaatgctcccctctttgcgggcatgggcatccctgaggcctacaaattcatgcccgatgtcatccagggcatctctgacggcattgaggcactgattgctgagggggctgctgagatgattgtgcctggtgtcatgcccacgggctgcttnccagtttacttgaacatgcttgatgagcccaaagaaggat

SEQ ID NO: 271670 - DNA, 388 bp, Zea mays
cccacgcgtccgaaattacaggataaggtgcataacaaccatctgcatctagaacgttgccctgtctttgtcatctctagatcacatgtacccgatttttagaatttccatcgaaccgttgccctgtactagcaaataatctgtactttatttggcttgaatttgctgatggagacagttttcctgtctcaactgctagagaaaaagtaggctggcattattgtcgattaaaacagaaggcaccttttgcttcaggcattaaacctttgattttaatgcacgtctatgctgggacctaacaatttgtgttctctcattcaggttttgccaaacaactgcctagggcatgttgtggggctccatcgactcccgagaaagcagcttacaa

SEQ ID NO: 271671 - DNA, 1158 bp, Zea mays
ggaaagggctttgcaggaagatataccacaaactccagatgattttgagaagttggttaggagctccccaaatagtagttttatctggataaagtatatggcaactttgttagatcttgcagatgttgagaaagcacgtgcagtagctgagagggctttaaaaacaataatccccagagaagaagaagagaaactaaatgtttgggtagcatatttcaatctggaaaatgaatacggtagtccaagggaggatgctgtgaaaaaggtattccaaagagccttgcaatattgtgatcccaaaaagctgcacttggctcttcttgcgatgtacgagaggaccgaacagtatgagcttgcagatgaacttctagacagaatgaccaaaaggttcaaaacttcctgcaagatatggttatgccgcattcagtttgctctcaagcaaggcaaggatgttgagtacatcaaagccattgtaaaccgtgcacttctaagtttgccacacagaaagcgcataaaattcctctcacaaactgctattctagaattcaaatgtggggtgcctgaagaaggaagatccagatttgacctaatattgcgggagtacccaaaaagaacagacctttggagtgtttatctagaccaagaaatccgccttggtgacgtagaagttatacgggcattgtttgagagggagggtggcttgtctgaccctacctccaaaaaagatgcagttcttgttcaagaagtatcttaacttcgagaagtcactgggtaaagacaacgaaagaattcagcttgtgcaacagaaggcaatcgaatatgttcagagttcactgccgtcacaagacaactcttgaactacatggagacttaataagcccacaaacaatcattaggaaataccagtcgtactgtagatgtgatctctttgatgactccttgaacattattgtgaaaaggtcaatgtaaaatgtgggctgttcaaaattttgtttgaaaccgttatataagttatgagtctagtatgtcatgtttcacccaattttttggaaggaactattctaagccggatctggttcgaatattgaccttttctatctgtggtattgactgttgaggctgtaaggaaaatggatcccgggccatttagctaagtac

SEQ ID NO: 271672 - DNA, 1432 bp, Zea mays
agcataggcgctcagcacggagcgaggcgccgcgccgtttcccagaggcgctcagcacggagcgagtccggagcatagcaacctcgctgggctcgggcccgcggagccgggatatactccagggaagtcgagcaaggagagcgtggattgtggactacaggggtaaagatcgagtgagcatcgctgcaccatgcgcccttctatctgctgtgcacctctttttcttctgctactattacatttggcatttgctagacctctctttcctctaccgagtaagacaaagaatgaagagaagaagcccatacagacgtttcggccatataacattgctcatcgtggatcaaatggggaaattcccgaggaaacagctgctgcatacatgagagctattgaagaaggggcggattttatagagtctgacatccttgctagcaaagatggggccttgatttgttttcatgatgtaacacttgatgatacaactgatgttgccaagcgtaaggaatttgccaatcgaagaagaacctatgaagtggagtggtttaatgttactggatggtttgtagtggacttcacactggaggaacttaaaacacttagagtgaagcagagatactcgtttagagatcaacaatacaatggtatgttttcaatcatcacgtttgaagaattcatttcaattgccctagatgcagacagaactgtcggcatatatcccgagattaaagatccagtttttatcaacaagcatgtcaagtgggctgatgggaagaagtttgaggacaaatttgtggataccttgcttaaatatggatacaaaggtcaatatatgtcagagaattggctgaagcagccattgtttatacaatcctttgctcccacctccattgtacatgtatcagattttattgactctcccaaggtatttttgattgatgatatcagtgtgagaacacaagacacgaaccagtcatactgggaaattacttcagatgactaccttgcatacattagtaaatatgtcgttggccttggtccatggaaggacactattgttccagcttcaggaaactacttgatgccacctagtgatcttgtcgcacgggcacatgctcatactctcctggttcgtccattctacgtacaggatcgagaaccagtccctgcacttcaactttgttcaagatccctacaatgaatacgacttctggataaacactgtgggggttgatggactgtttacagatttcaccggaacccttcacaggtaccaagaattgacatccccacaccggaaggatgagactgcaaatagcctcctagcaaaaattagccaaatgatctcagcatatgaaggtctgtgatcagcacgacgttgatgaaaattgtttgttcgaaccatttatgacagacagtgcaacgtgacact

SEQ ID NO: 271673 - DNA, 601 bp, Zea mays
caagatccctccaatgaattcgtgttctggataaacactgtgggggttgatggactgtttacagatttcaccggaacccttcacaggtaccaagaattgacatccccacaccggaaggatgagactgcaaatagcctcctagtaaaaattagccaaatgatctcagcatatgaaggtctctgatcagcacgacgttgctgaaaattgtttgtgcttttgttaatcgatctgcaagagcacacgatccattcatcacggacggtgcaacgtgacactgtgactttgcaaggttaaataaacgagttgtttctggttggcccctgttagcacgagccgtactctccattaaagctcttaaaccctgtgagaaatttctagtgtgggaataattgttttcacgatagaaaccgtatcatggtttagcgtgccaggatggacgagttggtctcgggtctttgcacagttggcctacaattgtacttgccggagtgttgaaatttctagtgtgggaataattgttttcacgatagataaacgctcttgtcactcttatcctcttttatgctgcttaagtaacacgctgtttgttggttcatcagtc

SEQ ID NO: 271674 - DNA, 928 bp, Zea mays
tttcgcgttcgcgtgggatggacacggacacaggcacagccacagccatgtccatgagccggtgcaggtagagggtagcgagggggaggtgtcggcacatgtgcgctccattgtcgtgtcacagatactggagatggggattgtgtcacactctgtgatcatcggattgtcactgggagtgtcgcggagcccatgcacaatcaggccacttgtcgcagcacttgcattccaccagttcttcgaggggtttgcactaggtgggtgcattgctcaggcacaattcaagaacctttcagcagttctaatggcatctttcttcgccatcacaacaccggcaggaatagctgctggggcaggcatgaccacattctacaatcccaatagcccaagggcccttgtggtcgagggcattcttgactcggtgtctgctggcattctcatatacatgtcactagtggatctcattgctgtagatttcttgggtggaaagatgacagggaccctgcgacagcaagtgatggcatacatcgtattgttcctcggtgcgctctttatgtcatcacttgcaatatgggcttgagacctgcccttgatgaaatatcagacaaaagatgaagtagtgtccatatatagaatgtctgtggtatatgtacagttttaatgtgtagtattcatgcactgttttttaagggcatgaaaaaaaaaacaccgctgatgtactcaagggtgaactatgtggtttctttaatcgatgatcaagcaatgatatgtttgactgccgctgaatgactgcttgcactgctggctttgtgtcaaatgtgggtgtggcactgtggctggtcttggcatttcagtatttgcaaagtgtaatggttgggtagtcttctgtcaaatatgaaatattaacaaaaaaaaaaaaccacggtcc

SEQ ID NO: 271675 - DNA, 518 bp, Zea mays
ctgaaacgtaggaacaccccgaagtctgaacatactagaagcgtaaccctaagtctcggaccccaaccctcgaggaaggcgaccggagatggcggcgtcgtcggcggtggagaagctcaaggtcctctgggactcgcaggtcaacgacgaggagcagtgggcgctcaattataagctgctgaaggctgctggtctgtttgcgggatccatcttcctgatgcggaacttcggtgatctgatggccatttagtaggcttatcagcgttgtttacttggatcctatgagtgttgttttgatgttccaataattcctgctatgaatatgaaagttattttgctctgaagaggactagatctgtgccgatagtgcttgatcttagactttgtagccatagagattagaccctttaatattcggcgtgtaccgtggatattttggaacgatggtatcagtctgcacccataataattttttgatttgatgggttaaaaaaaaaaaaacaaaaacaacatgggat

SEQ ID NO: 271676 - DNA, 830 bp, Zea mays
ctggtacgcctgaggcacgcggcgcaattttcgggtcgcgacaccacgcgcgcgcctgttcaggcagttctacgtcgtggtgatcgggtacctgtacttcactaggatcgtcgtgtatgcgctcaaggcagttgccagctacaagtaccggtgggtgagcatcttggcagaagagatggccaccctggcgttctatctgttcatgttctacacgttcaggccggccgagaagagccactacttttctctcgatgacgatgaagaagaggccgcagagatggtgctccgagaagaggaattcgagctatgaaagagatgcagcgactcacaagagtctccatgccacgttcgtttgatcttcactccctgtgatcttgatcatacctcaaatgcccggacacagctcatagtgttgtatgtaccgaagggatgtgagatcgttttgtccgtcttctagaattcagattttagtattttactgatgaaacacagattacttaacttataccatgttcaagaagattccttcccctccctttaatttttatctacattctcttgtatttgcttataaaaattaacttatacttctaatttctatgttgttacatctttctatttttaaccatcatctcttaattccttttatattttcctattacttttggcctttcattggtcatacattctacttaatttatttattatattttattactttaaaatactcattttctataaatttttttttatatttttcatttctatccttcattttcttttctttttttattttttcttattcttcaaatcttataatcgttttatta

SEQ ID NO: 271677 - DNA, 661 bp, Zea mays
gaggaatttacacgcttaaaaaatcttgtggaggagaaagagaaaaaaataaaggagctacaggacaatgttgctgctgtcaatttcactccatccagcaaactgggaaaaatgctgatggctaaatgcagaacactgcaagaggaaaacgaagagattggggcgatggcatcggaaggaaaaatccatgagctcgggatgaaaatcgccgttctgaagtcgcagaacaacgagctccggaatcaatttgatgttttgtataagcacatggacggcgtgacgaatgacgtggagagatcaaacgaactggtggccatcctgcaagaggagctagaagccaaggagttagaggtgactagactgaaggaggagacgctttcccagaaggaaggcactcaagaagcaccggcaccggcaccagctccggtggaagagggagacggagctggaaacgatctgaagccggcttcagatccgctgcaagtgaagctggaaagttaaggggagacggaggggtggaaacgaccagacggtagtgtgtttgttgagactcccgatgtgcgggaagtcgtagcatattaggccaatcttaactagtagaaccgttcgatttttataatatcttatgttcattttagttctatctatatagttacaatat

SEQ ID NO: 271678 - DNA, 474 bp, Zea mays
tcccgggtcgacgcaaacgtccagttagctccgcattcgaaggccagattccaagcaggtgaataataacagatggttgcgagtaggaccacatcgaagccaagagatacatgtcgcacagatgggaggatcaatattatcctttttttatttctttataaccaaacaccttggagtactttgacacaaggggtgtgttcacagtgggatctccccagtttcttgaatgcagaaccgtatccgttgtatttgttccttcttgtcgtgagtgtaaatctagcgtgtccgaagttcggttttagattgtaggtgtaactgtagcagggattatctggtgttaagcccgacgagaaaatgattcagtgtaactgttactggtaaccgcaggaaagtagttattcagtgtagatttatggttaccccaagaagaggcaaatacccctgtatgatgtttataaaaaaaggaaaaaacaa

SEQ ID NO: 271679 - DNA, 341 bp, Zea mays
tctattttcatcatcatcatcatcatcattaacctgtggtcttcacccgtaccaagcaaagccagacatggttaggccaagccaagcttctgatagatcattcatcatcatcatcagatgaacgattacgttctagtacgtccttatgatgacagacataaatactatcatttacttactgttcgtgaacgattcatgtaatagacactatatatgaagtgtatttagcttcctagcttctgatgatcgatcgagaggctaattaatgtagtgtaccatgcatatccatctcttgactatcgcttggcatgcagtattgaaaaaaaaaattatcacaacaa

SEQ ID NO: 271680 - DNA, 501 bp, Zea mays
aaaagttggttctcatattttcttgatgagttggaggaatcaaaataagaaggttgcattaggtacaataattggttgtgatccaaagcaacaagttggaggagatccattgggcaaagaattttggaaggttcgtctcggtcttgtacttgtgcgtgatgaaccactaatacggccctacaacaatttcgtggttctaggagacataaacaacgaccctatagcatggccttcaagttgtatagaaaaggcagctctttaatgtcaaccattgaacaacagcagatctacatgagggctatgactttgattcttctttaaattagcgttattagtgatgagagcgatgagtctactgagtccggtttatgagtcaacctttgtttgtttcatactatcatagaaaaaatgtcaattcacacattgtgtaatgaattaagttgtggatgatattttataacgacactactatttttaatatagactgattccagattaaaa

SEQ ID NO: 271681 - DNA, 594 bp, Zea mays
gtttaacagcgcccctgacaagaagcgtgtcctatcttccaaagcgtcgggcgagccgccgctggttctcgcagcctcggtgcactgcgcgatgagggaggccatcagggcggcgaggaaggagttctcggtcagcaccagccccgcgaaatccgccgtcacattccagatggacgtgccggcgacgatgcccgtcgtcaaggagctctgcggcctcgacgtcgtggagaggtacctcgagaacgtgtctgccgccagtgccggcccaaacacagcgaaagcatagatccagcaggcctcagggtgcagtcggcgcactgccagagatgatgtgtgctgccctgatgtacagacagtacagtacagaggagagagaattgggggaactcaggaactgcgaggagcgatgaccagtatatagagtgaaaaataaaagtgcttcgtactaataatcactagaaaaaattatgcacatctcccacgcactaccggcacgactgttgaatattttgtaaaataagatgtcataagctatttattttctgtatgattagatcagcaaataatttaattcaagtataaatcgcagaatat

SEQ ID NO: 271682 - DNA, 383 bp, Zea mays
  unsure (1)..(383): unsure at all n locations
gaacgccaccgccttcgagcaggccttcgtcgacgccatcaccaggctcggccgcgtcggcgtcaagaccgacccgtcgctcggggacgtccgccgcgactgcgccttcctcaactgaaaaggatggacatggagagctggtctatatctcacacaagtgttcatacacaatctagagtaaagtttttttgttgttgttattattatcatgtcaggtatgagcacaaggttgaattaatggttaatgcgattgatatactgtaagtggcacttgcattggtaggccaagaccgagatgtattccttttccctgttgattttgttcggtctcggagcaatatttgttccaccgtttttcttctaaaaaaaaaaaaanngaagga

SEQ ID NO: 271683 - DNA, 662 bp, Zea mays
caagagagagggtcactggcggtggattgtatcttgatctgataccaactgccacaaagagggatcctgctgctcagtttttagtcactttcagaaacaaggacactatgggattgcgatctttattgctggaggcaaactattacaggctaataataagatggagttcgtcttcgcaagtcattcttttgatgtttgtgagagctggatgctggaagggtgcctttcagaatgctgcaaacttgttaatcgcaaaaatgctatggctgtacttggggtctatattgaggtccttggagctccgagtgaagatggtgtcgttcggtggcttgattaatacatcaaggctatgctatatttagagaacattttaaggctatgttgtttctatagaacaatttaggcttatgctgccaactgctatcctcgggttaggtcttctctgagtctctcttgccaagtctcagttttggctgttctactgcatctgcatggacatggactcgcaacgcagtcttttttagtttgtttgtttttttactgtctgtttgttgtaagctgtgtctattgtattttaattatacagtgtgacaagcaatcgctattatagtattctctattcaaaattcaaaaaaaaaaaaaaaaaaaaaaaaaagaaaaag

SEQ ID NO: 271684 - DNA, 750 bp, Zea mays
gctatatatccggttttaatatcgtattcctcgcctgacaagcaagcattcccacgacacactctcagccgtgctgctctaatcatgagcgagagcccaatatttcttcttgacacatttaccaaccttattgtttactattcctcaactgctgatccttcatttccttttcctccaccccgtgactgtcttttgagaacaacaatcaataaactgaagcaggacagatgtataacccccaagcttacattcatccatggaggggaagatgattcaacattgtttgagagctatctcattgaagagcaagatgtcgatggatcgggctttacaactggttcaggttttgtagccttccgtgagagcgttaggaatgttgcaggagagatcatccaggaagaaattggaagctagtttcagctagaagacccttttggtcccgctgcagagcgtataaactcggatgctttttaaccctaattaatatcgtagtagttaacttagatagccaaaatggagaaacaatgtcaaaataataagaggggccacatgatttgtagttgcttctggcaataactgctttaggcttgattaatcagagaagcctttctggtccagtggtaaaagggacgagtagtaccccaatacaccgtgtgatcctggctgtctgaattttttcggagaatctcaaacccccgctgtatattaaagaacccctccattcagattaaaaaaaaaaaaagataaaaa

SEQ ID NO: 271685 - DNA, 702 bp, Zea mays
gttatgcatccggtctgatgatgtgattgctggtgtgacatgcatgcatttcaatgacacactcctaaacgtgctgctctaatcttgagccagagaccactattgctgggggactcattctccaatctcattggccactagccctgaactgctgatccttcatttgctcttcctccaacgcgtgactgtatattgagaacatcatgtaataaactgaagccagggagatgtattacctgatagattacatccatccatggaggggaagatgattcaacattgtttgagagctatctaattgaagagcaagatgtcaatggatcaggctctacaactggttcaggttttgtagccttacctgagagcgttaggaatgttgcatgagagatcattcaggaagaaattggaagctagttccagctcgatgccccttttggtgccgctgcagagcgtatcgactcggatgctttttagccctaattaatgccgtagcagttaactgaaacgtaaatagccaaaatggagagcccattcaatgaataataaacggaggccccttgatgaatagttgcttctgtcaacaactgctttaggcttgactaggcaaagcagccttttcgggaaaaagggccctgtctgtttttatgctaaaacagacgagttttcctacccaataataccccgtcggaacctggcaggctg

SEQ ID NO: 271686 - DNA, 526 bp, Zea mays
aggctcggacgcgaaagacatatcctcctccgtgtcggcgattgctaccgagaagatcaaggctgagaaacagcccgcagcaggcaaaaagaaacaaggagccagaaagaagcagctccacatcgagaaaggagacgacgacttcatccccggacggggtggtggctacgatgacccggacgagtacgacttcatgtgatttggctggaaggaagagtaagtagggttaataggtttccgtcttgtatacatttggcaagcagagaacatatcacgagagtttgcggcatactatactatggcatggaacatgcgttatctgtttgaggatgaattttgactctgcaggacaagaagagcacaagtgcttacttaattgttattgaatctctgtggtatttttttagcatacattgcattttcatttattttttgtcaactgtactgtaatactgtcgtcggtatgtactgtaatattgtcgccggtaccgggcgtgaaggtatgtcacacccgggttttggggca

SEQ ID NO: 271687 - DNA, 420 bp, Zea mays
aagactaggctgatggctcaagggagaactggggacgccaagtacaaaggcatggtccatgcgatacgaacaatatatgccgaagaggggctgcgagccctgtggaaaggcttgcttccccggctcatgaggatcccacctggacaggctataatgtgggctgtagctgatcaggtgatgggcctctatgagcgaactcatctgcagccagttcatatttgaccattctattgcagtgctggtgctgcactgaattttttttttggttggttctctcaatcggcggttagacgtggaagtcgtcgattatggatattcgtttgttcattgcttagagttgggtattgatggaagcaatggaagactcttgtactactattttgttgtcaaaaaaaaaaactagttctagatcgcgagcgg

SEQ ID NO: 271688 - DNA, 522 bp, Zea mays
ggcggggcgccaacgacaacttgacggcggtgatggtctcgttccactcggacgccccctcccccgagccgtgccaacaaaaggaccggcagggtcacgcggagcatatcggctgaggggcttcccagcctcagagtgctcctggaaggccagtgacgtcgccgggcggcgcggcgccattgctgcccgttcgtccctgatgctgtgctacgttgctgatgagtgttaactgtaagtagcggtttccggtatcttggtgcttgctcttcttcttccgctgagggcgggcgactattcttgtccttcctccgacaataaaccaacgggcctgagatctcactgtgagacgctgtaaataaggaaatatggaagttggagctcgtcattaaggacgagttagggcatgtacaatgtagatacctcgacacggtcctccaagtataaaacacacctaagacacagttcagtacaaagggacgtatctaaagtcttacatcttaattaatgtttcaaattcatcgt

SEQ ID NO: 271689 - DNA, 408 bp, Zea mays
ctcaaaaggtgtgggtgctggaagagctggagcttccagttgtcagtatatgctcggagggaaacagaaaaaaggttctgatgaagtctccctgggagataataaaaaaagccaacagggtctggagcaatcttcagcttactgttatcaaacaaaattttggaaaccctcaatgaaatgggtgtacagtatacacagatctgcagcttcatccaacagaccaatcatcgggcatcctttgctctttggggctgtcgcttcccgcggggctgatgttggcatccagctctccaagaccggtgaaacattggacgatttggacgtgatccttttcatcgaccagctgaacaagatgtgccgagatgtcacccagatcaggttctccgctcgccccgaacagaacttgca

SEQ ID NO: 271690 - DNA, 328 bp, Zea mays
gaaaaaacgtagcaacagcaacagaagagtcgtgattcttttattgcagagctggaagaagacaagagtatcgcagggagaatacactacctgttccttgattagtttcatttatatgtataggtcctcttttcgttggtgtcattttagtacaatttggtttaataacacacaaggaaatcgtgttgtagatagggtagatcaaatctcgtgtatcgaccttcgtcttcgtggtggtagaatgaaaggatatataaataagttggtgtaaaaaaaaaaaaaaaattataaaataatatataaattaaaaaattaaaaaaattaaaaa

SEQ ID NO: 271691 - DNA, 553 bp, Zea mays
tcgccctacgcgtccgtggagtcctctcgttcagaatatctcgccaaggagaaaaagcttaacattcgggagtcatcgacatcaagggcagagccatcttcatccgccgcaattagtggttcctcccgttcagttgctggagctgatagaggcaaagaggactactttgtgcttccagatactgcactgactcgcagcatgcagttgctcctcgcaatgggcttcagctacatccaggtcatggaggcctacagcatattcggcgaggacgtggactcgatggtctgctacctgttggagacaggaggcaccggagcctcagcgggcggtagcaatcgccggaaaggaaaggctgctgagtgatctgcacaccttcattgctgtggatgtaatcgttgatcgaaatcgttgggcatgaggaagcataccagataatgacagccttgtgagttgatatgtcgatatacctgctaccttttgggtgatgaataaatggtactcacacttgagacttctaaaaaaaaagcataagttaaaaaaaaaaaaaaaagaa

SEQ ID NO: 271692 - DNA, 657 bp, Zea mays
gggaaaagcaagtgcagttatggaaggatctgatacttgattactgtagaagtcaaaagatacatacaatatctctagaagaagatttccccttgttctccaatgcaaagattgagagatctcttagctacgaagcaaaggaagtgttcctcgcagctctcgtcagtgaaggtcgtgcagaatggatggacaaaggtcacaagaagtgcctaattctttggctaaggatacaggattgggcaaatttcatattgaactttgtaaaggataacgggttggaagtaatgactatcgaagaaatacgctctggaattgatacacgtggaactgaactcgagggaattgatcgtggtgttctcatgcgggctctgcggcagttggagcaaaagggaaaggcagctatcttcaaaggcacctctgctgatgacgaaggcgtaaagttttcggtgtaattcttttgcgatccttaaactggcagactaataatctcgttcagccggtgcccttgaacatggcatgagacacccatagcctcgatcattcagtgccctttgaaaatggcatgacacatccttgtaaaaagcagtagggctgatcacattcttcccgagtagtatcctcttcagtgctgcggtaaaatttcccaactcatctttt

SEQ ID NO: 271693 - DNA, 447 bp, Zea mays
gcgcgctccggggcgtgctcatgaaggccgtgctcaccttctcgctgctcttcgcggtttacgccaccgtcgtcgacccgcgccgcgccgtcggcggcatgggcccgctgctggtgggcctggtcgtcggcgccaacgtgctcgccggcgggcccttctccggcgcgtccatgaaccccgcgcgctccttcggccccgcgctcgtggctggggtgtgggccgaccactgggtctactgggtcgggcctcttatcggtgggccgctcgctgggctggtctatgacggcctcttcatggcccagggcggacacgaaccgcttcccagggatgacaccgacttctaggcagtaggtgtgtgttctcctgaataatttgaattgaaaacacatgtattgaagcctctaatgtttcggtttcgattcgaatggaatggaagcagcagtatca

SEQ ID NO: 271694 - DNA, 1111 bp, Zea mays
tctataaaaacagtatcctgagctgctatcacaggggctgcttagttatccaactacatccgtgggcagagaccgttaaccatattattttctgaacttaaatgcaattagtcttccttgaatcactccctgttgatttggcatactgaggggatgtttcaattgtggagttgcttttaagaggagacatcatctcttccgccagtaacatcactgtataagtactatttcgacagtctccttccacgagtgcctctcccaatcctccgacaggtcactagccaccttgagaagctaaagcttccaacaaagcagtcaggaatgactggggattccaacaggcttgaatcaaatgataccgccagaaggcctccttccgtaaaggcttctttgtctgtctcctttggtcagcgcgctccacaccgtgcatccacaagggattcttccccggtccgaagaacgttaccttccaaacaggacaaggaaggtgaccgtgcgaaatcgccaccgatgaagcaccggagtcggagctctgagcgtgatcatgatttggagagggagcgctcggatcgtgaacgtggcagtggcaggtactacaaggatagggagcctgatcggcatgctcgtgagcacagagaccgcgatcatcgtcggtctgattattcgaacagggatggcgaaacacgaggccgtgaaaggagggacagggattctgaccggagtagacatgcaagcgtccgcaggagcaggagcaggagtccagtccgtggcagaagtgatggcgacaaacatcgctccagcccgtttggtagggctccagaattgtcgaacctggcgaagctgaaggatctgtacggcgatgcgacaaacgtgaagaatgatgctggcgacgatagggcgcacagggattctggaacggaagaggtgatccgactgggaggggcaaggtggaggtgagtctcatgttaagggacagtgggacaccacggtgatgcatttaggtccatgaatgaatccaaacagcatcagtggaggaaatgatgggctgtatgtcttaacttgaacctacgatttcaatgctttattctgaaggttttcctctcattatgct

SEQ ID NO: 271695 - DNA, 1007 bp, Zea mays
ctcccctccgcttctcctctaggtccctctcctacagaacccttccaatccaaagcgaatcctccgggccgccgcggcggcgtctccccgggcgcccctagcacagctcgcgttccggtggaacagagaagagaggcgagaggatggagatccagtcgtctggccgctccatcgaggggctgatggagaaggtgctgtccgtgaacatcctctcctcggactacttcaaggagctcttcaagtacaagacctaccacgaggtcgtcgacgagatctacaaccaggtggaccacgtcgagccctggatgaccggcaactgccgcgggccctcctccgccttctgcctcctctacaagttattcaccatgaagctcaccgtcaagcagatgcacggcctgctcaagcaccaggactccccctacatcagagctattggattcctctacctacgatacgttgcagaaccgaagacactttggacttggtatgaaccctatatcaaggatgacgaggagtttgcacctggatcaaatcgtaaagtgactacaatgggcgtttatgtgcgtgatctcctccttggtcagtactatttcgacagtctccttccacgagtgcctctcccaatcctccgacaggtcactagccaccttgagaagctaaagcttccaacaaagcagtcaggaatgactggggattccaacaggcttgaatcaaatgataccgccagaaggcctccttccgtaaaggcttctttgtctgtctcctttggtcagcgcgctccacaccgtgcatccacaagggattcttccccggtccgaagaacgttaccttccaaacaggacaaggtaggtgaccgtgcgaaatcgccaccgatgaagcaccggagtcggagctctgagcgtgatcatgatttggagagggagcgctcggatcgtgaacgtggcagtggcaggtactaccaggatagggagcctgatccgcatgctcgtgagcacagagaccgggat

SEQ ID NO: 271696 - DNA, 439 bp, Zea mays
cttcccacaaacttcctacctccatgcagtttggcatttagctgcagcgctgggtggcggcacatgcaacaagctgcttgagtgacaaaggaagcaagatgcaagacgagtccgtgaaggccttcaaccttgctgctactgctgttatcaacaagctgttgatactgatttatcagcatgtcctccctaaatgcagaatacggtgcagttccattgttttacgttgacccgaacattggaggaatcctcgagacagattaatgcaccagatattagattacctggcatcagtttgttgcctgtatttgttgtatgctattgtattgtttgtgccaacataaactaaatactgtttgagaatcagatgtgtatatatatagatagaaacttcggaccgtcgtttggattttattctgcagaaatcaattgaagtttagcc

SEQ ID NO: 271697 - DNA, 1858 bp, Zea mays
ctgtcctgggcttccatgttcttggtgtttggtgcagtgtacttcttgtcactccctgtcagttcgtaccttttctccatagcagggtgcaggttgattagaaggatccggctgatgacatttgagaaggtggtaaatatggaggtcgagtggtttgatcacccagaaaactcaagtggagcaataggtgcaaggttgtcagctgatgcagcaaaagttagaggccttgtgggggatgcgcttcaattggttgtacaaaactcttcgacactagttgctggtttggttattgcatttgtgtcaaactgggagctatccctcatcatcttagctttaataccactcattggcctaaatggatggatccagatgaagtttattcacggtttcagtgcagacgcaaagatgatgtatgaagaggcaagccaggtggctaatgatgcagtacgcagcataagaacagtggcctcattctcagctgaagagaaggtcatggatttgtacaagaagaaatgtgaaggtcctctaagaacaggaatcaggacagggattataagtggaatcggttttggagtttcctttttcttgctatttggggtatatgcagctagcttttatgctggtgctcggcttgttgaggacaggaagacaacctttcctaaagttttcagggttttcctagctcttgcaatggcggcaattggagtgtcgcaatcaagtacccttacatcagattcttccaaagcaaaatcagctgcatcttctatatttgcaattgtagatcgaaaatcaaggatagacccaagtgaggatgcaggggtaactgttgaggcactacaaggaaacatcgtattccagcatgttagcttcaagtatcctaccaggccagatgttcagatattccgggacctttgcttgacaattcatgctggaaagactgttgcactcgttggagagagtggtagtggcaaatcaacggcaatttcattgctccagaggttctatgacccagatgtaggccacatactactagatggcgtggacatacgcaagttccagcttcggtggttaaggcagcaaatgggcctggtcagtcaagaaccggctttgtttaatgacacaataagggcaaacattgcctatggaaaagatggacaagcaacagaatctgagatcatatctgctgcagaattggcaaatgctcacaagtttatcagttcggcgctgcagggatatgacacagtggttggagagcgtggagcccagttgtcaggagggcagaagcagcgagtggcgatcgcccgtgcaattgtgaaggaccctaggatcctgcttctggacgaagcgactagtgcgctggatgctgagtccgagcggatcgtccaggacgcactggacagggtgatggtgaaccggacaacagtggtcgtcgcccaccgtctgtcgacgatacagaatgcggatttgattgcggtcgtgaggaatggggttatcatcgagaagggaaagcacgatgccttgatcaacatcaaggatggcgcctatgcgtccctcgtcgcccttcactcggcagcctcttcatagcaggtgatggtatgggatcctgcatacgtctgctaagacatatatgaacagagcgagctggcacaacctgtgtagcaatccaggtgctagtctctgttcctctatttgatggcatacataattgcttatacctaagcggagaaatgttacaaatagcaaggaccagatgtaaatgcaaggagctggtccttaagataactttttataatctataaatcttaatatgtatatgtagcttcgaacatagaaaccaaatagatgatggttatgctat

SEQ ID NO: 271698 - DNA, 317 bp, Zea mays
gctgcaggtggtaggtagcatgggatcctgcaaacgtctgctgaaacatatatatatatatggacagaggcacagagctgccacaacctgtgtagcaagtcaggtgctagtatctgttcctctatttgatgacacacataattgcttattatacctaagcggggaaatggtacaaatagcaagggccaaatgtaaatgcaaggagctggtccttaagatagttaatatatatatatatatatatataatttatattaaaaaaaaaaaaaaaaaaaaaaaaaaaaaaaaaaaaaaaaaaaaaagtgcggacgcgtgtg

SEQ ID NO: 271699 - DNA, 792 bp, Zea mays
gctggacgcgccgctgaacgagatcaacgtgcacgtgtaccagaacacgatcctgccgatgcagcgcggcgggttcgtctccaaggacgcacgggcgacgccgttcacgctcgtggtcgcgttcccgttcggggcgacgcaggccgacgcggagggcgcggtgtacgtggacgacgacgagcgcccggagatggtgctcgccgaagggcaggcgtcgtacgtgcgcttccacgcgagcgtgcgcggtaaggctgtgacggtgcggtcggaggtgctgatgggaagctacagcctgcacaaggggctggtcgtcgagaagctctcggtgctgggtctggagggtaccggcaaggaccttgccatccaggtggacggcacggacgccaccgccgtggcgacgtcgagcccttacttcgcagcaggtggcaacgcgaagctgcagggggaagaaggcgtcgaggatagtaagaacggcgtcatggtggagatcggcgggctggcattgccgctcgggaaaagcttcaccatgacatggaacatgcggatcgaagcataggtcgagtgatgctgtgcttccgtctccatgaatttgcttaaagtcgtgttccgtttctgatttagatgggtagatcctgccatgctgatgtgcagtcaaaatccatattctgaaaaatctgtcatcagggggtgctctgtgcaaggagcagagtacaacattgctgcaacaataaaagattgaatctttgacgtttgactagtatgatgaatgaaacatgtaacgagatgagatgg

SEQ ID NO: 271700 - DNA, 681 bp, Zea mays
  unsure (1)..(681): unsure at all n locations
gtatttggcacttgtcatcattggattcctgcatgggcttatcttcctaccggtccttttgagtttatgtggccctactacaaaatcggcgaagccaaaagaacaaagtcagccaccttcagcttcaagtgagcggacttgacaggattttatttgagttggacggttacatacttataaaattgatataggctagcctggtcggtgtgcgtccatgtgctgtcccagtggagcagcagcagtgaggtgtacagcatttgctgaaggtgaaagcagtcttacagatctgtagaaaatgttgtgcatatccatgttagcagccgaactaggttatttggtgttacagtgctacacatggcggggaaggaaactaaggcgaattggggctcggtgttaactagttgactgcagtccgttggttgtttaatttgtgtcacccaagccgagagtcgagactcgaatagtgttgtactgctgttgttttggtatttgctgtgggcattgagcttgtgtctaagttccgtatgcttgcaaggcttgtttttatgagaacatatctggtgtatatgggagtttggtgtacatattaaatcaaaaaaaaaaaaaaaaaaaaaaaaaaaaaaaaaaaaaaaaaagganggcgnaataaaaaaaaacaaaaaaaaanaaaccgggcaagcg

SEQ ID NO: 271701 - DNA, 650 bp, Zea mays
gcgtgttcctgccttgcacggtcggcccgaagcggtacaacaagcaccttccaccgcgcatccagaagcgccggttctcggcgatgatgtcgcccatcgaggcgcagggctgaggacccgcccgacgtcatgtcgccgtcaaaccgaacggccaagatcaagtaggacccggtgcaacgagccaccgtttaattcctagggttcttggagtgttttttttttctctctcgtcgtcgagtcaaaaaaagaaaaaagaaaagaaatggtcaaaacgcgcggacagtgagtttggacgtctgtgtatttcggtgacctgtgtttttttttttctctggagggcttttggtccgcatgtaatttagccgggtttgtgacttgtgactttgtgagtgagtagcggagtttagaagcggtagaagaatatgggtctagggataggtgaagtcagaatcaggacaaggtttttcgtttgttttcatccttcttttttcagttttttaagatgatgcttttagttttgctatatcctcgtcttttccttttttttttcgtaccctatttttccgtaccgagaagaatgttgacatgcatatatgcatttcatgctgagtttgaagttctataagcaaaagatgcattttgtgttgtcc

SEQ ID NO: 271702 - DNA, 633 bp, Zea mays
  unsure (1)..(633): unsure at all n locations
ccgagaaaaagaaggaaaaaaaggatgcccccaagggtggggatgatgaggatgatgccctagaggatgaggaagccgatgagaaggcagtcgaggacaaggccgactctgatgccgaggatggcaaggattctgatgatgagaagcagctcgacgagctctagatggcgaggatgatgttgcggccgctggcctagatttatcagctctgccactatgaagttctttttttttcccgtgaccaccaagaatgtagaacactgctaataagcagatggacagtttgggtcgccgtagcgctttgtagtcatttttcccattaaagccgataacactgaacaaggaggaaggatcttttgcccacgattgttatctccctttctgatgttaaatgtgagcctttgcgaaagcactggttccgtcacgcatgtggactttgcatgtgcggcgtgtttaggttcaggatcgtcgtgccgttttcgcgtagggaaacgttcgtgcctgatcactgttctagctatcgatatggtctcttttcaggcnnnnnanannaaaaaaaaaaaaaaaaaaaaaaaaagggggcggccgttcgccggacgcgtgggcggacgcgtgggcggacgcgtgggcgga

SEQ ID NO: 271703 - DNA, 430 bp, Zea mays
tccgggtcggacccacccgtccggagctaacgtggtggagggtgcttgcctaattgggcttcccaagtttaaggatttctataagctcaacgggaaaccggtttacatcctggtggagtcccgcaaataggacccagtaaatggtcaaacaaaaaagctttctagcttcccgtccaaagaagctcacaacttcactcatttgcacgcgcaagcaaggtggtatgggggcaccgagaaactccgcagtaatctgtgttgaggccacggccagatgatgctatgtatcttcatggagagggtgatggactgggtgaaacgtagtcactgtacctttgtagcacgtcatgtctagtgtttcttagtagccatggctgaagagagtttgtagctattcccggcttcctgcagccaggaacatcagtgttaggca

SEQ ID NO: 271704 - DNA, 556 bp, Zea mays
  unsure (1)..(556): unsure at all n locations
cgcacaacgggttccccgtgctggactggccgcggccaggcgtatcggagctccacgggctggtgctccggtcccacctgatggccgtgctcaagaagcggtggttcctgacggagaaaaggaggacggaggaatgggaggcccgtgagaggttctcgtcgacggagctcgcggagaagtccgggagtatcgacgaggtggcggtgcagctgacgccggaggagctggacatgtacattgacctccacccgttcaccaacaccacgccgtacaccgtcgtggagaccatgtcggtggccaaggccgtggtgctcttccgcacctgcgcgctccggcacatgcttatcatcccaaagttccaaggccctgagatagctccaatcgtggggatcctaacgaggcaggacctgagggcacacaacatccttggtgcattccctcatttggcaaacaaaaggaaagtacactaagctctgtcgcgccatttttggtaaatttaatgttctctgcatccaaagaaaagcggcccatgnnttgttcccatgttctatttttc

SEQ ID NO: 271705 - DNA, 1088 bp, Zea mays
tatggctctagcagaggaactgcaaagggaaaagaggataaatgctggcaaaaaaggaggatcaaaagctgcacccaagaaaccacgtaaaaaggctgcatctaaaaagctggatagcgatacagaagatgatgattttgaaccagcggttgcaaagcgtggagctcaaccgaagaaaacatccagcaaggcaaatgattctgcgtctgaagatggagattatgtggctgctgaaaatcaaaagaaacaatccaagaaagcaagtgcccatgtggacgaagaagttgacatgccttcgttaaaagaccgtctggctgcttttaatatcagcgactcctctccggatcattctgccatggaaactgaagtaacagaattgacagaacagcagaatgaaaacaaagcgacagagggagcaagcaaaagaggcggacgaaagaaggcgtcatcatccttggcgacgataccatctgatgttgatgaggaagtcctagaggtccaagctcagaagaaaggtagaggaaggaagcctgctgccgttgtgaagcccaaggctcctgccgccgccaggaaaagggcgccggctcagggcaaggtaacgcagaagaaaatagatgagatgctcaaggccactgaggataacaacaccagtgcatcttcccctgagaagaaggtccggaagatgaggtcctctcccttcaacaagaagagcggctcaatcttacagagaggctcgaccgcttctgcaagctctggaacaactgttgaagcttcaccaccctctggcagctctgcagagccagttggtgctgcacaacctagaaggacagccagggctaccaagaagcctatctatattagcgatagcgaccctgaggatgaagtggagttgattgatgattcggactttgatgcggacggtgactctgacgagtgaagattgtagtcatccgtactttggctgcaacaatatccagtttgtgtcgttgcatgtgacaatttgataatgcatttcttgtgcgttgtatgtgttcgttgcgttgttcagaactgttgccaagagctcaagacaacctggttaactggtt

SEQ ID NO: 271706 - DNA, 435 bp, Zea mays
acacatcccctgtacagtgtgtacatacacccccaaccccacttaattccaatttctatttctccgaacagcgacataaatccggttcatgggtttgaggaaggttactgttggcctcaattcctcccggggatcattggtcttcccaacaaagattgcccagcctattaccgttcaaacaaagagcgatttgccaaggcccaagggggaggccgctagaatgacagaaacagcagaaggatggtcacggaggctggtgtgtgttctttaggaaaggagagaaactagcccatgtaaacatcataatgttcatatgaaatataacgatgatcaccctgttacgagtacaatcttttcggaccttttctgtgtacattcttaacttggttttctttctgttgatgtgatatatactcggttccaggtgtctccacc

SEQ ID NO: 271707 - DNA, 434 bp, Zea mays
atggtgatatatggcaatgagaaagggaaaattggatggattcgtgcaccctgtgacagagcccccaacgacaatacggttcatgggtttgagaaaggttactgttggcctcaattcctcccggggatcattggtcttcccaacgaagattgcccagcctattaccgttcaaacaaagagttatttgccgaggcccaagggggaggccgctagaatgtcccaagaaggatggtcacggaggctggacactgtgttaggatcgtgtgtgttctttaggaaaggagagaaactagcccatgtaaacatcataatgttcatatcaaatataatgatgatccccctgttacgagtccattcttgtcggaccttttctttgtacattctttacttggttttctttctgttgatgtgaaataaactacggttccaggtgc

SEQ ID NO: 271708 - DNA, 682 bp, Zea mays
cttacccttgatccaaaaccaattcagggtgactggaacggagctggctgccacacaaattacagcacaaagactatgcgcgaagacggcgggtttgaagagatcaagagagcaatcctgaacctttctctgcgccatgatctgcatattagtgcatacggagaaggaaatgaaagaagactgactgggaaacatgagactgcgagcatcggaacgttctcatggggtgtggcaaaccgcggctgctctatccgtgtggggcgggataccgaggcaaaagggaaaggttacctggaagaccgtcggccggcatcaaacatggacccgtacattgtgacggggctactggccgagaccacgatcctctggcagccatccctcgaggcggaggctcttgccgccaagaagctggcgctgaaggtgtgaagcagctgaaggatggttcaggcaccaatataaaccggtccgcgacaagattgatctttgtgtccatggcgtgggtcttgcgactctctgctcggcggtgccactctgtacaaaatcacggctgtctttgattcatcggatattcggatacgtttgtttgttactttttgcttggacacccaccatgtttggaacttttttgggctccgtttgggggctgaacgatggtcagtggaaatttaaaaattcgtcgtct

SEQ ID NO: 271709 - DNA, 1051 bp, Zea mays
acggctcgatcgttttgctccgtctctcttcctcctcacttcccacccaccctcgctcgttttgttctgtctctctttctcctcactccctccgtcgatcctctgcagcttgcatcggtcgaccagtagtcttccactgtaatcgcctctcattattctttctgccacgctcctcttcgtccttactccctccgtcttgtctatctgtagccacctcgtcttcctacgtttttgccaggatttgaggctgtcatagtatgctctctgaccgtgctggcgggaggaaggagatgatttaagttctctgcgtttataaccagaaagaggaggataatccaatcatggtaactaaatagtaggtagtaatgtttcacggtaaatcacagtgctcgaatgcgatatgatctttgactcggagtattgaagactaatttagtttgagtttgagattagttgtttttgtcattaataaactcacattagcgtctggttacgagctcactactagattttagatctccatttttggtgtacttctgctgcatgtgcctcccatagttgcggatttgcaggtaaacatgaatacaaggctggcttgatctggcaagtgctcgccattctatgggcccatcacacttttcgagtacactgtttgatcatgaagagcagtctgctgccactaaacttgaggttgttgatcatgattgtctgaaaatttatcggggatatgccttgggatggagaaatgtcacagaacacaggatgaagacgattccaagaatccacccatgtcaggactagaagacgccttcacatcccggagtagagctctcagcaacaacagtgcaacgatgtttggacttttgttcacatatgggagtgtttaaactcctgcacctagatttagaaacccccccatgtaaaatagacaaggcggtgcttttgcaaacatgatgctgccacgagacccgaacttatgtatggccaaacatgttaacatattttgtatgtcatgggctgttccagttaccccaatgagcgaatatttccc

SEQ ID NO: 271710 - DNA, 583 bp, Zea mays
ttcgaaaaaaggatgttaagtaacttagtgactctgcttaacactgtaggatttgaggctgccatagtatgctctctgaccgtgctaacgggaggaaggagatgatttaagttctccgcgcccagggccagtttgaggaggatagtccaatcatggcaactaaatagtaggtagtaatgtttcacggtaaatcacagtgctcgaatgcgatatgatctttgactcggagtattgaggactaatttagtttgagtttgagattagttgtttttgtcattaataaactcacattggcatctggttacgagctcactactagattttagatctccagttttggtgtacttttgctgcatgtgtctcccagagttgcagatttgcaggtagcacctgattcttttttatttttggattgagatacagtgaaatttatatttgcctgttcccaccatactgtaatatgaatacaaggatggcttgatctggcaagtgctcgccattctatgggcccatcatgctcttcgagtacactgtttgatcacaaggagcggtctgctgccactaaacttcaagttgttgatca

SEQ ID NO: 271711 - DNA, 382 bp, Zea mays
gaaagattccaaaacttctgctccataggctttttccaaatgtgagattttcagtttggatagatgcaaaacttcagcttgttgcggatccctatctcctgcttgagaggttcctgtggaggaagaataccacttttgcaatctctcggcattacaaacgctttgatgtgttcgaagaagcagaagctaacaaagctgctggaaagtattacaacgcatccatcgattaccaaatagagttttacagaaatgagggcctaacacattattctcctgccaagcttcccatcacaagtgatgtccctgaacgctgtgtgatcatcagagaacacatccccatcacgaacctcttcacgtgcctatggttcaatgaagttgatcg

SEQ ID NO: 271712 - DNA, 838 bp, Zea mays
cgctaatcgctacccttcgcctttgctgtgctgctgcgtgactgcgtctcgtgtcaggctgtcagctagctttggggttgggggcggggcagtggggccctacggccggccatggccgccgcggcgaacacacctcagtgtcaccggccgtggcagctggtggtcccagcgagagcgagcgcgagcgcgagccgccgcactagccggccagccgcagcagcaggagtgggggctggcggtgcgccgaacgcatggacggggatgccaccgccacctgcagctcggcggaccgtgagggccaaggccggtgcggccgaggcgcggccgtcgtcgccgccggacgccgtgacctacagcgcgagcatctccacggacacgcccctccacgaaccccccggggtctccttcgacgagtacatccaggaccgcgcgcgcgtgttccgcgccatgttccccgacgagagcaggagccagcgggtcggcgacggggaatggcgggtccacatgctgccgctgcagttcctcctcctcaccgtgcgccccgtcgtcgtcatgcagctgcggcaccgcgccggcgggctcgacctccgagtcacggagtgggagctgagggggctggacgtcagctacgcgccatccagcttcgacctcggcgtgagcgggtcgctgtacgccgaccggagcaggagccgcgggtgccggatgaggggccacctggagatcgccatcacctgcgtcctgccgccgcccctgcgccttgtgccagagaccgtcctgcgcggcgtcgccgaatcggtcctgtcgaccctggcggaaaagatgaaacggagtcctcgtc

SEQ ID NO: 271713 - DNA, 776 bp, Zea mays
cccacgcgtccggtcgtatatgctgcagattggcggcagggctcctaacaaaattctatttgctaaaaatactgggaagatcttccagactgacttccatccagcttatgatccaaatgggatgattgagttcaacgagcttgttccatttaggctgacacgcaacttgcaagctttcttctcgaattttggtgttgaaggtctcattgtgtctgccatgtgctctgctgcccagtcagtggtttctcctaaacaaagccagcacatttggcatcatttggctatgtttttccgagatgaactgttatcttggtcgtggaggcggcctctgggcattccatcagtccctgtcgctgctggaatgatcaacccatcagatttccaacagaaggtggtaaacaatgtggagcatgtcatcagtcgtatcaagtcaatatcgccacattgtctggctgaggaggaggagaatgcaaccgagccacctcagtcggtacaaagaggcgttaccgagctggtggaagcggcattgtcgtccaggaacctgtgcatgatggatccgacgtggcacccatggttctgaaggcatccagcacctctgtagcctgaccaaactgacggcgtgtacagattttcatgtccggcaacgctggttgagactagaaaactcgttgcgttatgtagataaagccagggtgtcatcatgtgttcgctggtgtaatggagcagattagcttggtaattaatgagacattgcatttcttaaccaggcaataagg

SEQ ID NO: 271714 - DNA, 849 bp, Zea mays
  unsure (1)..(849): unsure at all n locations
gctcaacttccccgacaacgcggagtccagggcgccgctcgaccccgccgtggacgccaagctgcaggccatctgcgccaccatcgccgccgcgtcgtcgtcatccaagaattccaaggccaagagcaaggcgatgccaatcaacgcgtccgttctggaagcggcagcggcgtctccgagcaacagctcctccgacgaaggttccggctccgggttcgggtcggacgacgagatgtcctcgtcctccccgacgccggtggtggcgccgccggtggcggacatgggacagctggatttcagcgaggttccgtgggacgaggacgagagcttcgtgctccgcaagtacccgtcctacgagatcgactgggacgcgctgctctccaactagtcgcccttcgccgacagatgtgctgttgtagttcagtagtggcagtgtctctggccgccgcagatgaggttttaggcaatctgcaggccgccggcccatgtgtattaagtaggttttgctcagttgttggccctggacttcgccggcgtttttgtgaccggcgtccccgagtgcactgcattggtgtactggtctgtctgtaaaaaaaatggatctgtacttctatagtgtgtattcaaccattgttcttagttgtgatgttactcgtgctgcnnaaaaaaaaaaaaaaaaaaaaaaaaaaaaaaaaaaaaaaaaaaaaaaaaaaaaaaaaaaaaaaaaaaaaaaaaaaaaaaaaaaaaaaaaaaaaaaaaaaaaaaaaaaaaaaaaaaaaaaaaaaaaagggggggccgttttaaaggttccaattttacttccccttgcttgcaaagtaatattttttt

SEQ ID NO: 271715 - DNA, 402 bp, Zea mays
gtcacgcgtagcgaatagcgttggctgatggctgctggcctcgggcctcgagagagagcgcggtaatctccacagaattttctgagttatggtttgtcggtgtcggtcgttgctgctgaaagggactggattgaaggtggtggtggggctttggagcgtgtaggcttgggatttgtggttaattggctgtgaataaaggagagattgagagggactgaagattgagaggattgtaggtccagcgatctatcatatatgtgagtgtatagagaagttccagcccggttaagtttagtcaggcataaaagtttagaaacaacaaaaaattccattgccatttgttccttttgtatcacagctaccatcggatatttgctcttatattattcactccttttcttt

SEQ ID NO: 271716 - DNA, 688 bp, Zea mays
ttttatctctgcagagccctcacagcaaccaaaaaagtctgacaaggctgctcgtactgccacaaatgcgtcaccgaatggtaacctgaagccaaggtccctgaactctgatgctactgaaagcaaggaagctgggaagaaagagggcattcagaaagtaaatcctggtgcaagggtcagaggctcctgtaacaggaatccagtcaaaaacaccaccgcaaaggaagcagttgccaagaacaccggtaaggaaaccaagaaaggggccaagggtcagcaggaagttagcgaggctccgtcagcccttccaaatcaggaatctgctgatgttgtgaaggagatcacccatgaagataaagagaacatgggcgatattgaaatggcagtggatgttgccgtagcccaagatatctagaacagccggaccaacttcagattcgatccccttttttttctatcgctgaagatgaagtgttagcgtgtggttgcttattttggttttcaattgttaatatgttattagtagagcttgtctgtgtgattgctgtctggctggaccttgaacggtcttcaagagcgtgtcataagttgatgattgctttcattcctctgtcaagtttgcgcccttgcatgtgctaatccgcgcccctgaatatagttgaatttatctaaaaaaaaaaaaaaagga

SEQ ID NO: 271717 - DNA, 980 bp, Zea mays
gccctcttctgttattaaatacaatataataggctgttgggtaccagtttgattacgatgactaccacagctttgttcatgggaggttgtcttatgacaaaatcaagcctgatcctgtgcttaggaacatcctcctcagcttgcgccattcgcaaacttgtgttgcacaaacggtgacagaacacatgcttcaagggccctcaagaggcttggcattgaggattgtttcgaaggagtcgtgtgctttgagacactgaacccgacatctcctgctcctcctgtcccagctcaggaacttgaaatctttgatctaatgaagcatctggctcatccacagcccgcggtgcagctaccataatcacctatcctatgcaaaccgtcaagggaggccatgctgcaggctctcaaggtcgcctccattaatccacagacaactatattgttcgatgacagcttcaggaacattgaagctgcaaagcaaattggaatgtgtactgtcctggttggaacatctgagcggaaaaagggtgctgaccatgccttggaaagcctccacaacatgaaggaagcactgccggagctgtgggaggaagcttgagaaggatgacagatgtgatggaattccgagcaaagcacggaatcgcagacatctgtcgatccgcgtaatcttttgtgtctccttggttaccaaatgtagcccccttctgttttctcttggaggacaacacgaggtggtggtgtatgaaaaaagaggagacctcctcaaggggtgggggggactgactgatactacgaccactgatgttacaccccgtaaactattactatccaataagaatgttttcttcttcaactatctaggatggtcattttgttggtgtttagttaaagcagctatccaatatttttttggatccaaatgtgtatgtcctcgctacttggttcttcatgcttatgaatgtggagtgatgatgtcctgt

SEQ ID NO: 271718 - DNA, 806 bp, Zea mays
ggtcgacgacgcgtccgatgtcaacgagctccagcgtccctcacgcgtccaggcggtgtccgcctacttgtggaaggtcctcgccgccgtcgtggccgcgtgccgcgtgcccgaggagcggtgctgcatgggctggatggtggacgctcggcggcgggtgaagtcgcccgagctgatccccgcgatgcgcaactacttcggcaacgtcacggcctacgcgctgggcggcgcggccgtggaggagatccggcggaagccgctggccgaggtggcggccatggtgcgggataccatcacgtccatagactacgacgagtacctgcaggagctggtggactgggtggaggtgcacaagacggagcacgtgatggagaagggcgtcctcgggctgggctcgccgacgttgaaccagaccgtgttcgcgtcgttcccgctcgacacgaacttcggcttcggcgacgccgcgctcgcgctgcccatctgcgactacgggaggctttgctcgggctacctgtccgtcggagcgcggcctggaggcgacggctcctggctcctcagcgcctacatttggccgcagatggcggcggcgctgagagtcggacggcgtctttaagcctctcacggcggagtatctcggtctcacagtcacaccctagcctagcggcgacgtggtcgatctacatgcgctgcatgcatatcgtcagatcagaatcatgcatgcgcgctaccttgtgtacgtcgttcgtgtaataatgttgcatggtctcgggccagtgctaaataaaaatctctgttaattttcttca

SEQ ID NO: 271719 - DNA, 1444 bp, Zea mays
attatatactagatgaggaagcagccagaccacacacacccacacaccccgcttcacgttctcaataatggcgccgttcccacgtcgtcttccggccgccgtgccacttctcctcctcctcggcgccgcagtggccagcgccggcgcggaggacaccgatggcggcaactcccgccggcggcactcccgcttgctgttcgcgttcggcaactcgctcaccgacacgggaaacggggccatcttcccggtgactgcaggcgggccattcacccggccgccgtacggggagaccttcttcggtcgtcccagcggccgggcttgcaacggcaggctcgtcctcgacttcctcgtggaggagctgaaggtgccagagccgacgccgtacctggccggcaggacggccgccgactttgcgaagaacggggccaactttgcgctgggtggtgcaacggcgctcgaccaggcgttcttagcaagcaaggggataaagtcgttcgtgcccatctctctcatcaacgagacgagctggttccagaacgtttcgaagctactggacgcgtcacactacgacgagcgtaagatcatggcgaagtcgatcttctacgtcggggagatcggtgtcaacgactacttcgccgccctaagcaacaacgactccgtcgacgtcgcggtcagcctggtgccgcacatcatcgacaccatccgttcggccctgaccgtcatgatcgatgccggggcgaggacagtggtgatcacggggatgctaccgatcggctgtgagccgcagcagctggcccagttcgcaggcggcccggccggcgactacgaccctaccaccggctgcatcacgcggttcaaccagctcgccgagcaccacaaccacatgctgaggatgatgctgagggagctgcggaccaagtaccgcaggcgcaggcccctcaccctccactacgccgacatctaccgccccgtgatcgaggccgtcgcgtcccccgcctcgtacggcttcggcgacaggccgctggccgcgtgctgcgggggcggtggcggccccaacaacttcaacttcatcgccttctgcggcacgccggcgtcgaccacgtgcaccgacccgtccaagttcgtctcctgggacgggatccacttcaccgaggctaccaacaggcttctcgctcgtaaaatgcttcaggaactgctaagccgtggagcttacaatgttgcaatctgattttttctatgcccgcgagtcgtatcaacgtgtttcccatagcggatcggagctagcgtggaacctcttgtgcaataaaaaaataagtgtcatcacattcctcgcctttgacgcctagagaaccggatttcctttttctattatccaacaaaagatacattaccgttgaactagtaaaaaaaaaaaaaaaaaaaaaaaaaaaaaactcgaactagt

SEQ ID NO: 271720 - DNA, 472 bp, Zea mays
cccacgcttccgctatcacagtaggaagctaggaggaaatcaaagcaacaaagttgccggccgagagaagcaaccatgagacctcaggcgtcgttactcgtcacactggctgttatcgtcgtcgtccctgcagctctgccactcagcaaagggacggaggaggaaggaggaggaggggaggcagtcgccgccgtggacgccgccggaacgagctcgtggccatgctgcaacaagtgcggtttctgctacctgtctgacccgccgcagtgccaatgcctggacttctcgacggtcgggtgccacccagagtgcaagcggtgcatcaggtacaccgccgacggtggcgtcgacatcccgcccgtgcacgcctaccgctgcgccgacatcctcttcaacttctgcgagcgccgctgcagcacttctcgggtctctcgctgttgctagcaccaagtagacggttgcatattgcatg

SEQ ID NO: 271721 - DNA, 546 bp, Zea mays
gaacgaccgacgcgacccacgcgtccgggctagaacgaaatcagatccttctagccggtagaaccaaaggagcaagcacgagaccatgggtggctgtgctcgggcgacagcttaagacaagccatggaccttgatggtctgccactcagcagagggacgcaccgaggaaggacgacggaggggcggcagtcgccgccgtggacgccgccgccggaacgagctcgtggccgtgctgcaacgagtgcggtttctgctacctgtctgacccgccgcagtgccaatgcctggacttctcgacggtcgggtgccacccagagtgcaagcggtgcatcaggtacaccgccgacggtggcgtcgacatcccgcccgtgcacgcctaccgctgcgccgacatcctcgtcaacttctgcgagcgccgctgcactcccgccgcagctgcttctatgtgtagcgctagcaccaagtagaaggatgcatgcatgccatgcatcctcgtcgatctgcatgccattgccgggtgccgcttttgagaagaagcaaataaat

SEQ ID NO: 271722 - DNA, 382 bp, Zea mays
attaaggaaaggtggcgacagagaagaaaaagtggacgtcatggatcatccctttgtttaacaagtcgattcttgtaagataagctatgaagcagtgctctttttaggacccgttttacctgtatcttagtttgtaaggttttggttgttggtaacattgtgtaagatgtctctttgtgaacatgttgaagcttgttgttctattcttatatttgttttatttatatgaataaaggtttacttgttcctttttaaatattataaattataatatctattattttaatattttaattatgtggtggtctgttttagaggatttcaatgcttaacttaacttcttgcaattccgattttttattgcttttttttattgtgtgtt

SEQ ID NO: 271723 - DNA, 525 bp, Zea mays
cacaagccatggatcgagatggtaggacagcattccagtatgcaatcaatggcggaacaagtgacgaagacattcttgcgttattacaggatcatagtagataatcttgcaaccaataccttcagtaaatcgaggcactcttggtgtggtcgactcaactaacaaggcaccagccccgccaggccccagcttgtcgtgcagacaatcctaaatttatggcatgaaagcaacctatgtacatgtcgttatagggcttcagtatcatgacgcgcctgttgtttcttcccccaccttgtgcttgtttaggataagtcatccatatttagtcatctggcaaacggtttggttttgtttgctgcaggtgatgcatagtaagcctgtaaatggagttatttctctttattttctagtcatcttccgtcacgaagtagatttggcattctgatgaaagatgattgtacatatcgagatgtgtgatgttggggacttgttctcaaatgctatgaattaagaacgaggcaacat

SEQ ID NO: 271724 - DNA, 477 bp, Zea mays
gtgattgggcgggttcaaatctcaaacaagtcaaagttcttctaaattttttccaatcctatccaatccatgtataatgggaataaccgaacaagacctaacagggatccagccccgcttggtcctagcttgtcgtgcagacaatccgaattcatggcatgaaagcaacctatgtacatgtcgttctagggcttcagtatcatgatgcgcatgttgtttctttccccgccgtttgcttgtttagcatcagtggtccttatttagtcatctggcaaacggtttggttttgtttgctgcaggtgatgcagagtaagcttgtaaatggagttgcttctctttcttttctagtcatcttttatcatgaagtagatgtggcattctgatgaaagatggttgtacatattgagatgtgctgttgtggcatatatgaaatattggcatggtgtggatggtatatacgaaagttgtgcttgctta

SEQ ID NO: 271725 - DNA, 632 bp, Zea mays
gcaaaactcgggtgcacaaccgctgcccaacttgtcgacaagagctaggtgacgtcaggtgtctggcattagagaaggtggctgaatcacttgagctcccctgcaaatactactctcttggatgttcagaagtcttcccatactacagcaaactcaagcatgaatcacagtgtaattttaggccatacaattgcccttatgctggttctgaatgctcagttgttggggatatttcttttcttgtggcacatctgcgagatgatcataaagtggacatgcactctggatgtacatttaatcaccgctatgtcaagtccaacccaagagaggttgaaaatgcaacttggatgctaactgtttttcattgttttgggcagtacttctgcttgcactttgaggcatttcagcttgggttggcaccagtatacatggctttcctacgatttatgggtgacgaaaatgattctaggaactacagctattgccttgaggttggtgcaaatggcaggaagatgatatgggagggaacgccccgcagcatccgggacagccaccggaaggttagggacaggcatgacggcctaataattcaacgcaacatggctctcttcttcttaagtggagataggaaa

SEQ ID NO: 271726 - DNA, 744 bp, Zea mays
cactcattcattcattcatccatcacccacccctcccggcctcccctgacctctctcgatcactcgtcatctccaccacacacacacacgcgcgagcgaatccaaggaagaagaagaggaggaggatccatggagaagtgcaggtcggtgccgcacgagcactcgtcggcgtactacggctgcggaggcgggtacgactacgaggacgtcggcggcgggcccgggcaggccggcaagtcgtacagcttcaacgggccgagcggccgggacgacccggaggcgaagcggcggcgccgcgtggcggcgtacaacgtgttcgccacgcagggccggatcaagaccaccgtccgcagcagcgtcaagtggctcaagtccaagttctccgacgtccgctacggtggcctctgaactgatctgatgagcgtgagcctactgcatgcaacgcatcctactcctacgaccgcacacatatatgtgtatgcacgaaccatggtgctcatatatatgcaattatatatgcacgcgcaagctatacgcgtgccaagctaaatagctgctgcgtatatatactactactactgtgtacatgtgcgtgtatgaactgtgtgtgtatggtctcaagtcactgcatgtgttcgtggctgctttccagatcggtcagtgtgttttctcggtttgcttttggatctgcacatcaagttgttgtatcaccagccaccagagggaccatgccctttgctttgg

SEQ ID NO: 271727 - DNA, 569 bp, Zea mays
gcgacgtcctggagcgcggcttcaccctcaacctcgtcggcaacaggctcttctacgccggggtgcccctcctgctctggatcttcggcccgctcctcgccttcctgtcctccatggtcatggtccccatactctacagcctcgacgtcgtcaacctcatgggccacagcggatgcgtcgtcgtcagcggcaaatctgcggagatgaacggcgggagcgagtgcgcgcgtgccgtctgaagctgccggacttgtgtcctcaacaaaccatatgcatgcgatccgtacatgtgattcggttgagactgttgccgcgcgcaacggcctgtgatgtgtcgagcaccaaggagacggcatgttgttcgtcgtcgtcgttctctcattcatgtggggttataggctagccgcgcgccgtcgtagctgatgctgatgtactaggaaaaccttcgttgcatggatgacacggaacccataccccacgcggttcagttgctttgctgctcttggtgctcgacaagttgacagtgtgtgccactacaacacatattccaagtcggctttatctaaaaa

SEQ ID NO: 271728 - DNA, 380 bp, Zea mays
gttcctccatggatttggtgggtttaagctgcaagatcttggtggcagcgcagcaaatcgaggtagagattagcatattactatattagcatgtagagaactgttagttgtgcctgcactcgtcacttgtgcagaatggatgggatggaacgcatgccggatgcgacagcggcaacgaagatggtgggcggatggcaataatgtagtgctctgttgatctattctatctgtgagttgtgacgagaaacctgttgtatacggaggtcctgaacttgcagaattcaaattggcaatgtagtgtgacgaaataccttgtattgtatacgaaaatctgaacttcttgcagaatcaaaattcagaaaattaggtttggcgaggtg

SEQ ID NO: 271729 - DNA, 544 bp, Zea mays
cggaatggaagggccgacccaggcgtccggtcattgccggctccgccggccacagtagcaccgcagtgtgagcagtcggttcccgtgcgtttaccagccgtcgccagcaaggtggcggcgggcggcgcgccaacggggccgccggtgcctgtgccaccgccggacgttatggccggggacatgggccagcagatccaagggaagaccagggtgggctccagggtccgcaaccgcaaggcgctctccaagtagtagagaggtgaacacggtggccggtgggatttaggaagaagctaatgatcctggtcgtttatgcagcagcgatccttacatttgattatggatatcaggatgtggtttaatctctgtgagatcctttctgtgagcgtgagaacgttgatatcctatcaaagttctcggaatatacaatcactacaaatgtaaaatatcatgcttctagtgtactagctggatgtccgtgcgttgcaacgggaatatataatcccagtatactccgataacttatatacaaaatctgtattat

SEQ ID NO: 271730 - DNA, 233 bp, Zea mays
cggtacgttttcatttgtctccgacctgtcctgtgtgtgtgtgcgtgtgtttttgcactggatattccccctcccctctcgtggtcgtagggagggtttgtatgttcagtggaaagatgtttggtatggtctactccattctatttcatgattcatgaatatgtatgtatgtatgtatgcgtgtgatgtactactgtggtatgctgtataaatttataaacacgcgctttatt

SEQ ID NO: 271731 - DNA, 399 bp, Zea mays
  unsure (1)..(399): unsure at all n locations
gccaagcaaaggaaatcccatgttgcatgggtatgctaacgcaaaagtttggcacatggcggggagttgtttgttatcaggtccatggtcgcggaaggcttggaggcaattggtaaagctgagcatcatgcatgggagggggtaaaaaaaaaaagccctggaggtcaggacggggaggaaaaagcaggaacagggttttgaagcgtgtggagttgttgtgaacgagggatggatgatgcatgcgggagtggagtttctgcaggggatgatgtatgatggatgtagtagggtaggctaggccaggttgggtgtgtacaatgcaagccccccctgtaacagcctgatttgtccattcttgccccaaaaaaaaaaaaaaaaaaaaaaaaaaaaaaanaaaaa

SEQ ID NO: 271732 - DNA, 554 bp, Zea mays
ctttcttctcctgcacctgatgatcctcaggatgctgttgttgcacaacagtacctgcgtgactatccaacatttgccgctacggctcgctgctggactgaggccttcgcgaagagtgcatcaacgggcatggaagagaaggtgcagaagctggttgagatgggcttcccagaggatcaggtgagacgtgccctgaagagcgtggatggcgacgagaacatggctctcgaaaagctctgctctggctctgggtgaaccattctcttggggccaatacatgagcagctgtacatttcacagtgcctgctaatgctcctgctcagccatttcatataggggccgtgccatggcccatgggactggagtgagactctcctaggacaacatgagagttcgttcgtttctttaaactattttgctgttgtgtctggtaggctgaatcgactctttgcccatggaaccctggtaatatctgatgcaaaggaaacatgaggttgacataaacccccctgcagctgcaacctgtatgtcaatgccacgcttggcttcctttg

SEQ ID NO: 271733 - DNA, 565 bp, Zea mays
cgcagcagtgcccgccgcaggggaccggcgccgccgacccgcccctgcccatggaccccgtggcgcgcaccgccttcgacaccaactactacgccaacctggtcgccaggcgcggcctgctcgcctccgaccaggcgctgctcgccgacccggccaccgccgcgcaggtgctcgcctacaccaacagccccgccaccttccagaccgacttcgtcgccgccatcatcaagatgggtgccatacaggtgctcacaggcacagccggcaccgtccggtccaactgcagggtggctagctagctcatccatgatttacgtctacctgtagactcatgtgcttatataaaatcatacgacgaaactgtacgtacggcgtagagtggtgtggcgaggtccaatgattcagattgtacgtacgtgtccatcgatccaactgtagttgtgtacgcagtacagtacgtgctagctacggatcagttgcttatatatagcttgtgcgtttttttacactttcttctgtccttttggtttataatttttattaagatatacaaatatttctcttc

SEQ ID NO: 271734 - DNA, 491 bp, Zea mays
aacctggtcgccaggcgcggcctgctcgcctccgaccaggcgctgctcgccgacccggccaccgccgcgcaggtgctcgcctacaccaacagccccgccaccttccagaccgacttcgtcgccgccatgatcaagatgggtgccatacaggtgctcaccggcacagccggcaccgtccggaccaactgcagggtggctagctagctagctcatccatgagaatgtacctgtagactcatgtgcttaaaatcatacgacgaaactgtacgtacggcgtagagtggtgtggcggggtccaatgattcagattgtacgtacgtgtccatcgatccaactgtagttgtgtacgcagtacagtacgtgctagctacggatcagttgcttatatatagcttgtgcgtttttttacactttcttttgtccttttggtttataatttttattaagatatacaaatatttctcttcgaaaaaaaccaaaaaaaggggagc

SEQ ID NO: 271735 - DNA, 610 bp, Zea mays
cagcaactttggctgatattctcagacaatttagggacccattttcaaaatggacctcatggacagaaaagcagaagtgaaacgcatcatagaagatgtaataaatagcatgtctgatgatgaaggtgaagaaggctcggaagatgaagcagaagacaacggcaaggtggagaagtcaaagagtgatcccgatggaggagaagagaagtgattctgtggaccggatgtgccagtggtggtttggattgaacctggaaggactattttccggccaattctcccgtgtttggaggtttttggctctgtacaattgggggcaccgcgagaacgagccggtgacctgggtactggttacaaagattgttaaccatttcacagccatacacacctagttgtgcttgacttggtagtggatgtagtctctagtgtatggtcatgtacgatagtttggttgcgtaggtagctagcgtgactgtaatatgcagaacaattctgggcttgtttcatctatttatccatgtaaacctctgtatccgagttctgaatcgttcctgctccctgcatttgttgtttacctacccatcgcaatgttagcgcagtgaaaaaacga

SEQ ID NO: 271736 - DNA, 694 bp, Zea mays
agaagaagctgaaggagatggagacagagagggaaaggctcctggagtctggtatggtggacccaaaggagcgtgcgcctaggccgtgaggtggacatacaggtggtgcaggacgaggtccttgtacgagtgatgtctccaatggagaaccatccagtcaagaaggtcttccaagcgttcgaagaggcagaagtccgcctgggcgagtcaaaggtgacgggcaacaacaacaacgggacagtggtgcattctttcatcatcaagtgtcccggcactgagcagcaaacgagggagaaggtgatagcggcgatgtctcgtgcgatgagcagttgagcagagcagcgtaggatcagattgtcgcggtagagatgtggcagttgatcctgtttggttgcgagcgaaaacaagaggcggcggcggacagcagcccttgacatggtcgataggagatctgtaggtggagagaagcaagatgagattcttctgacttttttagcaacgcaacaacaaaagatggggctcgagttaagcagccgttgtactttaggtttcttttggttggtaatagtgttcctagtgtaagcttgatgatgcagcagaacaatgaacagcagtacatgtttttttcccttattttcatgcgtgatttggaaattaaatttattgcgatctttcttttaaaaaggcaaagaaa

SEQ ID NO: 271737 - DNA, 606 bp, Zea mays
aaaggagaactgctttaaggaaactactacaactacaagaaagaatatatttcaaaaccaacaaggatgtggcccaactgataaatactaattgtagtaaaagccaaaatcaccatttgagatagtataaaactaagcacaacaataagttaccgttacagcacggctcctggatttaggcagttgtccaagaaactcttggaaagcagtaatcctcactctacccttgatctcaacaaagcggcaccactcatttgttgatgtcttttcaccactgcaaagtagaaacattaggagttaggatatgataacagaatgttaagatgtgtgttttggggagggccctcacctcaaccaagtaaccaacatcaaaactgaccaccatgcattggtccagtgtggcctatccttgtgccaatgaatctaacaattctttttctgggatgcacgtggtctgaacaggcctgatcggcggaactcagctcatgacggcattatgtctgccaatgctgacataggatgtttacatgagacaagcttgttcggctgactgcagtcgtagctgcaatgtatagagataaaatactgtagccgcagcgagcaagc

SEQ ID NO: 271738 - DNA, 1077 bp, Zea mays
ctgttagctgtgtgccttgcctgtatgcttgtcggcattgcattaacgtggctactctcgaaacgagacgagacaaaagataatactccaacgcattcctcatttggagctatgttgaagtacatcattgcgccacttaaggacaaaagaatgcttctcaccattcctcttatagcatattcaggtttacaacaggcatttgtatgggcggtattcacaaagagtattgtaacacccgttcttggcatcagcggcgtcggtggagccatggcaatttatggtgcagcagatgtagtttgttctttggttgctggacgattgacctccggacttcgctcagcagcatttatagtgtcggttggagctattcttcaggccatagtcctgttctggctgcttcttttttacagtccaatggatggactgcttggcgcagcgtataccattagtcataggtgccttgtggggtgttggtgacggtgtcttgaatacacagttaagtgcattacttgggctgctgttcgaagatgtcaaggaggctgcctttgcacagctgaaggtgtggcagccgggcgccatcgcagtcatcttcttcctgagcccaagcattacgctgcaagccatgcttttactgatggccgctgctctcggcatctcctttggctcatacctgttccttacccttgttgatgagaagtcatcgcccgtcagagcctgaagtgcgaaaccatttcccgatgtccagaccggcgccagcgtgacttggtcagtgttaccagtggcctgggcagcgccatcgttgtatcccaatttcaccggaaacgcagcatccgtcgagtgcgatttgtggcacagtggtaccatttcaggcagccagtatctgaaccgaagctgtagcagctagcagttcgtgcaacggggaaaccgtcaatttgggcacgcttcttgctttgccagtagtggtcctttctccttttgcaatgtctgcactgcagcaatgttgttggaaaaaaaggatgttggaggaaaggttgtttcatttgtaccacgtcctataagagtggtctttttttttat

SEQ ID NO: 271739 - DNA, 1428 bp, Zea mays
cccacgcgtccgcccacgcgtccgatccacatgaccaccagaccagagccacagcaccagcggcagccacccaaagcccaggagcccaggaccgcctcaccgccaatggccgaccgcgtgtaccccgccgccaagccgaacccgcctccaggcgcggcgggcaacagcaacggcgcgcaggcgtcgtcgttccctgcgcccaagtcgcagatgtaccagcggcccatctaccgtccgcaggcccccgcgaagcggcagcgcgggcggtcgtgccggtgcagcttgtgctgctgcttctgctgggcgctggtggtggtgatcctgctggcgttcgtggccgcggtgtgcggcggcgtcttctacctgctgtaccggccgcagcggccgtcgttcagcgtgtcgtcggtgcggctggcgtcgctgaacctgacgtcgtcggcgacggcgcccgtgctgagcgacgccatcacgctgaccgtgacggcccggaacccgaacaagaagatggtgtacctgtacgacgacctgaccctgctggtggccacggtcgccaacgccgtgccgctggggagcgccacggtgcccgggttcgcgcacgcggccggcaacaccaccgtgctgaccgccaccgtctccgccagcgcggtgggcgtggaccccagcggcgccagctccgacatcaagcggtccggcggcgggtcgttctccgtggtggtggacgcggacaccagcgccggcgtccgggtgggcgggctcaagacgaagaagatcggcatccaggtgcactgcgagggcatcaagctgacggcaccgcctccgcctccgccggcgcccaagagggccaaggggaagaacagcaccgccgcgctcgcgcctgctccggcgccgtccgccgccgacgcgacgccggcgaagacggccacggtgagcacggcggcgcactcgtgcaaggttagggtccgcgtcaagatctggaagtggactttctaggtacgggcagcgggaggagaggagacacctttaggggctgcagcgcgcaaaaaaaaaagattttcgctttcattgctatttatttatctatatatataaatatatatacggcgataagtttgttatcaccatgattactatatatcggagcgggcaggagtatatgtattgtaggaccaagacatgcgtgcgtcggtgtaaattcattcgcccaggcattttcttttcctttttgcttcaaccatttttcacccctgtgattgatcagtggaacggatgatgtataattacgtgtgattgtacactgtgattcgattttatttgagcctgagagagaaggctgggccgctgaaccacagctggtggtgagagggacacgttgagtggcggcaattgtaaaactcgtcacgggccctcaaagtgtcggcaccttgtcag

SEQ ID NO: 271740 - DNA, 436 bp, Zea mays
tcgcacaggaccaccagagagccacagcaccagcggcaggcacccaaagcccaggaccgccaatggccgaccgcgtgtaccccgccgccaagccgaacccgcctccaggcgcggggggcaacagcaacggcgcgcaggcgtcgtcgttccctgcgcccaagtcgcagatgtaccagcggcccatctaccgtccgcaggcccccgcgaagcggcagcgcgggcggtcgtgccggtgcagcttgtgctgctgcttctgctgggcgctggtggtggtgatcctgctggcgttcgtggccgcggtgtgcggcggcgtcttctacctgctgtaccggccgcagcggccgtcggtcagcgtgtcgtcagtgcggctggcgtcgctgaacctgacgtcgtcggcgacggcgcccgtgctgtgcgacgccatcacgctgaccgt

SEQ ID NO: 271741 - DNA, 471 bp, Zea mays
catgaaggtcttgaatgtcttggccaagtatattgtggatgaggtcaaagacaaaagtggccaacagatggatgtgctctcatggaagcaggaaggtgtcaaaaaccttcctttgcaggagaatggatgggactgcggcatgtttatgctcaaatacattgacttctacagcagagatatggacctcattttcggacagaagcaaatgcattacttccgcaggaggacagcgaaggaaatactgagtttgagagctgaataaaccttggaggacatcataagtcattttggctatgttcagaattgttggaatatgtacttaacaaatgggtgcagcggcttaaaggtatagcactgagtgcaaggaatttggaagttctccagttgcacaacggcaccaagcgatggccaagcaaccggttggaattttgcatgagcacagtggtgcctttaagttttgccagtgagcat

SEQ ID NO: 271742 - DNA, 314 bp, Zea mays
ttcgttgacccgttcgccgggtcatgttttttaatcagcgaaatcgacgtcggcgccgccgcgccacgctctgccatcggcttcgcggccgtgctggcagccgggctcgcggcctccgtgctatcacgtgttgtcgtgaaacccttcagtttccctcgtcgcatcggtcgtcgtctgcgcgccttttgtcttcagctcgcctctggtgttggcaagagatttttttgacaagtgctactagtacctattaggttgttcaaaatgtatgtgttattgttaatttgtttttttaataaaacgcattacgcagacac

SEQ ID NO: 271743 - DNA, 686 bp, Zea mays
ttgttcacgcgtccgcccacgcgtccgcgagacaggccacactgagaggatggacgtgaaccaagctgggcagccgaagccctatgcagcaaacaaactacctgcaactgttgatggtcgcggcggccattggtagatctccgcgttgtgtaacacgttatcagcatctgttacttatgctaagcgctacattattctgacaaattcagaaatgtagttctgtacagatccgtattctttccccggattcctaagtactgtagaacggtgctcgaaatcgctgggtttccacctcctgtcgctattcattcactgaaagatctgctggctggtggagatttgtcagactgaagtatactggaagctcactggcaacagcgggaactcaagcaagcagagttcttgactgacgttgtcatttgttcttcagcctggtaggtctaacgagctgaatactggtagttcctgtgaatcatctacacgtcaggtgcagaattctgttgagctagctaggaggtgcaagcatgttgtacgcttctgaatatcaaagtcattgatgtaatctacaagtttgagttctatcttctgattatgtggctactgtattttgtaatttagttaaccatactcctaagcccttcgtttacgtttataataaccccatggagacgctattgggcaagtat

SEQ ID NO: 271744 - DNA, 864 bp, Zea mays
ccaaatcacccttccccttccccttccaccaccaccaggccgccgcctcgtgtcctcaattctcctttcgaatttagaatccccgtgctgagagctgagtgctgccttggttgctccgtactggactcgattcctcatcgcagcagaagcatcccgtcccctccgcttctccttgctctgctctggtaacacacagacaaaaaaaaaatagcatcatgtcggaggtgaaggactccaatgtgcctgctgcacttgatggaaatcctcaacctatggaccaaactgaagacaattctatgccctcagcacagcaacaggaagaagcaatcaagaagaagtttggaggactaatgcccaaaaagcccccactcatctcaaaggatcatgagcgggcctactttgattctgctgactgggctctagggaagcaaggtgttgccaaacccaaaggaccgctggaggcacttaggcccaagcttcagccaacacgccaacaacagcaacaacgtgcaaggcgccctatttacacttcgtcagaaaacgaggacggagacggggctggtgctgaggatatgaacatcaattgaagtggactagtggagtggaatgcctgctcagattggttgatgagcaagtcgtcactatatgtcaagtgctgtagtttgctttgcaattattggaggaattaaatgatcgtctgctgggttcatgagtcgaacatttgatatatatggcctattatttactactatatatttttattatctgtggataaacatttgatatgcatgaggtggccgagctgtgactgtgagtagggctggacgagatactcgtagcttgataactcgctcgattcggctc

SEQ ID NO: 271745 - DNA, 499 bp, Zea mays
ctgccagccatgtgcagtgctgcgagtggagactagagagaaaacagaagagaggagagggccggccgcggcctggccgaacggaaccggaggtagggtaggcgggccccacccccacaagctctacgctctacgctctgctctgctcttctctactcctgcgtgcgtggtctctttcctcccctcttcatccagatccggacccgaccgccgatccatccaaatcacccttccccttccaccaccaccaggccgccgcctcgtgtcctcaattctcctttcgaatttagaatccccgtgctgagagctgagtgccgccttggttgctccgtactggactcgattcctcatcgcagcagaagcatcccgtcccctccgcttctccttgctctgctctggtaacacacagacaaaaaaaaaatagcatcatgtcggaggtgaaggactccaatgtgcctgctgcacttgatggaaatcctcaacctatggaccaaactga

SEQ ID NO: 271746 - DNA, 324 bp, Zea mays
tgaacgaacggagtagggtaggcgggccccacccccacacgctctacgctctgctctgctcctgcgtgcgtggtctctttcctcccctcttcatccagatccggacccgaccgccgatccatccaaatcacccttccccttccccttctcttccaccaccaccaccaccaggccgccgcctcgtcgtcctcaattctcctttcgaatttagaatccccgtgctgagagttgagtgccgccttggttgctccgtactggactcgattcctcatcgcagcagaagcatcccgtcccctccgcttctccttgctctgctctgctaac

SEQ ID NO: 271747 - DNA, 1373 bp, Zea mays
cgcacctcccttcgcgcctcctccgcgcagatcgccaggcgaggaaccagaccgcagggcaggatgcagtacaagaacctggggcggtcgggcctccgcgtcagccagctctcgtacggcgcgtgggtcaccttcgggaaccagctggacgtgaaggaggccaaggtgctactgcaggcgtgccgggacgctggcgtcaacttcttcgacaacgccgaggtgtacgccaacgggcgcgccgaggagatcatgggccaggccatccgggacctgggctggcgccgctccgacgtcgtcatctccaccaagctcttctggggcggccagggccccaacgacaagggcctctcccggaagcacgtcgtcgagggcctccgcggctcgctccgccgcctcgccatggactacgtcgacgtcgtctactgccaccgccccgacgcgtccacgcccgtcgaggagacggtgcgcgccatgaactgggtcatcgaccagggctgggccttctactggggcacctccgagtggtccgcgcacagatcaccgaggcctgggccgtcgccaaccgactcgacctcgtcggacccatcgtcgagcagccggagtacaacctcttctccaggcacaaggttgagtctgagttcttgccactttacagcacctatggcatcggattgactacatggagtcctctagcttcaggagtactatctggaaaatatggcaaaggggacatacctgctgatagcaggtttgccctagacaattacaagaacctggcgaacaggtccctggttgacgacacgcttcgaaaagtgaatgggctaaaacctatcgccgctgaacttggcgtttcgttagctcagctctcgattgcttggtgcgcgtcgaaccccaatgtctcgtctgtgatcactggagccaccaaagaaagccagattgtggagaacatgaaggccctagatgtcatcccactgctgacgccggaggtcgtcgacaggatcgaggcggtggtccaaagcaagcccaaacgcaacgtcgagtcatacaggtgaaaattcggtgttcatccgacggagttcaggcctcctccacgaaacttcatccatgatccgtgtgtattctgggcgtggtgctgtgttcacaaacacaagtctgtcagtcctgtgttgtgtattctgctttccgatacagattttggaccaattcaatcctgcattgtgttgcttgcgagcagaaagatttgttggatgaccatgatcctttctggtcgtgctgcaagatttctggagcgtgagatcctcggctggatccctgtatcagcagcccatgctgtgggctgttgcttgcagaaaaatttgggtccgttttacccg

SEQ ID NO: 271748 - DNA, 589 bp, Zea mays
cggacgcgtgggcggacgcgtgggcggacgcgtgggcggacgcgtgggtgcgcgtcgaaccccaatgtctcgtctgtgatcactggagccaccaaagaaagccagattgtggagaacatgaaggccctagatgtcatcccactgctgacgccggaggtcgtcgacaggatcgaggcggtggtccaaagcaagcccaaacgcaacgtcgagtcatacaggtgaaaattcggtgttcatccgacggagttcaggcctcctccacgaaacttcatccatgatccgtgggtattctgggcgtggtgctgtgttcacaaacaccagtctgtcagtcctgtgttgtgtattctgctttccgatacagattttggaccaatcaaatcctgcattgtgttgcttgcgagcagaaaaaaaaaaaaaaaagaaaaaaaaataaaaaaaaaaaaaaaaaaaaaaaaaaaaaaaataaaaaaaaaaaaaaaaaaaaaaaaaaaaataatataaaataaaaaaaaaaaaaaaaaaagggcgcccgttttaaaggacccaatttttcctacccttgcatgcaactttataacttttttttagg

SEQ ID NO: 271749 - DNA, 401 bp, Zea mays
ggtgtcctcaggacccaaggttattggcatctgcgagcgacgacggcacggtgaaattgtgggaactgagagggaatgtgcttgattgagttctgttgtaatcactgtaccgtgcgttgagataatagaccagattaggtatcgcctttggatttctgttctactgacctcggctctctgtagtccatacttgtatatcgagagggttttttatgagggtctttcacaagattcacccggcacactataacccgcgccatcttataaaacacgtgttgttcgcgcgttcctcattgggggggcgcccgcacatgttgttcaaccactttttaaaaatcaaataattcatgcacagtggtgagtgatgaataatgaaaaaatttttgcttttttttgtttgc

SEQ ID NO: 271750 - DNA, 676 bp, Zea mays
gctcagcatccgacgacgggacttgcacgatggatgctgctcttatgcctctgctcgtcgtctccctcgtcctctgcctgctggcggctgcccctgcggcgtccgcggcgcgggccttcttcgtcttcggcgactccctcgtcgactacggcaacaacaactacctgctgaccacggcgcgcgccgacgcgcccccctacggcatcgacttccccacgcaccaagccacgggccgcttctccaacgggctcaacatccccgacatcatcagcgagcacctcggggccgaacctgcgctgccgtacctgagccccgagctccgaggggagaagctgctcgtcggcgccaacttcgcgtcggccggcgtcgggatcctcaacgacacaggaatacaatttgtgaacatcatcaggatcggcgaccagctgcagtacttccgggagtaccagcggaagctgcgagccctcgtcggcgagccgcaggcgacgcagctcgtgaaccaggccctcgtgctcatcacgctaggcggcaacgacttcgtgaacaactactacctggtgcccatgtccgtgcggtcgcgccagtacgcgctcccggactacgtccgcttcatcgtctccgagtacaggaagatcctctcgaggctgtatgagctgggcgcgcggcgcgtgatcgt

SEQ ID NO: 271751 - DNA, 629 bp, Zea mays
ggagaagatgagccaggtccaaagattggtgaaaggctcctatgtcgtcaccctttcaatgaatcaaagagagcgtacgttgttccacagcatgttgaggaattattgaagtgctactggcctggaaattcatcgaattcacgggaggagcttccatccatccatgagattaggactcggtgtattcaccatctggaccgaatgaggccagaccatatgaggcggctgaacccgacgccttacaaggtaagcgtgagtgctaagctgtatgacttcatccatttcttgtggctcaacgaagcgcctgtcggagaactgcaatgatgaaatgaagtggcggtagggtcggatcccaaacctaactctaataagctgatccgcttatgggtgccgtcggagcaaataacaaactgttgccgccggtgcaatttctgcagtagttttacaatcgcctgcgctctagtaaaatgtgagtatgttctggtgcatctgtcaaaacagaccatagctgaagtgttacgtactgggaacaagaggatacccataccgagttgtatgactgaactaattgcaatgaggagcaatcactaaatttgagacaaacttacttgtcttgtcaatttccctat

SEQ ID NO: 271752 - DNA, 220 bp, Zea mays
ggccggtgctcgagtcgtcgccgctgccgctggccggcgtccccgacgtcagccgggctgatctgccgacgcttgtcatcggcggcaccgagcacgtaggtaaatgagctagctgtgtggtgatccgaggattgattaaaatgtccagcatctgtttgttgcgattaatttatgaactgggattgattcttgaattatgaactgacacacccacatttcc

SEQ ID NO: 271753 - DNA, 399 bp, Zea mays
caagtctccaaaggtcgaatcaaagtgcaactgtgcaattatgtagagttatgcatcaactcaagttggcaactatacttattatgatcactaaaatccatggttgcttgttattatttcagcgcatgtgagttaacaaatgaatctgcacccccctggttcagtaagcagcagcgacctacaattttttttttggttgtggtgcatttgccctttatttctgggtcatagagtgctcaacgagccattcttttgtaaattcttgcttctccagtcagttctatggtttgtctattttttttcctgagagtcaacatctcaagcttaagcatatttatataataaaataataacatttaccacccccaataagcataaaaaaaaaaaacgtattaaaaa

SEQ ID NO: 271754 - DNA, 698 bp, Zea mays
ttggctcgccgccgagatcatcggcacctttgtgctcgtctacaccgtcttctccgccaccgaccccaagcgcaacgctcgcgactcccacgttccggtgctggcgccgcttccgatcgggttcgctgtgttcatggtgcacctggcgacgatcccgatcactggcaccggtatcaacccggcgaggagcctcggcgccgccgtcgtgtacaacaacagcaaagcctggagcgaccagtggatcttctgggtgggcccgttcatcggagcggcgatcgcagcgctataccaccagatcgtcctccgcgccagcgccagggggtacggctccttccggagcaacgcctaggaccatctcgtcggcgggctattcagctcttcctcctccgcagtttaaggtgaacggagaaggagagcgcaagggggtacggagcaacgtctaggctcacctcgcctttgcccccgcccatccacagcagcagtagctttcattcaggtcaagtgttgcagctgccggcaacggtagctagcgcaggcgtttgtgagtttgtgtgcggtgtggaaagcaagtgtgacttggtcagcgtctgtgtgtcctgttgggttgcagtcaatctaacttaataaagatggacgaatgcaagtgattattaaaaaaaaaaaaccccaaaaaaagggcggccgctcgcgatctagaa

SEQ ID NO: 271755 - DNA, 1740 bp, Zea mays
ataacatcttggtttagatgttcttaggtcctttgctttctcttcaaggcaggttcctttgatttcattcctcaaactatcaatcacaggctgcagcacgtgtaatccgcatcggttcaagaacagatttcatgcttggtgatattttgcatcctgcgattaattgggctgataaagagtctcatctggatcctgatgaaatggccaagatgaagtctgcttttattggtaacctgccagaagatgttaatgaggagtacttgagaaagctttttggacagttcggtgaggtagtacgggttgctatctcaagaaaaggacaatgtccagttgcttttgttcacttcgccaaacgttcagagcttgagaatgctatagaagaaatggatggtaaaacggtgagaggacctggtcgagggccgtctttcaagatccaggtgtcagttgctcgacctacggcagacaacgacaagaagcgatctcgtgaagaagtgagaactagaagatcaaatgcatcaggagataggcgagattattctcatggaagatatggacacgattcacttgatcgtcaagtgaaagctccaagattatctaattatgtggccgatgctgctgacccctatgaatcagctgttaattcattaccttcagctgtcaaggaagtcttgcttcgaattctacgtctaagaattggtactcgatatgatattgatatccattgtgttaaaagccttgatgagcttcctgagtcatctgctcttgctgtccttaatcagtttttgatatcaggtggagacaaacacaacaaaggagattattttgcatcgttggttgctaagcaccaggctgagacctttggcttaacacatgcattacacggtaccacttatttgtcaagaaatccggaaatgcatagcaagcgatacccacatgaagattatgattttgtgacacccaggagcagtaggtacgattcgtcagcccatcatccttcaacatactacgaagacgatccaccagtgtctgagtcaagggttagaagatatgctgaagaaaggtccaccattgtaagaagcccagaaccacgtccgcgatatgacgaaacagacataagaataaacccagaaccaagattaccatatgaatcaagacacaacgccgaatagcatctcgatcgaagatacatacaagagcatagttcaaatattgaaagaccagctgaagaagctctcctttctagggaaaggagatttctgcctgctgcagggtacatgccgaacccaggcggctcggatttccgctccaggtcgcccgccgaatattcagcacaacgccaacaaatgaggtttgatccattcacaggtgaaccttacaagtttgatcccttcacaggggagcccatcaggccagatccgaaccagcgccgctcaggaagcctgtactgatcagattagttggagcgatatgccagataagaccctgaaacaaagctagatctggataactcttcttcttgtctgccaagtgtctctgtgattttgcttgtgggctacagatcatgtaccccgagcaccatgtgtgatccagtcggactaatcatttcggcattgaaaagtcggactaactttttttgtgcccataacgctacgtattgtttggtagattaattaaaaattcatccggtgaaaagcaaaaaaaaaaaaaaaaaaagggcggccgctcgcgatctagaactag

SEQ ID NO: 271756 - DNA, 947 bp, Zea mays
tattgataagacgggaaaataccctaggctctcgccagtctccggtgcggctcaacaccgaccgaacccgtgaaaaattcgttctcctttcgatccgtttggcggggggctcggccggatccgaccggaggggcgccgccgatccatccggtcgcagccgcgtctgatttggtgcggattttggcgagataccccgctcctagctccgctgtttcaaggataacaaagatggcgtcgccgcggggcgggttcgatgagcaagatcgccggacggagaagggcaccgaggtgttcgtcggcgggctgccgcggtcggccacggaaagcacgctccgagagatattttcttcatgcggagagattattgacgcgcgcataatgaaagatcagagtggtcactcaaagggatatggttttgtgcggtttgcaaagagggattatgctaatactgccaaaaggcaaaagaatggtattgaggttcaaggaaagaggcttgtggttgagctttcaatggatcaagatacagttttctttggaaatctttgcaaagagtggactttagaagaatttgaagaattgattcacaaggcattcaaagatgttgtttcggttgaccttgcaatggcttcaaatcttggttcttcaaacaagaagaatatcaatcgaggctttggatttgtgagattttcttctcatgcagctgcagcacgtgtaatccgcatcggttcaagaacagatttcatgcttggtgatattttgcatcctgcgataaattgggctgataaagagtctcatctggatcctgatgaaatggccaagatgaagtctgcttttattggtaacctgccagacgatgttaatgaggagtacttgagaaagctttttgtacagttcggtgaggtagtacgggttgctatctcaagaaaaggacaatgtccagttgcttt

SEQ ID NO: 271757 - DNA, 860 bp, Zea mays
cgtacgcgtgggtggggccgcatcctctccccatcggcagtcttccccaagtcgtctaaaccccaatccctaaatccccgacgcagaccacacgacgcgcacctccgttcacgaggcggaagcatgagtcgccatccgatcactaagtgggcacagaggtccgacagggtgttcttgacaatagagctgcccgacgccaaggatgtgaagcttaacttgaagcctgaaggccatttcaacttctcagctaagggctcagatgacttgccctatgagtttgacattgagctgtttgatgctgtgaatgtggaggagagcaaagcagctgttgccccaaggaccatatgctacctgataaagaaagctaagagcgggtggtggccaaggctgctgaagcaggagggcaagccacctgtgttcttgaaggttgactgggacaaatggcaggacgaggatgatgaagacgctggatttaatgactttggtggtatggacttctcgaaactggacataggaggtgctgatgacgacgatattggggatgatgaagatgatgtggttgaaagtgctaacaaagatgaagaaggaggtaagacagaagagagcaaggaggaggaagcagctcctgcggctgcagaggaagtgaagccatgaagaatcatttgactttgctccgcgccatgggtgtccacggtatctagctaggctagacgttcccttggatttttggtgtaaaatctggaggtcgaaccactcactgcctattgaagtaaaggatacaaaaacagttgtgctgtcttagtttttggctgaaccctgtgaactgctgctacaatatttggtcagagtttatatgcatc

SEQ ID NO: 271758 - DNA, 655 bp, Zea mays
agaagatgttgatggtactgccgaggatatatcagtgaagcctggaatgaagcgtaaactgaacgaaatattagaggcaaaggagaatttagatgctcttgagaatccttcggatgttgattccagcggcactcaagttgttgaagacgatgacaacgatgaccttgttatgtttgatgaggacccaaggcaagacaagaagatgagattgcaatagcatcctgttgcggtgataacagctcttgactcccggcatcatggctaacacattgttcgacttcgatcataccatctttgataagtcatctatgtggtgatgtgctaggttgatgttgagacattggtagcaatgcccgggacactttttggcctcagatactggcctgtaggattgtaatttgtaggttttaggcacgagcaacggaaccactgagcaatctgtcatgttaattgttaagtacttaagtggcactgtgtctggaaatatgtaatcctgtaatcttcttagtgctacgctatatgctagaaacaacgcctgggtttaaaagctatccctgatttcctgtattttggaccgctttttgaaggaatatccttcataggatatccgcatggtacttcttatctgaatgtccaaaaccatgtttggttgccc

SEQ ID NO: 271759 - DNA, 606 bp, Zea mays
tcaaagctgggggcaaagaaccagctttggaaccagagtctcatagaatagaggcgcctaaggttgtgcgctcatctacaatcatgtcagcatcgggacttagtttgctagctggaactacaacaccacctaaaagagaccagccgggtgctttcagcagagcaagttcaatgaaggaaggatcctctgagttaccgagtggtgtccgaagctcagcagaaccaagccccaggagatctggtgcttcaaccctgtttggagggcttgggtttctaaggaactacaccagctgagatgtatgtgctcagataggtgtttttttttcccaaggagaccagcagtttgagctgtatatgtaggtagtaggtaatagggcagttgccaaaaggacggctcccttttcctattgggaattgcgaatttttgtaggaactaataccttgcagagcaatgcctcgatgccaagatacaaactttaaatttaatgttgggttagatgctggaagagaaacatcctattgtatattgcagtggaatgtactgctggaatacatgtttgggaaggagcaattacaactaagtgtgctgggtatggcgggtgccgtg

SEQ ID NO: 271760 - DNA, 3131 bp, Zea mays
tttacgcgtccgaacccacggaagcaagacaaaagctcgtgctggacgacatctcccctgtcgatccacgaccatgatgcagcagctccgtcacagccagccgagcccgtgcctctgcggcctgcgggcggcacggcctatgctcgccctcggcgcagcagcatcccgttcgcggcccgccggaaaactgcaaccgagcgtctgcctcggcctcggccatgtagccccagccgcggcgagaggacagccccgtccccgtgccgttgccgactcggcgctgggagcatcgcctacgagcgtgcatgtcggaggcaagctgctgctgcagaacttcgccgccgacagccagcagcggctcaagctctccatccagcttgtcagcgccaccgtggccgatcccgacgggcgcggggtgaaggcggaggcgtcggtgctggacgccgtcgtgggcagcggggacagcgagctcgacgtggacctgatctgggacgaggcgctgggcgcgcccggcgcggtggtggtgaagaaccactccgacttccccgtgtacctgaggctgctgagcgtgccggccggcgtcggcggcgccgacgacgaggccgacgccgtccacttcgcctgcaacggatgggtgtaccccgtcgacaagcacccgtaccgcctcttcttcaccaacgacgtgcgtgcgcgtgtgtcaaggaagaaacgccgagcgccctgctcaagtaccgggaggacgagctcggcgcgctccggggagacggcgagacgacggagcgaccgttccagccgtgggaccgcgtgtacgactacgcgctgtacaacgacctggggaacccagacctgcgctaggacctggtgcgcccctgtgctgggaggatcccaggagtacccgtaccctcggcgtaccaagaccggccgaccagtcgccaaaacagatcctcggtcggagagcagagcgccgctggacgaagagatctacgtcccctgcgacgagcgcgtcggcttcgccagcatccccgcgccgacgcttccgccgctgggcgggcacttcaggtccctcgccgatgtctaccgcctcttcggcctcgacgacctcggccggctcccggaggccaaggcggtcatcaacagcggcgcgccgttccccgtcgtgcctcaggtcatttcagtgaacccgacacattggcggaaggacgaagagttcgcgcggcagatgatcgccggggcgaacccggtgtgcatcaagcgcgtcaccaagttcccgctggcgagcgagcttgaccgcggggtgttcggcgaccaggacagcaagataaccaaggaccatgtcgagaagaacatgggcggcatgacggtgcagcaggccgtagaggaggggaggctgtacgtcgtggaccaccacgactgggtgatgccatacctgaagcgcatcaacgagctccctgcgagcgaggagaaggcggaggtgtcgcagaggaaggtgtacgccgccagaacgctcctgttcctggacggcgaggactcgtcgatgctcagaccgctggcgatcgagctcagctcgccgcacccggagaaggagcagctcggcgcggtcagcacaggtgtacactccaccggacagcgtggacgacggcatcacggccgggaggttctcaacctgggaactggcaaaggtttacgcctctgccaacgacgcagccgagaacaacttcgtcactcactggctcaacacgcacgcatccatggagccgatcgtgatcgcggcgaaccggcagctgagcgtgctgcacccaatccacaggctcctcaagccgcacttccggaagacgctccacatcaacgccgtcgcacgccagatcatcgtcggctcgggtgaccagaggaaggacggcagcgtcttccgtggcatagacgaggtcacctacttccccagcaagtacaacatggagatgtcctccaaggcgtacaaagcctggaacttcacggaccttgctcttcccaacgatctcatcaagagaggtctggcgaaaggagatccaaagaagccagagacgctggagctggcgataaaggactacccgtacgcggtggacgggctcgacatgtgggcggcgatcaagaagtgggtggctgactactgcgccatctactacgccgacgacggcgcggtggcgagggacagcgagctgcaggggtggtggagcgaggtcaggaacgtggggcacggcgacctggcggacgcgccgtggtggccggcgatggactgcgtcgccgacctcgtggagacctgcgccaccgtcgtctggctgagctcggcgtaccacgcgtccatcagcttcgggcagtacgactacctgggcttcgtcccgaacgggccctccatcaccacgcggccggtgccgggcccggacgccggggcggaggtcacggagtcggacttcctggcgagcgtcacgccggtcaccgaggcgctcggcttcatgtccatcgcctcggggccgatggggctcaagggcacggaggtgtacctggggcagcgcccggacacggagcagtggacgcgcgagcggagggcggccgaggcgctggcggagttccgggcgaggttggaggaggtcgcgggcaacatcgacaggcggaacgcggaccctgcgctgaagaaccggacggggcaggtggaggtgccctatacgctgctcaagccgacggcacagcccggactggtgctccgtggcatacccaacagcatcaccgtttgagcagcagagcgccgtcggcagctgtcagctgtgtacagtacagaataataaggtggtcgtgtttggcgctatctccaccacataaacgtgaaaatgtttttttttgaattatatggacatgcagggccgcagcccgtaagcctggcccccgtttcggttttctgtttttttttttttttgcctcgatctggtgatcagcaagccacgtcggtccgggtgatctcgctaccggagatagaatgtgtacacgaaacctaataggttttccctccattaggatacgaggcccagtcaattttcatacctatagatttgttaatgagcatacatttatacccgaaaaaaaaaaaaaaaaaaaaaaaaaaagga

SEQ ID NO: 271761 - DNA, 910 bp, Zea mays
ccacgcgtccgtggacgcgtgggcaatacagaaagagcccgtgtgcgtgacgcacggacgccgtgactccgccgcatagagagggagagtccacgctctgaagaagcaacggcgacgcccccgacgacgagcacagctgcacagcaaactagcagcgccctcgtcagttccgtctcgttcccaacctctcccggattcgattcgattgacccgtccgctccaaatcgaatctaatcagcagttttggagttgcggaagggagaaagagagaggagaggggcatggatcaggtgctcaacaaggtggggagctactggttcagcaaaagggccagcaaggaaatcgactccatcggcgacgacatcagctcgatctcaagcagcattggagggtcagccaaatggatggtgaacaaaattaaagggaagatgcagaaagcactgccagatctcctcaaggaatatgacatgccagcagggctcttcccacgggacacgactaactatgagttcaatgaagagacaaagaagctgacagtgtacatcccgtcagcctgtgatgttggttacaaggactcgtcagtgctgcggttcttcacctgtgtgaccggctaccttgagaaggggaagttttccgacatcgagggcatgaagaccaaagtgctggtctggaccaaggtgactgccatcaagaccgagggcccaaaggtccatttcactgcaggcgtgaagaagactcggagccgtgatgcctatgaggtcgtcagagatggtatcaccatagacaagttctagagcatatacctggcatgaaaaatgtgacgcgggtattcatatatgcttctctcctctcagatggtacaccgaaattcatacaatattcggggctaattctgcatttgtatgaaagt

SEQ ID NO: 271762 - DNA, 529 bp, Zea mays
ctcctgctcacccaccggcaccgcatcctcgccgcccggaccctctctgtctctgtctccgccgcggcgggctcctcctccatccccgtcaagatgactgcgcggtcggcgctggacgaggtcaccgacacgggcgccttcgaccggtcgccgtccaccttccggagctccgtttccagggacgggcggttccccgccgtggcggggcggtaccacctctacgtctcgtacgcgtgcccctgggcgtcccggtgcctcgccttcctcaagctcaagggcctcgaccacgccatcggcgtcacggccgtgaagcctatcttcgagcggaccaaggagagcgacgagcatctgggctgggtgttccccgccgccgccgacgaggagcccggcgccgagcccgaccctctcaacggcgcccggagcgtgagggagctatacgagatcgccagctccaactacgccgggaagccaaccgtccccgtgctgtgggacaagcagctgaagacggtggtgaacaacgagagctccg

SEQ ID NO: 271763 - DNA, 427 bp, Zea mays
gtcccgtcggccggacgagcagggcccaagggcccaccttaccatggctaccgccactgccgcccccgtccccgccggcggccacccgtaccgtcgcgcccgcactcgctgcggcccaccgcgcctgcaccgcctgcgctttccggccgcagcagcagcacgcttcgtcttccctgcccgccccgtcgtccatgctgccaccgctgccagatggaggcggtcggctggtggcggagctggtgtgcgcgttcaacgagctcacggagcggatgggggaggacctggcgacgtcctactcgtcgagcctgctcttccgtgtgctgaagctggcgctccccgacctccgcgacgtggagggcgggcggacactctcacgcgcgctcggcggtctcgtgaccctcgctgacctccagatggatgctgaaat

SEQ ID NO: 271764 - DNA, 770 bp, Zea mays
gattcgttaactagaacattagctgaacatcgccagcatttagtcagtatacagggtctaattaatcaactcaaggaggctattccagcaatgcagcagtctatagacgaactctcagaagaagtgaatagtgtatctattaactcaatggaccaattgaactcgaggctgccactgccagtacaaattgcagggtttggaacatcagaagaaagcagcagtgaagtttcggagatcaattctaagctctcttctacacacttggataagcctgggggcagtcctgctctaaagctaccaccattatttagtctgactccaagttcttctggaaaaggaatacagacacaaaaacggagtgcattggctcgtcaacgtagccaggacatcacatcagaacagaaaacgcttaccatcccctcaactaaggatcaaatgaatggttcaatgcacgaaaatgatgactattctgctcatgacattagacgttctgttcgtgaagctgctttatctaagccattgaagaatacagagagaccacaagataaaaatagtgatgatggttcggaacacttctttattccgctgtcaattagtgctgcgaagaaggaaatggattcggtggcaaatcgatgtaaccaaagattaggtttgtcacctcagatgaagttcccaaagagcacaagctacaatgcagataccccaatcaacaaaagtccaattctgttaagtgaactcaatggacatgattcgatcagtgccatgagttt

SEQ ID NO: 271765 - DNA, 542 bp, Zea mays
cccttgcgttcggttcatcgaagagatggccggggaggattccgaggggttgcagttagagcgggagtggggaacgctcccaggggacagcgaggacgacgatgacgacgatatagcccatgagttcgagggctttatcaggaggcacggacgggcatcggctctgcgccgggtgctcgacagcatccaggacgaccttagagccgacagggaaagggacaactccgtcctcatcaacgccttcaaccaagccctcgcctcgcaaggctcggcgctgctggatgccgacgaggcccgagacggccgaggtggatccagcaacagcaacgacgatggcttgctggaagagtatgatgtcctgggggctgggctgagcctactgcttcagcatctggccgagaacgacccgaaccggtacggcacccctccggcgaagagagaggcggtcgaagctctgcccactgtccagatagcggaagccgtcagctgttcggtctgcctcgaccatcttgagcttgggtccccggcgaaacaaatgccct

SEQ ID NO: 271766 - DNA, 1159 bp, Zea mays
cggacgcgtgggttccttccggccgcccattccgatccgatccccggccggccacctaccaccggtcagccccatcaatctctgaggcagcgtcagccatcacgcctccctcgtcgatctccccgccgccgccgctgctaataccagataatggaggccggcgccgccgctgctgccactgccatctaccctctgcaccgatgcaaaaccatacacctggtgaggcatgcccaaggtgtccacaacgtggaaggcgacacggatcacagcgcctacatgaaacccgacttcttcgacgcgcgcatcactcccttgggctggaaccaggttgacctcctgcgagagcatgtgaaggaatctgggcttgcggaaaagattgagctggttatttgttctcctttgtcgaggaccatgcagactgcagtgggagtttttggtggcgaaagctgcagtaatggtgtgagtgtgcctccactgatggtggagaatgctggacgtccggcagtttcaagtttgaactgcccaccatttcttgctgttgaggcctgcagggagcgcttgggtgtccatccttgtgacaagaggaggagcatcacagagtaccgtgctctcttccctgccattgatttttcgctgatagagagtgacgaagatgttctctgggtaccagatgtcagagaaacctttgagtcactcgcagaaaggggtatgaagttcattgactggctatggacaagagaagagagagagatagccatcgtcacccatagcggtttattaagccataccttgcgcatgtacagcaaagagtgccatccaacagtaacacaagaagtgagcaagtactttgcaaactgcgagctccggtctttggtactggttgacaggagtatgcttggttcagatggccccagttacaactactaccctggcaaaatgaaaatcccagccggacttgatctgcccagcgatgacaagaagcaacctcttcagaaccagagcggctgagcaggcctgtcttggggcttgtttggtgttcaccaccactgattccttttcttttgtcatcctattttgaaacttccctagctgtattcagtccattttttgtgaactattctgagagtactattctgaactttcccatttgtggttgttg

SEQ ID NO: 271767 - DNA, 507 bp, Zea mays
ctatgtatgagatgtaatatagcatgaagttatgaagtccggcccataccaccgcgcctagactgtgcctgcatccctcatcgctcggctcgatcgctgatcagttctgcggccggcgacgtgtgctagctcacgacgacgacatgggctcggcggtgaagatcgggacgtggggcggcgacggcgggagcccctgcgacatcacggtggcgccgcggcggctggagagcatcaccatccgctggggcaaggtcctcgactggatcgccttctcctaccgggaccagagcggggagctgcacaccgccggcccctggggcggcaacggcaaaggagagggcacggagacgatcacactggaggcctcggagtatgtaacgggagtggcctggtccgtgggcccgttcaagttcaagaacgtggagcgctgcatcacctccttcaaggtcgtgaccaacctccgcagctacggccctttcggccacggggtggacagcacgcaccaca

SEQ ID NO: 271768 - DNA, 1592 bp, Zea mays
accacacgtccgcccagtcgtccgaactgcgctggacccagccgcgccccgtctgcctcctgcttctctctccgcttccgcttcctgcgcctccaggctccacttctccgctcggcagtcggcactggaaggacagcatgtcggtctcggcgtcgtcaccggcggcggcggcgggcgatgagaagcaggaggcggcgcccgtcaggcgctgcaagggcgtcaacgacctcgacaaggtcgttctccgcgaggtccggggcagctccgcagaggtgtacttgtatggtgggcatgtgacatcatggaaagatgagcatggagatgaattactttttgttagcaataaggctattttcaagcctccaaaagctatacgtggaggaataccaatatgctttccgcagttctccaactttgggaatctggaaccacatggatttgcaaggaataggacatggagtgttgatgatgatcctccgccatttccagtgccaacctccaatagcgcttatattgacttgatcctcaaacctactgaagatgatttgaagatctggcctcatagttttgaataccgcctgagggttgcacttagtcctggtggtgatttgatgctaacttcacgtataagaaacactaatgcagacgggaagccattctctttcacttttgcataccacacatacttcaagatttctgatatcagtgaggtgcgagtagaaggattggaaactctggattacctagacaacttacaagatagagctcgttccactgaacaaggcgatgcaattgtttttgaatccgaactggacagaatatatctgggcacaccatcgaaaattgccattattgatcatgagaagaaaagaacatttgttgtgaggaaaggaggccttcctgatgctgttgtttggaacccctgggacaaaaaagcaaaggctatgtcagattttggggatgatgaatataaacgaatggtatgcgtggaggcggctgctattgaaaagactgtcactctgaagcctggtgaagagtggactggaaagttggaactttctgctgtgccatctagctattacagtggtcagctagaccctgaccgtgtgattcaggattccactgtcccggaggactccatcagctagtccttattctatttttgcaggtagagcattgtatcattatgcataagagatgctggcaacaagggctgtccacatgtttcttccattctgttcaaatcttcggtgtttttttattccgaatgcatatccgaaccaaggaatgtgaaattggtttccgctttttgaggatctatgtagcataatggataagtcggtgtttcgtaccctatttagggatgcttgaagcaagaaacatcttcatgggttgtaaaataaaagaaaaattctctttatatttgatcaattcttttgccttaaaacgtataataagttctatactggagaaaagaaaaaaaagagatggtgtagaaatggacccgtggtgtgaacgttccgccctgtgtgatttctataaaaaaaaaaaaaaaaaaaaaaaaaaaaaaaaaaaaaaaaaaaaaaaaaaaa

SEQ ID NO: 271769 - DNA, 826 bp, Zea mays
tgcgcctccaggctccacttctccgctcggctgtcggcactggaaggacagcatgtcggccgcggcgtcgtcaccggcggcggcggcgggcgatgagaagcaggaggcggcgcccgtcaggcgctgcaagggcgtcaacgacctcgacaaggtcgttctccgcgaggtccggggcagctccgcagaggtgtacttgtatggtgggcatgtgacatcatggaaagatgagcatggagatgaattactttttgttagcaataaggctattttcaagcctccaaaagctatacgtggagggattaccaatatgcttttccgcaggttatgccattgtccttccaatagccttggcctctctgtatcttctttggcaggaatcttaattccacttatgtagttctccaactttgggagtctggaaccacatggatttgcaaggaataggacatggagtgttgatgatgatcctccgccatttccagtgccaacctccaatagcgcttatgttgacttgatcctcaaacctactgaagatgatttgaagatctggcctcatagttttgaataccgcctgagggttgcacttagtcctggtggtgatttgatgctaacttcacgtataagaaacactaatgcagacgggaagccattctctttcacttttgcataccacacctacttcaagatttctgatatcaggtatgttgtttcaaattatggtcatcatctttgaaatattcaatttgccagcatagtttttgaagtaatcttgtggcagcatgtttatccccagtcccaattcgtttgaccaaactctggtattaaa

SEQ ID NO: 271770 - DNA, 429 bp, Zea mays
gtgaaggccaattacaatgaagcgcagaaaggttcatgacaagctatatgcgctctgtttgggtgaggcttaggggtgactaaagtttatttcctgtcacatcgaatgtttgaatatcgaatgtttaaatatcaattatgagtattaaatataagcttattatatttaataaatctgtctcgtttttttatttaatactcataattgatatttaaacattcgatatcattacatagactaattctcttgttcgttcactcatgcgtgatggcactgagtatgttacaccttactctcgaaagtctctccgagtcctgcgaagtgttggtgagccaatcaatcctagtgcatggagatggttctacaatactgttggggattccccgtgccctatatcagacaccttgtggcaaactgaaactggccggt

SEQ ID NO: 271771 - DNA, 746 bp, Zea mays
tttacgcgtccgcggacgcgtgggcgcggcgcagccagagtaagcagagagttgcactaccgtgcttcttcagttcttcttcctagtatgcactcgcttgtgaggcgtggcaatggctacggctacggctatggtggttacggcagcagcaatccccatatgaactaccaccgccaaaacaccgagtccgtgaccaccgtcgtcacggagatgaaccgaatggccgtcgacgacaagccctgctacggcggcggcgtgcagaagcaggcctgcaaggtggaggcgttccaggagcacgacgaagcgtacaagggcgccgtggccgtgcagcagaagcactcctccttcaaggaggacaaggaggaggtgcgcggtgctgctgccgccgtcagaagctggcacgacgagttatacaaggaggaggaggaggagaagcgcgtcgtcgacacggagtacggtgcccgctacgggggtgtggccgccgtgaagaagccgggctacaactacaagcagcacgaggcatacggggagaccgaaggtgcagggtacggctacggcgccggcggcgtgaagaagcaagcaggctacagctacgcgcaggaagcgtgcggagagagctacggcggcgctcagtctcaccacggtggtgccggcgccgtcgcgcagacgtacgcctacgaccagcagcaggcctacaagcacaaggacccagcaagggcggtgtacggtgctcgctacggtggtgg

SEQ ID NO: 271772 - DNA, 553 bp, Zea mays
cagacgcgtggccattgtgtaatcctcatcctccgtcgagatcaaggaagaaagaaagcaaccatggcggcaaccggaatgtccccctccccctcggccgcaataactcgccacatccatgctcgtcgttcctgtgctgctgcttccttgtccctccgccgctcgggcttcctggggcgcgtcgtgctggccgcggtgccagtggccgtggacgccacccggcgccgccgcgtctccgtgtcggtgcggatggcctgggacggtccgctctcgtcggtgcgcctcatcatgcagagcaggaacgcgaagctgagcgagaagctcaaggagcacatcgaggacaaggtgggtcgggcggtgtccaagcactgccacctggtccgggaggtagacgtgcgcctctccgcgcgcggcggcgagctcggccggggccccaagacgtcgcgctgcgagatcaccctcttcaccaagcgccatggcgtcctgcgcgccgaggaggacgccgagtccacctacgccagcatcgacctcgccgccgccatcgtcaagcgca

SEQ ID NO: 271773 - DNA, 990 bp, Zea mays
gaaagcaacgactccgcgtccgcctgacctgacgtccgcctgatgaccgattatcttccttctccgtccgagtaaaggaaagcaacgactccgcgtcccgcttccctttccccgcacggcggagttcacaatccccaccggccggcgtagcggatattgcgagttacgacggggaaggagaggaagatccgtcgatccgcgcagattcgtttcgatcgtggtttggtgacttggtaagaggggaggggagaagcggcgatgtcgggcgtgttcggcagggtgttcgggaagtccaaggagcagagccaggcgaccgcgctggcctcgctcgacaagctcaacgagacacttgaaatgttggaaaagaaggaaaacttgctagtgaaaaaggccaatcttgaggtcgagaaggctaagaattttaccaaagccaagaataaaagagctgcaatacagtgcttgaagaggaaaagactatacgagcaacagattgagcagcttggaaatttccagcttaggatacatgatcagatgattatgctggaagcagcaaaagctacaacagagaccgtggatgcattgagaactggagcatcagcaatgaaagctatgcataaatcaacaaatattgatgatgttgataaaaccatggatgaaattaatgacaatatggagaacatgagacaaattcaggatctgttgtcagcgcctatgggagcagcagctgattttgatgaggatgaactagaagctgaacttgcggatcttgagggggaggcgttggaggcagtgctgcttgcacctaccacaacagctccgtccacagctccagtgcgtgtgcgtgtacctactgctcagcagtccactaggccatctggtcagagtagcaaagctgaagacgacgagctggcagcactacaggcagaaatggctatgtaaatataggcattggcatggtcatcttggatttcagattctgcggttatctcg

SEQ ID NO: 271774 - DNA, 475 bp, Zea mays
atccaagctcagggattcttcgaccctgtcaagcaagcacaggtcctccaagcggcaggaatacgcggacttctacggcacctccgagcccgctcccgtaggtgccgccgccaaggtccccaaggacagggctccgcccaccgccgcccaccaccgcgagaagagcggggaggtcgcctacggcgccgcccatcacgacctgaagcccgcggaagcgaagcctgccgattacagcgatccgagctacgatccgtacgtgaggagcaagtatgccgccgagagtgggtacaggtattgacgtgtcgctagctgtcctgtcctgtcctctcctgccgggggaaacagcggaatgaaaacctttcgccggcgtctgcctggcaatgttgtaagtgtgaagctatacagcctccacaagcgcaaagcgaggcgcaaacaaaaaaaaaaaaaaagggcggccgctcgccggaaacgaggg

SEQ ID NO: 271775 - DNA, 1289 bp, Zea mays
cttgtcgtgtgggcaaaacctgaagcaactcgaagcgaaccgcgatactgcgagaagcggaagcggggagggcgaggaggagcagcaatggaggcgctgctggagctcgagaagatgcagagggtgctgtccctcatgagttcacgcggcctctcccacaccgactccagctgcggcggcgctgccgctgaccgcttcctcgcccaattcctcctcttcatggtgcaaccgtttgattctcttaccctggagaataagttccttttgatctctgagctattaagaaaggctactcctaatactttggaagaagtgcagcatctcacccatctggaagtgtaggtcgtactttatgtttcatggtttggatgttaacaagccacaagccattttcaagtatctacctgttctttctttcacagagagttacatatatcagttagatgcttcaaatgaagactgtttacatgtagtcccagatgacaacacttcaaaagtgttgggaaagaaagaagaatctctcaatgagacatccttgtctcaaatgattgaaccccttgaagggcttcttcagtgccaaggattaatgacagaccgattgcgaactgaactcaaatcaggcattcagtattggtctctagagaggaagctctgccaagcattactaagaaatgagaagatctcgattgaagatgtaatgatggcaatccatctgaaatcatttgactatcgagttcttaacctgttgatgtttcaacttactggtcagcgtgtcaatgaattgcatatggacttcttgtcagtttcagaatttttggttgagatatctgatgacctgtatgattatgaggatgacgttatgaacaatacgttcaatatccttcgcatgtttgctgcaatatatggaccattagaggcaccgaatatgctggccaagtgcataggcgaggctgaagagaaatacgagagcttctccaagaaactggatcctagtctctcaggtagttactggagaagatgtgaggaagcgacgaaggaaggcggaaaaacatcaggccatgcatatggaacatggaatatccctcgtgtgataagcaacgaagatgctttccgacgtgaaagacggagcaaacacgatgcttgtgctgtgatcacttgataggtgaaatgcagaaatgacctgcaaccgttgatgtaaggtgctaggggtctgctcagtgggaactccttgaggatatagtggccttggcctaccttgggccctttgatgtcacaaatgacccattttc

SEQ ID NO: 271776 - DNA, 528 bp, Zea mays
gacaggcagggtgcatgctgctaggaggttatttgagtacttacaggccaatggcttgaacttccctgtaattcatcacataaatttccctgaaaccattgacagagatggtcttgtcattggggctggggccaacgttggtgctctcttagtcgatggtcttggtgatggtgtattccttgaggcggctgaccaggaatttgagttcctgagggacacatctttcaacttgctccaaggttgcaggatgcgcaacacaaaaactgaatatgtgtcttgtccttcctgcggccgaacactctttgaccttcaggaaatcagcgctgagattagcgaaaagacctctcatctgccacgtgtttcgatcgctatcatgggttgtattgtcaatggaccaggagcgctggctgatgccgatttcggatacgttggcggcgctcccggaaagatcgacctttatattggcacgaccgttatgcagcgcgccatcgccatggacggtgcaactgacgccttgatccagctgat

SEQ ID NO: 271777 - DNA, 527 bp, Zea mays
cgctgctgcccttgcccgccatgatgcctccaccgccgctgccccttcacctcctcttccgctccgaaaccctaatccctctactccggcaccgacccagctgcgacgcgccccattgccggaccaggaggtacatctccgttcgcgcctccgctgcacagctcgccgccgcggacgtctcgacggcgcagcagcctgcacttgaacttgggttggaggcagcggcggcgggcttcgtcaccggtaagaggaaggccaccgaggtagcccacgcgtaggttctggagaaatattgttcagaaaggggatacggtggtggatgccacatgcgggaatggcaatgacacgctcgctctgctgaagatggtggctgatgaaacaggccgtggacgtgtttatgggatggacattcaagattctgcgatagagaatacttcctcttttctgaaaatggccgtggatgatgaacatcagcggagactggtaaaactggtttctatatgtcatagtagaatggaagagattgt

SEQ ID NO: 271778 - DNA, 465 bp, Zea mays
gcagcctccactgttgctgcgccttcacctcctcttccgctctgaaacccaaattccttgactccggcgacgacccagctgcgacgcgccccattgccggaccaggagggttggaggcggcggcagtgggcttcgtcaccggtaagaggaaggccaccgaggtagcccaagcgttctggagaaatattgttcagaaaggggatacggtggtcgatgccacatgcggccatgcgggaatgacaatgacacgctcgctctgcttaagatggtggctgacaaaacaggccgtggatgtgtttatgggatggacattcaagaatctgcgatagagaatacttcctcttttctgaaaatggccgtggatgatgaacatcatgtgtgggtttgaactatgaagcttttacctaatttcccctgagagaatgaaatagaaaggagacaacttatgaattctgaattgacatt

SEQ ID NO: 271779 - DNA, 458 bp, Zea mays
cgccacgatgccgccgcccctgcagcctccactgttgctgcgccttcacctcctcttccgctctgaaacccaaattcctttactccggcgacgacccagctgcgacgcgccccattgccggaccaggagggttggaggcggcggcagtgggcttcgtcaccggttctggagaaatattgttcagaaaggggatacggtggtcgatgccacatgcggccatgcgggaatggcaatgacacgctcgctctgctgaagatggtggctgatgaaacaggccgtggacgtgtttatgggatggacattcaagattctgcgatagagaatacttcctcttttctgaaaatggccgtggatgatgaacgtcaggtcgtgcgtttgcactatgaggtttttacctaatttcccataaagaatgcaataaaaaatgaataaaatagaaactaggcattctgattgga

SEQ ID NO: 271780 - DNA, 399 bp, Zea mays
gacaaccgcaaccgcagcagctagaccgacacgcactctactctcgcacacagccggcgggcgggcacagtgacgcggccacgcgggcgccggagctagggtttccctgatccggcagggccggggagccgccggaaaccgttgctcgatttcggcgccggaggcgcggcatcggtgtctccgaggacggcgggcgcgaggcgggctggggagctgaggcgcggcgccgagggctcagatctggtatgaccgacggcggcgaagacgggaatgctgcggcgcccagggccctctcgcgccggaggggacctgtgcgggccagcctcgatgccgacgagttcatggcgctgatgcacggctcggatcccgtcagggtcgagctcacccggctggagaacg

SEQ ID NO: 271781 - DNA, 609 bp, Zea mays
aattcccgggtccgacccacgccgtccgcatgacttccgacgaccaactcccctgcgcctgttctggcgtcatctcgtgtaacaccagcttcgtgcacgcgtccctcacatcaggctacatgtccggcgcgccctacacgttcgcgcgcccgcatacggattcgggtgggtcaggggcactagtctgaggttagcggcgggacaagcgtcggtctcataggcggatgcttgtgcggactcggcgcgtcataccagatgtgctggactttgctcggaactcaacgtttgccttcacgacgaccatcatctccaagggcctttcatgggaggaatggccgtgcgtttctgttctctcatgccatgaacgtagttgtgggggcgaaggaggatagacacctcatgacagggctacacacagttgctgatatctactgtaatgactgccgtgaggtgttaggctggaagtatgtgagagcatacgaagagacgcagaaatacaaggaaggaaaattcatattcgagaagtcaaagattgtgaaggaaaactggtagtgcccccaagttgccagtcaccaaatgatctggtgaagatgaaatggccatttagtg

SEQ ID NO: 271782 - DNA, 356 bp, Zea mays
cgccaaccgcctgccctgccgcccgccctcgcgtccccgcttctccacctccctcacatcggctactctccgcgcgcctaccgttccgcgccgcatcggattgggtggtcggggcctagtcgaggttgcgcgggacagcgtcagtccatggcggagcttgtgggaccgcgcgtctacagttgctgcacttgccggaaccacgtttgccttcacgacgacatcatctccaaggcctttcaggggaggaatggccgtgcgtttctgttctctcatgccatgaacgtagttgtgggggcgaaggaggatagacacctcatgacaggctacaccattgctgatactacgtaatgctgcgt

SEQ ID NO: 271783 - DNA, 438 bp, Zea mays
cgaggccaatgttgtgttctcgtcacttatgggcacccgggttgaatataggaaggaactgatccagaaagctgctagcatgatcaacatagatcaacttgacatttgaaggcattaagtaaggctgtcctttctgtgtatgatatagaaggtccgccacctgctgcttttcttgccactccaacaggattctagcgttgcagacttgatgataccttggcaacatctttttggtgctagagtagcagaaaacgtagggtacaaacattggatccaggatgagagctgggtttcctaacgaaaactctgattcatttgtggcggtgctataaccatttcagcttgacagttcaaagctcacgggtgtagttccctgctgtcggcgcgccgctgacatcgttcctccgattcgatgtaacccgcttttatttatctcct

SEQ ID NO: 271784 - DNA, 319 bp, Zea mays
ctgtcctttctgtgtatgatatagaaggtccgccacctgctgcttttcttgccactccaacaggattctagcgttgcagacttgattataccttggcaacatctttttggtgctagagtaccagaaaacgtagggtacaaacattgggagccaggatgagagctgggtttcctaacgaaaactctgattcatttgtggcggtgctataaccatttcagcttgcagttcagagctcacgggtgtagttccctgctgacatcgttcctccgagacggtgtaatatgcttttatatctatcgcctaatattcgcttcaaaaa

SEQ ID NO: 271785 - DNA, 598 bp, Zea mays
gtttcggaaacagcatcctaatgttgttgcctatagttactgggggtacaggcataatgcccggaagacaaacaaaggttggcgcctggattactttcttgtgtccgaatcaatcacagaaaaagtgcatgattcatatattcttccggacatctctgccagtgatcacagtccccttggtctcgtgctgaagctgtaggctgtatcacacaggctatgccaaacattcagtctgaagcctgtgccatatttctcagacagcgatgtttattcctgatggtttctggttcgtgcagatccctggcaggaacaacgacttttgtcagactattagtgaaacaaggctttgtaacgcactgagcagatttgactattagtggacaacttactgttagcaaagctgcacctttgtagtgtaaatatgcggccatatcttgtgctgcacttgtgcagctcaatatgagcagcgggggaagctcattacctggttatggaattatgaaactgaccttaacctattgaggtctttaaactatctgatcatgtgctgtgccgctgatggcgtcaaaaaataactgtgccatgcaatttcccgcat

SEQ ID NO: 271786 - DNA, 436 bp, Zea mays
gcgacgcgtccggcttagcgctccaacactcagtctggtgtaccactctcacccaactgctcacctcaccgtggccgagacgcttggagcaattgcatccccgcttggtcagaacagtgccacgctgccgcagaacagagtcgtggacagctccactgctggctttccaatccatgttgatctcgaatgatcttgtgcgagcactgaaggtatggtaggtcgtcgacgtcgtggccagcgagggcgggtgcttggctcgagcatgaaaacattggagcttgttaacatggacgtgttttgacggtgattatgatgcgcctgaggtcagcgccgctgtggctgcgtgggccggctgagtgagttcgggcctgatattgctctaagctgtgccacttctattagctgagagattttgaatggcgccacactttgtaga

SEQ ID NO: 271787 - DNA, 1059 bp, Zea mays
cctgtttatcttttgtgaagtcaaatgagttatcagctgttcatgtgacaaaaaaaaaaaaaaaaaaaaaaaaaaaaagggcggccgctcggacgcgtgggtccctttctccctcgagaaggccgtctccagttcatcaccctcgtcctattccttcgtacacaggccatcatcagacgagagggagaaccagcgaggactgccaagaagatgctgaagagactgctgacgaagactaagagcaagaagaagaaggaggctgcctcctctgccataccgacgttggatcggctccatgagactctagagatgctggagaagaaggagcgtttcctccagaagaaatgttccgcggaaatcgagaaggcgaaggattacacaaaagcgaagaacaagaacgccgcaatccagtgcctaaagaagaagaaactgtacgagacacagatcgagcagctatcgaatttccagctgcgagtccatgaccagatcataatgctcgaaagcgccaaggcgaccacggacactgtcgacgctctgcgctcggggtcatctgctgtcaaggcgatgcagcaatcagtcaacgtggacgacatcgagaaggcgatcgaggaggcgaacgagcagacggagagcatgcgggagatgcagcaggcacttgcgacgccgattggcgcttccgctgacttcgacgaggacgagctagaagcggagctggaagagctggaggaggaggaggaggaggagggggagatcgaggacgagctgcctgagccgccggcgaggcggtccgtggaaccatcggcgaaagcggcggcggcgtcttctagacagggctgtgatgtgagcgagctgaccaggcttcaggcagagatggccctctagctgtctagcagtgatgtgatgtgagcgagctcggcgttgcgcctgtattgtacacgtgttttgctgtaaattcatcttgttctagaagacaagacacggcatagatgagagaatctggatggctgtctcgcgtcggtatccggcggacgatgccagccggcagaagcagtttgactt

SEQ ID NO: 271788 - DNA, 444 bp, Zea mays
cggcgatccgctgcgcgctgccagtcccagtcccaggcacgctggtgctgcttcggactcggcggagaggtgaggctgctcgtccggggcggccatgcttgatcccttccgggaccggagttcactggtgcctgtcgatttctcaagcttgtttctttcggggtaagcgagaggcataggccatcatcagacgagagggagaaccagcgaggactgccaagaagatgctgaagagactgctgacgaagactaagagcaagaagaagaaggaggctgcctcctctgccataccgacgttggatcggctccatgagactctagagatgctggagaagaaggagcgtttcctaccagaagaaatgttccgcggaaatagagaaggcgaaggattacacaaaagcgaagaacaagaacgccgcaatccagtgcctaaagaagaagaaa

SEQ ID NO: 271789 - DNA, 589 bp, Zea mays
gcggctgccgccagcgtgccgctgctggcgtggccccgcggcggcgaccaccgcgtgaacgccaaggtagcggtgagcggtggggttggggtgtggatggagcactggagctgggacggggaggactggttggtgaccggggaggagatcgcgaagaaagtaaatgaggtcatgtccgacgaagcggtcagggcaaggacgacgaggaccgccgaggaagcggccaaggcagttgcagagggtggcaccagctaccggagcatggaggagtttatttccagcgtcaaagcaaccgtggcgtcttgattgcgtcgtggggctcctgatttccacaagtttgtgtcccctactcccctaccctaccttccactgatggggagtccggagttgtgacgtcgttgtcgtgtggctggttgcagtgtcaaccaaaacagttctcacacacgtgagttgttgggaggtaggtagcatgtactatcacgtacctaccccatcaagaatagtgcgtcatctgtcatcttgtgatgtcatcttgtaatgaaataaaaacagttgcattttaaatatttgtctaccattagtttatttt

SEQ ID NO: 271790 - DNA, 1081 bp, Zea mays
gtcgtttccgcccctccagtctcgaagagaggtgcatgtgtggtatcttttgcctgatgagttgaaggatgcctcccaactcaagatgtacacggagctcctttccccttctgaaaggaagactgctttgtctatgaacggggaaaagttgcagaaaggtgccgtgctgtcccgtgcactgctgcgcaccaccctctcgagatatacagattgcaaagttgatccaagatcatttgagtttaagaaaaacaagtttggcaaacctgaggtactgtggcgatctgatgacagcaggatggaatggcctttacatttcaatatttcacacacatcatctttgattgtctgtggcataaccatggatactcctattggcattgacgttgaagagaagacacgaaagacagccaagaatattttatctcttgctcgccgttatttcaccccatctgaaattgattatctagctaaaattccagatcctgatgctcagcaaaaggagttcgtaaaactatggactcttaaagaagcatatgtaaaagctcttggaagggggttttcaggcgcccctttcaacaaattctcgattatattggcagcaaatggcagaatccaaatttctgtggcaccaaaagtatcgaacggttctgactctatccatgactgtctgtccgagaattggcagtttgcacttgctgaactaaacagttctcattacatggcaatctgtatagaggatgactcaacaagttcagattctggaaacggtagactgccactaggattgaaagtatggaagaccactccgttcgtggaagatatacttgtttctggaacggaagctgtaaaacttgtcagttgagtatgtgagaggatcaagtgatttcttcagatgacaatgtgatgcaacgaatgtatttggacgaagtatgcgctgtgcagggagactgaacggttttcttcgagcatactgcatgcattgatgaactgaccactgacactgtgtgctttagttaagatttggaaatgcaacgacatacactttggagtcctgatattcgtattagcatatcacgacact

SEQ ID NO: 271791 - DNA, 685 bp, Zea mays
cgatacgggagggcccatccagcggcccatgtcacgctctcacgccacgcacgcatgctcccccgcctgctcaacgggccccaccgcctgctccttggcgggccccacgcctcgggcgccgcgcccctccaccgccgccgcgtcctcgccggccgccgggccatgtccgcctccgcctcgcccgcgtccgggccgaggcgtccgctgcgcggggtggtcttcgacatggacggcaccctcacggtgccagtcatcgatttcccggccatgtaccgcgaggtgctcggcggggacgccgcctacgccgcggcgcgcggctcggggggaggctccgtcgacatcctccactgcatcgaggactgggcgcccgacaagcagcgccacgcgtacgaggtcatggcgcgcttcgagcgggagggcctcgaccgcctccagatcatgcccggggcctcggagctgtgtggcttcctggacgcgaagcagatcagaagaggtttgatcacccgtaatgtgaaggacgcagttgatttgttccaccaaagatttggtatgacgttcactcctgcactgagcagagaatttcgcccctataaaccaaatcctgctccactgcttcacatatgctccgctcggaacattccaccacacgaagtgatcatggttggcgacagtctcaaggatgatg

SEQ ID NO: 271792 - DNA, 1114 bp, Zea mays
cggacgcgtgggcggctgcaggccatggaggcgtcgacggcgcggcattggctgaaaacatcaaagcgggcagggcggcggccgagcctgaactgcgctcgcctggcgacgcagctgggccgggtcacgccgtgccgtgcacagatagaatggtacaaggcgctgttcgacgcagagatggggtactacgacgcgttcaagcagcggcggtcgcccaggaagtacaccaaggtgaacttaaaccgcatcaagctgggccagttctgggaccgagtgctgagcatgctcgacgccggccagctcccccacgatttccaccgccgcgccaagtgggtcaacgcctcccgcttctaccagctcctcgtcgagcctcttgacattgccgactaccaccgccacggccaccacctgacgagcgggagctacatgactcacggccgggagaggaggtacgagctgttcgacaggtggtggcaggagaagggatgcactggcgctggcggcggcatcacgtcctccatgtcggcagcgtcggcgagcagccggagacgcagcaaatacgccgggctaacgcaggacccgtgcttctgggcgagagtggaggaggcgagggagcagacggagagcgctcgccgcgagcgcgacgtggcggagctggcgatgaagctggaggagctgcaagagttcgagcgctactcccgtgagctggtggcgaacaaggaggtgtctgttgacgtgctcgcgccgcagtcgagctacacgctctgggtggaggagtggaaccagctcaagctcagggatgaggtgaggacactgttgctccagttttgagctgagttgcaaacagctgatgaatttgtagatagctggtgggcattctccaaatggttcagaagtacatgaatcatttgatcattgtccatggatgctactatatagctgattgtaaatatatctaaacctagaaacattgcagtggattacaatatatttattctttcatgggtaccttgatggcccgatactgattcgaaaaagctttcgagcaaggaggcttgaaaacagctgaagttcagatatggatggatggatgctagtaagctccaagggcaga

SEQ ID NO: 271793 - DNA, 1104 bp, Zea mays
ctgaactgacaattagttgtgtctttttttttctgaccgaaagagcatatatatagctagctcgcagaaacacaccttcaagtatactacagcactagagtactgcatcgattgatctcatcactcatcatcggtgtttgatttgatttcgcttcttcacggatcggatagatgtttgcattgcatggcgaagcatgtgttcgtggtgggtcacgactggggcgccatcatcgcgtggtacctctgcctgttccggccggaccgggtggcggcgcttgtcaacaccagcgtcgccttcatgcgccacatcttcgtccgcgccgccgccgccgccgtcacgcccatcgactacttccaccgcacctacgggcccacctactacatctgccgcttccaggagcctggtgtcgcagagaaggagttctcgccggccaacgccgggtacctgatgaagcggatcctgtgcaaccgcttcacctcctcggcggccggcgacgacaagccgccgccggcggacgccgccgaggaggagccgctgccgccgtggctgacggaggaggacgtgggccacttcgcgtcggagttcgagcggacgggcttcacggggcccatcaactactaccgcaacatggaccgcaactgggagctggcggcgccgtgggcggacgccaaggtgcgggtgcccaccaggttcatcgtcggcgacggcgacctcacctaccactacccgggcatccaggactacatccacaagggcgggttcgaggccgacgtcccggggctcgagagcgtcgtcgtcatccccggcgccggccacttcgtccagcaggagaaggccgacgaggtcagccagcacatctacgacttcatctccaagttctgatacatgtgcatggatcgaccatcagcttgcttgcttacctgctaaagcctgtaatctcaacctcgatatccgtgctgccaacttgttttgtttttcgaactaagagtaataagtgttcgcatatatgtctggtttaatttgtgacttggacatggtatgttcgatgtgaaatggataaaccatgcgtttcgtaatttaaatgtacaatgcttgtaccggtg

SEQ ID NO: 271794 - DNA, 1427 bp, Zea mays
gggcaaacaagttgggtttgataacacatttgaattccaaggacataaaattattgtttggcttgaccccctggccttgggtttattatttcgtacaaatacatacatatgcatacggggggaatatttgtatcatttgacaagcccaaggctgaggatcccgaatggggtatgcggccaatccttgtcgggggccttggtcagcatcgccctgccccaggacacccagccctcccatggcatcctcttgtcccagctgctgccccactccagcaacagcctcagaccttcctctgcctgcatctgcgcctcgccgtacctctccatgttaaggtacacctgggcaagcaccaggtgtggttcccccacaaacgggttcttggcaatgctctgctggaggagctgctccaccttgagccagtccgacgcctcctcgccgcataccgcctcccagtagaggtctcgtgccaccttctggtcctcggcgttgagcaatcgggtgcagccgttgaacaccggggggatcaccaggtccatgtcctcgtcccggccatgtgtatctcgcgctcgctgcgtgatgtgtatctcctcctcgcggacgatgagggtgtagagcgcggccatgcgggagctagaggtgacccagaggccaggcttgccggtgccgggccagagggaggtccaggtgttgccgctgaactcgaggcggccgttgctgttgtcgaagaggcggtcctgccagtcgaacagctggtcgctgaagtcggctatggtcatcaggaggaacgtcgctgcgatgcgcctggacagtgacacatcctcccctgtcctgatgtgcttgcccgtgatgccgtccgccgggaggaggcgctggatcttgcgccgccacggctgggcgtcgtcgaacacgccgcgccgggcgtcccggaccgactcctcggagctggctaggtcgtcggcgaggtcctggtcggagtagtggaagagcaggtcgtcgtggacgagctgctgcctggggacgacgcagaagaggtggacaaggcgctccgcgggtccgccgaccacggcagcgacgtgggcgcgcccggtgtcaggctggaagatggccaggttgacgtaggagttggagtaggcggagtggtagaggccgcagcgcgccacggcgtcgggcgcgccccacaggcggaggatccggtgcacgtccagcaggtgcgccaggaacgtgccgtgcttgtgccagcactcgccggcgcccgcgccgcgcagcacggcggcgaggccaggcagcgccgggtccacctccgcctcctccccgcgcaggaaagggcgcgccgccgccagggcccgcgacagcgccgcccccgtggctgctgcaggcgcggcgacgggataccttggttgcgtgcggtggcatggtggctgccgac

SEQ ID NO: 271795 - DNA, 501 bp, Zea mays
gctttcctccccgactccccgtcgcgctttctcctagtgaggctactgggtgaccgccgccgctgccgccctacgccaggttctcaggtcattgtcagtccccttacttcgccggctcattcggcggcgacgagcaccagaaatcctagctgctttgagtatggaggcgctgtttgggtgcaacaaacatggcggggacaaggccgctgatttggcctcgtttataatcgtgcaggctgccttggaggtgccaaggttacttgggctccttgccatgattcttcataatgaaatctttacatctggtggagatcagaatttgattaataggattctgagcaaaaacaaaaatgcaactgatttcgagaacaaggatgatggagagtctgatgatgataatgatgaggagggagacgatgaggatgctgaaaaccaggaagatgatggtggtgatgagggatcagatgacaatgtgaatgaggagaagatgacgacgacgat

SEQ ID NO: 271796 - DNA, 287 bp, Zea mays
catcctgcaggtgcccatctgcaagtcgtacgtcgcgccgctggctctgtcggcgtggatgtggcgtcctgtccacgctccagtccgcgctgctcgtctccttcctcctgccggaccccagcgcctgcaggatccactcgctcttcgagctctcctgctgcgtcttctcgggcgtgttcgggtccggcgtcacgttctacctgcagtcgtggtgcatctccgtcaggggcccgctctactccgccatgttcaaacccgctctgcaccgtgatcaccacccgtgttcg

SEQ ID NO: 271797 - DNA, 418 bp, Zea mays
aacagattggaagcggtgacaggtctgagcgaatcagaacatacaacttccgcacagggccgtgtcaccgaccatcgcgttggagtcacacaccactccatagcagacgtcatggagggggagagcctggacatgttcgttgatgcgctcctgcttcaagaagagatggacgccattgcttcatttggcgcatagctagattaaaccttgcaacattgattcacgtcatggacaaaatagagatcagcgaaaaacaataccgagcagtccactagtgaattgcctgtgcattgtgtcctgttttggcgtgtgctaagtttacataatgctgaaattttaaagtaagcatgtgttataatttggtgccgataaacgtgttgcttcattcaattctttttcaaaactacagttttttgct

SEQ ID NO: 271798 - DNA, 253 bp, Zea mays
aattccctccaggtttttttttggtggggaggaatcaggtgtctgatgttctcgtctcggcaacgaaaaagaaagaaaaacggttcctagtgaaatactaggctattctgtatgccctagtataaaagtgtgcctctagtagaactgtagaagatgtagttatcagtatctcttttgtattattggcccatgtttacttctcaatcgaatatttatgcgagggatgtttgtcaacgccttaggcttcatcttg

SEQ ID NO: 271799 - DNA, 443 bp, Zea mays
gatcattgttcgcatcattgcttgctaatttgaccaattctcaacaattcattcatttgacaagccaaatgatgagactgcactaaggctgatgaatgaatctgcatctttgatgatggagcaataccctgacattgtctttggctatggttttagcaatgagtatagttttgtgttccatgagaagagtgaactataccagagacgggaaagcctaatcctttcatcatgttcttcatatttcacttctctttacatgacgaaatggaaagagttcttcccctacacagaattaatgcagacaccacactttgaggcagatgctctatgttatccagaactaaagatcatatgtgaatacttatcatggaggcaagcagagtgtcatgctggcaaccaatacaacacatgcttttggatgctagtgaaatctggaaaaagcg

SEQ ID NO: 271800 - DNA, 952 bp, Zea mays
gtctccctccccttccttcgctcgccatggccatggcgacctccaccttctccccgcgtcgggcaagcctcaggcccctgcgggcgggcggcaagcccgtcggactcctccccttcccgcgccgcctcgcctgcgccaccgccgccggggaggcgccgcccgtggagcagcgggacgaggcagagccggcccccgccgcggcctccaacggggccgccgtcaagtccgaggccccgccgccgcccgcgccagcgccggtcccggccttccgggacgccaggtgggtcaacggcacctgggacctcgccaagttcgacaagggcagcggcgtcgactgggacgccgtcatcgacgccgaggccaggagaaggaaatggctcgaagactacccggaggcgacgagcacagacgatgccgtcgtcttcgacacctccattatcccgtggtgggcatggatgaagcggttccaccttcctgaagccgagaagctaaacggtcgcgccgccatggttggcttcttcatggcctacttcgtgcacagcttgacgggcgtgggcctcgtcgaccagatgggcaacttcttctgcaagacgctgctgttcgtcgccgtcgccggcgtgctgctggtcaggaagaacgaggacgtggagtcgctcaagaagctcatcgacgagactacgttctacgacaggcagtggcaggctacctggcaagatgaccccaccgaggggccaaagaattagttcggcgttgggggtgcaaacgcagaatgctcgcttcttgtggtgtgtctttgcctctttcttcggcccctttttgtttcaccgtttagtcaggcttggaggaactttttgatgatcgtcataatctatctacgtgatcttgtgcaaaaacaaaaggtatgggagtactttctgtgctagagataataatcatgttgcagtttcactgg

SEQ ID NO: 271801 - DNA, 894 bp, Zea mays
aaaaaaccggaatggaacctggaggggattcctatagcagtggctccagttctggctagctaccttatcctatacccatcaccctaacaacccggctgactgctgcatctgaccccaccgtcccctggtccaaaccaactctcctttccttacatgcactacacccacttcctgcagctatatataccaccatatgcccatcttatgaaaccatcccccagaggggcagaaacaatcaaccagcaacactcttctcgtataacataatacagcgaaggtaactcacatggcaacttccatgggttgtctcgtcttgctctgccttgtttcttctctccttcccagtgccgtccttggccacccatggggtggcttgttcccacagttctatgaccattcgtgccccaaggcgaaggagattgtgcagtccattgtggcacaggctgtggccaaggagaccaggatggcggcatctttggtcagactgcatttccatgactgctttgtcaagggctgcgatgcttcggtgctgttggacaacacagcacatattagtgagttcaattctgcttcctctgttatgttctttatattacatgctctgacaaactataaagcttgatactggttgtgtcagcctcatatatgtcggtattgtttcagattcttgaacactgatatgagggaaatcataggacagcttctgctttcatgtatttaaagaaaacgcatttgcaaaacccgctggtctattggctctcttttactcatgtcctacagttcaacatttacaccagaggcctagaagacaaaggatatcagctgagggttataaagtggttgaatctaacaagatgcatcctcaacctccaggcctttcacggaagagatagg

SEQ ID NO: 271802 - DNA, 1243 bp, Zea mays
gaaacaatcaaccagcaacactcttctcgtataacataatacagcgaaggtaactcacatggcaacttccatgggttgtctcgtcttgctctgccttgtttcttctctccttcccagtgccgtccttggccacccatggggtggcttgttcccacagttctatgaccattcgtgccccaaggcgaaggagattgtgcagtccattgtggcacaggctgtggccaaggagaccaggatggcggcatctttagtcagactgcatttccatgactgctttgtcaagggctgcgatgcttcggtgctgttggacaacagcagcagcatagttagtgagaaagggtccaacccgaacaggaactccctcagggggtttgaggtgatcgaccagattaaggctgctcttgaggctgcctgcccaggcacagtctcctgtgccgacattgttgcccttgcggctcgtgattccaccgccctggttggtggaccatactgggacgtgccacttggccggagagactcgctcggtgcaagcatccagggctccaacaatgacatcccagcccccaacaacacactccccactatcatcaccaagttcaagcgccagggcctcaatgttgttgatgttgtcgccctctcaggtggtcacaccattggtatgtctcggtgcactagtttccggcagaggctatacaaccagacaggcaatggcatggctgacagcacactggatgtatcctacgccgcaaagctgaggcagggatgcccccgctctggtggtgacaacaacctcttccccttggacttcatcacccctgccaagtttgacaatttttactacaagaacctcctggccggcaagggccttctaagctctgatgagattctgttaaccaagagcgctgagacagcggccctcgtgaaggcatatgctgctgatgtcaatctcttcttccagcactttgcacagtctatggtgactatgggttacatctcgccactgacagggtcacaaggtgagatcaggaagaactgcaggaggctcaacaatgaccactgagggcactgaagtcgcttgatgtgctgaattgttcgtgatgttggtggcgtattttgtttaaataagtaagcatggctgtgattttatcatattatcgatctttggggttttatttaacacattgtaacatgtgtatctattaataactcaatgtataagatgtgttcattcttcggttgccat

SEQ ID NO: 271803 - DNA, 435 bp, Zea mays
  unsure (1)..(435): unsure at all n locations
accacgcgtccgcgacgctgggcacgagaagaagaagaaacaagccataccatagcacacaccaaaggttactcagtcacatggcaacatccagcacgggctgtctcgtcttgctctgccttgcgtctcccctcctcctccttcccagtgcggtggtccttggccacccatggggtgtcggcggcggcggcttgtccccacagttctacgaccactcgtgtcccatggcggagaagattgtgcagtccgttgtggcgcaggctgtggccaaggagaccaggatggcggcgtccttggtcaggctgcatttccatgactgctttgtcaagggctgcgacgcttcggtgctgctggacaacagcagcagcatcgttagtgagaaagggtccaacccgaacaggaactccatcanggggttcgaggtggtagaccaga

SEQ ID NO: 271804 - DNA, 335 bp, Zea mays
ttggtatgttccactatcgacaatcctttccaacctcaaggaacagacatgatatttgtatatatatatagtgatagctttggcaaacttagatattttttgaactctaaaccgtaggttggtggaccatactgggacgtgccacttggccggagagactcgctcggtgcaagcatccagggctccaacaatgacatcccagcccccaacaacacactccccactatcatcaccaagttcaagcgccagggcctcaatgttgttgatgttgtcgccctctcaggtgatttttcttgtatttattagtaacatctgtccttcggtattcaccaact

SEQ ID NO: 271805 - DNA, 733 bp, Zea mays
cggctcgagcggctcgaggtggacgacaagaagccgatggagtcaagcttcaccgacacgttcgccccgacctgtggcgtccaggccacaaccctctccaagatcaccggaaggctggtggcttgccagtcccagtacttggctccagctgaggcctttggcgtcttgttggtgaacgacgcgaagggcctccagatactgcgcagcaagaaccacacggaggtcggggcggctgtgagcggcaccgatggcggtggaccgtacttctggtgcgtcctgttcagtgacggcaagccgactaccagcttcaaggtggatggcgaagtgccgaaggcagccatccacccgggatgcttcagtggcaacaatgacgactgctcgggccccacaaatggcgccgttttgaccagtgctggtgcgctgaggctggtgacggccattctttttgctgtagctgctttgtgagcgtgtaagtaggtgtaatgttttctgccattattttgctttgtcaccatctcctgtctgtctgcagtggcacgctatatattctttgagcatatgaactatgtatgcaaggatttgtaggtcgttgttcagcattttgagactatctgttacctgttcggaatgttcatcatagtagttttgtgcgctcaaaaaaaaaaattaaaaaaaaaaaaaaaacaaaaaaaaaaaaaaaaaaaaaagtaaaaaaaaaaaaaccacgcgtccg

SEQ ID NO: 271806 - DNA, 244 bp, Zea mays
gagatccacaacctggagatgcggcagctgcacaagaccacatcggtggaccagaatcaactcggcatgcagcagcagaaccaccactcgtcggacggcagcgggaggccttcctccgaccttgaactccagggggccaagcaggcatgacagaaacctactctgggcaccacccacatcagacacagcttccaatgcccacgacatggaggacaggtgagcttggacagggctcccccggcac

SEQ ID NO: 271807 - DNA, 1919 bp, Zea mays
tcgttccaaccaacacgggacttgcgttgggggggtgggaacaggagacgcactgcatccttcacctgctgggaccagctattggatcccaggagctccaggagagaaagatcatgaataatatccgacaataccagctgccttggcagcgctacatggcactcatggatctccaggacgggaacgagaggcttttctacaagttgctcattgacaacgtcgaggagttacttccaatcgtgtacactccaaccgttggcgaggcctgccaaaagtatggatccatatttagtcgccctcagggtctttatatcagtttgaaggagaagggaaagatccttgaggtgttgaagaactggccagagaggagcattcaggttatagttgttactgatggtgaacgtattttggggcttggagatctcggatgccaggggatggggattcctgttggtaaactttccctttacactgccctgggaggagttcgtccatctgcttgcttgccgatcacattggatgttggtacaaataacgaggagctgcttaatgacgaattttacattggcttgagacaaagaagagccactggccaggagtacactgattttctgcaagaatttatgagtgctgtgaaacaaaactatggggagaaagtgcttattcagtttgaggattttgccaaccataatgcttttgatcttcttgcaagatatggcaccactcaccttgtattcaatgatgatattcagggaacagcttctgtggttcttgctgggcttattgcagcacaaacattacttggtggttcattggcagatcacacttaccttttccttggtgctggagaggctgggacaggtatcgctgaacttatagctcttgagatctcacgtcagacgaaagctcctatagaggagtgccgcaagaaaatctggcttgttgattcaaagggcttgattgtcagtacacgaaaggagtcccttcaacacttcaagaaaccatgggctcatgagcataaaccactcagcaacctcttagatgctgttaatgctatcaaaccaacagtgttgattggcacatccgggaaggggcaaactttcacaaaagacgttgttgaagcaatctcctcatttaacgagagaccaatcattcttgccctatcgaacccaacatcacaatctgaatgcacagctgagcaagcttacacatggagcaagggacaagcagtgtttgcgactgggagtccatttgatcctgtggagtacaatggcaagatacatgttcccggacaggcaaacaatgcctatatcttcccagggtttggcctcggcgtggtgatgtctggagctatccgcgttcatgacgacatgcttctggcagcatcggaggctctggcccagcaggtcacagaagaaaattttgagaaggggctgatttatcctcccttctcaaacatcaggaagatctctgcccacattgcagccagcgttgcagcaaaggcatatgaacttggtttggcaagtaggcgccctcggccaaaggacctggtgaaatatgcagagagctgcatgtacagccccatctaccgcaactaccgttgaattcggatcaactccagttatgtgcaaatcagcagcagccttgcgtcaactgcaagatttcctaagaatataactcgtttcagtctttcatactgtaataccctaagccctctagcaatagctgtttcacgtccttttctgcccctacatattccgcagcgtttatctcttgcgatgtcatgtaaatcagctccggttaggcttttggatgctagtcagtcatggtgctgctgccgtccttccggttccggacaaggataaatttggaataaagtttgagtcgacgattcctaatcaaaaaaaaaaaaaaataaa

SEQ ID NO: 271808 - DNA, 546 bp, Zea mays
tcgtttaaataacatcaccatctcgcgttgctcccgcactaaccacgccatcacttctgttaactacattcgcagcggcagcgggagggaggaccagcggcagcgtcgacctggtggtggtgcgcttcgggttcggcgaagggcgacatggagagcacgctcaaggggatacgcggcagcgatgcgccgtgcgttctggacctggacgacgcggccaccgtggcgggcggcgtcgaggacacctacggcgaggatcgcgccaccgaggagcagctcgtcacgccctggaccgtctccgtcgccagcggttacaatctgcttagggatccccgttacaacaagggacttgcgttcacagagagggaacgtgagacgcactacctccgtggccttctgccaccagctattgtatcccaggagctccaggagagaaagatcatgaataatattcgacaataccagttgcctttgcagcgctacatggcactcatggatcttcaggaagggaaccagaggcttttcttacagttgctcattgacaacgtc

SEQ ID NO: 271809 - DNA, 786 bp, Zea mays
tcggcaatctcctcatttaacgagagaccaatgattcttgccctatcgaacccaacatcacaatctgaatgcacagctgagcaagcttacacatggagcaaggtaatggtttcaatccgcagtcacgtcaactttttattaaccatggttctgcaactgcactaacgatctgaattcacagggacaagcagtgtttgcgactgggagtccatttgatcctgtggagtacaatggcaagatacatgttcccggacaggcaaacaatgcctatatcttcccagggtttggcctcggcgtggtgatgtctggagctatccgcgttcatgacgacatgcttctggcagcatcggaggctctggcccagcaggtcacagaagaaaattttgagaaggggctgatttatcctcccttctcaaacatcaggaagatctctgcccacattgcagccagcgttgcagcaaaggcatatgaacttggtttggcaagtaggcgccctcggccaaaggacctggtgaaatatgcagagagttgcatgtacagccccatctaccgcaactaccgttgaattcggatcaactccagttatgtgcaaatcagcagcagctattccgcagcgtttatctcttgcgatgtcatgtaaatcagctccggttagccttttggatgctagtcagtcatggtgctggtgccgtccttccggacaaggataaatttggaataaagtttgagtcgacgattcctccctaaaaaaaaaaaaaaaaagggcggccgctcgcgatctaggaa

SEQ ID NO: 271810 - DNA, 456 bp, Zea mays
  unsure (1)..(456): unsure at all n locations
gaccacgcgtccgctgggtctagctacttcctctctcaagcccataggtgttgtagagcaactcaactagcaatggcttccaagagcacaatgcgttcccttgtcctcatcatggggctcctgctgctctcgtgcagcggcatcagcagcgcggcgcggctgctggaggaggtggcgcccaaggaggagtacccgcaccctgaagtgccagagctgcccaagcctgagctcccgccgcaccctacggtgccggaactccctaagcctgatgagctaccgccacatccggtcgtgccggagctgccaaagcccgaggtgccagtgcaccccgccgtgccggagctgccgaagcccgagcttnctcctcaccccaccgtgcctgagctgccgaaagcccgaggtgcccgcgcaacccgcctgcccgaactgccaaaccccaactttcttcttaaccca

SEQ ID NO: 271811 - DNA, 596 bp, Zea mays
ttcttttgcccataggtgttgtagaacaactcaactagcaatatggcttccaagagcacattgcgttcccttgtcctcatcatggggctcctgctgctctcgtgcagcggcatgagcagcgcggcgcggctgctggaggaggtggcgcctaaggaggagtacccgcaccctgaagtgccagagctgcccaagcctgagctcccgccgcaccctacggtgccggaactccctaagcctgtcgtgccggagctgccaaagcccgaggtgccagtgcaccccgccgtgccggagttgccgaagcccgagataccgccacattcgaccgtgcctgagctgccgaagcccgaggtgccggagctgccaaagcctgaggtgcctgaccaccccgccgtgccggacctgccgaagcccgagcttcctcctcacccaaccgggcctgacctaccaaagcccgaggtgccggagctgccaaagcctgaggtgcctgagcaccccgccgtgccggagctgccccacccggacgtgccagagcaccctgcttccgtgccggagctgccgaagcccgaggtgccttgagcaccccaaccgtgccggag

SEQ ID NO: 271812 - DNA, 912 bp, Zea mays
  unsure (1)..(912): unsure at all n locations
acatggtgctgcatgcgnaggatgtaaggncggtgcagcatccggagcacggctggggtgcggcacatgtggatctcgggcgtgggtgcgaggatggaacaacggcgcggacgacgggtaaagattgggcgcagaagaggtgggcgggggcacacatctatgcacacaggtgggcgcaggcagaagcttgcgtgcggacaggcgatgtcgtatgtgggtgcagccgtggaccatcaaggcggcgatgaaagcgcgccgagatcctgggaggggagctgagcggagggggaggagggcgttgatggcggcctcgcagcggatcacgagatctgggaggggagcagagggggaggagggcgttgatggcgggtgcggcatcggatcacggcagcggatcacgggatctgggaggggagcggaggggcaggagggcgtgtgcgacagcggaccacggcggcgacgaaagcgcgagcgagagcggggcggagggggaggaccgctccaagatggtgctgctcgaggaccccgccgcgcaggccaagcgcctcctcgagcagcgccgcaccgacaaggcggagcgcgccgccaaggccatcgcccgcgccgccctcgacgtcgacaagctcgcaaccaaggtgtcggcgctggagacgatcgtgagcaagggcggcaaggtcgtggacgcggacgtggtgacgctgaccgaggcgctgatgaacgagctggtgaagctggactccgtcgccgccgaaggggaggtgaaggcggcgcggcgggcgcaggagaagcgggtgcagaagtacgtggagacgctggacgccatccgcgccaagaacaaggcggcggcggcggcggcgccggccaaggcccgcagcggcagcaaccaaggccgcgcgccgaaaactccgcggc

SEQ ID NO: 271813 - DNA, 1170 bp, Zea mays
gtaccatcgtgtccttttcctcctacctccttcttggctggccctcttccccgtcttcctccctcttccttcgtctctccgtttcaagccctaccgacaggcatttgcttctgctccagtgatcagccccctcccctcctggcctcctctccccccggccaaaaactgatctttttttttcggttctggtaccatagctattagtagtcgtagcggctaacttgcaagccgattgtctctagcacgcaagtgtttttccctcccctgagcttggtgggcgatcgagagttcgagacagtgtacacatacatactctgctcgtcagctgaggatcgatcgcttggtctcgttgttgcgtagataggtactagaggactatagctactagtaggactaggagaggatccgagggagagagagtaaggccaagatgatgcgcgcgaaccgggagcagagagtggccttctcgtcgacgaaggaggccgccgcggtgcccaaggaggaggtgtgggaggtccggcccggcgggatgctggtgcagaagcggagccccgacgcggacccgccccccggcggcgcgcccgtgcccaccatccgcgtcaaggtcaagttcaacggcgtctaccacgagatctacatcaactcccaggcctccttcggtgagctgaagaagatgctgtcggcgcggaccgggctgcaccccgaggaccagaagctggtgtacaaggacaaggagcgggactccaaggcgttcctggacatggccggcgtcaaggaccgctccaagatggtcatgctcgaggaccccgccgccaaggccaagcgcctcctcgaggagcgccggaccggcaaggccgagcgcgccgccaaggccatcgcccgcgccgccctcgacgtcgacaagctcgcaaccaaggtgtcggcgctggagacgatcgtgagcaagggcggcaaggtcgtggacgcggacgtggtgacgctgaccgaggcgctgatgaacgagctggtgaagctggactccgtcgccgccgaaggggaggtgaaggcggcgcggcgggcgcaggagaagcgggtgcagaagtacgtggagacgctggacgccatccgcgccaagaacaaggcggcggcggcggcggcgccggccaaggcccgcagcggcagcaacaaggc

SEQ ID NO: 271814 - DNA, 577 bp, Zea mays
cggggcggccccacccttccggcaagagcgcgcaggaggagcggctgatttttgattctctctgtccctccctccctcgcttcgctcgcgcggggtgcgtgcacgtaccatgagaagatgatgcgcgccaggcccaaaggtacattcgccgacgcgatgagggagagctcccctcctcctcctgctactgcccctccggctccggcttcggcagcggtgaaggaggacgagtgggaggcgcggcccggcgggatgctggtgcagaagcggagccccgacgccgacgcccccgccggggcgcccgtccccaccatccgcgtcaaggtcaagtgcaacggcgtgtaccacgagatctacatcaactcccaggcctccttcggtgagctgaacaagatgctgtcggcgcggaccgggctgcaccccgaggaccagaagctggtgtacaaggacaaggagcgggactccaaggcgttcctggacatggccgggcggcaggaccgctccaagatggtgctgctcgaggaccccgccgcgcatgccaagcgccttctcgagcagcgcccgatcgacaaggcgg

SEQ ID NO: 271815 - DNA, 794 bp, Zea mays
  unsure (1)..(794): unsure at all n locations
aatgaacttgggtggctcttggagccgcactattggttcttctggggatgttccactgcatggcgacttctctgctgagcacatgatttttggaggcgagagaagctggttgatctgctagacattgatctgcagtggcgcatgcataaagtttcagatgggcagcgccgcagggtgcaaatctgcatgggtcttcttcatccatacaaggtgcttttgctcgatgagatcacggttgatctggacgtggtgaccaggatggacctgcttggtttcttcaaggaagagtgcgagcagagggaagctaccatcgtgtacgccacccatatatttgacggactcgagacgtgggctaccgactttgcgtacatccaagaaggcgagctgagaaggtccgggagatactccgacatcgaggagctaaggagcgccaagaacttgctgtcggtagtcgagtcgtggctgaggtcagagaccaaacttccgaagaaggaaccccccaccacgtcctgagacccaggccaggcgttcctcgccgttcgatgcttctcctttccgttcgtcacgccacatggcctactaccgttgatggtttcccaactcgtactacaccattgcctcttgttctgcgctatatatatatatttttgttgtcgctcatatcgtatagtagctgtggagtttaatatgtgtcctcttcacggcccttgtagacatcaatcaatatatagcaggcagcacagaaataaaaaaaaaaacccacaaaaanaaagggcgaccgctcgcgataaaaa

SEQ ID NO: 271816 - DNA, 421 bp, Zea mays
cacagctagtgtgcaatggtgacctttcgtacttaggtggttcttgcagccgtactattggttcagccggctaggcgagtgtcccactgcaaggcgacttctctgctgagcacatgatttttggagtcgatcgggttgatcctgtcaggcgagagaagctggttgatccgctagacattgatctgcagtggcgcatgcataaagtttcagatgggcagcgccgcagggtgcaaatctgcatgggtcttcttcatccatacaaggtgcttttgctcgatgagatcacggttgatctggacgtggtgaccaggatggacctgcttggtttcttcaaggaagagtgcgagcagagggaagctaccatcgtgtacgccacccatatatttgacggactcgagacgtgggctaccgactttgcgta

SEQ ID NO: 271817 - DNA, 524 bp, Zea mays
agggaggcgaatgtccttttgctcttgtgattaaataaatgcatggcgcgcgcgtgcaggctcgagcaggtggacctgagcaggaggcatgggctggccaaggtggtgggcacggtggtgagcatcggaggggccaccgtcataaccctgtacaagggcctgccgctgctccatcacagtgatgtgcacgtcaagtcgtctccggtgacgctgtcctcctccagcggcagccccatcctcaactggactctcggctgcgtcttcatcctcggccactgcctctcctggtccggatggatggtccttcaggtgccggtgctgaagaggtacccagccaggctctcggttctgtcactgacctgcatcttcgggctcctccagttcctggccattgccgccttcaccgaggaggacctgagcaggtggaaggtccgctcaggaggggagctcttcaccatcctatacgctggccttgtggcatccggggtagcgtatgctctgcagatctggtgcatcgacagggg

SEQ ID NO: 271818 - DNA, 841 bp, Zea mays
tttgttgggattgatgttgttagcgactgtaaaggggtagttcattcctggttatctatgaagctttcatcagaggaagctaatagtgctttcagagtattatctggttgcaaggtgaacaaagtttgtccactggagtttgacgaaccttcttcagtcgttaaggcgtgtggcaaggcatcatcttcaacgttatcatgctgcgcagcattgcactcttacattggaactaggcaaaaacagatatttgtcacaaacctgcaagcaattaattgtgcaacaatgtttggatcaatgctacagaaagctggtgtggtggatgacatttatgggctttgcgacattgatttgaaagatttcagcttgcaagattttggacagcaaggctgtctacttcggagcttacctacagatattgtgtttgacaacgctacaggcattagctttacatgcgatttgagtgacaatattgcagcaccatggccagcctcatcttctgtccaatcattgtcactttgtgctccagaaatgtcgctgcctgctttgcctgtctcgccgaaatcagaaagctcaggtccctccagaactgggatcggcgttttgttgctgcttgtattcctcactaccatcactatctgaggaatacttccatctagtgagccagaagcttcttacccctgttgcattttttccccatctgtgcaggcccgcgtgtaaattgtctgaattacattcttgtaaatgagcctcccccttgtgtctctttttggtccagtggatagatcacagtgctgttgtgttaaagattactgttgtaccattttgtgtttgagccctggtt

SEQ ID NO: 271819 - DNA, 527 bp, Zea mays
cctcaacgcctaccaaacttacgcagcctctccataactgcgagctgttgctcctcctcccgagctaccattctccgtcgatctcctccaggctgtagcgcgctgccacgcccgcccatggcctcgggctcgaaaccggacagcgtggagaccgaccatcctggcggcggcctctccatcgccgtcgagcacaacccaccggagtcgcgcctgcagcagctcggcgtcaggtcctggcccaagtggggttgcccgccggggaagttcccggtgaagttcgacgcgcggcagacgtgctacctgctcaagggcaaggtgcgggcgcacatcaaggggtcgtcggagtgcgtggagttcggcgccggcgacctcgtcgtcttccccaaggggctcagctgcacctgggacgtcgccgccgccgtcgacaagtactacaagttcgactcgtcctgactggtgacgcacatcgctcccggcccggtccgctgatttggtcccgatcccacgcgtccgcccctcccggccgt

SEQ ID NO: 271820 - DNA, 499 bp, Zea mays
gacgacaaagacgaccgggcactcactgatatcgaagacggagatgaaccatggtctggccagagagtgcaaggaaggaatggaaccgtcctcacaaaaagaccaataaccccctcgcaagaggaggaaaaactaaaccagaggtgcagaagcgcaaagcttagagtcattcagaagacctgaataatttcggataaattttgaaggattcctgggcacatcggcgtgtagttgtttatagccagagaaatgtgaatgggattctcacttgcgtgcacagccagctgcagtctggatcaccagaaattttacatcagccggatgtggtggtgctatttatcctcgacaagaaatcatagaggcttaggttagtcgaaaaaaaactcactgtatctgcatcagtttctgaacttcgttcatgtatatcgcctcatgaactctgtaaaccattcacttgcaagacacgataatcagtttagggttttcgagccctccttca

SEQ ID NO: 271821 - DNA, 1465 bp, Zea mays
  unsure (1)..(1465): unsure at all n locations
cggccggaattcccggtcgacnacgcgtccgcaaagctcgcaactacttcctcccctcccatccccttccttcccttccggccgcctcttgtcctcctcacctcccaaattgaaatcctcctccctccccgcctagggttccgcttcctcccccgtccgagcaccactcaagcggcggcagcagcggtggcagcctggaagcagtcccatctcgtcgccctagacttccctgccgccgcacgtctcagtttcttgttcgcccgctctcctgccggtccgcccatcgcctgaggttcttacggtgccacggagttggcaactgcaaggagtgatattgtggtacaacactagttctaattgaagtaataaggcgggggtgaaactgtctgctaccattgcttccatggcaactaatgagaacctcccgccaaatgtcatcaagcaattggctaaagaactgaagaaccttgatgagtcacctccagaagggattaatgtgattgtcaatgatgatgacttcactactatttttgctgacattgaaggccctgctggaactccatatgagaacggagtattcaggatgaagctattattgtcacgcgatttccctcaatctcccccaaaagggttcttcttgactaaaattttccatcctaacatagctactagtggtgagatatgtgtaaacacactgaagaaggattggaatcctggccttggattaagacatgttcttctggttgtgagatgccttctgattgaaccatttcctgaatctgcacttaatgaacaagctgggaagatgttacttgaaaattatgaggaatatgcacgacatgcaaggttatacactggcatccatgcccttaaacctaagaatacgtccaagaccggagctatatctgagtcaaccacagctctgaatgtcgacaagtcaagtactgcctctagcaagaacacaccatcgatgccaccggcggtatctacctccagtgcatccagagcatttggtacgagtttgcaggatcagaaccccactgtttctgatcctgctgtaggagctgcggcggcacgaaagaaggatggcccaatggcttccaaagttcctgtggataagaaaaggctggatgcgcggaagaagagcttgaagagattataggcggaacgtcctgggaagaagagagagggtttagagttcagaatttttatcggaaactcagcagatgcttatttaagctgggagacaaacaattaggggaggagaggcatctgatgacctggctttcgggagaagggggtccggggcggggccaaaggtgaataatgtgaagcaactgagtccttcgggacaactgtatgtgcaatgcccaatcatttggaagaacacttgcctatttctttttgttgtcaaaaaaaaaaaaaaaaaaaaaaaagggcggctgttcgcgatcctaggaactag

SEQ ID NO: 271822 - DNA, 1660 bp, Zea mays
cttgccattaacactatctgctcaggatcctaagatcccaagcagtgctttgcacccaaaccatttcatgcctagtgcgcctccagtggttgatgttagtgaccataacaatgatatagaagaggagatgattaaggcagcaattgaagcttcaaaaagggaagctgacgggatgaaaaatgttctaagtagtggtcaatctgaaaacatgtcacgtggcagaggtgatcatgagcttgctcgggcggtttctttgtccttggagacagcagagcgagagagagctctgcgccaagagggagtgcctgtagccgcccgctcgccggacttaattgatcaagaacgcggcctgcgaggtgctcgactactcgagcggccggggctcacttcaggagaagtgggaacttctgagcaaacagtttatgaagagaacttccaagaggacaatgaagatggtgaagaacaacctttagttaggactcgttctaggcgacttcgaggcagaactattgagccagcagaaactgttcaaagggctgacagcccgccctcaagtccccaacctcatgttcaaattggtcatcagcgtaatggtggggtttccttcagtagaggggggtgggtatttcttctgaggaggcgtgatgaagctcttatgcttgaggctgcaatgtttggtgcggattcctgaaggagcaccatatccattttccttcccagcccatggcaggtcgactcactatcccctagtagcacgtcctccatcaccatcattaacggcacagcggttgttaagggagcagcaggatgatgagtatcttgctgctctccaagctgatcgagaaaaagagttgaaggctgtgcaggaggctgaacttcgcagggtagaggaagctgcagcaagagaggctgctcttgaacgtcaaaagaaagaagaggaggagaagctaaagaaacaacgtgaggaagaggagttggaatccaagcttgcagccaaacaagcatcactacctaaggagccactacaaaatgacgagggggctgtcacagtggtagtccgcatgcctgatggtagtcgtcgaggacggcgctttctcaaatctgacaggcttcagtatctttttgatttcatagacatcagccggactttcaaaccaggaacttatagactggcgaggtcttatcccaggcgtgccttcactgaattggagagccagatgtcactgagcgatctcggtctcactagcaagcaggaagctctgttcctagaaaaactgtctgcgtagagtacaaggttctggagttatggtcgagtagtatatgcacttataaaatcggtcatttagatcgtgcctggcgtgtgttcatgaaaatactgcagcggttgaatgattactgatctctagagatcccgtcgccatcttctgtgctctgaaacggaggtgtttcgatctgactgtgcagatgggcagttctacattcagatttcagaacaactgtagctcttgcggttttaagacttgagtatggtttactttggagatagtggtttagaccatccgtgttggtctcctgagcggtattcttacgtgatcacgtgtcaaaacgaacagaatcctttgttgcagtcattatagttaaccggctcgctggaactcgc

SEQ ID NO: 271823 - DNA, 417 bp, Zea mays
gttctaagtagtggtcgatctgaaaacatgtcacgtggcagaggtgatgatgagcttagtcgggcggtttctttgtccttggagacagcagagcgagagagagctctgcgccaagagggaatgtatgtagcagatcactctcgtgcttatctgataaagaaggcggtcaaggagggagtgggataagcgaaacgcgaggactaactacaggagaagtgggaacttctgagcaaacagtggatgaagagaacttccaagaggacaatgaagatggtgaagaacaacctttagttaggactcgttctaggcgacttcgaggcagaactattgagccagcagaaactgttcaaagggctgacagcccgccctcaagtccccaacctcatgttcaaattggtcatcagcgtaatgtggggt

SEQ ID NO: 271824 - DNA, 544 bp, Zea mays
tggactcgtgggcggggacgaccgccagagccgccgccttacgtccagctgccacggtacttcatcgggccctttgccggtgcaggcggcgcagcacccaccgcaccaggattctgattgctcttcattaggctataaatggcaggaaggcaccgggcaccccgacaataccatgatgaacctcgaggataccgtgatggtccaccacctccacttccacgaccaagacctctctcaccgcgtcgcatggcagaggaactgtctaggcgccgtgctgagatccgtagaatccatgaggacaatcagcgtctggcggatgaaattgttagtctcaagcaaaccatgccgcgtttgcaagaagacctccgaatctcaagccaggctgttccaaagctccgggcagagaaagagctcgagtcgagggagctgactcagaggaacctgaagctggaagctgagctgcgtgccttagaacccctcaggcaagacgctctgcatctgcgatccgaagcaagtaaattgcagtctctgaggcaagagttgg

SEQ ID NO: 271825 - DNA, 489 bp, Zea mays
ttccacgcgtccgcccacgcgtccgcccacgcgtccgcccacgcgtccgcccacgcgtccgacggggacgaccgccagagccgccgccttacgtccagctgccacggtacttcatcgggccctttgccggtgcaggcggcgcagcacccaccgcaccaggctataaatggcaggaaggcaccgggcaccccgacaataccatgatgaacctcgaggataccgtgatggtccaccacctccacttccacgaccaagacctctctcaccgcgtcgcatggcagaggaactgtctaggcgccgtgctgagatccgtagaatccatgaggacaatcagcgtctggcggatgaacttgttagtctcaagcaaaccatgccgcgtttgcaagaagaccttcgaatctcatgccaggctgttccaaagctccgggcagagaaagagctcgagtcgagggagctgactcagaggaacctgaagctggaagctgagct

SEQ ID NO: 271826 - DNA, 765 bp, Zea mays
cactaaaattgtctaaacatagcagaaacaagctaggattgaattcatatatctgagaacaccttgacgacctcacctcacaggtaaatcagctgaaggaccagaacaagcagctcagcatggcactgagtataaccagccaaaaccttgtggcagtgcaagcgcagaactctgttctgcagacccagaagatggagctggacagcaggctgggtgccctgacggagatcctctggtacatgaactcaagcaccagcaccagcactgctcctacaaatccagccatagcgaacgacttcacagcatggagcagagcctctgatattcttggtggaaccagctacagcgccatagacctgtaccaatgcttctagctctaagctctagctctagaagagagaaggtggctgtggcatatgacatagtggtagggccaggaagaaaggaggcgggcaggcatcaagttctgttcaatcgtgtggggcctttgtgtcactgttgatgtgtgcagtgtgtgcttgatgcttctccctccactgtttattttcgaggcgacggcgatgttttggtttggtagagactcaaggacggacaaaatggcagaaagttgccttggctttgtgtgacgtaaatgcagttgttctccggtatttatatggcaaataatattgggccagctagtgaaaaagacaggcagatgatttaaaaaaaaaaatttttaccccaccttaaaaatcgggggcctcatgttggggtcgcacccat

SEQ ID NO: 271827 - DNA, 345 bp, Zea mays
tgttctgttcaatcgtgtggggcctttgtgtcactgttgatgtgtgcagtgtgtgcttgatgcttctccctccactgtttattttcgaggcgacggcgatgttttggtttggtagagactcaaggacggacaaaatggcagaaagttgccttgcctttgtgtgacgtaaatgcagttgttctccggtatttatatggcaaataatattgggccagctagtgaaaaagacaggcagatgatttgatgtggctcttgatatatagggaaataatatgcgtaacgatgattataatgtttattaagaacccgatttgatgtcaattgacccccgtttccagtcttatt

SEQ ID NO: 271828 - DNA, 459 bp, Zea mays
agactcaccttttcaagttatctaggcatttcctatatatttaccacatataaaaattatactaaggcagtaacaaaagaggtgcctttatatctgacaaacagaagggagtgaaaaagtttagattacacctcagtttgcctgtggtgacaactatgtcaagtggcacttcgtccggatcgagccggtgggtccaaagttctagatccgaggatgacctagatctccaggcccagatggagaggaggagaaagcggaggaaggagtcgaatcgggagtcagctcggaggtctaggcaacggaagcaagaacaccttgacgacctcacctcacaggtaaatcagctgaaggaccagaacaagcagctcagcatggcactgagtataaccagccaaaaccttgtggcagtgcaagcgcagaactctgttctgcagacccagaagatggagctggacagca

SEQ ID NO: 271829 - DNA, 538 bp, Zea mays
ggccgcatcccgcccgccgcccaccgcccatcgcccacctgtggcaaccgccggctacatggaccaccaatcgaccactcgccgaaccaagccacccaccccaaacccaatggcgtccaacctcctatccgcggtggcaatcgagaaggagacgccggagagcgagctgcccccgacgttcctccgcgaggacgggcgcggcgccgggtccgtgcgggcgcggttcgagtccatgatacggcgggtgcagggggaggtctgcgccgcgctcgaggaggcagatggcggtggggcgcgcttcgtcgaggacgtctggtcgcgccccggcggcggcggcggcatcagccgggtcctgcaggacggccgcgtcttcgagaaggccggggtcaacgtctccgtcgtctacggggtcatgccacccgacgcctaccgcgccgccaaaggggaggccggcaagaacgaggccgccgcggatggccacaagcctggtcccgtgccattcttcgccgcgggtattagctcggtgcttcaccccaaa

SEQ ID NO: 271830 - DNA, 470 bp, Zea mays
cggacgcgtgggcagcagcgttgcagcgacgagcacaaaaagaaaaaggaaattcctctcaacatcaccagaccacgacctccctgccgagctccctccctctccgttggtgatggcatctcagagctccaagaccgcggacaccgccgcgcctccgccggaggttgcagccaccggagaggcggctccgggcgcggcttcttcaacaccggcacaaaaccctaacgctgctgcaaccgcagtggccggggccacggatctagagaagaagatgcgccgcgcggagcggtttgggatgccagtactgatgtcagaggaggaaaagcgcagcagtcgcgccgagagatttgggactggctcttcaagtgtaaaggaggaagagaagaagaagtccagggctgagagggtggctgctcgcttctagagagagctaaaaggccgtgacgttggcaaccaatgccagcgagaga

SEQ ID NO: 271831 - DNA, 509 bp, Zea mays
ccccaacatcgtccacgagcccgtcatttacagattgaatgaagctgttatgcattttggagagagcatcaaggaaatcatcaatgaggagtttggtgatggaatcatgtcagccatagacttctattgttcaatttgccaaggttgaaggggccgacggaaaagatcgtgtggtggtcacatttgatgggaagtatctaccttacactgaacagaaatctgaacatatgatgtctaggcctacccgcaagacatcttgatgtggctggtgaggaggagaaacatgatcgtagtggtaggtatcgggctcagcaaggatcgagcatgccattttctttgggtagtccatatcatcaccccaataaacagacctatattgatgatacctgtcaaaaggaccattaaagtcaatgttctacctggcatgattgctggactgtattggatgatgctgagataaaaagagagaaaaagtgaaccaaactggattcaaattcgtttttttcccc

SEQ ID NO: 271832 - DNA, 723 bp, Zea mays
gtgacttcgaggagggcccgtacatcatcccggggaccaagtggggcgtgctgatcccgtcgcgcgtggtggaggaccattcgccgcttccggggtggatggtggagtcgctcaaggccatcaagatacatcgacggcgagagcttcgccgtgccgcggggtcggcgcgccgtggagctgctggccgggagggagagcgcgatcgcgcaggtcatccgcaccgtgccggggcgacagtacgtgctgtccttcaccatcggcgacgccagtaacgcctgccgcggctcgctcatggtggaggcatacgcgggccgggagtccaccaaggtggcgtacgagtcggcggggaagggcggcgtgaagcgcgccgtgctgccgttccgcgccgcgtcggcgcgcaccaggctcgtcttcttcagctccttctacagcaccaggagcgacgacctcagctcgctatgcgggccagtgcttgatgacgtcgtcgtcgtcagcgtgcgcacgaagcgcggctagagaagcgtgctctgtggagttggggcgtgccctgtgcgtgcgaaacggaggaatttttcatgctgctgtcatcgcacgggtactttactaccgtgtttgtaggtgctcgttgggggcatcagaaaattgctccaaccatcggaaatttgtaaacaaaaaacaacaaaaaaacaaaaacaaaaaaagacaaaaacagacacccaaaca

SEQ ID NO: 271833 - DNA, 455 bp, Zea mays
cggacgcgtgggcggacgcgtgggcgcgctctcgtttcgtcgctacgctagcttccagtcccgggcttagcaactgtgctgctgttgcactgcacccggcgcacgcagagatgcgccgtgtcgggacgggtgtgaggatgctttgcggcgcggcgctgtcggtgcttctgcttctcgcgggcggcgcggcggcgtcgcactcgcgctcgtcgtgccccgccacgcctccggacgcggggaacacgctgcaggtgtcgcacgcgttcgggccgtgctcgccgctgggccccgggacggcggcgccgtcgtgggcggggttcctggcggaccaggcgtcgcgtgacgcgtcgcggctgctgtacctggactcgctggcggtgcgtggccgcgcccgcgcgtacgcgcccatcgcgtcggggcggcagctgctgcagacgccgacgtacgtggtgcgg

SEQ ID NO: 271834 - DNA, 1865 bp, Zea mays
gtcgccgcgcccgtgccttcgaatggcgccttccccaagatgccggccttcgactacacgccgccgccgtacgacgggccgcgcgccgaggagatcttccggaagcgcgctcagttcctcagcccatccctctttcatttctacgatcgcccattgaacatagtcgaaggaaagatgcagtacctatttgatgaggatggccgtcgttacctggatgctttcggtggcattgcaacagtttgttgtgggcactgccatccagatgttgttgaagccatagtaaaccaggcaaagcggatccagcactccacagttctatatctcaatcatgcaattgcagattttgccgaggcattggcttccaaaatgcctggtgatctgaaggttgttttcttcacaaattcaggcacggaggcaaatgagcttgcactgatgattgcacggctttacactggttgcaatgacattatctctcttaggaatggataccatgggaatgctgctggaacaatgggtgctactgctcaatccaattggaaattcaatgttgttcagacgggagtacaccatgcgcttaatccagaccccttcagaggtgcttttggttctgacggggagaaatacgccagagatgttcaggaaatcatcgaatttggaactacagggagagttggtgggttcatttcggaagccatacagggggttggtggaatagtggaactggcaccaggatacttgcccgtggcatacagtatggtaaggaaagccggtgggctctgcatcgccgacgaattcaggcaggagtcgcgagaactggaagccacttctggggattcgaagggcatggtgtcatcccggacatagtcaccatggccaagggtatcgggaatggcatacccataggagctgtagtaacgacgccagagatcgctcaggtgttgacccgcagaagctacttcaatacctttggtggtaaccctgtcagcactgcaggcgggcatgcggtgctcaaagtgctggagaaggagaagctccaggagaatgcgtttgttgtgggctcctacctaaaggaacagcttaacaatctgaaagacaagcatgagatcatcggtgacgttaggggcaaaggcttccttcttggagttgagctggtgacagaccatgaaaagaaaaccccagccaaagctgagatctcacgtgtcatgaaccatatgaaagatatgggagtgttggttggtaagggtggtttctacgggaacgtttttaggataacaccaccgttgtgcttcaccaaagaggattccgacttcttcattgaggtgatggacattgcgctctcgaagctgtgaggcaagcagggcgaagatgatgtgcaaaccctggtccgtcgccatgggatttttgcccatgaataatattaagattaatgagacagcacctcgttgtctcttaatctaagacgatgccatgtcatccggtggcatggtattcctaatcctacctgccaaatcactggtattgctcgctgtctcgtaatcagacccatggagcaatatgattcttgtaaactctagcttcatccaatctgttcctcctgatctaactagtctgaatagcagctgttcgtttgtgaccaatatcaacttcttttcagatgctccatatattcctgctctctgtaaacaaaccattatcactgttcaatagatgcggagatgtggatataaaaattacaaaataaaaaaaaaaaaaaaaaaaaaaaaaaaaaaaaaaaaaaaaaaaaaaaaaaaaagaaaagaaaaaaaaaaaaaaaagaagaagtgaaaagagtaggaagataaaaaaggggggggccccctaagggt

SEQ ID NO: 271835 - DNA, 603 bp, Zea mays
cccacgcgtccgcccacgcgtccgcccacgcgtccgttggagttgagctggtgacagaccgtgagaagaaaccccagccaaagctgagatctcacgtgtcatgaaccatatgaaagatatgggagtgttggttggtaagggtggtttctacgggaacgtttttaggataacaccaccgttgtgcttcaccaaagaggattccgacttcttcattgaggtgatggacattgcgctctcgaagctgtgaggcaggcagggcgaagatgatgtgcaaaccctggtccgtcgccatgggttttttgcccatgaataatattaagattagtgagacagcacctcgttgtctcttaatctaagacgatgccatgtcatccggtggcatggtattcctaatcctacctgcccataaataagggacgagttgtgagacagcacctcgctgtctcgtaatcagacccatggtccatggagcaatacgattcttgtaaactctagcttcatccaatctgttcctcctgatctaactagtctgaatagcaactgttcgtttgttaccaataaaaaaaaagggcggccgctcgcgatctagaacccacgcgtccg

SEQ ID NO: 271836 - DNA, 640 bp, Zea mays
cttaatctaagacgatgccatgtcatccggtggcatggtattcctgcttgctataggtgcccaaacgggcggcccggcacggcccggcacgggcccgttaggcacggacagttagacgggccgtgcccggtcggcccacgtgccgcagatgcggcccaggcacggcacgccggcctggtagccgtgccgggccggcccgtttaatttgcccacgttgtccatttaatcagaaaaactgcaaaaaaattgggcgcagtggggttttgaacccaggacctccctcttctaagctgggagcactaaatgtaagaggctaaccagtagaactctagcgtatttgttgtaaatagcaaatataaaatctaaatatatatatactatgttttataaaataaaaaaaatataatcgtgccgggccgggccggcactgcgggccgagacagcggcccaagcacggcacggctgtcgtgtcgggcccgacccggcactattaaacgggccgtgcttcgggccggcccgttaagcacggcccatttggccatctataaataagggacgagttgtgagacagcacctcgctgtctcgtaatcagacgcatggagcaatatgattcttgtaaactctagcttcatccaatct

SEQ ID NO: 271837 - DNA, 443 bp, Zea mays
ccgcttaatccagaccccttcagaggtgctttgggttctgacggggagagatacgcccgacatgttcaggaaatcatcgcatttggaactacagggagagttggtgggttcatttcggaagccatacaggtattccaatctcaaagcgtcggttaggcatctccatcactcttaaacaaaaaccaaatttctcccctgaacatgggatgttcttttccgaagggggttggtggaatagtggaactggcaccaggatacttgcccgtggcatacagtatggtaaggaaagccggtgggctctgcatcgccgacgaagttcaggcaggagtcgcgagaactggaagccacttctggggattcgaagggcatggtgtcatcccggacatagtcaccatggccaagggtatcgggaatggcatcccataggagctgtagtaacgacg

SEQ ID NO: 271838 - DNA, 654 bp, Zea mays
ggacaggtcgcctgggatgagccggacctgttacagaacgtgaagagggaagaagctgtgcgtcccactgtacccggagcttccgctggagggccagttcccggcgccgatgttccacggaagccccctcctcggccgtggcggcgccggtggcccgatgtgctacttcccggacggcactcctgcaggcatacagggagccaggcatgctcaattcggcatatccttatcagatctccacctgaacaagctgcagccgggcctgtcaccgcacgggctccaccgccagctcgaccacggcgtgcaggtgcaggtgcagcagccgaggatcgccgccgggctcatcgtcggcggccacccggcggcccgagacgacgtctcgtgtctgctcaccatcggcaccccaaagagcaagaagccaccgtcagacgtcaagaaggcgtccacggcggcggcaccgcagctgatgctcttcgggaaagcgatcctcaccgagcagcagatatcgctaggcggcggcaatgtcgtgccggcgctggcgaagaagagcccctccgacgacgacgacgacgtggccgagaggacggtgagcaactcggacgtgtcgagccctgggaggagcaaccaggacggcacgtccagtggcggaggccc

SEQ ID NO: 271839 - DNA, 397 bp, Zea mays
cccacgcgtccgcccacgcgtccgggactcgtcccggatcagctggttcatgggcactgtctccgccgtgcacgtcgctgaccccatccgatggcccaattcaccctggaggcttcttccaggtcgcctgggatgagccggacctgttacggaacgtgatgagggtgagcccatggctggttgagctggtgtcgaacatgccggtcatccatcacctcacagccacgcccttctcgccgcccaggaagaagctgtgcgtcccactgtacccggagcttccgctggagggccagttcccggcgccgatgttccacggaagccccctcctcggccgtggcggcgccggtggcccgatgtgctacttcccggacggcactcctgcaggcatacagggagc

SEQ ID NO: 271840 - DNA, 420 bp, Zea mays
tgcacaactttgaaccagaaagggatgatatcgcaaatgatatcatcaattggttgagcgcaagacttagtgttcttcagagatggtgagctgaatcaagtatgaactacaaggtgcttccccttatgtagttaccggcggttttactggaactgtatacatggcatagagtgcagaatagtgtaaatgtaaactaggatgttatcattatgtcttcacggtcacggtcatttcttgtcttcagctctgctgtataagtttgggaagagcctacatgagatgtaaataatattagagttaagctgaaaataatgtatctcctaatacacaggtagttcagtgtcactttttttttaaaaggacttggttcgcatctttttctggacaaaaaaccaaaagggtgagataatgttaaaattt

SEQ ID NO: 271841 - DNA, 622 bp, Zea mays
gcgggcgaggtgctgtgcgggtaccagccgctggcgatgcgggaccccgaggtgttcgagcggcccgaggagttcgtgccggaacgcttcctcggcgacgacggcgccaggctgctgcagcacctcttctggtccaacgggccggagacggcgcagcccgggcccgggaacaagcagtgcgccgccaaggaggtggtggtggacacggcgtgcatgctgctggccgagctgttccggcgctacgacgacttcgaggtggagggcacctccttcaccaagctcgtcaagcgccaggcgtcgccgagcgtggcgcaggcagcagccgccgccggagcgcagcagtgagtgcgctgtataggatccatcggtggcgtgcgacgtcgccggcgccggcgccggccaagcaataaagtaatgagtaggccctcctcgtcatccacatgctcgtctgtgttcgacttcgatcggtgtctcttcctcccggccggccgctggccgccaaacagccgttgtggtaataaaaaaatcatttgtggaattgcagagtgtaccgtggtcacacacacttgtacagtgaattctttagtgacgctgcaataaaattgaatgaacatgtactcgc

SEQ ID NO: 271842 - DNA, 670 bp, Zea mays
ggactggaggccggggaccgagcagtacaagttcatcgagcaatgcctgtcgtcgggcgacaggcagaaacagccgtggctcatcttcctcgcgcaccgcgttctcggctactcctcctgcacctactacgaatcggagggcacgttcgaggagcccatggggcgggaagcgctgcatgagctctggcagaagtacaaggtggacatcgacttctatggccacgtgcacagctacgaaaggacatgcccggtctaccagtctcagtgcgtcgtcgatggatccgaccactacagccgcccgttccaggcgacgacgcacgtcgttgtcggcggcgcaggagccagcgttctcgattctgagttcaccacctcgaagatccagtggagccacttcaccgacttcgaccacgggttcgtcaagctcacggccctcaaccattcctccctgctgttcgagtacaagaagagccgcgacggcaacgtgtatgaccatttcacaatctcacgcgactaccgggacatcctcgcttgctccatcgacaactgcccccggagcacgctggcttccggaagtcccacagtgtcgtagttgcagaccaggaattttagttcgtagcttttctgtactgcaccgaccaataaatgaggccttttcttttttaataaaata

SEQ ID NO: 271843 - DNA, 775 bp, Zea mays
ctaagacaaagtggcatactcttctctgtactagctttcttcttcctcctcctcttcctcctcccaaacagactggatttcatcaagataatcctgaaactggagccaacaagcagacagagaaagaagagcaagaagaccggctcccagccgatacaaggtaggagtgagcagcgttagatcagttttcatcacaggatcgatatggtgacagtgagagaggagactcgcaaggggccatggacagagcaggaggacctgcaactggtatgcactgtccgtctgttcggtgaacgtcgttgggatttcattgccaaagtatcagggctcaaccggacaggcaagagctgccggctgcgctgggtcaactacctccaccctggcctcaagcgtgggcgcatgtctccccatgaagagcgcctcatccttgagctgcacgctcggtggggaaacaggtggtccaggatagcacggcgcttgccagggcgcactgacaatgagatcaagaactactggaggacacacatgaggaagaaagcacaggagaggaagaggaacatgtctccatcatcatcctcatcttcactgagttaccagtcaggctacccagatactccatcaatcattggagttaagggacaggagcttcatggtggcagtggctgcatcacaagcatcctgaagggcacccatccggacatggatggctatcccatggaccagatatggatggaaattgaggcgccagaggtgccctcggaggtgggctttgttg

SEQ ID NO: 271844 - DNA, 564 bp, Zea mays
cggacgcgtgggtggcgaactcttctctgtactagctttcttcttcttcctcctcttcctcctcccaaacagactggatttcatcaagataatcctgaaactggagccaacaagcagacagagaaagaagagcaagaagaccggctcccagccgatacaaggtaggagtgagcagcgttagatcagttttcatcacaggatcgatatggtgacagtgagagaggagactcgcaaggggccatggacagagcaggaggacctgcaactgggctcaaccggacaggcaagagctgccggctgcgctgggtcaactacctccaccctggcctcaagcgtgggcgcatgtctccccatgaagagcgactcatcctagagctgcacgctcggtggggaaacaggtggtccaggatagcacgccgcttgccagggcgcactgacaatgagatcaagaactactggaggacacacatgagatagaaggcacaagagaggaagaggaacatgtctccatcgtcgtcttcgtcttcgctgacttaccagtcaggctacccagatactccatca

SEQ ID NO: 271845 - DNA, 1472 bp, Zea mays
ctggaacacatgtattttctgctttcggatttgttcataagatcgctacctttgagaaagcatctggttatcaggctttgattcagttttctcatgctgaaactgcaacatctgcaaaagctgcactggatggtagatgcattcctagctatttgctaccagaactggtccgggcctgcactttgagaataacctattcagcacacagtgttctcaacgtcaagtatcagagccacaggagtagggacttcactaatccttaccttccttttctggactctgctaaagatggctctggaccggatggaaaaaaacaggaagcagagagcaatatactgcttgcttctattgagaacatgcaatatgttgttacaatagatgtgcttcatgaggtcttttcagcttttggatttgtacagaagattgctatttttgagaagaatggctttcaagcattgatccagtatccagacattcaaactgcgtatgcagcaaaagaagcactagaagggcacagcatctatgaaggtggctactgcaaactgcacctcacattttcacgccatactgagcttaatgttaaggttaacaatgagcgaggtagagattataccaaggggaatgccactccaagcagtgatcaaccttccattcttggtcctcagccaataccaagcgttggtgctgctattccaccagcacagggtagtgttccttctgcagccaccaattcagtaatgccaccaggggatccatcagttgctctaccttctaatccttccagtgagccactcctgcaagcacctgttgtttcctctggagggcctccgcattaccctaatcaggccatcctacaaggcccacttggtgttgctgcacggttcccaggctatggtgccctgcagtttgctcagggctcagctcaagctcaaatggtgcagccttcaggccaaggaagtcaacatatgtcaggtcatgtaaattatcagctacctccaggttcagcccaattcatgcagtatctcagcaacggaagccatccacttccaaacgcacctgggccacagacaatgccttaccctgccctcagtgggcagcagctacctccgggtcttcagatgatgcaagctcaaggtttcggaggcctgccgttttcacagggtcctggacaaccaatgccacagttcccaatgtatggcacccaccagtttcctccgggtatggagccccagatgatgcgcttctctgagcagggaggccagcagtttacatttgcgccacggggtccaaatagtcgttagcaatttgaacttagcaacgttagatcgttgatggtgatggatggatgtgaagccttctatgtttgctgttttgtaaggtgaataccgatgctgttccattactaggatctatacttggccaaaacaaatgtctaatctgaggtttcgtaaccttgtatttgtatagaatat

SEQ ID NO: 271846 - DNA, 586 bp, Zea mays
tgttttggccacagtacgagagataaaccaagtatagatcctagtaatggaacagcatcggtattcaccttagaaaacagcaacatagaaggcttgacatccattcatcaccatcaacgatctaacgttgctaagttcaaatttgctaacgatatttggaccccgcggcgcaaatgtaaactgctggcctccctgctcagagaagcgctacctccgggtcttcagatgatgcaagctcaaggttttggaggcctgccgttttcacagggtcctggacaaccaatgccacagttcccaatgtatggcacccagcagtttcctccgggtatggagcccaagatgatgcgcttctctgagcagggaggccagcagtttacatttgcgccgcggggtccaaatagtcgttagcaaatttgaacttagcaacgttagatcgttgatggtgatgaatggatgtcaagccttctatgttgctgttttctaaggtgaataccgatgctgttccattactaggatctatacttggtttatctctcgtactgtggccaaaacaaatgtctaatctgaggtttcgtagccttgtatt

SEQ ID NO: 271847 - DNA, 574 bp, Zea mays
ggtagtagtaactgcagctgcaaagctggcagtgtcggtgtcggtgtcgtcgtcggcgtcggtgctggggagcgggcgagcggcgcgtcgcatgattctgtcctcctgacgtggcagctaacgattccgattccctttggttgcagtgcgacgacattgacatggacatggcgcactgggagtggctgtcggggctcttcgacgacgcatccatcccgcacgagccggcgttccccggcgcggcgcccatcatcaagagctccgcgctggcggccggcgcgctgctgccgccggacaagatggaggacgcgctgctgttccgcagctccagccccatctcggtgctggagcacggcagcttcaacaacgccaacggcggtggcggcggctgctccgcgtcgtcggagtcgtcctcggcgtcctcgtcctcggagtctttctccggcagcgggagcgggagcggcgaaggccacgcgtggtcggcgcccgtgtcgccgccgcccgtgctcgtcataccggcgcgcgcgcggagcaagcgctcccgcccgtccgcgttcacgcgcgccggggcgga

SEQ ID NO: 271848 - DNA, 589 bp, Zea mays
gcaagcccaagtgcccaatcaacaaacccagaccgccagacggcaaccgttgtcatctctcgctccacggcgccggccatcgtcactcacacgcccagcaccgcagcacgacaccatcgcgccctggccatcctcccgttcacgtgcacctaccgcacgcaccaccgcggaaagtaaccccgagatccagcgccatcggcacgaccaggcctgtccaaggatgggtggcggagaggggagccctactacgtcgaagcggcgccgccggtggacgtgaacaagaacacagagtggttcatgtacccgggcgtctggaccacctacatcctcctgctcttcttcgcttggctcctcgtcctctccgtctctggttgctcccccggagcagcctggaccgtcgtaaacctcgcgcacttcgccatcacttaccacttcttccattggaagaaaggaaccccttttgctgctgatgaccaaggcatctacagcagattgacatggtgggagcaaattgacaatggtatctgatcgcatcgcacttgactgactacaagcagccgatgtttttcctcaatccaatggcagtttt

SEQ ID NO: 271849 - DNA, 429 bp, Zea mays
tcacttaccacttcttccattggaagaaaggaaccccttttgctgctgatgaccaaggcatctacagcagattgacatggtgggagcaaattgacaatggtcagcagcttactcggaacagaaagtttttgactgtggtacctgtggtgcatgtatctgatcgcatcgcacttgactgactacaagcagccgatgtttttcctcaatacaatggcagtttttgtgctagttgtggcaaaattgccaaacatgcacaaggtccgcatatttggaatcaatggagacatctgaggaccactgcaggaagtacatggatgcaatgccatgatgtgatgaagagctaaaagaacaagcagtgtgtttctcaaacttgacacaactgtctgtaatatatgtacaggtttaggaagaactgtaaatgttactcta

SEQ ID NO: 271850 - DNA, 491 bp, Zea mays
cccacgcgtccataaatctgaggcttgtttctctacattcgcagttgccgcctaagagctttcgccttgccaggcttgagagctagtgctgctaaatccttccttggatgtctgatgcgattcaaatccaattcttttgtgctttggttgtagagggttccgtaggtttcggtctaaaatcgtgtgctttgcaagatcagcttcttgtttggacttcgaaactgaaacctggtccaggcaatcggcaaatcatcctgccatcttgcgatactgtatccaagccagcttaaactcacctggatctgacgtcctgattttctgggccctttcggctggcacatgccttctgcttcagccatttatgcttctcttttctgctgttgcttgaactgtgtacctgaatgttttactgcttaccctagctaaaattttcttgtatggctatttgctatggcacacagcaaaagcttatgttgcaaggtcatgttttg

SEQ ID NO: 271851 - DNA, 667 bp, Zea mays
cgacgatagactggatgatgaggaagacggatttgattgcgaaattgggacattggagaacgttaagaaggctaagggcactgtaaatgtctcagcaacttacaacaccaggcaccatgactttgagagttcagtagtcgcacgaggagacctttggaggttggagtcatcgcgtggcaatttaacttcagggaatgatagctcaccacttttccttgttcaacttgggcctttactgtttgttcgagactccacgcttcttttgccggttcatctgtcaaagcaacaccttctttggtatggttatgatcgcaagaacggaatgcactccctatgcccagctatctggtcaaagcatagaaaatggatgctgatgtcaatgatgtgcctcaaccctgtagcttgttccttcatggatgtgcaatttccaaatggacaaatgacatatgttgctggtgaggggataacagcaagtggttttatccctttatttggtggattactccaagcacatgcaaagtgtcccggtgatacaagagtgagcttctccttcaagaacaaacaaggtactaggttcagtccaacgtttcagtggcctgacaattctgtttcatttggagtcgcacaagctgtagcatggaagagatctggccttatggtcaggccc

SEQ ID NO: 271852 - DNA, 797 bp, Zea mays
gctggaagctccagttgttgttgttacaggtgcatctagagggattggtaaggcaactgctctagcccttggaaaagcaggatgcaaggttctggtaaactatgcccggtcctcgaaagaggctgaagaggtctccaaagagattgaagcatctggtggtgaggctatcaccttcggaggagatgtttcaaaagaagctgatgtagagtctatgatgaaagcagctctagataaatggggaacaatagatgtgctggtaaataatgcagggattacacgagacacattgttgatgaggatgaagaaatctcagtggcaagacgtaattgatctgaatcttactggcgtcttcctttgtacacaggctgcaacaaaagtaatgatgaaaaagagaaagggaaaaattatcaacattgcatctgtagttggtcttactggcaatgttggccaagctaattatagcgcaccaaggctggagtgattggtttcacaaaaacagttgccagggagtatgcaagcagaaatatcaatgtgaatgctattgcaccagggttcattgcatctgatatgactgccgaacttggagaagagcttgagaagaaaatcttgtcaaccattccgttagggagatatggccaaccagaggaagttgcagggttggtcgagttcctggcccttagccctgcagctagctatatgaccggacaggtgcttacaattgacggagggatggtaatgtaaggttcgagttggcttgatgcacttctacttttgcttaacatttaggcgacgttggt

SEQ ID NO: 271853 - DNA, 673 bp, Zea mays
  unsure (1)..(673): unsure at all n locations
cggacgcgtggggcaggaaaagagggcgaatcagcaactgcttcaaggccaggggggcgatgtttctcaagagaaagacaaggatgcgactaatggcaaaccagggtcacagaaacaggcaacgagcaaggaaggcactcctgctgaggtggcggcggatgcctccaaaccagtagctgaaagtggaatatcaaatgacaactaagcatcatgcatactggtcggcaccataccggtgcaaatgctgcaggttttgcggtatctgcaaatcaaaacctattgattctgcctgaattctggacttctttcggtactggagttcgtgagatggggctcatcatgggagtgaatcagattttacttattgtcgctttgctagttgtgtgactggtttttggtgtcttggaacccgtgttaggcttcttacatacccctgtgacgacaccgagtttgttgtaacccttgttttttttgcctttttgttttagttctatcattgttaacgaagcagcctatttcctatactttgaacaacattaaggtagttttttttgcatgttgcggtactgtggagagtaataagacaaaaagactctaggtttaaaccattttatccccgtattctgtattaattacaccttgttttttaaaaaaaaaaaaaaaaaaaaanaaa

SEQ ID NO: 271854 - DNA, 623 bp, Zea mays
cggttgcaatcgcttacatgttttggtttgagaacatggatctaaccacggttatcagaagctaacctccataaggccctgtggacccagcaagagagccatccgcgccgcaacctatgatctagctaagaacgatccatccaaagagccttttgagaaccttccggagcacgcttttgagggcgttgcagactgggagaggaagttgattcatgaccgggtgcgtgctcttcacgaagcatgagcagaagaaactttctccacgcgtcaagaaggggggaactaagcttcctaatgaggcaatggctgtgcttcggcaccagatcattagatgtcgaaacgataaagtttgttctcaataaagcttatacgacgccatatttgttgctgggtagtttgtaatagtcactaataggaaggaaataaagagggccttgcatgagattccagctggtgtcttcacctttgtggtgactgcaaatgagatgcccatccattaatggcatggcgcattgtaggtatattgtgtaaataaacctgtggatcttcatttgaggaacatcacttctgtaaaagtttatttgaagatacggccagctttgcaaatctaccatacctttggc

SEQ ID NO: 271855 - DNA, 946 bp, Zea mays
ggagaaaagaagtgtcgtggttccaaagtctccaatgactattgaagaagcacttccattcggtcgacagtggtggccatcatgggatacaagaaaacatatcagtgttattactacagaggctgcagggattgagcagacatgtgaaagattggggggcatggttagagagtcaagaggagtgctttcacaagcaagacaaatgcagattatacaccagtgcagggtttcaaaccttatttgggtcggtcgggacaggttaggccctttggagcctcgtcaagtggaaaagatactaggttacccttataaccacacaaatttgtttgaattaaaccaacctgatcgacttgctgccatgaaatatgcattccagactgatacattgtcatatcttttatcggtcctgaaaggtaagtatcaagatggaataagagtgttatccacccgcccgggcgttggaggtgcataagtagcacttcatcgtctaggcatccctttgaaatgtgtgatatctgttgaggaatctgaggtgaatagaaaaattctaagaaggtggtggttgaaaactgaacaaactggagtactaaggcaacatgcaggaatttggaagctcaaaacacatgtgattgaagacttggtgaaagagtttggtggttttgatctgattatcggtgggaattatacttcttgcaaaggtggtactacagtaaatacgacaatgggcatggattcgaaccgcttctatgagtataaccgtgtagtcaaaagggtaaggactgcagttggactcagttgaagagtccatctttaatgaagattgcacgtcttcataaaactagcctgtaggaggatatagaatcatctgatccgtaaatgtaggatgctacaagtaaactttacaagtcttgggacttgattattgcaagcaattgacttatccttt

SEQ ID NO: 271856 - DNA, 691 bp, Zea mays
tggtgctgaagagtcggatgagcaatgctgtaattcttgcgaagaagtcagggaagcatataagaagaaagggtgggctctaacaaatcctgacctaattgaccagtgtgcaagagaggattttattgatagagttaaaactcagcaagatgaaggttgcaatgtccttggctttttagatgtcagtaaagttgctggaaattttcacttcgccccaggcaaaggattttatgaatcaaacatagatgtgcctgagctgtcattacttgagggtggtttcaacattagccacaaaataaacaaactgtcctttgggacagaattccctggtgttgttaatccacttgatggtgctcagtggacacagccagcttcagatgggacataccagtatttcataaaagttgtccctacaatatacactgatattagaggacgcggtattcattcaaaccagttctcggtaacggaacattttagagatggaaatgttcgtccgaaatcccaacctggagtatttttcttctatgatttctcacctataaaggtgatattcacagaagaaaatagatccctactccactacctgacaaacctttgtgctatagtgggagctatgagcatcaagtttagtataggtgtagttaccatttgttaagatatttgctacatctacaatcttcactcttct

SEQ ID NO: 271857 - DNA, 841 bp, Zea mays
ggtgcccattgttttaggcacacctattaacctaaatatgtattttcttactctaaaccacttcaccatttatgaacacagtgctcagtggacacagccagcttcagatgggacataccagtatttcataaaagtgcagtctttcttcgtgcatgtatgttgcagttctatggcttaacgctgcataaaaaacttaccgagtttcctgtccaggttgtccctacaatatacactgatataagaggacacaatattcattcgaaccagttctcggtaacggaacattttagggatggaaatgttcgtccgaaaccccaacctggagtttttttcttctatgatttctcacctataaaggtgatattcacagaagataatagatccctactccactacctgacaaacctttgtgctatagtggtaggtgtgttcactgtctcgggtatcatcgactcgtttatataccacggacagaaggcactcaagaagaaaatggagctaggtaaatacagatgatcaacatcgaccttgtactggccccatcgtttccaagttttgtggcatgtaaggaggggatatgcctgctaaatacgacaagatgccacttacattgctgaggttgcaatttgcaaggccatcagactgatgttattccacgtgagctgatcagataacatgtaaaaagacaatgaatagcctggtctggggggagtgctttgatgtccatcattgttcactgacattgaaatggcccgaaccggtgcggtggagtaatttgagttcggaggtggatatatcacaggtcataccataatattaccaaagtttgttcaaggaaaca

SEQ ID NO: 271858 - DNA, 1081 bp, Zea mays
cgggtcgagacacgcgtctacactgcgccattgcctctttattcggcgctaagaagctcagaaacatcgctgacatccacatgcaccacagtagttcagtagagtagctgttggaacccacacaccggcgatggcaactgctcctgtgacatcctccatggctacgaactccacctgtgtgcggctgcctagcatgcccctgaggcgtgcacccgccatcgtctcctttgcctctcgtccatggtcaaccgcaatgacctcatgtactggattgtcgcggcactctgatgtggttgccgccgcggggcaccagaagttgatggggtctttgaacaacaacgagggactcatgtttggggtggttgtggcacggttcaacgaggtcgtgacaaatttgttactacagggtgccctggaaactttcgagcgatactctgttaaagcagaaaatataacagttgttagtgttcctggaagctttgaagttcctataacggcacaaaagcttgggaaatctggaaaatttgatgcaattctgtgcattggagctgtgattagaggtgacacaacccactatgatgccgttgcaaactcagctgcatcaggtgtactcaatgctggattatctgctggtgttccttgtgtatttggtgttctaacctgtgaagacatggatcaggcactgaaccgtgctggtggcaaggctggaaacaaaggagctgaagctgctcttactgccattgagatggcctcgctgttccggcatcacttaggctgacaccttgtgtattctgattttctatacacgaggcggcagcatttcctcctatcaagagttttggctaatagagagcttttccgccgcggctagtataatttatttccaagtctgttggtccggtgcggattggttgctttccttctatgagacctgaaaagctcacaagacatatctgtaatgtaaacctgacaccatgaataattgtcgccacgaacgaaatatggtcatgaataaagatgcactagtgttacttcatgaaaaaaaaaaaaaaaagggcggccgctcgcgatctagaactag

SEQ ID NO: 271859 - DNA, 490 bp, Zea mays
  unsure (1)..(490): unsure at all n locations
ggtcgaccacgcgaccgctctctctctctcggcgtcgattgggcgaccgccgccgccgcccccaggtcttcgctgggcccgtcgccggcgacgagcacccaccaggttcggaaacattgctgacgttcacctgtaccacagtagttcagtcgagtagctgtcggactcggaacacacatgccggcgatggcaactgctcctgtgaaattctctgtggctacgaactccccatgtgtccagcctagcttgcccctgaggcgtacacctgccgccatctccttcccctgtcgtccatggtcagccgcaatgacctcatgtactggattgttgaggcgctctgacgtggttgcagctgcggggcaccacaagttgatgggatctttgaccactaacgagggactcangtttggggtggttgtggcgcggttcaatgaggttgtgacaaatttgttactacagggtgccctggaaactttcgagcgatactctg

SEQ ID NO: 271860 - DNA, 1023 bp, Zea mays
gacttgggtcgaaaattttcaggtaacacagtgttgtgcaaccattatgcatggtgtaatactgttagttctagatcaactataaactggattatatttgttttgctgtgctgtttgagcttttgaccaactttttagttctttgaactctgcgcttgcaacattttcaggtaacacagacacagtgttttgcaaccattatgcatggtgtaatactgttagttctagatcaactataaactggattatattcgttttgctgtgctgtttgagcttttgaccaactttttagttctttgaactctgcgcttgcaacattattggtatactatcttactgacattgtgacatcttctaccatgctaggtcattttggactcacactgttgggttccgatgccatctgttggttttgtagcaaatggtgttgtcgatgagacttctgatgatgtgactccaccttccgttttaatggagcatccacctcttgcagtgtttgtcaacggtgtttcagcagcaatgaatgagctaagaccgtgcgcaccattgagcttgaaagttgtccttgctcaggaggtggtcaagggactacatgcagtctctgactccctagtaagatacaaagctatgcggatgcttcgtggaaatgagtccgcccttttcctgtcactctgccaggcattcatcgaggttgcacatccttgttgtgccgcatgttttggccgatgctactcggacggggcaacattgatctcagagtgtcaaggcacatttgacgctgtccgtcagttattgaccgtgccggcaagatctaacagttccagcatcgaaagatggcagtcaggaggcatgcaacgaagccagccaggagccattgaaagaaagcagtctgttgagagcactgggacagcggtcactgataacgggctctcagccgatggacctgggctagagacgaacagttctgctgcaaccaccacctcaccggtagacgacggtgggagtacccatccaccagcgagt

SEQ ID NO: 271861 - DNA, 399 bp, Zea mays
ctggaaatgatgagaactccgaaggtgggctgcttttcagctgggcaatgcaacagcttaggaatcacctcgctactcttcaagttatgttaccaagcataacagaaggtgggtctctgtccaacattcttgaacaatgcatgtattgtgcaatgggccttggcttagttggattggatttccgtggcctccttccgccaatctttgaggacgcggttctaaatttattctcaaagaatatgagtatggcggttgaaaattttcaggttgttttggattcgcaccgctgggttccgatgccatctgttggctttgtagcaaatggtgttgtcgatgacacttctgatgatgtgactccaccttcttgtttaatggaacatccacctcttgcaatgtttg

SEQ ID NO: 271862 - DNA, 584 bp, Zea mays
cttcaccaacgacaaggtgcgccgaggctcgctactactcgcccggctggcgcacctgggcggccgtcgccgttcagctggcctggaggaggtacaagcaccgcaagacgctctcgtcgctctccttcatccgcccgcggcgcccgctgtcccgctgctcctcgctcggggaggagaagctccgcctgtacacggccatcctcacctcgcccaagcccaaccaggacgacgacttctagctagcttatagctaggccgttccaggccggattctcttctcctcagcgaggaggagtatatatatcaaacaacatgcatttattagtagtattcattactcgcatgtcgcatgagacacagagccatgaccgtattttgcatccaagttccgatgtggaaagcacgaatttgaggtcacttgtgttcaaacttcaaaaccgcaaggccccgcaaacactcttggtgcgcatctccgccggcgcgacgccacccaccaacgatggtcgatgagtctttccctacgtgtcgtcataaaattttgtaatgtatataagctattgaatgaaaacgttagcccgtccctg

SEQ ID NO: 271863 - DNA, 361 bp, Zea mays
caaccgaacactacataccacagatgaaagacagatagtgccagtaaagaaacagatggtaaagccaatttgcagagcaaaggggccagataagtggcgatctttgcattgaaggttggccacaacgaactgcagttctccgtgccgctcagatttccatctgttctgtgacggcctcgaacaagctgctacatcggctcttatctgcgttccaatttgttttttggtcttctttttccttcctatttaaaagccgacataaactatataatggctttgaaactgctgcggcagtcttcaccgatgtattacagaacatgtaagtaaagaacgactgaatatcagtaaagaaccgagtgcg

SEQ ID NO: 271864 - DNA, 444 bp, Zea mays
  unsure (1)..(444): unsure at all n locations
aattcccgggtcgaacccacgccgttccgaagaaagtttttggtcaagttaggcaaataacctggtctattttgacgccgacaaataggccaccataaggattgtggcgagtgcttaccttgtctgggcttagggggaacccctgtagntttaagtagggttntgtatttgttgattcacccgctgatgaaagggcagtaacttgtaggtttggtgggtgtacccgcctaataagactaggcttgttgctgacaccgtcccttggtacaccgcacttttgctaggagccctctggctggcccagacagtactagcatgtacattagcggcagcttgaacgctgattttgtttaactgtgttgattccagtatgtaggaaggcgactgctgtaagcattttttcttacttttgtttaacgtgacggatgaaaccattggcgggcc

SEQ ID NO: 271865 - DNA, 876 bp, Zea mays
cggacgcgtgggcggacgcgtgggcttcaattcgtcacttagcttcactcggttctgcttctacacatctatatatcgttagtttggcaaagaaaagaggcaacgacgatggctgctgcggcggcgatgatggtctccggaggacgggcggcgctggcggtggcgggcgtgctctgcgcggtggcggccatggcggcggcgcagcaggcgtcgaacgtgcgggcgacgtaccacctgtacaacccggcgcagaacgggtgggacctgaaccgcgtgagcgcgtactgcgccacgtgggacgccgacaagccgctgtcgtggcggcagaagcacggctggacggccttctgcgggcccgccgggcagaagggccaggccgcctgcggcaagtgcataagggtgaagaaccgtgcgacgggcgcgtccatcgtggcgaggatcgtggaccagtgcagcaacggcggcctggacctggactacgagacggtgttcaagaagatcgacaccaacggccagggctaccagatgggccacctcaacgtcgactaccagttcgtcgcctgctgagcaggagagctcagtcagatccttcctgtgtatgtatgcatccatgcatgcaggcaggcagatgcagagaccgacgtcgttgtaaaacgcgtggccttacttgagatgaataaaacgcaacatgtagcgtcttgcaactgtcgcaagcacagctactactgctactgattaaataaacatgactgcaataatagtaataaactatttaggcctcgttcgtttttaaaacaggcatgtttttagttctgggccggatggagtgaatcctgctggttcactcaaacatgaaaacttttggtttggtttggt

SEQ ID NO: 271866 - DNA, 751 bp, Zea mays
cccacgcgtccgcccactcgtccgcccacgcgtccgcgtcctcctccattaatattggcagcaagctaggatcatcagcatctgagcttattattactaaatcgatcggttgccatggcggggatgagagtcggcaagctggcgctggctgcggtgctgctgtgcgcggcggcggccatggccacggcgcacaggcctccggcgtgcgcgccacctacaacttctacaacccgcagcagaacaactgggacctcaacgccgtgagcgcgtactgcgcgacgtgggacgccagcaagccgctgtcgtggcgcatgaagtacggctggacggccttctgcgggcccgccggccccaccggccaggccgcgtgcgggcagtgtcttctggtgaccaacacggcgacgggggcgtccatcacggtgaggatcgtggaccagtgcagcaacggcggcctggacctggactacgacacggcgttcaagcccatcgacaccaacggccagggcttccaggccggccacctcaccgtcaactaccagttcgtcaactgcggcgacaactgaactgatagattattcacctgtgcgtgcacctatatgtactagcaccattattcacaagagttatatggatggtgatcccacacgtaagagccaataaaacatatatgcccagtggaataaactgaattacctagatactggactactcatgtatcgtcatgtctcacgaaatactacatccgttctcg

SEQ ID NO: 271867 - DNA, 477 bp, Zea mays
  unsure (1)..(477): unsure at all n locations
tcgcgggtccacacacgcgtccgaatcgtcaattcgtcacttagcttcactcggtacggttctgcttctacatctatatatcgttagtttggtatgtactaacggctcgatctgcacaaggcaaagaaaagaggcaacgacgatggctgctgcggcggcgatgatggtctccggaggacgggcggcgctggtggtggcgggcgtgctctgcgcggtggcggccatggcggcggcgcagcaggcgtcgaacgtgcgggcgacgtaccacctgtacaacccggcgcagaacgggtgggacctgaaccgcgtgagcgcgtactgcgccacgtgggacgccgacaagccgctgtcgtggcggcagaagcacggctggacggccttctgcgggcccgccgggcagaagggccaggccgcctgcggcaagtgcataagggtgaagaaccgtgcgacgggcgcgtncatcgtggcgaggatcgt

SEQ ID NO: 271868 - DNA, 299 bp, Zea mays
gttagtttggtatgtactaacggctcgatctgcacaaggtaagcacatcgatcgctgcatgcccgatctcgacttgctgagttcggagctggtggcgtacgtgcaggcaaagaaaagaggcaacgacgatggctgctgcggcggcgatgatggtctccggaggacgggcggcgctggtggtggcgggcgtgctctgcgcggtggcggccatggcggcggcgcacaggcgtcgaacgtgcgggcgacgtaccacctgtacaacccggcgcagaacgggtgggacctgaaccgcgtgaggc

SEQ ID NO: 271869 - DNA, 1068 bp, Zea mays
cgcagttcacgcttggctgacgaccgacccccattcgttctagccctccctccgacactccgatccattactcgctatggacgcggcgggcggcgaccagctaagcctggccgcggtgcgcgacgcgctggtgcggctggaggactccgtggtgttcgcgctcatcgagcgcgcccggcatccgcggaacgcgccagcctacgcgcccgccgccaccgctggagaacattcgctcgtggagttcttcgtccgggaagcagaggccctcaacgcaaaggctggacattatcaaaagccagaagatgttccattcttccctcaagatctaccctcacctctctttcctacaaagccttccgcaaaggtcttgcacccttttgcttcattggtcaccgtgaatgatgcaatatggaaaatgtattttgatgaattgctcccgttattcactgttgatggtgatgatggcagctatgcacaaacagttgcactggatttagcgtgtctgcaggttctatcacaaagaattcatattggtaaatatgttgctgaggtgaagttcaaagacgctcctcaagaatatagtcgactaataaaagaaaaggacaccgattctctgatggatatgctgacattcaaggctgtggaagagaaggtcaagaagagagtagagaagaaggccaggacgttcgggcagaacgtcaccttggaggacaatgccactgctggtgacagcgagtgcaaggtcgatcccaaagtgctctccaagctgtatgatcagtgggtgatgccactgaccaaggatgtcgaagtcgagtatctcctgcgccgcctcgattgatcacccgattagttgtagctgcgaactttatgtacgcgtgggtttcagtttgctttgcacatgccctttatggctttatcgttcaaactcaactacgagagaacgttaccaggatctggccttcgtctttgtcagcctgcttgcccgtcatctgcatgagtagtccaactgtaagtgacgcttggtatggaatgtaagaaaagtaatacaactggttacatgttatcttt

SEQ ID NO: 271870 - DNA, 680 bp, Zea mays
aacaacttaggttctgaaatccatctgttggaggagcaaggccattcaagtaaaggaatacttgctctggtcttcttccatgggcggtgccgtggaccacctgattgtctcacgtatttgaccagcaacaagggacaaagtttggagctgtgtgaatggtgtggaggcgacaacggtcaagagcatttcatctgatcccttttctctgatggatatgctgatattcaaggctgtggaagagcaggtcaagaagagagtagagaacaaggcaaggatcttcgagcagaatgccactgatagtgaagtgcaaggtcgatcctaaagtgctcttccaagctatatgatcattgggtggatgccacacagccaaggatgtctgccttgactaatcaccgattagctgtagctgtaaattttatgtatacatggtttcagttgcgctcgatccaattgtcttaaccttgaatggacattttgatgtttctttcatgaatgttcaggtcaacggcaagataaaccaattgcgttgtatgagttttagatcataactcaagttttttgtagatcttggtgctatttcatatgatgtgtcatgtttcagtgattgctttatagtgaacccgtaagatgtaaaatgacctttatgacagaaccatatgtaataacagagtattctgagg

SEQ ID NO: 271871 - DNA, 588 bp, Zea mays
gctgtgtgaatggtgtggaggcgacacgggtcaggagcatttcatctgatcccttttctctgatggatatgctgatattcaaggctgtggaacagcaggtcaagaagagagtagagaacaaggcaaggatcttcgagcagaatgccactgatagtgagtgcaaggtcgatcctaaagtgctctccaagctatatgatcagtgggtgatgccacagaccaaggatgtcgaagttgagtacctcgtgcgctgccttgactaatcaccgattagctgtagctataaattttatgtatacatggtttcagttgtgttcgaaccaattgtcttgaccttgaatggacattttgatgtttatttcatgaatgttcaggtcaacggcaagagaaaccaattgcgttgtatgagttttagatcataactcaagttttttgtagatcttggtgctatttcatctgatgcgtcatgtttgagtgattgatttatagtgaacctgtaaaatgtaaaatgacctttatgacagaaccagctgcaagaacagagtattctcaggaacctttgttgaagtccatgttatcaagtttcctagc

SEQ ID NO: 271872 - DNA, 230 bp, Zea mays
ataggcttgacgcagagaccccatctcatctgcgctcccgcgcgtggcctaacgctgacggagccagaagcaaaggagaggattccacaagcttcgagttgccgaaacattttgttaaatctactgcttgtgtgggatcattagtgcaaatccggtgctcgcgcgtgcaggctgtgctacccatgcgtcttggctattgtgaataaaaggtttcgcctggcgcatctgtc

SEQ ID NO: 271873 - DNA, 917 bp, Zea mays
attcaggcagagcagaacgctaccataatgccttccctttcttcgcagggtacgaagcccagaagcttccggaagccagcccaagccatgaacgccgccagcaccgccgccgcggcccccgcgcctgccgcgaccgtgcaggtgccgcgcgggcaggtggatctgatcgacttcatcgactggaccggcgtcgagtgcctcaaccaggactcgtcccacagcatcgtcaacgcgctcaagcagagtttgagagacgacgaggggctgtacctcgccagcgattcggacgagcagctgctgatctacatccccttcatgcaggtagtcaaactgcattccgcgctattcaaaggtcccgaggaagagggccccaaaacagtaaaactcttctccaacaaagagcatatgggtttcagcaatgtcaatgactatccaccaagtgacaccctcgagctatcatccgatcatttgatagagaataaacttttgccactaaagtatgtcaagtttcaaaatgttcgcagtctgactatatttattgaggacaaccaaagtggaagtgatgtctccaaaattcacaagattgctctttatggaacaactgtggacacgacaaatatgaaggatctgaagaagatagaagagcactgagacgattttaaggctgagcttattccagtccagtgggtgcatggcatactagaagcagtttagatgttgaattgagcaatttctagttgaccctgcaactttccccccctatttttatacatgaggagttaaaagagtgcgagtctggtgatgccgaagctattacctcttggtatcttgtaatcctgcaatttatttatgtggcttgggagtgacagtcagacgatccggatccattttatgaatgaatcaaaattgctccatgc

SEQ ID NO: 271874 - DNA, 460 bp, Zea mays
cgctcgtccacctacccggacgcgcgcacgcaaagcagaacgctcccctcccggccttcccttcctccccgccctccgaagtccgaaggccagaagcttccggaagccagcccaagccatgaacgccgccagcaccgccgccgcggcccccgcgcctgccgcgaccgtgcaggtgccgcgcgggcaggtggatctgatcgacttcatcgactggaccggcgtcgagtgcctcaaccaggactcgtcccacagcatcgtcaacgcgctcaagcagagtttgagagacgacgaggggctgtacctcgccagcgattcggacgagcagctgctgatctacatccccttcatgcaggtagtcaaactgcattccgcgctattcaaaggtcccgaggaagagggccccaaaacagtaaaactcttctccaaccaagagcatatgggtttcagcaatgtcaatgac

SEQ ID NO: 271875 - DNA, 1239 bp, Zea mays
attggttattcagacttgctggaagctcgtggtctatcactttcgtcagttctgatgaagcaactcagaccctctgttgagcaagcattagattccaatttgaggagaattgaagagagtactgctgctttagctgcagctgatgactggatactcacctatcctccaactggtatacgtccactggctagatcatctggtaatctggcactccagccgaagctctcaagcagtgctcaccgtttcaattcaatggttcaggatttctttgaggatgttggactcactggttagcttacacctgggtggttccgcgatggatgggcttctgaaaatgttcaactcgtatgtaaacttgctcataatggaaactggttgcatgtaagtccgcggcaactggccgaatgtgattgaggagcatcatctgaagtactcggggaactgtcaggtaaacgacatcctggacattggctgctctgttggagtaagcaccagatacctcgccgagaagttcccatcagctcaagctgttgggctcgacctatcaccgtactttcttgctgtggcggcacaaaaggaagaaaaactgtcacggccaaagcctattcgctgggttcatgccaatggtgaagcgaccgggctgtcttcagattcatttgaccttgtctcccttgcttatgtgtgccatgagtgcccagcacgagcaatcacgggattagtgaaggaagcattcagggtccttcgcccgggaggaacaatcgccttaactgacaattcgcctaaatccaaagtgcttcaggaactatccccagttttgttcactctgatgaagagtaccgagcctttcctggacgagtactacatgctggatttggaggagacgatgagaaaagtgggctttgttaacgtttgctccgtcctgacagaccccaggcacagaacagtcactgcaaccgtgccttactaattgggtcagaccatcaaatcccaagcccggccggtgtacaacaattgactatttgaaattttgtatccttactggtatggttgcacctgtataaagtagagcaatctgagtgaaacaacaaatcgaagtacaccaatttaccttccacgcatggacattatgaagtccaacactaggactgttatggtcagatgattcagggaaccaatctaaaaaaaaactcatgtgatattgtagccaggaatcactttcatgaaccttaattaactctg

SEQ ID NO: 271876 - DNA, 595 bp, Zea mays
ggaccgtggcatgcgtgtaggacggcggagaagtcgaacatcccgtggagggagatgacgaaggaagtgctggagtcggacgtgtacgaggtgttcgagagaatccaagacccaaacctcgtgtaccctgactactatctcaacccgtttcatgcctacgacgaagggaatctatcatggctggctgcaacagaggccgagcctgcaacaatgtcgatcgcaaagagggccatacctgaggctacatcaatcgaagaggccaaccaaatcgtccgcggcaactggctgaatgtaattgaggagcatcatctgaagtacttggggagctctcaggtaacctggacattggctgctctgttggagtaagcaccagatacctcgccgagaagttcccatcagctcaagctgttgggctcgacctatcaccgtactgtcttgctgtggcggcacaaaaggaagaaaaactgtcacggccaaagcctattcgctgggttcatgccaatggtgaagcgaccggcctgtcttcagattcatttgaccttgtctcccttgcttatgtgcacgagcgataaccggattggtgaaggaagcattc

SEQ ID NO: 271877 - DNA, 537 bp, Zea mays
cccgggggctcttccactccgacgccgcgctgctcaccgacccggccaccagggcgtacgtccagcgccaggccacggggctcttcaccgccgagttcttccgcgacttcgccgactccatggtcaagatgtccaccatcgacgtgctcaccggccagcagcagggcgagatcagaaagaaatgcaacctcgtcaactgacaaataatacgtacattaattgctgctggttttgacgatgcctttcacttacgttcatccacttaattcatgcatccatgttggttgggttcattcaattattatattcgttgcttacctttacttttgcttggttaatcttaattaaatcgtgtgagttttcttttcttttcttgagtatatatatgtatgtacgtagagcgtgatgagtgccttttcaagtttattgtttttttttactttttcctctcgtgcatatggttcaaatccatgatgatgatgtaatgcatgtaattaataatgacaatcaagtcaataaacacacatgcaatttttt

SEQ ID NO: 271878 - DNA, 1391 bp, Zea mays
cggacggtgggaaaggagaggcccgcgactgtagtgggattgtgggaagatgcctcgggatggcgcgcaggcggcgccgccaccggagcgcggcgagatggacgaggtggtagaggcggacccggatacggaggcggaggatcaggaggagaggtgggcgaggctgctgccggagctgctctccgacgtggtgcggcgcgtcgaggcgtccggcggcgagcggtggccggcgcggaaggacgtcgtctcctgcgcctgcgtgtgccgccggtggcgggaggccgccgtctccgtcgtgcgtccgccggcggagtccggcaagatcaccttcccctcctcgctcaagcagccagggccaagggagagaccaatgcagtgctttatcaagaggaataagaacaactctacattctacctctaccttggcttcacaagttcacctgtgtataaagggaagtttctcatggctgctagaagatttaggcgtggtccccatactgagtacattatatctcttgatgcagaggacttatcacaagggagcaattcatacatgggaaaactgagatctgatttctgggggacaaacttcaaaatatatgatagcaagccaccatatgacggcgctaaagcatcaagtagtcgatctagtcgtcgtttcggaagcagaaggattagtccccaagtatcgtctggtaactatgaagttggacaggtttcatacaaatacaacttgctcaaatccagaggccccaggagaatgaattgcactcttgaatgcccttcagcgcaagagacctgggaaaactcactcaagacaaagttcaggcgccccctgggccccacaactttacgaaataaagcaccccgctggcatgagcacctgcaatgctggtgcttaaacttccatgggcgggtaacagttgcatcagtcaagaatttccagcttgtggctgctgccgaccccagtgagcctactaccaacgtggatgatgaaacggttctgctgcagtttggtaaggtcgatagcgatatgttcacaatggattaccggcaaccactctccgcgtttcaagcatttgccatcagcctcagcagctttgggaccaagctagcctgtgaatagcgatgcagtttgatgctcttcgtgtggctatatggtttgtgttggtggttgcttgcttgtttcttgttgttacgatgtgatccgttcttcgttttagttgagtatttatgtactatttgtaccacaagagatgtaataaactattgtattgtcaaacggatttgttcaaggaaattatgtgtaatgaacttttgctctagttccatgcaaaagacatttcaatgttcatctgttcatggccaaataatacttaaaccttccccat

SEQ ID NO: 271879 - DNA, 465 bp, Zea mays
ttgttcgcggttttgcacaagcgagcaaagagagggagagagagaaagaaaagaaaagaaaagaaggggagggccgcgactgtagtggggagatgcctcggcatactgcgcccgcggcgccgccatcggagcgcggcgagatggacgaggtggtagaggcggatccggacacggaggcggaggatcaggaggagaggtgggcgacgctgctaccagagttgctctccgacgtgttgctgcgcgtcgaggcctccggcgccgagcagtggccggcgcggaaggacatcgtctctttcgcctgcgtgtgccgctggtggcggaaggccgcagtctccgttgtgcgtcctccggcggagtccgccaagatcaccttaccctccttgctcaagcagccagggcctagggagaacccaatgcaatgctttatcatgcggaataagaactctacattctacctttaccttg

SEQ ID NO: 271880 - DNA, 689 bp, Zea mays
  unsure (1)..(689): unsure at all n locations
ccggnccggaatttccgggtcggcccaacccttccggaagcggccgcccactcaaactacggcctgtttactctcctgccaaccgatgtggtaggggggctccaaatttgcaaggacaagaacgctcagcctcaactgtgggaatacgtagctccgttgaaaggcggatttatcgtcaaccttggcgacatgctcgaaaggtggagtaaccggcgttttcaggtcaaccttacatcgagtggtcctagatgggcgagaacgcttactcgatagcctacttcgtggaaccaagccacgactgcgtggtggagtgcctgccgacctgcaagtccgaatcaaatcctccaaagttccctccgatcacctgctccgcgtacctgtcccagcgctacaaggacactcacgcggatctgaaatcctacgacgacagcaaggcctgatcagaggactgccctctcctctctctgtctcagccatcggtacgtacgtacgacgtgtatcctgcgataacactgggtggaggacggcagtacagtataggtatagacagttctgctggtgccaccgtgccaccgtccatgtgttcatgtaagatgacgagaagaatcaagaacgggggccggcgttgaggtccccggccttaatctattctaggccttgttgttgcaaaaaaaaaaaaaaaagaaaga

SEQ ID NO: 271881 - DNA, 457 bp, Zea mays
actctctcaggcatcctcgatcggatggctggagccaggcagatgctcgacatctgccattcatcaggatacatatatattatgttctctgaccaattccgaatctttacagctgcgttgtatatatctccactgcccaggttccctccgatcacctgctccgcgtacctgtcccagcgctacaaggacactcacgcggatctgaaatcctacgacgacagcaaggcctgatcagaggactgccctctcctctctctgtctcagcgatcagtacgtacgacgtgtatcctgcaataacactgggtggagggcggcagtaccagtgtaccacagtatcagtataggtatagagagttctgttggtgccaccgtgccaccgtccatgtgttcatgtaagatgacgagaagaatcaagaacgggggccggcgttgaggtccccggccttaatctaggcct

SEQ ID NO: 271882 - DNA, 552 bp, Zea mays
  unsure (1)..(552): unsure at all n locations
gccgtcctgtgagtctgtgtctgtgaccggctgactctgccagccgcacgcacgccctcgcgcttggagcgttgcgaggatcggctcacaggtcacagctcagtctcagatcggccaccggccggccgggcaccggaccacagctgtctgctgcctgctccgcttgccgccattgctggccagcgcgagcgagctgccgggaccgcacacggaggtagcgtctacggggcggcaccgcgcgtcgtggttcgcgctcttgaagctggatctggaccgacggtcgatcgagcgagtgcagctgcctgcgagctcttctcccgccgcgatatgggcgccgtgagctgccggaggcggacgagccggcgccgctgncacgccgccgccctactcgccgncgcaatcttcgccgcggccttgtgttgtggcggcagggcggcggcccatccgtctgccagcagcggcgctggcgaggaggcgagtagactcgtcgacggcaattgccgccgccgccgaccgagtcctcccagccgccccgcggcggtggctgctggc

SEQ ID NO: 271883 - DNA, 705 bp, Zea mays
gtacatggtatcaaactgtgggatgagtgatgctatcggtcctgtgcatgtgaaagagcgaccaagtgtagagatgcaatcaaggatagatgctgaggtggtgaagctcctaagagaggcttatgggcgggtcaagcgattgcttaggaagcacgagaagcaattacatgctctggcaaatgcgctgctggagcgtgaaacgcttactgcagatgagatcaacaaagtagttcacccgtaccaagaagagccccatctttccttccaagacgaggagtttgccctcgcttaaagattcttttgttgcatcaagatatcggtcaccacccgtgaattgtaaatccgtgtacagtaagtggcgtctagatgagccatggaagttccttcagatgctctcttctgtaaaacagggcgcaacacctatggtaaattagaagattggtgttgcgaaagctgatgcctgcttattgacaattctttggatggaaggcttcccgggaaggctctgggtttgcaaaaccctctcatacttttggtttagttaggatagatgtaggtttaacaccgcatgttctgattgctaggtttctggctagggcaacatgttgatcatgttcttttcacttttttattgacattttctgtaaggaaatcgtacatgtaacgattgttttatttgtcaaacaagcactgcccgtttttgtc

SEQ ID NO: 271884 - DNA, 858 bp, Zea mays
tgtgaggagaatgttgtagatgttgattttccttttaggaaggtgaagctctccgatgtggtagggggaatggacaatgtgcatatatgcttctgattgcagtgagattagcctcgtccaagttatgggatctgccatgaactagacaagattataagtgtacagaggccttacatcaagagagtaccagattgccataaggcagtaaagtctttgaggaaagtgaccttatgagaagcttgagaaaatcaacttgtgtgtgagacgtcttgtctacttgtgctaattagtcatatgatatttttagtcatgccactagacaagatcagaagtttaaagaggttttacatcgagtacaagatcgccataaggaagtacaagtctttgaggaaagtgaccttatgaaaagtttgagcaaatcaacttgtgtgcgagaagttttgtctacttgtgctgatcagtcataccttggaatattgctgaactgttgcctttgttgctcattggcttcaatacttcatacaccatcaaatgagtcatgtgcaaaattcttcgaagcattagttcttgctctagaagaacttcatcagctagaggcggggtcgaatcagcaacgacggctgacatgacactacccatccagttgctcactgctcaggttatagcgaagaacattgtcttagctggatacaaggagatgcagaagctctgagttttgaggatggatctatggatggttacactatcgcatttgggatcagagatgtgacgcacgttgagaaagctctatcagcagcgtacagcaatgaataggtcggctaatttagaaccctaacaattattattgctcatgtttaa

SEQ ID NO: 271885 - DNA, 1208 bp, Zea mays
ctgacgcgtgggctcccatgccaccagcttcggtacacattgctcgtatccattttttcctgcttatatagatcctaaaatctcgtagttcactagggtacaagcaggttcgcgaagaggataagagcaaattggttggcaacgtgttcagcagcgtggcttccagctacgacctcatgaacgatctcatgagtgtcggcctgcataggctgtggaaggacaggcttatttccaagctgaacccctttccggggatgaagcatctcgatgtggctggtggaacaggtgatgttgcttttcgtgtactggaaagagttaagagtgtgtgtcacagagctatgcagggtactcttactgaaaccgaagaaggcacccatatttatgtctgtgacattaatccaaatatgctaaatgttgggaacaagcgtgctgcagaaagaggtaggttatagcgaagaacattgtcttagctggatacaaggagatgcagaagctctgagttttgaggatggatctatggatggttacactatcgcatttgggatcagaaatgtgacgcacattgagaaagctctgtcagaagcttacagggttctaaagcaaggggggaggttcctatgcttggagttgagtcatgtggatgtccctatttttaaagagatttatgatgtttactcgttttctatggttccggctattggagagctggttgctggtgatcggcagtcgtaccaatacttggttgagagcatccgtcggtttccgaatcaggaaaagtttgctcagatgattcaggaagccggattccagagggtggaatatgagaacctcgtgggtggtgtagttgccattcattctggactgaaactgtagagctgaatacggatggatgttttttcatgcgtgcaccgcttctacaattagtagtatttgttttttaaattaattctataataggttcggtggcttgtaaaagcagctggtgctggctgtcagcatcagcacaataagtagaataagtagtatttgcgagaagtatgtgctggagcagtagcgtcagtggctattttggcttttaagccagctgacctcttccatttgtaaagctttttcttggaaacgtgaaaccatccagaacatcaaattagtcttatcacatacctcctgcaataaccccaccaaaaaaaaaggcggccgctcgcgaaaga

SEQ ID NO: 271886 - DNA, 917 bp, Zea mays
  unsure (1)..(917): unsure at all n locations
cccacgcgtccgcccacgcgtccgctgtcgcgtgggtgtgatttttctgatcatgagatggaccagagttccaatctctgttggtttagatgaagtggcaagtttttgttgtgtgtgtgtctctgataaaaggcacccatatttatgtctgtgacattaatccaaatatgctaaatgttgggaaaaagtgtgttgcagaaagaggtcccgagcatgaacttttctaatagattttgttgcctctgtctcaagtgtgggttatgttgttcaacagttggtttttatttccaggttatagcgaagaacattgtcttagctggatacaaggagatgcataagctctgagttttgaggatggatctatggatggttacactatcgcatttgggatcagaaatgtgacacacattgagaaagctctatcagaagcttacagttgatggttctaaagcaagggtggaggttcctatgcttggagttgagtcatgtggatgtccctgatttttaaatagatgaaaagtttgctcagatgattcaggaagccggattccagagggtggaatatgaaaacctcctgagcggtgtagttgccattcattctggactgaaactgtagagctgaatacagatggttgttttttcatgggtgcaccgattctacaattagtagtatttgttgttttttaatgaattctataataggttcggtggcttgtaaaagcagctggtgctggctgtcagcatcatcacaatatgtagaataagtagtatttgctagaagtatgtgctggagcagtagcgtcagtggctattttggcttttaagccagctgacctcttccatttgtaaagcttttccttggaaacgtcaaaccatccaaaacatcaaattagtcttaaaaaaaaaaataaaangaa

SEQ ID NO: 271887 - DNA, 788 bp, Zea mays
aatcctggcgcgctagaggcggggtcgaatcagcaacgactgctgacatgacgctacccatccagttgctcactgctcaggttatagcgaagaacattgtcttagctggatacaaggagatgcagaagctctgagttttgaggatggatctatggatggttacactatcgcatttgggatcagaaatgtgacacacattgagaaagctctatcagaagcttacagttgatggttctaaagcaagggtggaggttcctatgcttggagttgagtcatgtggatgtccctacttcttttttcagttatgatgcttactcgttttctatgattccggctattggagagctggttgatggtgatcggcagatagaagacgggcaacatgctaaccaggcctgtgaaccttaaaccttggcaggaaaagtttgctcagatgattcaggaagccggattccagagggtggaatatgaaaacctcctgagcggtgtagttgccattcattctggactgaaactgtagagctgaatacggatggatgttttttcatgggtgcaccgcttctacaattagtagtatttgttgttttttaatgaattctataataggttcggtggcttgtaaaagcagctggtgctggctgtcagcatcagcacaatatgtagaataagtagtatttgcgagaagtatgtgctggagcagtagcgtcagtggctattttggcttttgagccagctgacctcttccatgtgtaaggcttttttcttggtgacgtgtagccatcccctcc

SEQ ID NO: 271888 - DNA, 1557 bp, Zea mays
gcggggacctcgtccgaggatttgatcgaggcgaccgccggctctgaggttgaccaggcctccgctgcgggcaggggtgcaggcgctacggatgcggaggcaaacggtggcggggccggcacgtcgggtgaacgggtggcgggtgaccgcgcgtaccagcgctacgacgtgcaccacgttgcgcggtggttcgaacagatattgccgttctcgctgcttctactcgtcgtcttcatacggcagcatcttcaaggtttctttgtcacaatttggattgctgcggtaatgttcaagtcgaacgatatattgaggaagcaaactgccttgaagggcgagagaaaaatatctgtactcattggtattacagtaatcttcatgattcatgtgtttggcgtatattggtggtacaggaatgatgatcttctcagacctttgttcatgcttcctccaaaagatataccaccattctggcatgcgatttttgtcatcatggtcaacgatacaatggttcgccaagctgcaatggctgtcaagtgcatgctgcttctgtactacaagaactgcagaggtcgtaactaccgtagacagggccaaatgttaacccttgtggagtaccttctgcttctttatcgtgctttgttgccaacttctgtttggtatcgtttctttctgaacaaggaatatgggagtctcttctcatctttaaccactggactgtatctgactttcaagttgacttcggtagttgaaaacgttcagtcattcttggccgcggtgaaagcactgtcacgtaaagatgtgcattatgggtcttatgcgactgcagaacaggtacttgctgctggtgatatgtgtgccatttgccaggagaagatgcatgtgcctgttctccttcgctgtaaacatattttctgtgaagactgggtttccgaatggttcgagcgagagcggacttgccccttgtgcagagcattggtaaaacctgctgatatccgctcattcggcgatggttctacaagtctattcttccagttgttctagactgcaagcggtaaaatcctaacataacaatggacgagctattgcatgaaaactcgagtggaggtccttttaacgccatcatgtgaaaccatcttccgcaatgttgagatcaatgtgagaaggttcatgacagtcacgacagtgcagtcgttatttgtttatatattcaaccaaatagtttacagagctttttagttgcaacagaggcaaaatgtttccagcagactgctttcagagcctttagaactctgctggacaaacaatttgatcgttgaggtctgctgagccgacaaccgtatgcctcctgtaaaattctggtatttttttttaattttttttttgcatatgtgggcttacgtgggtgtaactgaaatttgaaagtaccgcttgcacagcaagaattgccggtgggggttgaaagtggtaaatgaatgtaactgtaaagcgttgttacatgaagacaaaaatttccccccgttgcaacatagtaaatgctgacagacgcgacttgtgttc

SEQ ID NO: 271889 - DNA, 830 bp, Zea mays
  unsure (1)..(830): unsure at all n locations
ttctctcacgcgtccgggagaagaggataagaggaagcgagtgggactgtgagtgagttggaaggaggggggtggcaatggcgttgcggaatggtggtggtggtggtggagcctgtcccgcggcggttgtgctggtggctgcggccgtcgcggcgctgctgggcgccggggtggcggcggcgaccaagttcgacgacgtggtgcagcccagctgggccaacgaccacgtggtgtacgacggcgacctcctcaagctccgcctcgactccagctccggcggagggttcgtgtcaaggaccaagttcctgtacggcaaggccagcgccgacctgaagctcgtgccgggggactccgccggcgtcgtcacggctttctatctgtcgtcggccggggacaagcacaacgagttcgacttcgagttcctgggcaacgtgaccggcgagccgtacctggtgcagaccaacctgtacatcgacggcgtgggcaaccgggagcagcgcatcgacctgtggttcgaccccacggccgacttccacacgtacgccgtgctgtggaaccccagccaggtggtgttcatggtggacgacacgcccatccgggtgtacgagaacgccacgctgcaccaaggccacggccacggccaccaccggcacggcggcgcggcggcggaggccaacggcaccaacaccaccaccacgacgttggctgctgccccggcgccgttccccgggccgcagccgatggccgtgtacagcttcatctgggaacgcgacgactggcgacgcanggcggcgcgtgaagacggactggtcgcacgcgccgttcgaggc

SEQ ID NO: 271890 - DNA, 676 bp, Zea mays
ttgctgagagcatgtggctgcacacacatctaatccaggatatgcttgctatcgtgtcgacagacattcaaaggtgctgtgcactatgcctggacaagtgttccaacatatcccagtggtgtcattggatttttgctatgtgcaaaagaaggtcgtgcagtgaacttcttaactcctgtgaatccaattgagaaaatagaaggaacagcaaaagctggaagggaactcagattttacaattccgagatccatagggctgcttttgttctgccaacatttgtaagaagagaactggaagcatataccactcctagtacctctgctgaaaacgagaaaccgaaagaatcggtgtcagaaccgcagaagataaagatattgtcaaacaacgccattcttacagcttcctagccctgagccgtactcaatcttgctcggtatagttgtattctcacagaataaatcagtcactggcttttgctgacaccgcacgagcagctttagtatagaatgatgatcgattgaataagagggtggatattgaactgatgtaatgcctctgccgaaacaatatgtctccctatcttgttaggcgtgttgtgtgttgtgcacgatttcagctgtagcttgtaaattgtacgacccgttgatgtaatgtataccctgcgtttgtgctgag

SEQ ID NO: 271891 - DNA, 401 bp, Zea mays
ggagaacgagttctacgtcaagtacctggagccgcggcaccccgggatggaggcggacgacgtgggctacacgacgaaggtgcgcgacttgcgggacctgctggcggcggcgccggcggcgagggccaaggagtgcccgcccgtgcagaacctgctcttctccgagtgcctgctcgccatcaacgacctgcccaacgacctctacgacgtggcctgggacgtggtcctcatcgacgggccgtccggctggaaccccaactcgcccggccggatgccgtccatcttcaccaccgccgtgctggcgcgctccggcgccaccgcggccaagggccccactcgacgtgctcgtgcacgacttccagttcgaggtggcgcaggtgctgagcagggagttcctgtgc

SEQ ID NO: 271892 - DNA, 473 bp, Zea mays
gccggactcatatccattattcagtttctctgcggatgagtggcttggatcgcactgtgccatctgcgcgtcgaacagatgcagtgatggatgggcgctcgtcgtcctccagctgtaccgctgtgcgctaggacctgcgtcggctatatacggctgttcggcagtgagctgccaggttgtacagtctgggtaacagcctaacagggtatgcttatacctctcggttttcgttctgtaatacgtacgtattatttgcgcttgccaggagactgttcttcggccgtgtgtatgtttgtagatggttgcaacattggtaaaaaaaaaagtagccgtcgtgaatgtaaatttgtattcgggctaggtcgcaaaaatcctcgccgatgaccagaaggctcacacgtatctggacactgaacgtatgaacccttgtaactatttttgcgccagaataaccgtcttgtgccttgtcgttt

SEQ ID NO: 271893 - DNA, 415 bp, Zea mays
aacaagagtagtagtcggagccgtccgtagtagctagcgtacgtacgtgtgaccgattcagcgaggtcgccgtttgtgtgtcgatatatatggcgaggtcgccgtttgttccgatggatcaggggaaagagcaaggcgccggacgaggagcggccggcaataataaggagcggcagcagcaggagcaggagcaggaggaggtgctgctggtgcacagccaggtgcggcggatcaagaaggaggacgaggaggccttcagggagcgcctcctgaagctgcgcctgctggagacccggcccagcgccggcggcctggcctggcgagccccgcgctccctgtcgccgctccgccgtgccggcagcgccatcatcccggtcccggtgagcgagtgactagtagcgagcatccgtcgaca

SEQ ID NO: 271894 - DNA, 463 bp, Zea mays
cctacgcgttcgcccacgcgtccgcggacgcgtggggtcggagccgtccgtagtagctagcgtacgtacgtgtgagtttgtgaccaattcagcgaagcctcgatcatcgttcgcttcgcttcgcttcgcttgtgtgtcgatatatatggcgagatcgccgtttgtcccgatggatcaggggaaagagcaaggcgccggacgaggagcggccggcaataataaggagcggcaggaggaggaggtgctgctggtgcacagccaggtgcggcggatcaagaaggaggacgaggaggccttcagggagcgcctcctgaagctgcgcctgctggagacccggcccaacaccggcgccggcggcgtggcctggcgagccccgcgctccctgtcgccgctccgccgtgccggcagcgccatcatcccggtcccggtgagcgagtgactagtagcgagcatccgtcgacac

SEQ ID NO: 271895 - DNA, 1055 bp, Zea mays
gcaggagcccaaagaggaggagcccgaggaggcgccggtgcctaaggaggaggagccagaggagctcgagggggtggaggaggagggcgaggacgaggaagaagaagaggaggaggaggaggaatgcgaggatgagaatagcagcggcgcccggaagaagcagcggggtaatgatggcaaaaagaggggtggtggctttacaaaattatgcagtctttccccggcacttcaagagtttgtcggcgcctctgagttagccaggacagaggttgtcaagaagctttgggcatatattcgagaaaataatctgcaagaccaaaacaataggaggaagattttgcctgatgagagattgaagaagatcttcaatgtcaattccattgatatgtttcaaatgaataaagctttgaccaagcatatctggccattgaattctgagggtcctgtctctcctgatagatcaacacccacagagaagccacaaaagagagacaggagtgaaggaaagaagcaaaagggtggctcttcaggagctggatctggttttctcgtgccccttcaactttcggatgatttagtaaaatttatcggcactggtgagagcatgttatcacgatctgatgtcgtgaagaaaatgtgggattacataaaagggaacaacctgcaggatccttctgaccggaggaaaataatctgcgatgagaagctgaaggacctatttggagtggaaacattcaccggctttactgtttcgaagctgcttgcccctcattttaccaagaccaagtagcaacctgccatccacatcttctaaaaccaaaaaggcttggtaattttgtttttccagaatgtgtaatcatggaacagttagcagctatgtgggtggtgtgaatttttttttgctcacctatggaagtcgatggcactttttcgaacattaccagataaagtaagctccttccccaatgtctaatggaagttagccactggtccctaaccatttcgcgctctccaaaaatgtagggacataaaattatctgtccggtgtggcttct

SEQ ID NO: 271896 - DNA, 677 bp, Zea mays
tgagactgtcggagaactcgctggagggaccaatcccgccggagctcgggcagctctcggagctgcaggtgatacttgacctgtgccggaacaggctctccggcaagatcccggcgtctctcggcggactcgtgaagctggagcggctgaacctgtcatccaaccggctggatgggcagataccgtcctcgctgctgcagctgacgagcctgcatcgcctgaacctatccgacaaccacctctcaggcgcggtgcccgcgggtctatcgggcttcccggcggcgtcgttcgtcggcaacgaactctgcgccgcgcctctgcagccgtgcgggccgcggtcgcctgctactgctaggcggctgtcgggcacggaggtggtcatgatcgttgcgggcatcgccctggtctcggcggtggtgtgcgtggcgctgctgtacaccatgctgagggtgtggagcaactggcgggcggtgtcggtgtccaactccgatggcgaggagtcggcacatggtggcggcggggggaagtgggtggacggcaagtacaggaaagtggggtcatcggtgtcttggtcgtcggaacagaagcacaactcggggtccgagacaaccagcgtgctccatggcaagtccacggaggccgccggcgccgggaagagctagctgctcgcggcgtgg

SEQ ID NO: 271897 - DNA, 581 bp, Zea mays
  unsure (1)..(581): unsure at all n locations
ccgaccggaggagctgccgccggcgatgaagcacgcctaccgagtcatcgttgccgaccctccctatctgaggaaatatcgaggagaaatggctattattcgttggttgatgatgcagagcaaggagtgcttggaaaaggttgccaaaacagtatctttcctcgcacggcctgaaggttcattcctgctgctgctcacaggggaagttcggatggaccgggcattggagctgctgaatgttcgtccctgcggtttcaggcctcgccactcgaacaaactaggcaacgagttccggctgttcacgaattaagatcctgctgacagacttggtggttgggagcaaagtgatggtgcccccatttaactataaactaatacaatttttgttctagagctgttccatctttatgaacatgttgcatctttgatccacagctcactgatccctccaatttaaattgtagtgacaattatttgaggaatctgtgtgctatgatgtatgattaatcaaacatttacactgttagtgtacctcattttaatttcattcaaaaaaaaaaaaaaaaaaaaaaaaaaanaaa

SEQ ID NO: 271898 - DNA, 579 bp, Zea mays
cacattgtgggatcctgataataatgcgcttgttggtgtcattgcagaaacactatcgccagtgacaaatctttctttcgttgggacatcagtgtttttgatgtctctatgtcagagttcaagaccacagattgctctatggaatgtttcaaatctttccatgcagtggtcttacagcatttatgcagaagctgcatgctgttcgccagatgggagtgaatttgcagttcttgctcttcttagttgtcctgatggagaagcatcaacacaacaagatggagtaattcttctttttgatgcagaaagctcaaaccccattgcctcctggtcggtaaagaaggcatcgggtggcagcatttcttttgtaaaaggtgacgtccctttggatgcaaatgctgatagttcgagagacaaagagccaatgttgcttgtttatgtaaatggttctcatgaatacgccatctttgatccccgggagagtgaggaggtggtcattagcaagaacaagcacaagaagattcaagctgaggaacctgcaccaatcggctacccttctatttacggagagcttacaaaact

SEQ ID NO: 271899 - DNA, 721 bp, Zea mays
ccttcgtttccgcgcgtttccaagggtacggtccacttcgctcgcaaccttccccagccatggcgaccgcgacgcggaggctgctccccgcgctcctcaagaccctagctccagccggcgcgcgcggcctctccaccgagaaggctgttggtgcagccgccgtcgtcggcagccacaccgctaagtggatgcaggacacgagcaagaagtcgccaatggaactgatcaacgaggtacctccgatcaaggttgatggtcgcattgccgtctgtgaaggggcttctgaaggtgttggacttggccacccaatcgagtacatctgccttgatctggaggcacctaatgtgtgcaagtactgtggtctccgttatgttcaagttcaccatcactaaattgggaagatactgccgtctaccgctgcagaagctgagttgaggagtttatgtgcacacacatttgttccacaatgttctgtagtgtactttgtactatgcttgcgggcaaaatattacctttgatgatcatcctcttctcgggcgatcttttattaatcctgtcttagtatggttcatttttctacagatgaattgtgctcctttttcagaatctatacaagctgtgtgtattgaagttttactctgaataagcatggaactaactctgagggcaatttaatctcagaagttctagttttctggagttccatgatccagacgttttc

SEQ ID NO: 271900 - DNA, 713 bp, Zea mays
cccacgcgtccgggcgttccatctgactgtacacgtcgagaagtttcacacatcttccgaccatttgttggctttcgtgaggttagacttgtaaacaaagaaccgaaacatcctggtggtgaccctattgtcctttgttttgttgattttgcggaacctacacaatctgctattgcattggatgctttgcaaggctataagtttgacgagcatgatcgcaattcacccaatctgcggctgcagtttgctcgtttcgcaggtccaaaggggaattcaggacctggtggtcgtggtaggcgataagttattggcgttcctttttgccaggccagttccgtggtgaatacccatgtggatttgatatcgcaccataggaataggattggtagttttggccttgcgcatccagcgttgcgacccttgtttcgctagatgttttttaggcagaatgcactagctggacataataggtccaaacatttgtagcatcgtgcattcgtgcaggcgtaaatcgtaatgtgttatattgctggagttgtttggaatgtgctgttttgtatctctgaggcagtttggctgtcaaaatccgtgggcttgacgaatatcaacaacctggctgctgttaccttttaaaaaaaaaaaaaaaaaaaaaaaaaaataaaaaaaaaaaaaaaaaatataataaaaaaaaataaaaaaataaaatttttttt

SEQ ID NO: 271901 - DNA, 1193 bp, Zea mays
gccgtgctggtgtagatttccaaccctgcccgcagcgaagggcgcgacgtgcaaggcgtgcaggacgaggccagggccatcagcgcccgggtcaatgcgcgcttcggcacccccgggtacacgccgatcgtgctcatcgacggcccggtgacgccgcaggagaaggccgcctactacgcggccgccgagtgctgcgtgctgagcgccgtgcgcgacgggctcaaccggatcccgtacatctatacggtgtgccggcaggagagcaccgcgctcggagacgacgcgcccaagcggagcgccatcgtgctctcggagttcgtcggttgttccccgtccctcagcggcgcgatccgcgtgaacccgtggagcgtggagtccgtggcggaggccatgaacgccgcgctgcggatgccggaggccgagcagcggctgcggcacgagaagcactacaagtacgtgagcacccacgacgtcgcctactgggcgcggtccttcgactcggacctgcagcgcgcctgcaaggaccatttctcgcgccggcattgggggatcggcttcggcatgagtttcaaggtggtggcccttggcccgaatttccggcgcctctccgtggagcacattgtcccgtcgtatcggaggacggataaccggctgattctcctggactacgacggcaccgtgatgccggagaactccatcgacaggacgccgagcagtgaggtcatctctgtgttgaatcgtctgtgcgaggaccccaagaacagagtgttcatcgtaagcggacgggggaaggacgagctgagcaggtggttcgccccctgcgagaagctgggcatcgccgcggagcacggttacctcacaaggtggagcagggacgcgccatgggatacctccggattggccgccgacttcgactggaagaagaccgcggagccggtgatgcagctgtacacggaggcaacagatggctcctacatcgagcacaaggagagcgccatcgtctggcaccaccacgaggcggatccggacttcggttcctgccaggccaaggagctgctcgaccatctcgagaacgtgctggccaacgaacccgtggtggtgaagagaggccagcacatcgtcgaggttaacccccagggcatcagcaaaggcgtggtggtggacagcctgctgtcgtccatggtgaggacggg

SEQ ID NO: 271902 - DNA, 709 bp, Zea mays
ctcgctgcgcggcgtggtgccgggcggtgcgcggagacgggacgcgttcgccgcgtccctccggcgtctcgatccgcgggttgttactgtcgtcgaggaggaggctgatctcgtggcttttgaccccggcgcgcccgatgaaagcggcgacacggaggcagcgttcctgaaggtgttcggcgagggcttgcggttcttctcggcttacatggactcgctggaagagagcttccccaagactagcaacgagaggctggcgctggagaggggagccggacgtgccattgtagacttggtctcgtgcccggcgtcggagtccatggagcggcgggagacggcggcttcatgggcccgccgcatgcggtcttccggcttctctccggtggcgttcagcgaggacgttgccgacgacgtgcggtcgttgctccgtcggtatcgggaacgctggtcgatgcgggacaccggtttagacgactcggcagccggagcaggcatcttcctggcgtggaaggaacagcctctcgtgtgggcaagcgcgtggaggccatgatagagatccatgagctcgtcgacgcgcaaatgcaagctcggtgagtgcactacatggaccgcagcccgcagcccataggagaagccggcgtggatgcgtcgatccgtgcattggatcgcgcgcacgtgcatgtatgtatgcgagttctctcctcctctg

SEQ ID NO: 271903 - DNA, 438 bp, Zea mays
cccacgcgatcgccctcgcgtccgcattactactttggcattagcagtctgtgagaagcggggagagcagcgcgagagagggcacggtggttcgttcaacaccctagcaagcgcagccctagtccggagccccacggcgcggctagggagccgtgcccggcggccgtcggagccgccgcgcggaccaggcggcggggcgcccagggtcgccgggacgcgcgccatggcgtggtggcgcgcgcgggtcgtcgcgccggctcgccgcgcctggctcgccgtcgtcgccgcgcgcgtgcgccgccgcaccgagcgcgcagggatcgtggacctccacagggacgtgcagacctgcgggtaccacgacgtcgaggtgatgtggggcatgctgggcctggacgccgggccgcccagcgcgccggagcgccggaaccgctcgcc

SEQ ID NO: 271904 - DNA, 630 bp, Zea mays
ccgactgcgaggatgacttctacagcgtgaatggagatttcactccgtctcgtggcagcgcaccggtctaccagcccagagcgcagacggtgatgagcagcatctttcagccggacacgcgcagttccaaatcaccggagccttctccgactggacggaggaagctcgctgagctgctgcaggaggcaatgcaagacggtcccgaagaaagcgccgacgagcagcagcagcagcagcagtcgcgatctgctggtgctgccgctgatgggaagccgccggtgtctgagtccacgtccagctccgcttgcagcaccgtgccaactccggtcgcagtcgccaagagccggaaggagaaggcgtggtacaccggacgctgttgcctgccgagctttgttcatagcctgaccttagacgagagtgagagggggcagaagatgagctctaggccatgtgctgtttgacggtggggctccagtgccctcctgagtcctgccctgagctgtatttagcgcgatatgttatctgaatgcccgattgggacgctgaagctactgtattgagatttgagagtactatatagtaatcaagtggataataggcgctcgttgaaaaaaaagaaaaaaagggaga

SEQ ID NO: 271905 - DNA, 486 bp, Zea mays
tcggcagggcactgcactgcacgcatgcactgacctgacgacgcgcgccacagtccactcctcactcaggcatggcgatgggcgccgcttccatcctactgatgatggtttcgctggagaccctgcttctcgccgccgccgccgccggcgggaccatccgtctgtccagcgatgtcggaggcgttgctgcagaccttgtcacggcgatggcgagggcgagggcaagggcaaagcatcagcttcgcgacgaggagaggccgtggggggaatgctgcgacttggccgtatgcgtcaagacgtacccgctaacttgctcgtgcttcgatcgggttgagcgctgctccgacgcctgtaaagagtgcgtggaaacggaggactcgcgccacgtctgcgtcgacaggtaccgtggcgaccccgggcccaggtgccacgacgaggacggcgggggtggggagtggtcgccgacgccgatgctcgcgagtggca

SEQ ID NO: 271906 - DNA, 693 bp, Zea mays
gacccacgcgtacgaggcaaggcactgcacgcttgcatgcacacagtccacactcagacatggcgatgggcgccgcttgcatcctactgatgatggtttcgctggaggccctgcttctcgccgccgtcgccggcggcgggaccatccgtctgcccagcgatgtcggaggcgttgctgcagaccttgtcacggcgatggcgagggcgagggcaacggcaaagcatcagttacgcgacgaggaggagaggccgtgggggaaatgctgccacttggccgtatgcgtcaagacgtacccgctaacttgctcgtgcttcgatcgggttgagcgctgctccgactcctgtaaggagtgcgtggaaacggaggactcgcgccacgtctgcgtcgacaggtaccgtggcgaccccgggcccaggtgccacgacgaggacgggaggagcggcggacccgctgacgacgacgctggtgggcaagcgacgccgacggcagtgatggcagatgacaagaaagcaggcggcggcgacgacgacaagaagaagaggccgtggaaatgctgcgacgtgcccatctgcaccaggtcctggcctccggtgtgccgctgcgcggacacggtggagccgtgcgccagcactggccagcacagcgagcacggtggagatggcggccccgacgctaccgctgcctcgacacgca

SEQ ID NO: 271907 - DNA, 303 bp, Zea mays
cccacgcgtccgaggcagggcactgcactgcacgcatgcactgacctgacgacgacgcgcgccacagtccacagctcctcactcagacatggcgatgggcgccgcttccatcctactgatgatggtttcgctggagaccctgcttctcgccgccggcgccggcgccggcgggaccatccgtctgtccagcgatgtcggaggtgagcgtgcatagctaggcgttgctgcagaccttgtcacggcgatggcgagcgcgaggacaagggcaaagcatcagcttcgcgacgaggagaggccttgggg

SEQ ID NO: 271908 - DNA, 530 bp, Zea mays
  unsure (1)..(530): unsure at all n locations
cggacgctggcggtgaggttccggccgttcggtacaggtagtttatttcaaacgctcgttttatttcttgttatactatattcttctgcttcctgttcgtaccggtggcttgtgcctttgcggtggcgctcctggatctggatgcagcgagcgcccgtcagcttttctccccccggcacctggcagattcgcgtcatgctggctgagcgctcgacccctcgcgctcggcgccgtcgcctgcaggccagtgcgaggacttctgctgcatcgcttcgcgatgcaaggacgtcgttccagcaggacgattcaagccgtggactgtgggttcttcgtattggactctcgaactgctgattggagctctggaggcatataggcgataataatgcggtgtagattgtgacgatagctgagtatcttagtatgaaatacggaatgtatcgcttggacactgtatcgcgaatcggtggatgagcatgatgtagtccggtgctctnttggatcgatataatgccacgtacatcgcatgc

SEQ ID NO: 271909 - DNA, 559 bp, Zea mays
gtagtttatttcaaacgctcgttttatttcttgttatactatattcttctgcttcctgttcgtaccggtggcttgtgcctttgcggtggcgctcctggatctggatgcagcgagcgcccgtcagcttttctccccccggcacctggcagattcgcgtcatgctggctgagcgctcgacccctcgcgctcggcgccgtcgcctgcaggccaggtccggtttcatcgcatgtcgccgcccgctggtgcttccgtgtcatgggagggagcttcgtttatctttctgaccgacatgtaatgtgctgtgcgaggacccctgctccgctgctacaacgcttcgcgatgcaaggacgttgttccagcaggacgattctgtttggactccggaactgcggtttggagttctgaaggcgaatatgcgataataatgcggtgtaaattgcgatgaaacctgagattctttgtatgaaatacagaatgtatcgcttggacactgttttttagaaactattttaatttataaagggcggtcgctctaaaggattcaagcttacatactcgt

SEQ ID NO: 271910 - DNA, 616 bp, Zea mays
  unsure (1)..(616): unsure at all n locations
tcgcccgctcgtacgcccactcctccgatgagtttgatcagagaaggttcagtcccttttagctccagaacaagttgccctgtttttatttttattaccaggaaaataaacagtccagacgaccatgcatcggagtggtaaacctgaactggtttttgcctgttcagcggaagcccaaatggcagaatcgcaacaacagtagcagcggcagctcaaaagaacccgcgtggaagctcaaatggcccgcttggttgctggtgatgaggaaggaaggaggggtgccgtgcaccagttcgttccgagcaagaagcagatgtctcgttaacttaaaacagagtattcagattccggaatggttgatgggggagtggtacttcttttgtgtagttggggctggttatcctcccatggtgtaaaggccgcggaggaggaggtgcatagaatttgtctcttagcccgttttttattttatgcatggatggatggcccaaaagctggtttctccccctctctctttcttgtagctttgctgttcccgttttcccccctttctttcttttgggtggttctaagctttaactaactggaggaagaaagattcagttagaacgccnaa

SEQ ID NO: 271911 - DNA, 810 bp, Zea mays
cccacgcgtccgcccacgcgtccgcccacgcgtccgcccacgcgtccgcccacgcgtccgcatccatccttggccagcagcctaatgcatcgcctggttccaatcctgggagcaagcagcactcacatacgcagccagcatcgatgaaacagcagccattcccgcaaggccatttcttcatatccaacacctacgctcctccggctccgggagccggaggtgctgctgccctaggcctctaccagaagcgaccaggcgacaagacgcagcagcagcagcagcagcaggcatcgcaccagcagagcgccatgtcaggttcgtccgcaaccccttccatgtcctttggatccgtttcggcttcctctgccgtgaccctcgctgacccagggaaactcttgctcgcagctgccggcggcaataacgtgaaagcactccatccttcatccggcgggtttatgcatctcgcagcccagtctgcaggtggcatggcgcacacccacgtgtcggcggggcaactgactttcggaacaatgccgacgcctttaaaaccgtcaagcgaccagaagcctgctgccggaaaataaacagtccagacgaccatgcatcggagtggtaaacctgaactggtttttgcctgttcagcggaagcccaaatggcagaatcgcaacaacagtagcagcggcagctcaaaagaacccgcatggaagctcaaatggcccgcttggttgctggtgatgaggaaggaaggcggggtgccgtgcaccagttcgttccgagcaagaagcagatgtctcgttaacttaaaacag

SEQ ID NO: 271912 - DNA, 1088 bp, Zea mays
  unsure (1)..(1088): unsure at all n locations
cggacgcgtgggccgggacgaataaggtgcttaggatcgcagagaagggggagaaaggcccagaaatgtggctagagttggagctgaagttagtcgccgatgtaaggattgtaggtgctccaaatgctgggaagagcactctcttgagcgttattagtgctgccaagccagctatagccaattatccttttaccacattgctaccgaaccttggcgtggtctcattagattttgatgctacaatggtagttgctgaccttcctggcttactggaaggcgctcatcgtggttatggtttgggtcatgagttcctaaggcatagtgagcgatgctctgtattggtgcatgtcgttgatggttctgcacaacaaccagaatatgagtttgaggcagttcgcttggagctggagttatttagcccatctttggttgacaaaccgtatgttgtggtgtacaataagatggaccttccagaggcatctgagagatggaatgcatttagggaaaagctacagtctgaaggcatcgaacctttctgcattagtgcaataaacaggcagggcacacaggacgtcattcatgctgcttacaagcttctgcagaaagagaggcaaaggatgaaggaaactgaaggatggagcgggacagaaaatctgaaccacgtgtctgaggcaataaaaaaggaaagacgtgcacccatgaatgagtttgaggttttccatgataagggtacaaatacatggaatgttgtcggagctggaatccagcgtttcgtccagatgactaactggcagtactcggattccttgaaaaggtttcagcatgccctagaggcatgtggcgtgaaccgggctcttacgaaacagggagttaaagagggtgatacggtttataatcggcaaggtatgtatacacactaattagagcacgatgggttgatgaactgaaagaacccacaaaaggacctggcaaggttattctcaagttatagtgacaaagtgttggcaaaacgtgacgagctgcttcagtttgctcagggtgcgatctcagggctaaagatanatgctgacattgcagattagataatg

SEQ ID NO: 271913 - DNA, 382 bp, Zea mays
cggacgcgtgggtggcagtactcggattccttgaaaaggtttcagcatgccctagaggcatgtggcgtgaaccgggctcttatgaaacatggagttaaggagggtgatacggtgataattggcgagatggaaatggtttggaacaacgaaacggatagagcacgcccgtcaaagacgatgaacacgcaagatgatgctgtccgttggcccgaatttggctagagcagcaatagttcttgaggctcttcgcacctgtagaggaagatgccagtgggttgacgtgcatgaagcaccttgcagatctttggcatggttgttttgaggagggccacgggtgggcggcgcggcacatgttgtagagaagttgtaggggaagatgagc

SEQ ID NO: 271914 - DNA, 1254 bp, Zea mays
taaagctcagctgcgggatcaaaagctggggcaatttttcacaatgtgctcccgagcccgtacggcaaggcatttgtttacaagaaggctcttgagctcgccacggctggaaaggctgctgagtacatcatcccatctttcaagaacattgacagttttgtcagtgagtggggaattgacaatttggagaagagggagctataccttgctatcaccaccatcctcaaagaccacaagggcatggctaaggagtactttaactttctcaataagtaccttgccacattcaaagggtcagatgatgaatcagctacaattggtgatgcgaaggaagaggctgttgcggcaatcatcgagtttgttaaatcgcctaatctctttcagtgtgatttgctcaacatgccagctgtttcacagcttgagaaggacgaaaagtatcagttggtgtatgaactactaaagatattccttactaagaagcttgattcctacttggagtttcaaagtgcaaactctgacttgctgaaagattatggtctcgtccatgacgaatgtgtaaccaaaatgcgcctcatgtctttgctcgatctgagcagccgatgctctggtgaaatcccttattctgcaatcactgttgaactcaggatcaatgatgacgaggtggagcaatggattgtgaaggcaattgcatccaagatattggattgcaaggttgaccagcttaaccagactgtcattgtcagtcggcacacagagaggatctttgggatggaacattggcatgctctgcgcacaaagctcggagcttggaggggaaacattgccagagctatcaacacaatacaagctaacaaagtcaccgaagagggggcacaagggatgcaaggcttggcgatccactgattcagggcagatcagcgggttcgtgaattgagattatagcgtgggagattagaagggcaacctttttttgtataagacaagctgtaatggtttatttacttagatcccgtaaccatgcctggttattccttgtatttggtcagacacgccgcgcattacacatcccaagtttttaccctcgacgtggtctgtcctgataaatttccttccctgatattttttttttgccctttccaagcttggagcagtagtgtgtgttccattggagcatctgatgttatccttctaagttgttcactcaagaagtttgggcttgtaaaaaaaaaaaactcgagccgaatcggctcgaga

SEQ ID NO: 271915 - DNA, 557 bp, Zea mays
ccacttgctgccccacgagcccattcccctcagcccttcaccatctccggcggtcgcggtggcatcagcagctcgggctcacgcgcagcaaaggaacgacaatatggcgaccatcgtaaacacgacggaggaggagccgatgctggccgtggtccgcttcaccgctgagctcgcctgggccgacgcgggcccggaagtcgccgaccccgaggtcgcccgcctatgtctcgaggcgcaggagcatatcctcgcggggcggtggctcgacatggcctcccttatgctcgcctccgccgacctcctcctcacctccccgtcgcgcgtctcggacaaagacctggagtgcgttctctccgtcatctgcagcctcgtcaccaaggccggatccgaggaccaggcgctgcagatcaccgaactcatctgcgctaagctcacccagcaacacggtgacaagccagcgctgcgcctcaaagttcttttcagcttgtacaatctgctcccgagcccgtacggcaaggcatttgtttacaagaaggctcttgagctcgccacggctg

SEQ ID NO: 271916 - DNA, 1467 bp, Zea mays
ctccctcgtccagagtccagagccacagaggcaggggagaggaggagcagcgtggcgacgcccaaatcgagcgacctgatcgaggcccctcgcccctactcgctgaatcccaatccgagcccgccaattgggcgcccccccccgcccacgcaaaggacagatagaagaaaattattggcgctctgacaaatccaactgaggttttcttggactacagatgaagcgggctcgaagggcgtatgtgcaagagatgactgatgagggatgctagtgaaattgatgaacttgttacgggcgtgctggcgaccgtcatcgaaccggcatgcccgaacaggctcagatgttaccggtaggcaggatggacttctatggtacaaggacgccgggcaacatgtcaatggggagttctccatggctgttgttcaggcaaataacttacttgaggaccagtgtcagatcgagtcgggcccactgagttttctagattctggaccatatggcactttcgttggcgtttacgatggacatggtggtccagagacggcctgctatatcaatgatcatctcttccagaatctgaaaaggtttgcatctgagcagaatgcaatgtctgctgatgtactgaagaaggcatatgaagctacagaagatggattcttttccgttgttaccaaacaatggcctgtaaagcctcagatagcagctgtcggctcatgctgcctggtcggtgtaatttgtggtggcatgctttatgttgccaatgttggggatttccgtgtcgttttaggaaaacatgttaaggccactggagaagttttggctgtccaactgtcagcagagcataatgttagtattgagtcagtgagaaaagaactgcagtcaatgcacccagaagataggcacattgttgttctcaagcacaatgtttggcgtgtaaaaggactaattcaggtttgtagatcaatcggtgatgcttatctcaagaagcaagagttcaatagggaacccctatatgtgaaatttcggcttcgtgaaccttttcacaagccgatactaagttcagaaccatcaatcaatgtgcaaccactacaaccacacgaccagtttctcatatttgcatctgatggactttgggagcagttaaccaaccaagaggcagttgatattgttcgaagtagcccccgcagtggctgtgctaggaggctgataagagcggcactgcaagaggcagccaagaaaagagagatgaggtactcggacctcaagaagattgaccgcggtgttcgccgccacttccacgacgacataacagtcatagtagtgttccttgactccggcctcgtaagccaggcgagcacacaccgaggtccaactctttccttgcgaggcggtggcggcacgctggcctgcgcagaacacacttgcacctacgtgactataaagtgcctggtggagtggaggctactg

SEQ ID NO: 271917 - DNA, 532 bp, Zea mays
actactcctccgggagagggagacagggccgggggggctgtggagaggaggagcagcgtggcgacgcccaaatcgagcgacctgatcgaggcccctcgcccctactcgctgaatcccaatccgagcccgccaattgggcgcccccccccgcccacgccaagaatgaagcgggctcgaagggcgtatgtgcaagagatgactgatgagggatgctagtgacattgatgaacttgttacgggcgtgctaggcgaccgtcatcgaaccggcatgcccgaacaggctcagatgttaccggtaggcaggatggacttctatggtacaaggacgccgggcaacatgtcaatggggagttctccatggctgttgttcaggcaaataacttacttgaggaccagtgtcagatcgagtcgggcccactgagttttctagattctggaccatatggcactttcgtcggtgtttacgatgggcatggtggtccagagacggcctgctatattaatgatcatttttcccagaatctgaaaagat

SEQ ID NO: 271918 - DNA, 421 bp, Zea mays
tctgagtccagacccagaaggagagggagacagaggagaggaggagcagcgtggcgacgcccaaatcgagcgacctgatcgaggcccctcgccccaactcgctgaatcccaatccgagcccgccaattgggcgccccgcccacgccaaggctgaaagtcagtggagttctcagttctcaccaacattcagaaaactgttggctcgctgacaagtccaactgtgtttttcttggactacagatgaagcgagctcgaaggcgtatgtgcaagagatgactgatgagggatgctagtgacattgatgaacttgttacgggcgtgctggcgaccgtcatcgaaccggcatgcccgaacaggctcagatgttaccggtaggcaggatggacttctatggtacaaggacgccgggcagcatgtcaac

SEQ ID NO: 271919 - DNA, 277 bp, Zea mays
cagaagataggcacattgttgttctcaagcacaatgtttggcgtgtaaaaggactaattcaggtttgtagatcaatcaatgtgcaaccactacaaccacatgaccagtttctcatatttgcatctgatggactttgggagcacttaaccaaccaagaagctgttgatattgttcacagtagcccccgcagtggctgtgctaggaggctgataagagcggcgctgcaagtggcagccaagaaaagggagatgaggtactcagacctcaagaagatcga

SEQ ID NO: 271920 - DNA, 1038 bp, Zea mays
cgtccagatccggcgactggcgtccctcctccgccatcttccctaccctcgacgtggcgatgagctgtgagccgtgagctgttccaacattccggaaataaggggcaagcgagaagatgaggctggtgggtttgacgggtggcatcgcatctgggaagagcactgtctctaacctctttagggactctggtgtccccgttgtggatgccgatgtcattgctcgggatgtagtgcagaaaggcaccagaggttggaagaagattgtaaaagcctttgggaatgatattttgctggaaagtggagaaattaacagagctctattgggacaaatcgtattttctgacccatcaaaacgtcaacttctaaaccgtcttctggcaccacatatttcttatagcattgtctgggagatagcaaaactgtggatgaaaggctgcaaggttatcatccttgacatcccgctgctgtttgagacaaagatggatagatggacgaatccaatcattgttctctgggttgatccaaaagtccagattgagaggctcatttcaagagatggatgctctgaaggacaagctcagaataggatcaatgcacagcttgcactagactggaagaaatcagaagcagacatagtgattgacaattctggttccctggatgacaccaaacagcaattccaagaagtgttgatgaaagtctcggagcccttgacatggaaggaacgcttgagatctagagatggtctgatctctgttgtcgtctttactgcagtgggcgtattacttgcccagaagaatctgctatgatcatgaaggcttagggagttaaaaatgttgatacgatgttttaaaggactggcacaactaagtaagaacccttagtaagaaccactatttttagttgtccttactggataatgggtcaagtaatgaaagtctgcatttagggattgctgggcttagccaaaatcttgttgtaccaaattgtgttgatgggctgggaattacaactatattcggactacgggctaaaaac

SEQ ID NO: 271921 - DNA, 424 bp, Zea mays
atcaccgccatggcctagatgcacatacaaacgaacaccaagtaacccactcgcatccccctcttctttcgccccctcctccatccatggtgcgaagaaagtgtaaccatccaagcactttgtcggaggagagagggagagagaggatcaatcaattcgtcctaaatttaaccctcctaaaaaccacttatattactacttttatttatataaatccgtccccatcccaaccatccaccagcccgcccgccccgcctgatccgtcccagcgattgctatgagtttaggtgattttaccacagatcttcctcttttttttgtatgtaaataaagtttgaggtccaggctcgtcatgtaaattcgggagcgagtgaaatcgggtacctaagaattaagaacaaaacgagtgtaatgggggcaaaaa

SEQ ID NO: 271922 - DNA, 1837 bp, Zea mays
gtttccactctcgcgacgcctccaccacagagagcagcagcagactcgcaagggggtagggttgtgtactctgcgcctgtgcggacggcggccggcggacggcgaaggagatggatcgcctgcccgagtcgacccggagcatgaggaagtacgcgtcggaggccggcggcctgcgcgcggcgcggcagggcccccacgggcggtcgctgacggcgcgcacggcgcacagcatgtccacgacggcgctgcgcaccaagtccaagtcggccgcgtcgctgctgcgcagggtgcccttcgcgccgctccgccccgtcctcgccaacctgcaggaggtgttcctcggcaccaagctcgccgtgctattccccgccgtgccgctcgccatcgccgcccagtgcgcgcacttcggccaggtgtgggtgtttacgctcagcctactcggcctcatccccctcgccgagcgtgtcagcttcctcaccgagcagatcgcgatatacaccggccccaccgtgggcggcctcctcaacgcgacgtgcggcaacgccacggagctcatcatcgcgctcttcgcgctcatggggggccagatcgaggtcgtcaagtgctccctcctcggctccgtcctctccaacctgctgctcgtgctcggcacgtccctcttctgcggcggcgtcgtcaacctcggctccgaccagccgtacgacaggacccaagcggacgtcagcacgggcctcctcatcctcggcgtgctgtgccagtcgctgccgctcatgctgcgctacgcggtgggcgccggcgagcactccgtcgccgcggccaccacggtgctcgacctctcccgcgcctgcagcgtcgtcatgctgctcgcctacgtcgcctacctcttcttccagctcaagacgcacgcgcagctgttcgagccgcaggaggtggacgacggctgcgaggcggaagaggacgagcaggccgtcatcggcttcgccagcggcctcttctggctcgccttcaacaccgtgctcatcgccatcctgtccgagtacgtggtcggcaccatcgagcctacctccaaatcctggggtttgtccgtcagcttcatcagcatcatacttctacccatcgtggggaacgccgcggagcacgccggagcaatcatttttgctctcaagaacaagctggacattaccctcggagtagcgttggggtcggcgacccagatctccatgtttgtggtgccgctgagtgtcattgtagcttggatcgcgggtattcaaatggatcttgacttcaagctcatagagaccggctctctcttcgtctcagtaatagtgacagcattcaccctccaggatggttcgtcacactacctcaaggggatccttctgctgctgtgctacattgtgatcggtgcatgcttctttgttacgaggcaacctgcaagtaacaacaatggcgctgggctgtcgctgccaactggcactttgagtgcacaagctgcatgatggttcaagggtcctgcctgagcctgaacaaatgagcatccaaggcagcaacgcagttgtgagtcagaaacaatgccgtgcaaaggttgatgctttcagaagcggtgaaatctcagccggtggctcagtgctatgggagaaatgaaggctagctgctgttgcaataagggtagcgaatatgcatccggtctatgtatatgatgctgtgttgtttcatttattatacagcttaataagatatatgcagagggtggatttgtatatatttgtggcttgccggcttgtgcggttgtaccacccaaaaaaaaaaaaaaaaaaaaaaaaaaaaaaaaaagaaa

SEQ ID NO: 271923 - DNA, 428 bp, Zea mays
ggacggtggtgcccacaggcagcccagtgactccagtccacccacgcctgcagtacaccacacagagccgcagcagactcgcaagggaaaggaggcggatcgtctgcccgagtcgacccggagcatgaggaagtacgcgtcggaggccggcgggcttcgcgcggcgcggcagggcccccacgggcggtcgctgacggcgcgcacggcgcacagcatgtccacgacggcgctgcgcaccaagtccaagtcggccgcgtcgctgctgcgcagggtgcccttcgcgccgctccgccccgtcctcgccaacctgcaagaggtgttcctcggcaccaagctcgccgtgctattccccgccgtgccgctcgccatcggcgcccagtgcgcgcactttggccaggtgtgggtgtttacgctcagcctactcggcc

SEQ ID NO: 271924 - DNA, 430 bp, Zea mays
cggcggagctcggggacatcacgggcttctacatgatcgacgacaagggcgtgctgcagtccgtggacgtgagcgccaagttcgtcaacggcaagccggcgcggatcgaggccaagtacgtcatgcgcacgccccgggactgggaccgcttcatgcgcttcatggagcggtactctcaggccaacggcctccagttcgtcaagaactgacgagccggctttgagatcgattgcctgcctgctgcgctacgttctgcttgcttgctagtgttcttttttttttctttcctttctcccctgtgctgcgcccctggtgttgtgattgtgacctgctgggtgcttgtgagtgattttttttttggagagaaaaccaaggaatatggggaggttgtttttaaaaaaaaaaaaattattttaaattattaatttat

SEQ ID NO: 271925 - DNA, 1025 bp, Zea mays
ttgtcgcgtgggtcgcggtggcccaagacggaggtgcacgcgctcatccagctgcgcatggacctggacatgcgctaccaggagacaggtcccaagggtcctctctgggaggatatttcgtccgggatgcggcggctgggatacaaccggagctccaagcggtgcaaggagaagtgggagaacatcaacaagtactacaagaaggtgaaggagagcaacaagaagcggcccgaggactccaagacctgcccatacttccaccagctcgaggccatctacaacagaaagcacctccgcagcctcacagccgcggccacatcgtccaccgccgccgccgccgccgctcctcgtcccgcctacccagatcagctgaacccgagcaggcaagagatagaggggaagaacatcaacgatgacaagaggaacaacggtggatcaggtggaggcacgcaggtgccgaccagcaatggcgagacagcgacgacgacgacgacgacgacgctcgtcgcgttcgacgccgacaccggcatgaagaagccagaagacatcgtcagggagttgaacgagcacccgcgtcgggagttcacgacggaggacgagacggacagcgacgacatgggcgacgagtacaccgacgacggcgaggaaggcgaagacgacggcaaaatgcagtacaggatacagttccagaggccgaacccgggcggcaccaacaccgcgccagcaccggcagcagcgacgacggctgcgccagcggtgccgacttcggctccgaccagcaccttcctcgccatggttcaataggggcgcgggcggcacccctctcaaaccgtacgtacgtatatgcgtccaaaccaaaaacctgcgcgcatcaccgtcaccgtcaccttcttctttactttaccagtccaccaagcatgcaccatcagtccatcacactgttctcttgttcatctgtaatcccccgtgccattccattatttattgatttgtttcgtgtataataagatccccaccgttgcgga

SEQ ID NO: 271926 - DNA, 581 bp, Zea mays
agagatcgtcgtccgcgctccgccgccgtcggagtcgcaggacacggcggggttcggtggcggcgcgccgtcgccgtcgaggtggcccaaggcggaggtgcacgcgctgatccagctgcgcacggagctggagacgcggtaccaggactccgggcccaagtgcccgctgtgggaggacatctcgtcggggatgcggcggctcgggtacaaccggagcgccaagcgctgcaaggagaagtgggagaacatcaacaagtacttcaagaaggtgaaggagagcaacaagaagcgccccgaggactccaagacctgcccctactaccaccagctcgacgcgctctaccgcagcaaggcgctcgcgtcgtcgtcgtccggccccggtgcagctccggcgctgccgccgccgccgccgccgccgcagcgcccagatcagcaggctgctgctgcggcgccgcccgtcaccgtcttgctagccccggtgccactgtcccagacggggcctcacggcaacggaaacggcaacggcaatgggtgcgcgggcaggggcagctcggacaatggcggcggcggctccgggggca

SEQ ID NO: 271927 - DNA, 407 bp, Zea mays
gcgcacgaacccatcgtttgaccgaccaactgcccaacaaacgatggccggcgtgtcagcaagcatcccgtgcgtggtgctcaacacgggccacgcgatgcccgtgctgggcttcgggaccggctcctccagcacgccggaggatctgccggcgaccatcctccacgccgtccgccttggctaccgccacatcgacacggcctccatgtacggcacggagggggcggtcggagccgccgtctccgacgccgtcgctgcgggggccgtcacctcccgcgctgacctcttcatcacctccaagctcgtgatgaaggacgcgcatccggaccgcgtgctccccgcgatccgggagtcgctggcccgcctaggcctggactacctcgacctcttcctcgtccactggcccg

SEQ ID NO: 271928 - DNA, 636 bp, Zea mays
  unsure (1)..(636): unsure at all n locations
cccaagggctggctcgcgtgggacggggacttcgcgctcgacacgctttactacggggagtacgccaaccccggccccggcaccgccgtcgccgcgcgggtcaagtggcccggcttccacgtcatgaccagcccccccgaggccggcaacttcaccgtcgcgcagttcatcaagggcaacatgtggttgccgccccccggcgtcaagtacacccccggactcacgtcctgatcctctcttcaaacccttgatggatgtaggcttagtactatacgtagtgtttgcaaccgtatactcctagccctttatatatgcttgttggaacttgctctctgctgctaggagatccaacgggggagtagtgacgtaaacagggttctcgcgtaagatggcaacatctctgttaacctagcctctcacggcactgtgcgggggtatttataggtatctaagcgccctgcgtcctgtgttaaggacgcatgtgccctcagacacctaagttatcctcagaatattcccataaagcagggttacagactgttnaaaaaaaaaaaaaaaaaaaaaaaaaaaaaaaaaaaaaaaaaaaaaaataaaaaaaaaaatataaaaaaaaaatttaaaaaaaaaaaataaaat

SEQ ID NO: 271929 - DNA, 820 bp, Zea mays
ctattgttcatcatcaaagattcgaggaaggttctttaatgaaggaacattgctccaattgttcatcatgaaacattcttcagcaatgttcagaatgactacaatcaaacaggattagtgcctttggagggatgttctgccagtgaggcttcacagcttctcagtgatcgctggactgctgcaatcaacatgtacaatgaccaaacaattgacccctcagagaaaccggtaatgtattctggatctagcagctcatcatggggtcacctgaagcttcctcatcagatgaacttcctcgaggagttgcgccgtgcagtggacgctcatacagaatttgcgtcgcctgtcgtcacctggaactaatcgaagtcagcatctgcatcattatgcgttatgactaatttatggaaggcaggctgttcgccaggtctatgtatgatgtatcccatacacggatgatgtgccaaaaggctttcgtctgacctgcagctgcttctggaatctgcatctgtacaattgtaccattgttacccctggccttgtagctgcaaagcagtttgttgtaacaattaaatgaggcgccggatcctcacgccatcgaaagtttgaaacagcttggttgttgtatggtagttccaagacttggtgattataatgtgcgcattttctcgaaaaaaaaaaaaaaaaaaaaaaaaaaaaaaaaaaaaaaaaaaaaaaaaaaaaaaaaaaaaaaaaaaaaaaaaaaaaaaaaaaaaaaaaaaaaaaaaaaaaaggggggccccccacttatgaactttttaaccccggaattaatttcgga

SEQ ID NO: 271930 - DNA, 825 bp, Zea mays
gttggatcgtaactaacgctagagaagcactccgaagacctgctctccttcgttctgtttgttgtttttcttctcccgtccgcagtccgcttggcgtgcgcgacggctagggcgaccgccgccgccctacgccctacgtccagctgcccatgtcttcttcgggccccttgccggcgggaactcaccagaccaggaatcgtgctggcaaccggcgcaagtctggagatagggctgataaagctaattactactacaataatgatggagagaagagcaatgttccttcattaaagaaccttcctccaattgttcatcatgaaacattcttcagcaatgttcagaatgactacaatcaaacaggattagtgcctttggagggatgttctgccagtgaggcttcacagcttctcagtgatcgctggactgctgcaatcaacatgtacaatgaccaaacaattgacccctcaggtgaatcaacagtactctctggatctagcagctcatcatggggtcacctgaagcttcctcatcagatgaacttcctcgaggagttgcgccgtgcagtggacgctcatacagaatttgcgtcgcctgtcgtcacctggaactaatcgaagtctatgtatgatgtatcccatacacggatgatgtgccaaaaggctttcgtctgacctgcagctgcttctggaatctgcatctgtacaattgtaccattgttacccctggccttgtagctgcaaagcagtttgttgtaacaattaaatgaggcgccggatcctcacgccatcgaaagtttgaaacagcttggttgttgtatggtagttc

SEQ ID NO: 271931 - DNA, 334 bp, Zea mays
ctcatcatggggtcactgaagcttcctcatcagatgaacttcctcgaggagttgcgccgtgcagtggacgctcatacagaatttgcgtcgcctgtcgtcacctggaactaatcgaagaagctgttcgccaggtctatgtatgatgtatcccatacacggatgatgtgccaaaaggccttcgtctgacctgcagctgcttctggaatctgcatctgtacaattgtaccattgttacccctggccttgtagctgcaaagcagtttgttgtaacaattaaatgagagcgcggtctcagcacgaagttgacacttgtgtgatgagtcagactggataa

SEQ ID NO: 271932 - DNA, 530 bp, Zea mays
cacccacccgcccacccctcgttttctgcaattcgccgccatcgttcgctgagcttgagcgcgtctgccgcctgccaccaccgctctctgcctctctgctgctctgttcgttctcccgccggggcagaggagggcggggaggcccgttgagcgagcctcggtcggtatggggatctgcgcctcgtccaagcgcgtgcggcaggaggagcaggactccgacgagaacgtggtgtacgtgatggacgagcagggcggcgggggagaaggcgaggacggccgtggcgcccgcgcggcggcatcccgcaaggtggcctccctcttctcgcagaagggcaagaaggggcccaaccaggacgccgtcatactctgccaggttcgcgctcgcaccaccacccctgctgctgctgccttgcccgaggaattctctcgatgtctcagctttttcttcttcttcttctctcctatagccgcttgattattattttgctacacagcgctggtagatgtagaatctgactgatacagatttt

SEQ ID NO: 271933 - DNA, 579 bp, Zea mays
gccaccaccgctctctgctgctctgttcgttctcccgccggggcagaggagggcggggaggcccgttgagcgagcctcggtcggtatggggatctgcgcctcgtccaagcgcgtgcggcaggaggagcgggactccgacgagaacgtggtgtacgtgatggacgagcagggcggcgggggagaaggcgaggacggccgtggcgcccgcgcggcggcatcccgcaaggtggcctccctcttctcgcagaagggcaagaaggggcccaaccaggacgccgtcatactctgccagggattcggcatggaggacggcgtgttctgcggcgtgttcgacgggcacggtcggtgcgggcagttcatcagcaagctggtgagggactacctcccgttcatgatcctgagccaccggaacgcgctcctcatgggctccgacgacgacgacgacgacccggccttcagcgacgcgtcggcgtccgcgtcgtccacggacggcagcgggcagtcgtcgccggcgccggctcacctgctggaggagtggcttggaggcctgcgccaactcgttcaaggccatggacaagg

SEQ ID NO: 271934 - DNA, 423 bp, Zea mays
agtgcccccaccaaaccacccctgtgcgattcgccgccatcattgtgagcaagctcgagcgcgtctgccgccagccaccaccgcttccgttgctttagctctgttctcccgccaagaaggcgaaggggagacggttggttgagttgaggcagccagccagcaagccagtggcggggcgtctgctctcgggtgcttcgctatggggatctgcgcgtcgtccaagcgcgtggagcaggaggaggacgagaacgtggtgtacgtggtggtggacgggcagggcggcggcggtggagggggattgggaggggacggccgtggcgcggcggtggagcggacggtggccgtctccctcttctcgcagaagggcaagaaggggcccaaccaggacgccgtcatcctctgccagggattcggcatggagga

SEQ ID NO: 271935 - DNA, 999 bp, Zea mays
tcccactcgtcctaatcccttcagatttggctcaaaaatgtgaagatcttgcaccctgatggggggaataactttattgagaggagttcagatttgaaggtactttctgaattgcgctacttgaggaaccttaatttgcagggaaatcctgtttccaagaaagacagtcttgtcaaaaaggttaagaaatctgtgccaaccttgcgcatactgaacgcaaagcccctagaggccacctccaagagtgatacgaggtctacaaaagagaatcctcctagcaaagatgaagaccccattgggattgatgcaaagaaggataaaaggaagggatctaaacaagaggtaaagggccttgaagagcttgaagtccagagtgtttctacaggtatcaccacttcgaaccctggtaaacttgaagtgccagacggtaaggaaaagaaaaaggtcaaggaagctaagacgaagaaatctgaagagccgtaccatgccaataacagtagcttaaagaacaaagaagttcaatcttttgtctatgataccagcacgaaggacaagaaggaagccaagaggaagaaatttgttgacgaagaagatgtagatgctgaaggaattgacaatacagaaatctcgtttgcaaatttaatgttttccaatgtgggcaatccagagactaagctaaagaacatctcaaccctggaagcagctcctgatggaaaatctgttggaggtctggtaattgatcacacaaagaagagaaagaaaccaaaaggtgttgtcaccatcactgactcctcagctcttaagatgttttcctcaatgccagaggtaggagcaggagggcttggcctgtcaggatgggatgagtagcgtctagctctctaggaccataagtttgctgcctgatgaatatcgttttttggtgaaaacctcaattttatgtgaactgagcagcattttcttctcttcccatcaagtgcatttatgatgtgtcatttgagg

SEQ ID NO: 271936 - DNA, 850 bp, Zea mays
tacaagccacagctaatcgatgctgcgctcttgcgacctggaaggtttgatcgtctagtcttttgtgatttccctcgatgggatgaacggggagaatttctgaaggtgcatgctaggacgggtgcactggcaagtgatgccagtctcgaagatgtcgcttctctgaccgaaggattcactggtgccgatctcgctgctattctaacggatgctggactagctgcaattcatgaacttttggacaaccaggagaacggtgttccagaaaccgaaccgtgcatcagcaaagaacttctcatgtccgtcactaggaaggcaagaccttccacaccagcagacgagaagatgcggtatgatagggagtttggtgaattcgtgtcatccaggaagtctatttcgacaaaggcaagagagtcaaaaggcaaaaaggttacactagcttgagcctttccttggccaatattaatgcgctgcaaaatttggacagtggcctacatgaaggctgctaacacgcggacttgtcaagtcatgcgacgtaggcttcctttcatttgaagagaaacaaaatctacaaagaaacctaaccaaggctcacttatgttagtgtacttggatggaggaggaaggccattggagggacctgcaggtggtcaaaggtgtcatagtaggaaattttgtacggtaatcctgctgtaattaaagttatagcacttgtcacaaattttgtacggtggtgaatagtaggaaatagaaatttgaagagaaaaccggtaatcctgctgtaatgaaagttatggtgaatgatccgcttcttaacgtgcaattaaaaaaaaaaaaaaaagggcggccg

SEQ ID NO: 271937 - DNA, 707 bp, Zea mays
gctgtcttcccccctatatatatctatataaaaaaagagagaaaaaaaatcggacaaacgtgtggcgtcggcagccgggcaggtaggaaaaggtatcagcgtcgccaatctccatggagctcacaggcgccgcgctccggcgatacgcgctgccgtcggcgtccccggtggccgcgagggtggggaggaggaggcgaccagccagggtggcctgcgtcgggggcggggggttcgcggaggaggggcacctcaggtactacgaggcggccccgcggaggaaggcggtggaggcggtggcgagggacctgggaaagctccgggccatggggctcgtcgcgggggacgcagccaaggagaaggtcctctcggaagccacggatcttctgctgcaggagctgagccagatgaaggatgcggaatacaagataaacaagatggagaaagaacagaatgctgctatgaaagcactgaagaagcaggagaggcgcaccaagaagactgccatcatgatgatgaagtgtgaagaagatgagtcatctgagtcgagcgagagcgattagtgcggacgaggcaaccatgaatgccgagcggtacatggtgatgtcaacagcggttcccgaggttgttgcatcaagcatctcagctgtcctcgcgatggagtgtgataaggctgcagtgaaggccatgaagaaaatggagaaggaaca

SEQ ID NO: 271938 - DNA, 647 bp, Zea mays
ggaccgtgggaacagaatgctgctatgaaagcactgaagaagcaggagaggcgcaccaagaagaatgccatcatgagggtgggccgtgaagaaaatggagaaggaacaaatgaaggccatgaagaagatggagaaggaacagaagaaggctgcgaagaaggccatgaagatggagaaggaagcaaagaagatggcaatggctacactgaatggctgcagggatgaagacgattcctcatgctcatcagagtcgagtgaaagtgaatgcgagggccaagttatgaggatgagccgctgcgctacaatcaccgcaccggaaatgccacctgcaagcacgggtcttccaatcatagttcctcaaattccagcacctttggcaccacagccgtctcaatctcaaccttcagagccagcaaccgcagggcaagccaccagagtcagcagcgttgcagtaactgagacatccacaaccagcagaattgaggtctgcatggggggcaaatgcaagaagtcaggcgcgcttgctctcctgcaggagttcgagaaggctgtgggcaccggtggcgcggtcgtcggctgcaagtgcctggggaagtgcggcctaggtcccaacgtgcggctgaggagcggtgcctctgcggaaggtt

SEQ ID NO: 271939 - DNA, 850 bp, Zea mays
ctggacagtttatagaacgtctgctccagctgctttttgggacggacaaggcctggcatggagacacttctaaacagaaagaaagctcaggtcgtcccgagaaaaaagttcggaagaggcacaagtatttgatgctgcttgcagttttagctgcctccatcacgtatcaagctggtctcaacccacccggtggtttctggtccgacgacaatgaagcccatgtggaaggcaatcctggcctgaaaccacctggtgccttgtggtctgataacaaaggtcatttggcaggcaatcctgttctccttgatattaatcctcggcgctacgaaatattcttctgcttcaactctatctcgttcatggcatctattgtcgtagtcatgttcctgttgaacaaatctgcccggaagaaggccgtgccacttgaagtactgcacttgatcatgatactggacctgctggccctcatgactgcggtttgctgctggaagctgcagaaaattcaggacttcagtctatgtgtatggtctagtgctcggtgtcgtggtataccttgtgatcgcagttcttttgtcaagtggcattgcaaaatgtctgagacccatggatagaaatagggtttcctctcagagaagtcctattcgcgctcctacagcaagcacaaggatacttggagaccatgcttgatggttccattcctttggtaatagtactagtttaatagtagtgtatgtatttggctttttaatgtaccttatgttgtgggagtttgaaattgacctgaaattcgacgctttatggtgttcatttcttttagaatgtaaaatcagtgccaatcatgaatctacat

SEQ ID NO: 271940 - DNA, 922 bp, Zea mays
tgtgcttaatcagtgctcagcatgtttgggattgggggagatagcgtttgatgcgtgtgtcgtcattaagcgcgtcaagaattcgggatgatcgccatcaatggaggtggcggcggttccgatccaagcggaggctggactcttcaccatccgtccatccattaattaattaattaacaaaacagcggcttttgcgtgctatgcagttgtcatttggattggatatggtggagcgagtgcgacatcgccttgtgcggagtgaatactagtactagtgatcgcagttggttagccgtaggaaacacctcgagctattattactacacacggcggccggagaaggacccgcatgcaatgcaatgcaactggccgctccgtgtcggtgtcgccaacaaccgcagcaacagctgccttcatcacagagagcgctggacggcgcgcacgcgctgcagtggaccaagctctgcaacatctacacccgcttctgcgagcaggtcgccggcagcctcgtgctcgggatgctggccgccgtcggcaccgccgtcctctccgccgcctccgcgcgcaacgtcttccgccactactactgctcgtcgcactcgccgccggcgccggagacctgcgccgcgcactagacctctcggcccagggcgtcagctgggccgccacgaagcgcaggtgcaggcccagatgaaggatgggctaggctgtaatgcaggagattgagttgtgctctagagtgtactcctcctacctgtgtttccctctctctctctctcttttgtctttgtctctctaaggtgtgtacttctattttcatttaattttgttgcatttggtacgttagttgcgacgtgagtatgtatgttcgtcagtgtcccccgtacattttaataatccccataataataataataataat

SEQ ID NO: 271941 - DNA, 533 bp, Zea mays
ttatccccagcaagggcgagggcctccttaccctggagcagctggcccacggggcagcggtggcagtggctatggggctggagggccaaactaccaacagggtggcccatatggtacgtccggtccaggccgaggaccaaactactctcaaggtagtggttcccgcaaccaacagcagtatgggaactggcaataatgtggcagtattatgccattgatatgtatgtatttgcagaatgcatttgcagcacctttgcactttaagcatgttgtgagatgtatgtcatgatagtactctaattcagtccagatgtctcaaaaagatgtttatgactccagatgtagattatgattatcgagaaacgttttgtacttagaacccttgattcacttattagaagtatgccacaaagacctagcagagtttgctattagccccagtttcatacttcatatccaaattggaatcaggaacgcatagaagaagcctgaagttcagaaatgaaatttgttatggttgtgtacagttttgt

SEQ ID NO: 271942 - DNA, 1836 bp, Zea mays
ctcgagccgctctcccccacccgtcgtctccttgtcatccttgcctgcggattggggcggacacggcagtcggcacagcctctcgcttctcccgcgcgcgagccctttctccacggccgcggcatgacgttgccggaggtgaatgccggtgcgacggcgcagaggaagaagaactcaccagagatggagttcttcagcgagtacggcgatgccaacaggtacaagatccaggagatcattggcaaagggagctacggggtcatctgttcggctattgaccaacatacgggcgagaaggtagccatcaagaagcatacagaacatcttcgagcacctgtccgacgctgcgaggatcctccgcgagatcaagcttctccggctgctgaggcaccccgatatccatcgagatcaaacacgttatgctgcctccgtcgaggagggactacagagccatttacgttgtgtttgagctgatggataccgatcttcaccaagttattaaggctaacgatgacttgacgaaggaacaccaccagttctttctctatcagatgctgcgtgcattgaaatatattcatactgctaacgtttatcatcgtgatttaaagccaaaaaatatattagcaaatgctaactgcaaactcaagatatgtgattttgggctagcaagggttgcatttaatgactctcataccacagttttctggacggactatgtggctactagatggtacagggctcctgagctgtgtggatctttctttagtaagtattcaccggctatcgatatgtggagcatcggttgcatttttgcggagattttgactgggaagcctttattccctggtaaaaatgtggttcaccagctggatttgatgactgatctcctgggtacaccatcagcagatactatttcacagattcggaatgagaaagcaaggaggtatctaagcagcatgaggaggaaacagccaatacccttctcagagaagttccccaatgcagatcattcggcgctcaagctcttacaaaggcttcttgcatttgatcctaaggatcgaccaacggccgaagaggcattggctgatccctactttaaaggcattgcaaaagtggagagggaaccatcctgtcagccaatttcgaaaatggaatttgagtttgaacagaagtttaccaaagaggacgtcaaggaacttatattccaggagatactgcagtaccatcctcaacttctgaaggattacaagaacggctctgaaaagacgagttttctatatcccagcgccgttgacaggttccgtaggcaatttgctagcttagaagaaaatggagagaggaatgccgcgcttgacaggaaacatgtttctctcccaaggacaacaaccgttcactccactccaattcctgcaaaggaaggtccagcagcaacctcccaggttgctcaaaggattccagcagctagaccaggaagagtggtaggcccagtattgccattcgagagcgcaagcgtcaccgatcaacacatcgcccgacgggtggcaaggaacccagctgttcctccagcaacgaacacctcgtcagtctactgctaccacctcaagtcggacagctccgacaggcaggagcatcatctagagcgtgagaaagaccgaaggcagtataggccagggcagcatttcatggatgccaaggtagcccctgagatgggccgggatatacgcccgtcacagtgctatatctcaaggggcttgcccaaagctgatctgacagacagggccaaaatacatcccagcgctcttcatggcgttgctcccttcaatagcatcgcagaga

SEQ ID NO: 271943 - DNA, 804 bp, Zea mays
  unsure (1)..(804): unsure at all n locations
gctgtttcctactcttcaccgcttcaccccgcgggcgcgctttctatgaagctccgctacaactgcggcgccgccgccgccgccgccctacgccagttgcagagcccttcatcgctcttcttgccggcgacgagcacccaccacaacaagtctttcacccacagaaggcaaagatgatcaagaggcgctactttaggcaggaccatggtgataacagcggctcctcatcttactcctcatcggattgtgactcggacaacgatttggcagaagaggcagtcagcagtgaggaagtagaggagcaggaagaagaggaagcattcaaggaagaatcatgagaagaagaggaaggagaactagaacaacaaactggagaagggagttcaggataccaaagtgaggacaactcatggaatgatgttgatggtgcatctatagacgatgatgaacacagcagcccaagagatgaagaacgtcatgaaataagtttgcccattatgaaatcttctggtgctaatgctgactctgccaaaagtgctgataacacagatgacgctgttgatgcagacttccctaactgcattctgaaatgcaaatctgtgtttaagtgcaagctctgtcctaggatcatgtgcttaaatgtggagatggtcaagatacatctgaaatcaaagaggcatgctcgttccgagaaactactaggagaagggaggcttaagctgatgctcaacagcgatggtgaactggaggaagagcaagagacacatgctgaacgacatgctncgactatagccctttcccagc

SEQ ID NO: 271944 - DNA, 498 bp, Zea mays
cggctcgaggccctgtcacgggctaggggctggtgccaacctattgatccaaagtgatcacctgtcgcgggccatcatgtgtggcaatggttctaaactggggtggtgagagccctccattttgttaaaaatatgcatgggaaggatgaagatcatcttgcatagtcatttgcttccaggaggcgcacaggaggtggagtaaaggtggagtaaaaacgaacgtatttatggtgcctagaggacggttttttcagccactgccaaaacggcttgaatgacgccaccgaagtagtggagttcaaatggctcattgtttgccgcaacctcaatttcaagcgggtttgttcagcggcttatagcttcttctctccttttgttgtctcatctgttttagattgtagaatttgggctagttgcttcctgctgtaaatccgaattttgatgtagtgacggaagtgctacctttttgttgagcatgatcgaaaagtttacaagaac

SEQ ID NO: 271945 - DNA, 342 bp, Zea mays
agactaccgagcagattgcatgtgatgtgcagatgggctgccagcgctggtactgtccatcgtgcctctgccgtgtctgcctgtgcgacacggacgatgaccagatcatcctgtgcgactgctgcgatcagggctatcatctctactgcctcagtcctccaagaggaacggtgcccaaggggcattgcgactgcgaaccctgcaaggagccgagggagaaggagaacaggatactgatgctccacacgaaggattacgatgaagacatcctgaagagtggcgagttccatggaccgaacttgctgcttaaggccgcgaaaaacgtgaagcgcgatgaggagg

SEQ ID NO: 271946 - DNA, 492 bp, Zea mays
gttccagggaagaccaaagcattttaggcagggctggtgcaagggcaaacggcatgggggacgtggaaaggaggatgatgcaggagatgccgggcgtgttcaccaagggcctgtccaacggcagcagggtcgaaggcttcctgtacaaatacagcaaaggagaagtgaggatcgtatgcatctgccatggaagcttccttactccttcggagtttgtggagcacgccggcgccggcaaggtagataacccgctgcgacacattgtcgtcagcgctaccccgaacctgtgactgtgaggccaggcagacccgtgcacaagctatagtgttctgtagactcaggacctgagcctagcgtcagagcaatgtcaccgttagactgtgtggtgcggtgcttatgcccgattaaattggtgggcattgtggtaacataccctgttgataatgttttgacaatgttttgatccttacttaatgaagaactaaatcacgc

SEQ ID NO: 271947 - DNA, 618 bp, Zea mays
gtactacttctgcaacggcgcgtccatgctgctggccgtcacggcggtggtgtacgtgcaggacaacgtgggctggggctggggcctcggcgtgccggccttctgcatgggcgtctccgtcgccgccttcgtggccgggtacccgatgtaccggaggctggagcccgcggggagcccgttcacgcggctcgcgcaggtatgtcggcgccgctccccagatgccgccgctgccggcggcggacgtcaaccccgcgttgctgtacgaggacgacgagctcgacgcgcccatctccatgtacggcaagcttgtgcacacggatcagctcagcttctttgaccgcgcggcgatcgtcaccgacggcgacctggtcacgctgacggacgcggactccggcaagccgtcgacggcccccgtcccggacctgtggcgcctgagcaccgtgcaccgcgtggaggagctcaagtcggtgatccgcatgggtcctatctgggcggcgggcatcctggtgatcacggggtcgtcgacgcagaacaccttctctctgcagcaggcgagcaccatggaccgccgtcttgcgccgggcctttcacgttcgagatccccgggggtccatgacc

SEQ ID NO: 271948 - DNA, 991 bp, Zea mays
cccacgcgtccgcccacgcgtccgcccacgcgtccgcccgaaactagtcttccctcctgctggcggcgtgcggagggccggaggccgcgtcgacaagaggagatgacgttggcggcggggctgggttacgccctgatcgcgctgggccctgccttctccctcttctccggcgtcgtcgtcaggaagcccttcctcgtcctcaccctcctctctagcaccttattttggcttataagtttgatagtcctctcgggaatatggagaggatttcttcctataaagtcaggagcttggtgggcatatgtgattctgatccttacatctgtcgcattgcaagaaggcactcgtcttgtgttttggatgctttacaagaaaatggaagagatgctagatgcttttgctgatagaatatctaagccacgtcttagattgactgacaagatgctgatttctttagctggtggtttaggccatggagtggctcatgcagtctttttctgtctcagtcttttgactccagcgtttggtcgagccacattttatactgaaaggtgctcaaagctgccatttttccttgcgtcagccttattgcacttggattcttggtcatccatacattctcaatgattattgcttttaatgcatatgacgagggaaagaaaagtgatcaagtctttgttccagtaattcatttggctgctgctgcgatgacacttgttaacctcgccccaggaggctgtctcattggtaccccgctgttggtggtcatggctgcgctgaccttgcagcactgctggcgagtggcatgccggagattaactgagcaccggcatcagcagcataacagcagctagttgtaggcttgccatcatgtaattttcccatgtatggttgactgaatcttctgatgtactatgacagtaaaaatcaaggtctgagtcgtgtcgtgtagttagacaaggggttattataggttgactcgatgttttgc

SEQ ID NO: 271949 - DNA, 406 bp, Zea mays
  unsure (1)..(406): unsure at all n locations
cgaaactagtcttccctcctgctggcggcgtgcggagggccggaggccgggtcgacaagaggagatgacgttggcggcggggctgggttacgccctgatcgcgctgggccctgccttctccctcttctccggcgtcgtcgtcaggaagcccttcctcgtcctcaccctcctctctaggtctaccccttgcgtcgcccgtttcgtgcttctttagccacgttttgatcagatcgtccgttgccctctaataaaagcgaacattcagttaatcgattggcgtaagaggcaggtggcgtttgtttgaggcgttccagggtgtggtttcgtgaggcaaacgcggattattggtttactcgcagttgtgctanggttcagtagtttcttccggatcgatacggatgctgct

SEQ ID NO: 271950 - DNA, 725 bp, Zea mays
cgacgccaggtccttctccggatccagccatctccgcaggggcatcacctccgccgttgccttctccgccttctccttgcccacggacacggggaacttgtcttgcagatgcaggccgcggcaggcggcgttaacccttatcttgtgtttcccaagctccatcgcacacagacggaccaactggtggatggctcccaagcttgtgccatatgctgcagcgcctggatacaatcctctctcagcaccaataatctgagtcaagaacacaatagatccaccagattttgtatcctggaaccgctttgcgatcgccttcattagaaaccaaggtgttatcacatttactttgatggtcttcctgtactcgtcttcacttatactgaggcaatcttgcacctccccctcgtaggagtagcagttgacgaaggcatccagtccggcgaagcagcgccaggcccgatccaccgccgcgtcggcagcagcctcaccgcacgccttgaagtccagcccgaccaattcgacgcatccgccccctaccccgcagcgccgcgcctcctcctccgtcgcggccagcgcgccctcgtcgcccaacaagaccaatctgcagccgtgcttggtgagggtagaggcgatcccccgcgagacggtgtcgccagctgcggtgagtagcacccgcttcgcgtaggcgtccgcgtaacccatcgcctgattccagcggcggaggc

SEQ ID NO: 271951 - DNA, 985 bp, Zea mays
ctcagctggaaattgaggtgtctggatggcacactgccttctgcaatcttatcacatcgcagcgtgaatacgttagcatccttagccaatggattggtctcacagactgccttccggatgatggtggcttaatgagaagttcatctggaatccttagcctctctgaggaactccagcgtgctcttgacaggctaccagagaaggtagcagctgaagcgataaagacctttatgtcagtcatacactctatagttgtacagcagagtgaagagcgccaactaaagaagaagtcagataatatggatagcaagttccagacccagttagagaaacacagtgataattcaattcaaaactcggcacagcctccaaataagaatcactattcagtatcaaagaatgaaacgaaactggatgcatttagaaagaaggtcgaggaggagaaggccagatacctaacctctgttagggaaagccgagccatgacactgaacaatctgcagacagcccttccaaatgtgttccatgctctggagggattctcaggagtgtgcgtgcaggcatttgaaggtatcagctgatgcagtgaagttgctgttattcactcgggagcggcttcatctgctatttgctcgtgacattgctacgatggctgtgattattcattgtaagtaggcgaagtataaactggttccacgtgaatacccttttcttctaattttcagaactttgaatagttttcggaggattttatgaagtcaatataggcataatagtcttgaatagatcacaatgtctcaactctcaatttgagaagagatgtgaagtatcataaaacatatgtggctttaaattatggaaaggattcatgcagacttcaactgcacgttctcatggtatgatgatgctactcatctcaaaaaaattccaatgtatttgctcaaaaaaaattgtcaagcaactgtcctggatcgctaattcacct

SEQ ID NO: 271952 - DNA, 406 bp, Zea mays
  unsure (1)..(406): unsure at all n locations
caggagtgtgcgtacaggcatttgaaggtatcagcagatgcagtgaagttgctgttattcactcgggagcagcttcccctgctatttcctcgtgaccttgcttcaatgactgtgattattcattgtaagtaggcaaaggataaactggttccacgtgaatacccttcgcttctaattttcagaactttgaatagctttcgggggattatgtgaagtcaatataggcataatagtcttgaatacatcacaatgtctcaacttacattttggttcttattgcatgggatgtactgctctgtacataatcatttacattttgaccgaaccagtatttttctccctgcacatcccctctatacataaaagttacaaatctgcctcaaaaaaaaaaaaaaantaggnanaa

SEQ ID NO: 271953 - DNA, 670 bp, Zea mays
acctgtcgtcctttttttttttttctaggaaaatcgagatttccccttagcttgcatagtcctgtctggaaacaccaggcttattactaaggaacaccacattaacttgttgcagacggccacccgttgccttaattatcatctttctggaaacaaaactccctgccccattcctcacaccggagcgatatatatagaacggggcgcgcgcccggaagaactccaacaaaactaaggagataaaaaaaaaggactgctgctacaatggacccggaagaaccagtctctcacccgccgaatcacatcattttacagacaaaatcctccgatcccatggtgcgcttcaaaatccagccactcgaatgatttccggagagaattcgcggcaaatttgcttcgaactcagatctccttcactgctgacctgatgcttcacagtaggttacccagccaaggggctgctgctttaccggatccccatggatgaagatgattcttggcaattatgtagacttctttactgcatccgggccctcggcgaggccagcgcctcggcagccgacgcgccgcggggccacccccccactacggccacgcgcagcgtgcacgctgaggatgacgaggaggtggtgagagggaagcgagagatagagtcggcggcggctgagag

SEQ ID NO: 271954 - DNA, 788 bp, Zea mays
  unsure (1)..(788): unsure at all n locations
ttttttttttttttttttttttttttttcaggaagatgctgaattcaattgtaatccacccattcccaggatcaaggtgtatctgtacatgatcttattgttcactgccagccgcagccttaaatatcatctttctggaaacaaaactccctgccccattcctcacatcggaacgatatatatagaaggggagcggggggaaaagaactccaacaaaactaaggagataaaaaaaatggactgctgctacaatggacccggaagaaccagtctctcacccgccgaatcacatcattttacagacaaaatcctccgatcccatggctgcgcttcaaaatccagccactcgaatgatttccggagagaattcgcggcaaatttgcttcgaactcagatctccttcactgctgacctgatgcttcacagtaggttacccagccaaggggctgctgctttaccggatcccccatggatgaagatgattcttggcaattatgtagacttctttactgcgcgcaaaaaaaactgccccagaatcattacaggtgctctggcctccgcatggaattcgcggctaatctctatccaataaataatatacaatacaaatagtagaaatggaaaatagaatcagcattctaattgaaaagagtcgttggtacttgcaagtgtgcagcatttataatcaatactgcaacagaagataatagtataaattaagtaaatcttgtgattggaaactttatcagttataaagttaagcatttgaggcaggtcagcgcattntc

SEQ ID NO: 271955 - DNA, 862 bp, Zea mays
cggaatcggctcgacactgacttgttggctacagtagagcttaatatgcaagatggcatggaggggaatcatatgttagaaccaatgaacaagttctcccggttttttggagttttgtttgttccatttacaataggctttccaaaggcaattttcgtttactgggtcacatcaaactttttctcacttgtttacggtgctgttctccggaatccggctgtaagactcttcttaaatcttcctcgcttggaatctcagcccacaactgcacaagtccagcccttaaacctgtcgggcggaccggagccaagtcctggagtcgattctcctatcacagataaggaatctgagcagtcgagttctgtgctaagtcctggagtcgattctcctatagcagacaaggaatgtgagcagtcgagtcctgcggtgagtcctggagtcaattctcctatggcggacaaggaaagtgagcagtcgagttctgggttatgtgaccgtatcagagatcttgagatcagggctaaagcaacgggtgaatctcgagagtaaattcgtgatttgtccccatggaagtaagcaagcacatctcctcttgggggtttctggtacttttttttttgttgggagcaaaggatacccagtagcgaggtataattttgaagagtccgcggtttttcgaaatataacggcccaccatgtttccgtgaataaattggtgtagtatattggcttgtaaaatcgttgcacggtatgatataaccttgtactactagctaacattagccatgatgttccttggattaagcatattgttgctattgagcggcacacgacatgtttgtctaatatttgcttcatgctg

SEQ ID NO: 271956 - DNA, 870 bp, Zea mays
ccaggcgtcgctctgtatttttctctcctcactcaacgcggcgatgccccctagatcggatcacgccgccggcagcggcgccgcggcggcggccacgcaggcccacttcgactccatcgatccactcttccatgtgctccgcgtgctacccttctccttcctcctgccgccgcgcacccgcctgaggctgccgtcgaacctggcgcttccctctcccatgaccgtcttctccctcatcctgctcacctactttgcggtcgtctccggactcgtgtacgacgtcatcgttgagccccctggcatcggcagcgcccaggaccccggcactggcgccgtccgccccgtcgtcttccttccagggcgcgtcaacggccagtacatcatcgagggactctcctccgggttcatgttcctccttggcggcattggcatcatcctcctcgacctcgccgtcgaccgcacgaggccccggagcctccgcgtctcgtttggaagcgccggcgcagtcgccgttctcatcgcctacgccatggccatgctcttcctccgcatcaagatccccggctacctttggtgaggctgataaatcttgcctgttaactagaccagatccgttgcaagatctcgctacatctaaatagatctgcgtgctgtggagcgtggactagcttactcctcttttagttatgtcaattaatgttacatcgcaccatgttgtataatatctactcagagttgctaggtgaggatatcattatgcaatggtagtagacaaagttcttagtattgaagtttcatggcgtgtgtggaaccacactatttatatcaacatggtgtagttgattatatcaatataatttgtcattttgt

SEQ ID NO: 271957 - DNA, 637 bp, Zea mays
  unsure (1)..(637): unsure at all n locations
ggaattagcactgcaacagtgatcagcaggcatgcactntgcctcctaactntgcgttgcatgcttactgtttataatttccttcacacgtcacaaagggcagcagtaggagaactttgaaagctcagcagaagaaagatgacaatctattctggcttgtgcttagggcatttgttgttgctatatcgaaaatctgggcaaaatgaacagtgcagaaaggcagcgtatgtggaactctgaagatcgagtgaatccttcctagtggaaaacgagaaaccggtccatgaagttccatttctcccatgtgaatatagatgcgctacttttgtgccgcagtttaagtaatcttttttggagacagctggtctggtttgtagtcgcttcccactgtaggtgaaagaccatgttgggccgtgttcaacatttcacccatatagtcactccaaaacattgttttgcactttaaattgtactgatcgtagagtggattttgaatatgggtacgaggatgggtaagctgacggaaatagcttaaagtttagttatcctagtctggtgttcatgtgttagatgtttggtacaatggatgtcatgtgtcttttggtaaaaggaggatggatctcttttaatgctctcc

SEQ ID NO: 271958 - DNA, 1230 bp, Zea mays
catttcctttggcttcatgataggcctaataagacaacaaataattccagttcatatatgtacattattgcctccttattgcttgaaaatgtggagttgcaattcggctcgatgagcaagctcgcttatttgctcaggtctctgattcagatgaagaagtaacacgaaacaatcaggcggatgcacaggacgggacgaccaatagtggcactgatagagttattcttccctgagaatctctcgctgtttatgaaaacaatgcttcacttctaagagatcatgagacattgcctgatgataatcatgatggatcaactgatagggttgcggatgacgcaagtctccttgcggcgaccaatggtgttcaagcaaagcaagcttctttacatgagcatgatgcatcaactggaagtgtatcgattgacaatgctcagagcttagatggtcagtttagtactactgtgtctactgatcctataaatggtgctaaattggaggctgaagttgcaaccaagacagttgaaccatctaaagtacacaggctgcaagatgagtttgagcaaccattagttgatgctagctatgatgggcaagaaaactctgatagcccagtttctcatccagcattagatacaaaggggctgttgcacacagaagatcagcacaatgtggtacaggtagatgaaactgaattcaagaactcaacatctgggatcacaaaggaagaggtccatgcagccgatttcaggcatgaacaaggaattaacaccacaatggcgatcagcaggcgaactttaaaagctcagcagaagaaagatgacaacctattctggcttgtccttagggcatttgttgttgctatatcgaaaatttgggcaaaatgaacagtgcagaaaggcaccttacgtggaacggtggaactgaagatcgagtgtgatacctttcctactggaaaaccagaaaccggtccatgaagttccatttctcccatgcgaatatagatgtgctctgcagcttaggttattgtttggagacagttggtctactttgtagtcgcttccccctgtagatgtaacattcagtcatcttgttctggtgtcatctgtgaaatatctgctacaatggatgtcatgtgtcttttggtaaaaggaggaggatctctttcacaccgtgtttggtttgaggaatgatatagtctatcaaaaaaaaaaaaaaaaaaaataataaaaa

SEQ ID NO: 271959 - DNA, 1856 bp, Zea mays
ccagcttagtgtccgtccctctcctcgacacgcacatcttccagtccgcgcttgcttcctcgtgtcgtctagctctatccgattccaacacagctacctataaatacatctctctctctctctctctccgagcagagctaggcagaccattggagagaggatcgttggagctcggccgagctgagcacgcacagtgtgattgtgtgtgtgtgtctgacatggcgtcgctctggctagcgagagcgtcgtcccagctggcgcgccgtgccgccgccaggaggcctcctccgcgtcctgcgcgccacggctccgaccaacccaccagttcgtggttcctgggctcagtgccgccgccggcccttgggtcagcagcggcggacacctgccgccgcggcttctgctccgtccggcgcttcgcaggggagagcagcgctgctgctgctgcggcggctgtcgtcgacgaggagccggagagcgggttcgcagccggcgatcagcaggcagttgactttcctggagggaaagtatcctttgtggcagaaatgaacttccttccagaatcgacgagggaaaggatcaactgctaccgcgtgcttgacgacgacggcagaacgatatcaggaagtagattccaagaggtcagtcgggagctggctctgaagatgtacagcgagatggtgacgctccagatcatggataccatcttctacgaggctcagaggcagggcaggatctcgttctacctcacttccaacggcgaggaagcgatcaacatagcctctgctgctgctctcagcattgatgacattgtgctgcctcagtacagggaacctggtgttcttctatggcgtggcttcactctgcaggagtttgcaaaccagtgctttgggaacaagctggactatggtaaagggaggcagatgcccattcactatgggtcgaaccgtctgaactatttcacagtctcgtcacctatcgcaacacagctccctcatgctgttggagctgcctactctctgaagatggacaagaaggacgcgtgtgccatcacatactttggggacggtgggacaagtgagggagacttccatgcagcgctcaacttcgcggctgttatggaggcaccggtgatcttcttctgccgcaacaatggctgggccatcagcactccgactactgaacaattcagaagtgatggagttgtcatccgtggccaggcttatgggatccgtggcatccgagtagatggcaatgatgctcttgctgtgtacagcgcaatccatgctgcccgagaaatggctgtaactgaaggaagaccaattttagttgaggcactgacttaccgagtcggccatcactcgacatccgatgattcgaccaagtacaggccagttgatgagattgagcattggcgaacagcgagggatccgatttccagatacagaaaatgggttcagggtaatgactggtggtctgatgctgaagaatctgagctcaggagcagagtgagaaaagagcttctccaagccatccaggttgcagaaagaatgccaaaaccaccagttactgagcttttcactgatgtttacgacaagatcccttccaacctgcatgaacaagagcaattgctgcgggatacaatcatgaggcaccctgcagactacccaactgatgtacccgtttagttttcttggccttagatgagcagtatcgttgtgtaattattgatgagtcaggtccatagcattttgaataatacagtgattcagccagtgaactgctgattcaacacgttcttaaacaataattcaacctggcagattgccctgttgctggcactcgtgagccatgctaag

SEQ ID NO: 271960 - DNA, 542 bp, Zea mays
tctgagctcaggagcagagtgagaaaagagcttctccaagccatccaggttgcagaaagaatgccaaaaccaccagttactgagcttttcactgatgtttacgacaagatcccttccaacctgcatgaacaagagcaattgctgcgggatacaatcatgaggcaccctgcagactacccaactgatgtacctgttggggtcgtgcttcggtgcgccgaaggtctcacacgaagaagcagcttcggccgaagtcgtctccaagagatggccgaaggtcccttttcatggagcttcggcgttttaaaccgacatagaggcagaatgacctttttatacatgtatgtccgagtcaatgttgtaaacttccgcaaggggcataattgtaatttgtcacaggctgcgacctgtgtctataaatagatgaacagtacctctgtactgttcacgcgaacctgccttttgccttcgcatcacgcttgtacttttgccttccgcaggaccgaaggtacatttgtaattcaaagtcatttatattcattgat

SEQ ID NO: 271961 - DNA, 471 bp, Zea mays
acggcggagccgaaaatgtagtacagggaatttggttttcttctatggctaggcttaactgggcaggtattagcaaaccagtgctttgggatcaagctggactatggtaaagggaggcagatgcccattcactatgggtcgaaccgtctgaactatgtcacagtctcgtcacctatcgcaacacagctcccgcatgctgttggagctgcctactctctgaagatggacaagaaggacgcgtgtgccatcacatactttggggacggtgggacaagtgagggagacttccatgcagcgctcaacttcgcggctgttatggaggcaccggtgatcttcttctgccgtaacaatggctgggccatcagcactccgactactgaacaattcagaagtagcaacagcgtgtcttcatatactgatccatggcagttacaagtaaacaatgcaatgtcgtgttaaaattctagtcgt

SEQ ID NO: 271962 - DNA, 1388 bp, Zea mays
cccacgcgtccgcccacgcgtccgccttcccctacgagtatccaagtccaaccagcaagaggggaggcgctgcacgcaggtcacgcggcgatggacatatgcgatgtttgagcaggcggtggcagatttctgctggcatgcgagggaagtagtgtcgtcagggatggggctctggggttggccgtgggggcgacgtgggccgtcgggcttcggctccgcgtccaccgccgaggaggtcaccgccggcgtcgacgcaagcaacatcactgccatcgtcacaggagcgacgaatggcattggaaaggagacagccagagttctagcactgaggggagccaaggtaatcataccagctaggacactggagagtggcctcaagttgaaggagagcctcgcagatgaggtcccaagctccaaggtacacgttatggagatggacctgagctgtctcagctccgtccgcgacttcgcacggtccttcaattcatcccacaagcatctgaacctcctcataaacaatgcagggatcatggcctgcccttaccagctgtccaaggatggaattgagctgcaattcgcaacgaatcatgttggccatttcttgctgacaagtctcctgctagacaagatgaaatcaactgctgcagagacaggtgtgcagggaaggatcataaacgtatcatcggtcgcgcataaaagaagtgatggtacatgctttgagctgaacaagctaaacgataaggctaggtaccaaccgttcattgcatacgcgcattcgaagttagccaatgttctccacacaaatgagttgtccaggcgttttcaggaagaaggatgcaacctgacagcgaattccctgcatcctggagtgatcatcaccaatatcattcgctatgttgctggaaacagtgcgctgatttcggctctctcccctgtagcaaatcttgttctgaagagcgtgccccggggggctgcaactacttgttacttggcattgcaccctaatgtcaaaggtgtatctggtaaatacttcgctgattgcaatgaagcaacaccgactgctgtcgcgagagactcagagctggcgaagaggctatggtcgttcagcgaagaacttgtcaagatctatgctgatatgtcacagacgacacaggcaagcgaagaggaggaaaccacggttacgaaagacgttttccaagacaagtagcgtaatatatgttgctgcgttttctacgttttgtacctgtcctctgggcccgaatggccagtgactgtaatagcacctaagtgcccgagactggtaagacaaggggtattcagacaatcaagaaaccacggtgcggctgaggcctgaggcagtcctctccgtcgttcacccacaacaagtc

SEQ ID NO: 271963 - DNA, 365 bp, Zea mays
aaattgtcattcaacgaaggcatgccctccagcatcagtcggtaccgatgattgtcagcgaggtataaagcctctaccatccccttcccttgaacataacaggccctacagacagattccattttagtagaagcggtggatcgacaactgcgcctcgttggtctatcttttgtccaaatggcaggatgctgccaatgggcgttgtaagcgcaatcagccaattgggtggtaatgtaagctttagctttagatactgggagatggtctgtcaacagttacttttagcctaaacattcttgtacatctttgaaagtgaacagatttgtaatccttgtggcatataaatggtaacattgttcataact

SEQ ID NO: 271964 - DNA, 428 bp, Zea mays
tctttctttcttctcctccacctcgtcaggcaccctcaaaccctcgccgcaagaaagaagaggtcaatcaaatcgaaccaaaacctcccgaccccacaaggccaagctcatttccatggtggtgtacacgcaggaacatgtgtaccggcacccgtgggaccgggtgacagcggcggcgtggcgcaagttcacggatccggcctcctgtacggcgctctcccacgtcgcagacgttcacaccctacaccgccgcctcgactccgacacgggccgcctccaggccgcgcgctccatcaccgtgcggtccccgccgctccctttcggcctgcgccgactcctcccgtccgccgcggcgtccccaaacggcgccgcgctctgccactgtgttgagacctcgcttgtggactcccagcgccgcgccatggacg

SEQ ID NO: 271965 - DNA, 405 bp, Zea mays
ccaaattccaatcccaccccgccccctttcattaactctagtatcaaccaaccgtccagcgaagagcaggagtcgcatcccagatcccccgcgcatcagagacaggcagggagggaaccgagatccgtccgtccgtgtcgatggagtcaacggtggagcggataagctcgtcggtgcagtcctgggtgaaggaccacgagctcgcagccatcggaggcgtgtgggctgcggcggtgggcacttcggtggcgtacagccggaggaaggcgccgcagcggggcacgggcctgcgcctcatccacgccaggatgcacgcgcaggcgctcacgctcgccgtcctcggcggcgcccccctcttccactactacggcgacggcgggcgcaggaagagggccgacgacatcg

SEQ ID NO: 271966 - DNA, 900 bp, Zea mays
  unsure (1)..(900): unsure at all n locations
cactcccggcatcccttccatccgcgacccgccgcgtccgtacaccggaccatgctctccacacccgccgcatctcggcgcttccgccggggaggtctgccctggaggcttcatacgtgctcctgcctggcgtcgccgctgtcttccagcggcggcgagcctgaaaaggcgaggcctttgctcgcggagaggtaccgggacggtgtcgtcaagaggtttttcacttctgaaccgtgaattcttgatttcggctacgccatctgatttccccattctacacccgaactcacaaagaaactgtcgagtttgcatttggaatgggacagggtaagtggagaaccatgccaaatttctcatgtttgatttggtcgatgctgtggtagatatatttcggatggcagttctaagctgcaacttcgtttggagaagcatgaatctccagtgaacggtgtggaagatgagaatgcagattctttgatcccacaggctattttggactttgtgcttccagctgggtttccagggtctggttcagcggactacctggactacatgttgttgcagttcccaacaaatgtgacaggttggatctgtcatgtattggttacatcaagtcttttgaagattggtacaggctgtaggtgttgggtcctttacaggaacttctgcagctgcatctgctgctgctatcagatgggtatcaaaggatggcattggggcctttggacgtcttcttattggtggacgctttggagcacttttcgatgatgacccanagaagtggaggatgtatgcagatttcatnggaagtgctggaagcatatttgagcttagcactacattatattncaggttactttcttccacttgcatcattagggaaccttgcaaggccatagc

SEQ ID NO: 271967 - DNA, 596 bp, Zea mays
cccacgcgtccgctgagctccacggtcccgtacacggcgctccggcccgacgtgtacgcgccgttcgtcaaggcgttcgacgcggcggcggccgggcccaacttcccctggatgtccagggtcgccgcggtggcgccgttcgaccggtgctacgactccaccaagctcccgcagagtctgctcggctacgccgtgccgcagatcgacgtgatgctggagggcgggcagaacttcacggtgctcggcggcaactccatggtgcaggtgaacgccaacacggcttgcctcggcttcgtccaggcgccggggcaagcgccggcggccgtcatcggtgggttccagctggagaaccacctgctgctgctcgacgtggacaagaagcagctcggattcaccactttcctcaacgcaatcgggctttcctgcagcagcttcaatttcactcttgctagctagtgtgctgctgcatgtatacttaactgtaacaacttgtactgccgtgtattacaaataaataaataaagtgggaataaattgattggagaaaaaaaaaaaaaaaacccaaaaaaaaaaaaaaaaaaaaaaaaaatataaaa

SEQ ID NO: 271968 - DNA, 306 bp, Zea mays
cccacgcgtccggcaccaatagggtgcaactgcagatttatccctgtttttttagactttgcgtgcgtgcctttagattttttgaaacgaaactgctgtatgtctcttccgttaaaccgttgtatgtctctacttcggttagtcgtatttagtatttaacggtgtcaagtcttgataatacgtcaagggataattatgttagtgtccctgttttagggtagaactgtatatctacccttgttttttagactttgcgtgtttgcctgtacaattattatgcttaacatgatgaggatgttatgctct

SEQ ID NO: 271969 - DNA, 469 bp, Zea mays
gtcctcgtccacgccgcgctgcacaaggcggaggacaacgccgccgacgaggctgaccgctggtacgcgccggtgtcacagcagccgtcgcactgaggatctgaatgtggccgttctgcgccttggctgtgatcctattctgtactccctgtttccgagttcctccagctgcgcgagctgggccatccccatctcatctgcgatgaaaaacctgtccctgttggttgtgattcacctgctgccggttccatgggaagttttggatccagcgacgacgcagggctgttaaacttgttctccacgcccatttctgtggtacgtttaaagcgtctcgttcacgtgtatcaaatccggactgaagtctagtgtccattttgagttggagcaatgtcaccccagggacctgcgttcagattttatcgacgccatgcatgtaggcaagggatgctgatatttcagacatggtttt

SEQ ID NO: 271970 - DNA, 583 bp, Zea mays
aaagaaccaagtataaacctgacattgctttcacaaaagcatgggacaatgagcttccaaatatcttcgcggctcccaaaaatccaaagacattactgcttcctgcaaacagggctatttgcagcaataaactttcagaagatagccattaccggcctgaaagccttgttaaattatttcttctaccagacgttttgtgtcttgctaagagaagaaaatcacttgatgctccagtggataataatgatgactttatcccatctgaaccttgggaagacgacaacttttgcaatgaccacattcatgaaggacatgtctgtagtgatgtagaagagccagtaaatcttatcaataaaccgagacaggtcaacaagattgatatacagtatgacaaggtatcaaaacaagtggatgttcatgctttaaaagaagtgctttggaatcacatccatgcatctgctgagactggtcaggaaagagaggaacctggaccaccgctgcgcctatctcaggtgttacatgaccttccaagcagcagcccagatgctgtagcaactgatatttcgccacacctgtatttcat

SEQ ID NO: 271971 - DNA, 1260 bp, Zea mays
cccacgcgtccgccacgcgtccgcccacgcgtccgccacgcgtccggaagcagcaaatattttctgacttagagaagtactgtccttcacattgcatccttgctactaacacatctacaattgatcttaatctgattggggagaaaacaaaggctcaagatcgtattgctggtgcacacttctttagtcctgcgcatgtgatgccacttctggaaatagttcgtactcagcacacttcaccacaagttgttgttgacttgctggatgttgggaagaagattaaaaagacaccaatagtcgtcgggaactgtactggctttgcagttaataggatgttctttccatacactcaatcagcactcttttatgttgatcttggtatggatgtttataagattgatcgtgcttgtaccaaatttggaatgcctatgggtcctttcagactggcagatctggttggttttggtgtggctgtggccactggtatgcaataccttgaaaatttcccagagagggtctacaaatcaatgctacttcctctgatgatggaggacaatagggcaggtgaagccacccaaaaaggattttacaagtatgagggcaagaggaaagcgactcctgatcctgaaattatgaaatatattgaaaaatctaggagcatggcaggagttacaccagatcctgagctgatgaagctaagtgagaaagacatagtcgagatggtgtttttcccggtgataaatgaagcctgccgagtccttgatgagggtatcgccgtcaaggcttctgacctagacatcgcttcaatctttggcatggggttcccaccttataggggaggtgtcatgcactgggcagattccatcggcgcaaagtacatccatggaaagttggaggagtggacaaagcggtatgggggcttcttcaagccctgctcttacctcgctgaaagagctgcaaaagggattcctctgagtgcaccaacaaagaaagttcaggctcggctataagatgatttccttgtggacggaggagactacgttgaataatggattccggtgaagcatttggaatgcgtagagctgtaggctaccactatcacatgcatgtaacgcaatatactactgtgaaaataaagtgcactgcacggcggtttttttatatataaatacaaggatttttttcttgtcacctgtaaaaatttaatcagattttttgtggaatcacatgagaactgaggccccgctccaaatttttacc

SEQ ID NO: 271972 - DNA, 841 bp, Zea mays
cggaattcccgggggcgagccacgcagtccgatgtgagaaatgtgaagtatgaagcagcgaaatattcttcgtgaccttagacgaagtacctggcctggtcacattgcataccgtggtgactaacacatcgtacaagttgatcattaaatctgtattggggagcaaaacaaagtgctcaagaatcgtattgctcggtgcacaacttctttagtcctgcgcatgtgatgccacttctggaaatagttcgtactcagcacacttcaccacaagttgttgctgacttgctggatgttgggaagaagattaaaaagacaccaatagtcgtctgcaactgtactggctttgcagttaataagatgttctttccatacactcaatcagcactcttttatgttgatcttggtatggatgtttataagattgatcgtgcttgtaccaaatttggaatgcctatgggtcctttcagactggcagatctggttggttttggtgtggctgtggccactggtatgcaataccttgaaaatttcccagagagggtctacaaatcaatgctacttcctctgatgatggagggcaatagggcaggtgaagccacccaaaaaggattttacaagtatgagggcaagaggaaagcgactcctgatcctgaaattatgaaatatattgaaaaatctaggagcatggcaggagttacaccagatcctgaggtttgctttcataattctgttgactgtgcacgcccttctggtgttcctcgagaaacatgcagtttttcctttttcaaggtcatgggtttgagttatacaatcgttagtggttgtgtcccgtgaatttttc

SEQ ID NO: 271973 - DNA, 452 bp, Zea mays
gggcttatgggttcaggaattgcaactgcgatggtattaagtaactatcctgtgctacttaaagaagtaaatgagaagttcctaactgctggaatcaacagaatccaagccaatttgcagagtcgagtaaggaaaggaaaaatgaccgaggagcgatatgagaaggctatgtctctcgttactggtgtccttgattatgaacgtttcaaagatgtagacctcgttatagaggcagttattgagaatgtgaagttgaagaggcaaatattttctgacttagagaagtactgtccttcacattgcatccttgctactaacacatctacaattgatcttaatctgattggggagaatacaaaggctcaagatcgtattgctggtgcacacttctttagtcctgcgcatgtgatgccattctggaaatagttcgtactcagcacacttcaccacaa

SEQ ID NO: 271974 - DNA, 469 bp, Zea mays
ccgaccgttccggagacatgctggcggtggtcaacggcgacgggcacggcgcggcgaacggcacggtcaacggcaacgacgtcgctgtcgcgatcgcggtgtaatagtaatgaactggaggatagggacgaacgaacgactggtaggtgtggcgtgccgcgcgtgcccaccggccggtcatatatatcgatcccggcccggcgcggcagcacgtgctatcatctctgaatgtagtgcctcgatcgtatctgtacgtctttaggaaaaggtgtgtccgtgtgtattgtatgtgtgtgagcaagcgtgcgtgacgcgctctgcctgtgtgacaaagcagagcagtacaagctcaggcattttctgtccgagcgatgatttgaactggatctatcatctctgaattgaactcggccggacgacgacctaccgctaaaaaaaaaaaaaaaaaaagaaagagaaaaaagaaaga

SEQ ID NO: 271975 - DNA, 704 bp, Zea mays
  unsure (1)..(704): unsure at all n locations
agctgcagatgaagtagtagtccttggcgtccttgagctggaaggcgtaggtgtggcccttgctgtagctgctcagcgcgttggccttgtcgcagttgtcgtagccgacctcgtccacctgcaccacgtccgaccgcccgttctggtactcgaagatgagccagtctcccttgtagaacggcttgtgcttcttcacccacgccgtgtagtccacgtccgggttccaccccttctcgtcgcccaccgtgtagttggccgccaccgccgccgccggcagctgccacgccgccaccaaggcggccagcaggagggccagcgccagccgcgacgtcgccgccattcctctgaccccggcctcttgctgatcgacagagacggatgagcttgcagctagctggagcctggacctggaggaagaggtctgagctagtaattggagtggggtattggtggtggtggcctgggtctggtgagtggggacgaaccgacggacagcagtgcagacaagtcacgacgagctaaaagctggtgacctctctctctgcttgcttgcttgcttgtatattgccaagaaccctccataagcagaggcagtcaggaggagactggcgtgtgcagtaattattcatgcatgatttggcacaatcagtcaattgagccccngntnaaaatatatagattttactataatggtaacttaattg

SEQ ID NO: 271976 - DNA, 469 bp, Zea mays
cggacgcgtgggaggaaagtaacaagctggaaagcaagaaccaagatacattgttggatgcatagatcctgcatggatctgcaatagaatctacagcacaccacattatatgcgaaggtaaaattgagaagtgaacaatgctcttaggttaaggtggaaaatggaacatcttgagggaaatactcagtgcaagcttcagttctgaacacgtccttgattcttttagtcaagcttggtgtgttcagaagtctgtggtgttttttttgtatatatagaaaattgttagcaggcaagagcatttcagttgattttgttggtcccagacttatcatttgattgcggtcctagtacttgaatttttgctgcgtgcctaaagtcgtatgcctatttcatctgtactatcagagaaatgctagttcttttaatcaacaacagttttttttgtctcaaaaaaaaaacaaaagggaaa

SEQ ID NO: 271977 - DNA, 857 bp, Zea mays
cccacgcgtccgcccacgcgtccgcggacgcgtggggacgacatggcccagcacgccgaggccttcggcggcgtctctgacgacgaggacgtgccttcccaccttcgcgccctcgccaacgccgcccagtccggcgacgtccccgcccttgaggctgccctcgataatcatgatggcggtattgatgttccagttgaagatggtgatactttgctccatctggcatgcttatatggtcatcttccttgtgtgcagctattcctggaacgtggcagctagcttggaatgccaagacgaagaaggtgctattcctcttcacgatgcttgtgctggaggcttcactgagctggtccaatatattctcaactttgctgccaacaaggatggttgcgtagtgagaatgctcaacactattgattctgaaggcgatacgccgctccatcatgctgctagaggagaacatttggatgttgtcaagcttcttctccaggctggggcgtcccccaagaaggagaacacttacgggcagacacccgctgatatggctgaccaagacaccgaagttcgaaccctgttgactgccaagcaaattgaggcaagcacacacatgagtgatgattaagcggcattggaatccttagttgcaactggtaatgttgagaaatagccgtaacatcttatctgccatccaaacttcatttgaactgaagtaatattgtaatcagactagtatggaggggttagcttagctacatgatcatgctccttttccttatcgctgcattatactaaagatgaagtgggacacccatcggtctttcttgttctttcgcggaaaatctgatgcttgatcaccg

SEQ ID NO: 271978 - DNA, 678 bp, Zea mays
ctcactcttgagtccacacgctctggcgcacgcgcaccgtgcacaccatggccgctgcctcagcttcgcttctccacctcgcgaccccgaccctgactcgctccactcgcctcgccgtccgcctccccagcgcccagctgtcgcgctggccatcgggggcacgcatcgccgccgcgcagccgccgcgggcgtacaaggtgacgatcgagcacggcggcgagtcgcgggtggtggaggtggcggaggacgagacgatcctgtcccgcgcgctggacgagggcctggacgtgccgcacgactgcaagctcggcgtgtgcatgacgtgcccggcgcggctggtctccgggacggtggaccagagcgacggcatgctcagcgacgacgtcgtcgcgcgggggtacgcgctgctctgcgccgcgtacccgcgctccgactgcaccatccgcgtcatccccgaggacgagctgctcaaggtccagctcgccaccgtcgacgactgactgacgctccgccgatgaccagcggaccggccagcaggcatcaacctccggcggtgtaatgatgtccctgagacttgtacaccattgttgactagtagcactagtgacagagcttttctcgagaatagatgctgtgtgatatgcctctgccaaatttctggtatccaaatcgagcatt

SEQ ID NO: 271979 - DNA, 756 bp, Zea mays
agtatttcaatcaaatcttaacggttgtgcttgaggtattagacgactctgattcatccatgagggagcttgctttatctttgattgctgagatgctcaacaatcagaaagatgcaattgaagactctacggagatcgttcttgaaaaacttctgcatgtgaccaaagatgcagtggccaagatttcaaatgaagcaaaccaatgtttaaatgttctattggcaaaatacgaccctttcagatgtcttgatgttattgtacctctattggtcagtgatgatgagaagatacttgttgtgtgtatcaactgtttgacaaagaaattgtaacgtaaatggtaacagtaatgattctcacccgtttgacaacgcttgttgggcgcctttcccaagaggaattgattgataaattgcctacatttctgccagcattatttgatgcttttaacaaccaaagtccagatgtccgaaagactgttgtgttctgcttggtggatatgtacatcatgcttgggaaagcattcgctccatacttggaagggcttagcagcacgcagctccgcctagtaaccatatacgctaaccggatttcgcaggcgaggtctggcaagccaatcgattctaaccaatgagattttaacattgttattatttgtggtctatatgagcttttcttcggtaggctggttttcttgtcatttgtttatgtatgtgtatagtataaacaagtgtcttctatctgtcaagagctcctggt

SEQ ID NO: 271980 - DNA, 822 bp, Zea mays
atgtgggagaaagtcagtccagcgctacagcgtgcagtgcaaagccagatgagtctaatgagcacaccgttcatcgacaacagtgaccttttcgaaaccggcagtacaggaggcatgtcaagggatttgattgataggatcccaaagacgaggttcagtgctgcgagcaactgtgatcaggaaactgatagcagctgctgcccagtctgcctccaggatttcggagcacggcaattcgtgagggccctgcctcagtgccaacacatattccacgtgcggtgcatcgacagttggctcctccggcacgcgtcctgcccgctatgccgggccggtgttcacatagaccatatacatatgtaaatgaactcgcagggtggcacctggtgtattttcgtagcgaatacccgtgctcctgttggatatcacaagtatagctgtatacatagggtttttttgctctctctttttgtcacttcttgagacttgcttgtgtggggctatgctttcagctgcacgtttttgtcgaagcatgatgccttgatatgtacatctggaaaatggaccgactaacaagctccctgaattctggcactgtaaccctatgtatacagctatacttgtgatatccaacaggagcacgggtattcgctacgaaaatacaccaggtgccaccctgcgagttcatttacatatgtatatggtctatgtgaacaccggcccggcatagcgggcaggacgcgtgccggaggagccaactgtcgatgcaccgcacgtggaatatgtgttggcactgaggcagggccctcacgaattgccgtgctc

SEQ ID NO: 271981 - DNA, 359 bp, Zea mays
ttcacgcgtccgcccacgcgtccgcgacaattggctccttcggcacgcatcctgcccactatgccgggccggcgttcatattgaccatatacatatgtaaataaactcgcagggtggcacctggtgtattttcatagtgaatacccgtgctcctgttggatatcacaagtatagctggatggatacataggttttctcctttttttttgttacttctccggtcttatgtggggctatgctttcagctgcacggttttgtcgaagtaatacctggattggctggatatgtacatcttgagaacggattgactaacaagctccctgaattatggtcctgtgtgcttcaaaaactgctttca

SEQ ID NO: 271982 - DNA, 656 bp, Zea mays
atgtaaatctatgaatccattattactctcttctgctgatgaataaaaattacagtatataccatgtgtatgcgtttaccctccaagttttcacaccacgaggcaggagcaggtaacatttacaagttaccactgatcagtaattcagtatacaggcggcggaggagcatgcaccgctggaggtggtggcgcgatgcacccgtgggcgtcgcagtggacttgcggttggtgtaggaatgagacgcactcctcgcctggccgctggtcggggcggccagcgatgcagttctgccggtcgtcgacgcgcggcacctcgaggcaccggcgcggctcgccgcagaagaagttgtacgagtaggtgaagttcttgaggtgcggcagcccgcagacgctctccggtatctcgccggcgagcctgttgtgcgcgacgtcgagctgctccagcgcccgcatgttgccgatcgtgtccggcagggtgccggcgatgctgttgaagctgaggtccagcacggtgagcttgtccagcttgccgatctcgggcgggatgcaggaggagatgccgctgttgagcaggatcagctcgttgagcgtggcggccatgtcgccgatgctgctctgcaggcagccgctgacccgctgcatgttcgccagcacga

SEQ ID NO: 271983 - DNA, 399 bp, Zea mays
ggaactgcaaagagcctggccacatggctaacagctgcccaaatgaagggatatgccgtaactgtggcaagtccggtcacattgcaagagactgcaccgctccaccagtgccgccaggagaagtgatcctttgcagcaactgctacaaaccagggcattttcgtgaggaatgcaccaatgagaaggcctgcaataattgccggcagagcggccaccttgcccgtaactgcaccaatgatcctgtttgcaacctgtgcaatgttgctggccatctggcccgtcagtgccccaagtctgatacattgggtgagaggggtgggcctcctcccttccgtggtgttggcgctcccttccatgatgttggcgctcccttccgtggtggcttcagtgacgtggtct

SEQ ID NO: 271984 - DNA, 1913 bp, Zea mays
cccacgcgtccgcccacgcgtccgcactttgctagccagcatatacttacacgtagctagcttaataatcagcagctggtgcagcaagagtaacagctagcgacgacgaccatatggcggcgaagcagccagtcgtcgctgctgctgcctccggccaccccaagatgggggaggagaagctgatcatccggccggagaaggtgcggttcatagacgtgctgtcgatgctgctcctgaggcgccccatcaccagctacgcattcgtggaggccggcgaccggaccgccgccgacctgggcagcacgcccggcgactggctcgtcgcgctcacgcaggtcatccagaaggcgctcgccggcgcctactacccggctctcgtggtcggcgccgtcgtcgagttcctcctcaacttcgtcgcgctcaacaatggcatactcggcatctttctcaacctcttcagatgtaagctggtgatcccactgaaccgggaggcgcccaacttccggtccatgatcgggatgatcgacgggaggacggagctgaagccgctgccagccagcggcggcccagaggaccggcggctgcaggtggtgggcgtctccgccgccgccggatccggcggcgatgactactacttggacgtggagagcggcagcgcggcggtgccgctggtgcagcagcagtacgtgaacgggcggctcgtccgcctccgcaccttctccgtgttcgaggtgagcatgatggccgccaagatcgcctacgagaacgccgcctacatcgagaacgtcgtcaacaacgtctggaagttccacttcgtagggttctacaactgctggaacaagttcgtgggcgaccacacgacgcaggcgttcgtgttcaccgacaaggcagaggacgcgagcgtggtggtggtgtcgttccggggcacggagcccttcaacatgcgggactggtccacggacgtaaacctgtcgtggctgggcatgggcgagctgggccacgtccacgtcggcttcctcaaggcgctgggcctgcaggaggaggacggcaaggacgccacgcgggcgttccccaaggccgcccccaacgccgtcccgggcaagccgctggcctactacgcgctgcgcgaggaggtccagaagcagctgcagaagcacccgaacgccaacgtcgtggtcaccggccacagcctcggcgccgcgctggcgaccatcttcccggcgctgctggcgttccacggggagcggggcgtcctggaccgcctgctctccgtggtcacctacgggcagccgcgcgtgggcgacaaggtgttcgcgggctacgtgcgcgccaacgtgcccgtggagccgctccgggtggtgtaccgctacgacgtggtcccgcgcgtgcccttcgacgcgccgcccgtcgccgacttcgcgcacggcggcacctgcgtctacttcgacggctggtacaagggccgcgagatcgccaagggcggcgacgcgcccaacaagaactacttcgaccccaggtacctgctgtccatgtacggcaacgcgtggggggacctcttcaagggcgccttcctgtgggccaaggagggcaaggactaccgcgagggcgccgtctcgctgctctaccgcgccaccggcctgctcgtgcccggcatcgcgtcgcacagccccagggactacgtcaacgccgtccgcctcggcagcgtcgcctcggcgtagcttttggattgcatgttcgtttccatgcatgtgtatcattgcatgcaataattggatgaaataaacagcaacaagcttcatcagtattattattgttgttgttgaataaaagcatccccccccctctatatagaattataaatacattaggcctggccggccgcgcccgttttttaacagtttaagcgcttcccc

SEQ ID NO: 271985 - DNA, 887 bp, Zea mays
  unsure (1)..(887): unsure at all n locations
aaaaaaagaaccgtacgtgcatacataaaattaagaattaatggctgccaatggacgacatatggatggacaggtaagctggtgatgccactgaaccgggangcgcccaacttccggtccatgatcgngatgatcgacgggaggacggagctgaagccgctgccagccagcggcggcccagaggaccggcggctgcaggtggtgggcgtctccgccgccgccggatccggcgcgatgactactacttggacgtggagagcggcagccggcggtgccctggtgcagcagcagtacgtgaactggcggctcgtccgcctccgcaccttctccgtgttcgaggtgagcatgatggccgccaagatcgcctacgagaacgccgccacatcgagaacgtcgtcaacaacgtctggaagttccacttcgtggggttctacaactgctggaacaagttcgtgggcgaccacacgacgcaggcgttcgtgttcaccgacaaggcagaggacgcgagcgtggtggtggtgtcgttccggggcacggagcccttcaacatgcgggactggtccacggacgtaaaccgtgcccggcatcgcgtcgcacagccccagggactacgtacgccgtccgcctcggcagcgtcgcctcggcgtagcttttggattgcgtgttcgtttccatgcatgtgtatcaccgcatgcaataattggatgcaataaacagcaccaagcttcccccgtattaaaaaaaaaaaaaaaaaaatataaaaataaaaaaaaaaaaaaaaaaaaaaagacaaattgattcaaaagaaaaagtatttaaaaagagataattaaatttaaaaaaaaagtatgatttataacaaagttaaaacttaaaaaacgtttgtt

SEQ ID NO: 271986 - DNA, 318 bp, Zea mays
agcttgagcattccactttgctagccagcatacttacacgtagctagcttaatcaacagcaggagtaacagctagcgacgacgaccatatatatggcggcgaacaggcggtcgtcgctgctgctgcctccggccaccccaagatgggggaggagaagctgatcatccggccggagaaggtgcggttcatagacgtgctgtcgatgctgctcctgaggcgccccatcaccagctacgcgttcgtggaggccggcgaccggaccgccgccgacctgggcagcacgcccggcgactggctcgtcgcgctcacgcaagtcat

SEQ ID NO: 271987 - DNA, 938 bp, Zea mays
ccacgcgtccgccacgcgtccgtgatgttgcttactgggcacgcagctttgaccaggatctggataaagcatgcatagagcaatacagccaaagatgttggacaactgggtttggtttaaattttagagttattgccctttcacctgggtttagaagactgtctctagaacacctagcctcgtcttataagaaggctaacaggaggatgatattcctggactacgatgggacccttgtgccgcagacatcacacgacaaatctccaagcgctgaacttatctctacccttaacagcttgtgcagtgatatgaagaacacagtatttatagtcagcggacgaggaagagattccctaagcgagtggtttgcttcatgcgagaacctcggtatcgctgccgaacatggttactttatcagatggaacaaagcagctgaatgggagacaagcttctcaggtatttattctgaatggaagctcatcgcggaccctatcatgcatgtatacatggaaacaactgatgggtccttcatagagccaaaagagagcgctttggtatggcactatcagaacacggatcatgactttggctcgtgccaggcaaaggagctagtgagccatcttgagcgagtcctatcgaacgaacctgttgtcgtgaggcgtggccatcagatcgtagaagttaaacctcagggagttagcaaggggatttccgtggacaagatcatccggaccttggtcagcaaaggggaagtaccagaccttttgatgtgcatcggaaacgatcggtcggacgaggacatgttcgagagcatcaacagagccacctccctttccgagcttcctgccgctccagaagtattcgcctgttccgttggccccaaggccagcaaggcaaactactacgtcgatggctgctgacgaggtcagctgccggcg

SEQ ID NO: 271988 - DNA, 472 bp, Zea mays
caattgtgtagagcgctttgaccatcattgcccctgggttggacaatgcattgggcagcgcaattaccggtactttttcatgtttgtttcttcctcgactcttctctgcatttatgtatttgcaatgtcagccttgtacatcaagtttatcatggatgaggattatccaacagtatggaaggctttcaaacactctcccgcttctttggggcttctgatatattgtttcattgctctctggtttgttggtggactcactggatttcatatgtacctcattagcaccaaccagaccacgtacgagaatttccgatacagatcagacagcaggcctaacatctatagccaaggatgtctgaataactttctacaagtcttctgcagcaagacaaagccttctaaacacaagttccgggcctacgcgcaagaggaagtgcggcctacaacggttagcttcggcagggaggtcgat

SEQ ID NO: 271989 - DNA, 993 bp, Zea mays
acatgtggatcttgaacctgtgcaaactgaaaggccaggagaattgacagcatattacaagattgctaaacattataagtgggccttggacaacctattcattaaacataattttgctcgagtaatcattctagaagatgacatggagattgccccggattttttcgactacttcgaggctgcagctaaactacttgataatgacaagacgattatggctgtttcgtcttggaatgacaatgggcagaagcagtttgttaacgacccaaaagctctttaccgctcagatttctttcctgggcttggatggatgttaacaaagtccacttggattgaattgtcaccaaagtggcctaaagcttattgggatgattgggtgaggctaaaggaggtacatggacatcggcaattcatacgcccggaaatttgtagaacatacaattttggcaagcatggatcaagcttgggacagttcttcgagcaatacttggagcccattaagttaaacgatgttcatatcgattggaattctgaggatctgagctaccttagggaggataagttttcaaccaaatttggaaaagaggtggctagtgccactcctctccgtggatcagatgctgtgttgaaagcccacaatatggctgaggatgtaaggatccaatacgacgaccaagaaggtttcgagcagatagctcgtcaatttggaatattcgaagaatggaaggatggcatcccaagaacggcttacaaaggagtggtggtcttccggtacaacagtagtcaaaggcgaatatttctcgtcagcccagattctcttcgtcagctgggggtgtagcatgttgagaaggtagatttttacccttggaatggcaaatatcatggaattgcttaactggtttctgtgcatgcatcccgattcctccatgctcaccatgccctgaagttggagcttatcagcaaccaaagctgggtctccaattcatagtcaca

SEQ ID NO: 271990 - DNA, 443 bp, Zea mays
tcagctgggggtgtagcatgttgagaaggtagattttttacccttggaatggcaaatatcatggaattgcttaactggtttctgtgagcatggaggaaccgggatgcatggtgaagaaattatttttgagaagtgattgtgttgacccaaaggtactggagtagtagaagcatgggcttggtttataggacatttgcaagatataatacatcgttgttatatctttctccgcatcaggaaatgtttagtcagtatgggacttgttatccttgagtgtatttagggtttacccgatgcagttgcatgcgctcaaaagagtgtagcaggagctcactagctgacctggacgctcgatcctttttggtagaagaaaggtgtatctttatgaccaaatttttcttattgggcatcttggaatattaagatggaaggaaatcttgtgc

SEQ ID NO: 271991 - DNA, 620 bp, Zea mays
tcttggagttggtccgtgaaggggttaagatcatgctagatataatggagaactcatcgctctgtgctgagactggaacttcgcaggaaggagtgggagtgaaaaatccagatgaatgttcattggaggaaccacaatccatgaatttgttgccagaaccggcactgtattctccagatgacttcgttaatgaacaagagaaccgtagtccgtcagaaattgttgaattagtcaaaccatctgtattgacatttccttactcgccggaaaatactaatgacaaagaggagaaattgagtccacaatccgttcttgaccccattgcagaagttaccagtcctagacacaaaactccaaagcaagatgaattctccatgcctacttccagagtgctattcaaagaggttgacgccccttcagcatccccagctttgtggaatgggccacaggtagccattttggatgacagagccacaagggtgtccttcatcaaggccgtgctagaagcttcaggattgctgtctgaggaaaattcgcaaatttggtacacagaagagccactgcttgatgtatctgtactggctgaagtaggaaactcgtactgcctgacagacgatgca

SEQ ID NO: 271992 - DNA, 434 bp, Zea mays
ccgcctatggacaagcatcggctcctagttcacattcttagacatcaagaaaggggctgagaaatcatcatatcttgctcaactaataaaatgtgccaccagcttgctcgtggcattgatcgcaaccttaatgctttaagcatacatggtcgtaaatcacaggccgaaagagataatcttcttaatcagtttcgaactggcagggctccagcattagtagccacacatgttgctgctcgtggacttgatatcaaagatatcagactggcactcaattatgactttccaactgggatagaggactatgtgcatcgcatacggcgtacaggaagagctcgcgctactggagtctcgtacacgtttttctcagaacaagattggaaatatgcttgtgctttggtgaactcttgcaaggtgccaaccagcttgtccct

SEQ ID NO: 271993 - DNA, 1135 bp, Zea mays
gcagtgggctgcgaccgaatccaacataagaggaaaggggcgcttgctttatattctttctaacctgcgatctccgtccatccagccgagaggtcgtgtgcgcgtggatctctgcgtggaagggatgaagattacggcgctcctggtgctgaagccgtcgacctccggagccgggagctcctcgtccggcggcgagtcgggcccggaggcggtggtgctcgcgaacgcgatagacgtcagccacttcggctacttccagcgcagcgccgcccgcgagttcatcgtcttcgttgcccgcaccgtcgctcagcgcacccagccaggccagcggcagtccgtccagcacgaagaatacaaggtccactcccacaatagaaatgggctttgtgcggttgcattcatggatgatcactatcctgtacggagtgcattttctcttctgaatcaggttcttgatgagtaccagaaggcttttggggactcctggaaatctgcgactgcagatggaactcaacagtgggctttcctgacagacgccttggcaagatttcaggaccctgcggaagctgacaaactaatgaaaattcagagggacttggatgaaacaaaaattattcttcataaaactattgatagtgtcctggccagaggagagagattggatagcttggttgagaaaagttctgatctaagtgctgcttctcagatgttctacaagcaggcaaagaagacaaaccaatgttgcacaatactttaaactttggtgcttcaatcatgtttgcaagaaacaaaaacgatcgatattgtgctaatttactgtaagttaaatcgcccatgaagcgtggacacgcggttgcaaggctcgagctcagtgctgttggtctcagtttgcaaggctatagttttctccaagacctgccgattggactgttttcttgtgagaattcctgctctccaaacagcacatggagtatcattctttagtggttatgaaactgcgtagtgcctgctaacaccatttattgtactatataaggcttgcctcaaactgcagaaattaccaaatattgttaaattctcagagcttactggcagtggcgaagacagcacaagctgatagtctcttcttgcttct

SEQ ID NO: 271994 - DNA, 364 bp, Zea mays
gcgaccgaatccaacaggagaggaaaggggcgcttgctttatattccttctcggctgcaatctgcgtccatctatccagccgtctcggggcagccaagaggtcgtgtgcgcgtggatctctccgtagaagggatgaagatcacggcgctccttgtgctgaagccgtcgacctccggagccggtagctcctcgtccggcggccagtcgggcccggaggcggtcgtgctcgcgaacgcgacggacgtcagccacttcggctacttccagcgcagcgccgcccgcgagttcatcgtcttcgttgcccgcaccgtcgctcagcgcacccagccaggccagcggcagtccgtccagcacgaagaatata

SEQ ID NO: 271995 - DNA, 507 bp, Zea mays
cccggccgacccatgctcacctgcctatctatctagcgagagagagagaggaaagctagctagctagcatggagtgcggcagcaagaaggcagcaggcggtgtgttggcgctgctgcttctccagctggtgttagctccgacgacggcgacggcccgcctcctgcaggcggatacctccaccgtggttggcctggacatcatcgcgagggagtttggccatccagtgagaggcatcctctgtggtgaaacctgtgtcttcctaccatgctatacggcagccatgggttgccaatgcattggccaaatctgcatgatgtgatatctggactagcgctatttgtaatttgtgttgggagaaacacaaggacggtacggtggtgttcaacttattgcatgtgtatggtgatctaataagtaaagtataataaaaagggatatgttggatgtgtacccatcgcctgctccttacatcatttttgacatatatatactcccttcgttccagt

SEQ ID NO: 271996 - DNA, 363 bp, Zea mays
gcccgtctcttcatctattcatatgctactgcagagaaagggtctttgcacgagtattggggggaacatgatgctaagagcttgaagacattttgtcaagaacacctgccaagattctccaaacgggtagatattagccaattcagcttccctgtaaatgttctaccaaaccttcctcaagtgctcttactatcgagtaagacggacacaccagcaatgtggcgtgctatcagtgggatgttccgcaatcggataatcttttatgatgctgaggttcacgatgtttctcatcctctgctgaaaagtcttggcgtgaagaatctcccagcgtaattgggcggaaccgtgaatggtgaggagctc

SEQ ID NO: 271997 - DNA, 430 bp, Zea mays
cgctcgttcgcacgggcggacgcgtgggcggacgcgggggctgtcgcgtgggcccgggaccacaaggcagccagaagacgcgcgcgcccctctcgggtctcggccgcgccgtcgcgctcaccaggtctccaccatcaccagagtggcggcgctctctcctatcgcggcgagcgacggcggcgatgggaggaggggagatggcggggtggctgaaggcactggcgtacagcgccgggggcgtagcggtggccggcctagcggcgttggttgcgctgcaggagcgcctcgtctacgtgcccgtgctcccgggtctggcgcgctcgtaccccatcacgcccgcccgcctcggcctcatctacgaggatgcctggctccgtgccgaggacggtgtgcggctccactactggttaatgcgtaacttccccagcta

SEQ ID NO: 271998 - DNA, 876 bp, Zea mays
cttttgtgatcagtggtatcaacacgggatcaaattgtggatatgagatgttccactcttctgccattgctgctgcgagggaggccttagtgtatggggtgccttcaattgcaatctcattccggtttatgtgacttggaagaaggacgaaaccaaagacagtgacttcaaggatgcagctcaggcctgtttaccattgataaatgctgctttggatgacattgagaaaggaactttcctcagaggttgcctattgaatattggagttccaagtgcaccatctgcaaataagggtttcaagttgaccaaacagagtggatacagtcctgctcaaagttgggaagctgtgtcaacaagcaggcccttatctgctactcacttcatgggcatgcatcaaagcctcggtattcagttggcacagcttgggaaggatgcatctgcagcagcagctgcacgtagagttagtgcccaacgaaaggcggtcgaggttgagtctggtgcagctgctggtaaacaagaaactcgagaagtagtgaagaagttattccgtgctgagtttgtcgagaggcaacatcaaggtttagatgaggataccgatttgagagctttggagaatggatttgtatcggtcacccctctgaatgttcatgggcaagtggagcctgaaatccaagccccagcttcagattggctctcagcagctgtatcactagagaaagaaaaggaagctgctccagctacagctgaagctcattcagcagcctaacaaacacgcagacatgtacacactccgtacgtgccttagttcctgtggtgatggcgctcttttctctcttccgtttatcagttcagtttgtttagtatttctcccgcaat

SEQ ID NO: 271999 - DNA, 544 bp, Zea mays
tatgctcggacccagtctgtgggatgtctggaataataaatctcacataatgtcagttgagatggtttcttgtattgctattgaagcaatctgcatacttgagaaattacattcaaaagggtatgttcatggcgatgtcaaaccagagaatttcttgctagggactcctgggacacctgaagaaaagaaactcttccttgttgatcttggcttagctacgaagtggaaggatattgcaacagggcggcacgttaaatatgatcagcgtccagatgttttcagttcatccacgagaggatcactaggccgtggtcaagcatttgatgcgctaaatcaagggcctgatcagggagtcgcctcccccaagatctgtggataggaaatgcagctcaagggcttcagcgacagtgacatggggaacatttcgctatgctagtgttcatgcacatcttgggagaacaggtagcaggagggatgatttagaatctctagcatatacactagtctttcttctacgaggatgtctaccttggcaaggttatca

SEQ ID NO: 272000 - DNA, 735 bp, Zea mays
atggatctgaatggaggttcaagcacatatacaggggccaaccccgtcggcaccttctgactactggatggagcacgtttgtcacatcaaagaagctgattgctggtgacgcgtttgtctacctgaggagcgagaccggacagcagcgtgtgggagtgaggcgcctcgtgcagaagcaaagcacaatgccagcatctgttatatcaagccaaagcatgcatcttggggtgcttgcaagtgcatccacacgctattaggactcattccattttcctagtgtattatagaccaaggttaagccaaagccaatacatcgtcaggctgaacaagtacctggaatctagtaaaattggattcgatgtgggcatgaggtttaagatgagttttgaaggggatgacgtccctataaagaagttttctggaacagttgtcgataaaggagatctttctccacattggcatggttctgaatggaagacattgaaggtcatatgggacgaagccacatacttatatggccctgagagggttccctcctgggaaattgaaccgttcgatgcatccgctcctgccatcaccttgcccgtgcatccagcaatgaaaaacatatggcctagggagacactctgaaggcctggatattcttgcgctggtaacctgctcatgaattctggctctctggaaggcctgaacagcatgagaagacaagcgtaagctccagcgaacccaaacatc

SEQ ID NO: 272001 - DNA, 752 bp, Zea mays
  unsure (1)..(752): unsure at all n locations
cggacgcgtgggtgcccatcttctccaccgagcacgaactgtcttggatccgtgcgcgcgtgccgtacatacctcgtcatgcaggagttcaggtgctgcctaatcctcggcggccctcaccgcgccaccggcgtctcgcgtcgtcgctgccgatcgatcgatcgtccagcccgccgtcagttgagttccgaaccccgatgcttatagcctcccatccctggttagcaagcatcgtgtgtatcttgcatctcagacttgcttcctcttcatcattcattcattcatactcaagcattaattattcaggaccaagcaagcggtagaattcaaattcaattcgcacaaccctttgcttgtcagctagcttaccttgtgtattggatttgaatacatgctggtaatccatctaataagaaagcgctgtgtggcgctacctgtccgtagtatggccgcgccgactgtctgtcggctggcatggcatgatatacattctagttatcttgaaccaaaggcgactgtccgtagagttgcttgctcttgcttcancaggtgggaatggcgccgagcacttgggttcgcctgtctcagttaccagaagagcctaatcccatcgtctctcgtacgtcgctcggatgtccgcatcaacgaccagcgcggcagccagcatgcacaggcgcgccgagaatgatcagggggtgccgtctctatccttcattcagcgattcgctttctgaaaagaacatttgtcaaaa

SEQ ID NO: 272002 - DNA, 298 bp, Zea mays
agcgatcagaaatattatcaggtacctttgtgcatcgcggatgaagaatctaccttctccagagatggaaggtgttgatactcttctgatgtatctttatggagcacttcatcttgttgatgacatggagaagctcgcatcatctcagaatagctgttttgtggatgaactggaatcccttttggatgactctggacatttgcggacacttgctttcttgtatggcagcaaaggaatgtgctccaaagccctttctatatggcgcgtactggcaaggaattatagtgcaggtttgtgg

SEQ ID NO: 272003 - DNA, 1254 bp, Zea mays
gcaagatcttatcctgtataaaagtcggtgcgagaataggctgaatgagattacagaaagggcgtcctctgataaacgcgaggtggaatcattggctaagaaatatgaagagaagtacaagcaagtagctgagttagcttccaaactagcagttgaagaagctgcatatcgtgatgttcaggagagaaaagttgagctgcatgatgcactgattaaaatggtacaaggtggaagtgttgatggtttacttcaggttcgagctgatcgaatccaatatcaattagaagagatggaaaaagctcttagtgaacggtgcaaacactttgaacttaaattcaaaccatctgcatcagttgagcttccttccggttgggaacctgggccacaagagggactcattgagtgggatgaagactgggataaatttgaagacgaagggtttagtattgttaaggataatggtacaatacaggaaaacccagtttctgctgaaaatggaaaagtgccatctctttgggatgatggtgatatgtctcctgttgcatcctctaatggtcatatcaaggaagaaaggcgttacagtggaggtgatcaagtggctgagagtgaaatagcatatgattttggtgatgaatctgtgaggagtcctggcagtgctggaagaagtgcctcagggagtccatttaaatcttcccgctttggcatgcatgactcatctcccagcaaaagagaaagttacagtgaccatggtggttctgaatccgtttttggtgacaagtttgctgatgaaacttcctggaactttgatgatcaagatactgactctgtttggggttctactgtactgaacactgaggcggaccaacgcggtggcacgcataactctttctttgggtcggaggcaggctcaccaagtggcgctagtgtatttggaaagaagaggaattcattcttcgatgattctgttccaagttctcctgcatacacatctgggttctctccaaaatttggcgaaagccgtgacgatagctcctcttataacttcgggaggtttgattccttcagatcccaagacactggatccttccctcaggaaagccgtttctccaggttcgactccattaccagctccaagggcgagaatgtatcaggatttgacacaggaaatagctcacgaaattttggccggtttgactcttttgatgacgccgacccattcggttcaagtggaccttttaaagcatcgggaagccg

SEQ ID NO: 272004 - DNA, 428 bp, Zea mays
ccggtccggaattcccgggtcgacccacgccttccgttttcaagggaaggtcgataaactgtgagatactgagattgaagctgcacactgttttagtttcttcaaggacaaggaacattaatatcaccaaatactttcgtcaatggagcttgaagctgatttcgctgatgaagatgtcagttcaaataatggattacaagacctgtggtcacttggcgagatagatccaaagagagcaaggttcccgtgctgcattgtctggactcctcttcctgtagtttcatggcttgccccttacatagggcatgtcggaatctgtcaggaggacggggctgtcttggattttgctggttcgaatttggtgagcgtggataattttgcttatggttcagttgccagatacctccagcttgacagatagaagtgct

SEQ ID NO: 272005 - DNA, 392 bp, Zea mays
accggtccggaattccccggttcgaccgacccgtccgaaagcaaagagagagagagagagagagaggcaggctaggttaggaagacgcagccaatggcggggcttcacttcgtgctcgtgccgctactggcgcagggccacataatcccgatggtggacctggcgcgcctcctcgccggccgcggcgcgcgcgtcagcgtggtcaccacgcccgtcaacgccgcgcgcaacggggccgtcgtcgagagcgcgcggcgagcggggctcgacctccagctggcggagggcgcgttccccggcccggggctcgggctgccagaggggatggagaaacgtcgacttggtggcggaaaaggagcacttcatgcccttcttccaggccacgtggaaga

SEQ ID NO: 272006 - DNA, 1270 bp, Zea mays
cataattcctacctcactgggaacagctcaatagtgactccagtgacgtcccaattgtaaaggcgttgcagagaggtgttagagtcattgaactcgatatgtggcccaatccttcaaaggacaatgtcgatattcttcatggagggacattgactgccccagtggaaatgatcaaatgtttgaataccatcaaagaatacgccttctgtgcctcaaattatcctcttgttattactcttgaggatcacctcacatcagatctccaagctaaagttgctacgatgctcactgaaacatttggagatcttcttttcgtccctaatccagacccgatgaaagagtttccttctccagcatctctaatgaagagaataatcatatcaaccaaacctccacaagaatataaggagtttctcaaagccgagaataatcgcagtggcagcggaaacatagctgagttgccagaccaaggaagcctgagaagaatagattcaaatgccgatgaatctgatgggaaggatgaactggatgagcaagacgaggaagactccgacgaggacgatcccaaatttcagcaggatacagcctgtgagtataggaaactcatcaccatccaagctggcaaaccaaaaggccatttgcgggatgcgctaaaagtggatccagacaaagtcaggcggctttctttgagcgagacacagttagctaaagcgacaatctctcatggtgctgaagtcataaggttcacacagaagaatatactccgtgtgtatccaaagggcacgagggttaattcttcaaactacgatccaatgaacgcctggacccatggtgcgcagatggttgcattcaacatgcagggccatgataaagcgctccggttgatgcaagggtttttcagagccaatgggggctgtggttatgttaaaaagcctgacttcttgctaagaacaggtccaaatggggaagtatttgaccccaaggctagtttgccagtgaagaaaaccctcaaggtgaaagtttatatgggagacgggtggcgcatggacttcagtaaaactcatttcgatgccttttcgcctccagatttctatactagggtagggatcgcaggtgtgaacgcagacagtgtgatgaagaagacaagggtgattgtggaccagtggttgccgatgtgggatgaggagtttacgtttccttctgacggttcctgatactgtccctcctaatggttgaggtccatgattactactatgttgtataatcacta

SEQ ID NO: 272007 - DNA, 548 bp, Zea mays
cgggcataatgctctccacttttttgtggttttacatgtgcctaaagcacactaaattttggggacgtttcactctggttttacaggcctcccgccaactctacctgtccggattcctaaacatgaggacgatgcagctgaaggaatccctctcaggtctgctgaaggcatcccgctcagatcaccgagggcaacggaatcgtttcgatcaacgctataatggttggtgatccttcttcaaaggccatgctcagccattctttcatttgataacacacctttgtagattgtattttaggattccaaaaggtaaaggcaccgctccccatgtcatttttttgagacaccggtgtagagtatcgggggaacttatgttattcatctcgaaatgcccagaatgggcttagatccagtttttgatacacaccagacaccccggtggcatacaagacccgttatcagcgacacagttactgttgtattcttttggatagaaaattagaagataggggaagaatctgaagaaggctcctcgaaggaacttcttt

SEQ ID NO: 272008 - DNA, 510 bp, Zea mays
ctgtcggtcatgagtgtgaaagctcttggaatagccttgaaactgaccttttctggcatgaatcagctaatttatccacaaacatggttgttcaccattgttgttgttgcatgtattagtaacacagatgaactacctgaacaaggctcttgatactttcaacacagcagttgtatcaccgatatactatacaatgttcacgtcactaaccattttggctagcgtgataatgttcaaggactgggatcgtcaaaatccaactcaaattgtaacagagatgtgtggttttgttaccattctttcggggacgtttcttctccacaagacaaaagacatggttgatggcctcccgccaactctacctgtccggattcctaaacatgaggacgatggagctgaaggaatccctctcagatccgctgaaggcatcccgctcagatcaccgagggcaacagaatcgtttcgatcaacgctataatggttggtgatccttcttcaaaggccatgctc

SEQ ID NO: 272009 - DNA, 529 bp, Zea mays
ctgtgacggagctcctaaagaaagcctcgacgctctacgcgagcagacgacaactcaacggacacgccgtgggcacatcgcgagcacaccgacgcgcccgcgcctgcatccacctccaagtccaacccacacagagatgccgcgagctctgtcggtcgtagcaggctgattcaagcaccggccgatccagccggccagtttccttccataccgagctccatggagtgtcacgagagcagcagccaaggtccgccgcagccggagctgttgagcatgccgggcgtggagagctcgggcctgcgttgtgcggtgctggggcaggcgctgtacggtgtctgtgttccgaaggacgtagaagacggctgggacctcgcgccgcctttccgcgtcgtcggatgcgttgtggggtgctgctgctgctgccgcgccgcctcgccgtggtagcttccgtccgatgagatgtgtacggcgctcgagattgtgatattgtgcgtgcgttttagtttaaaaattaaggtgagcaacaaat

SEQ ID NO: 272010 - DNA, 1431 bp, Zea mays
cggactcgtgggcggacgcgtggggaagaggattcctacttttcctaccttccattagcacatatatttgatcaagtaattgagaactactgtatttctaaaggagcctccatcggattctggcaaggggacattaggtacctgatggaggatgtgcaagtgatgaaaccgacaatattctgtggtgttcctcgtgtttatgatcgtatatatacaggtataaacatgaaaattcagtctggagggatgatagccagacacctttttcagtatgcctacaactacaaacttgccaatatgaggaaagggctgaaacagcatgaagcatcaccgtttttcgacaagatagttttcagcaaaataaaggaagggcttggagggcgtatacgtctcatgatagctggagcagcacctttgccagggcaaatcgaagaattcatgcgggtaaccacctgcagcgttgtagtacaaggatatgggctcactgagagttgtgcaggatgcttcacgtcaatcgccaacattttctcaatgattggaacagtcggccctcctgtcacaacaatagaagcacggctggagtcggtccctgaaatgggctacgacgcactgtcagacacgccccggggcgagatctgcttgaggggccacaccatgttctccgggtactacaagcgccctagcctcactgaagaagtgttctcagatggctggttccatacaggtgatatcggggagtggcaatccaatggcacgatgaagatcatcgacagaaagaagaacatcttcaagctgtcccagggggagtatgtggcagttgaggtcctggaaagagcatacctgcagtcaccccttgtggcatcggtctgggtctacgggaacagcttcgagtcgttcctcgttgccgtggctgtccctgagaggcaggctctcgaggaatgggcagcagccaacagcaaggccggcgactttgcagagctgtgcgctgatcccaaggcgaggacctacgttcgggatcagctgaaccaaactgggaagaaacttgggttgagaggcttcgagatgctgaaagcagtctacctggagccggtgcctttcagcatcgagaaggacctcgtcactccaacctttaagctcaagagaccccagctgctcaagtattacaaggatccggtcgaccaaatgtacaaggatgccaaggaggggagagctgcgccatgagcccatgacggcattgccaatttgccacgagtggctatgatcctgagcattgtgattcctcgaaagcgtgtacatattgattatcacaatttgtaagtttaaggcatgtgtgttctatgccaaaatgtcagcagaaaatgaattggctaagaagctcgtgaatcgtgatagcttacattaataaatttattaagccagtccattcccttc

SEQ ID NO: 272011 - DNA, 740 bp, Zea mays
tcgacgcttccctccgccgccgtcagatcggagctcgactccgtgccccgcttctccgccgcgatggcggcgccaccgcgccgctccctccttgtccttctctccgggctcctagtcttcgcctcccttgttgccctcaccacagccatctacgaggaccaggtcggcctcgcggactggcatcagaagtacattggcaaagtaaagcaagcagtttaccacagccagaagagtggaaggagacgagttgtggtcttgacagaggaaaatgtgatctcgtctcttgatctacgttctggagatatattctggcgacatgtcattgacaagaatgaccccttggatcagcttggtctatcacttggaaaatatgttctaactctttcttcggggggaactatattaagggcatggaatcttccagatggactgatgatctgggaaactaaccttcgaacttccacagcatcgaactcacagttgcatgttatgtcaaacaataaagcggccagggacaacttagttttagtttcagctgggcgatggatttatgctgtatcaagcattgatggggcaatttcatgggaaaaggagttttctcttgatgacttggaaatcaagcggattctccagtcacctgaaaatgatgttgtgtatgctttaggacttgctggttcctcgaagctagctttgtatcacttgagtgctaaaactggagagatactagaagatatccaaga

SEQ ID NO: 272012 - DNA, 909 bp, Zea mays
aaatttggaggcatcctttctagggactgcacgtgtgattgggtggttcagtctgatgcttggcacctacacctacaaccgctattttaaacagaagaagctcaggaatattcttgtgtttgctcatgttggtcttgccgtaattaccctactggacattgttttggtgtcacggttacatgttcagtatggaattgccgataagtacatggtgctgtggggttccgcgttggctgatgcaatcaaccagttcaagatgatgccgttcctgatcctgtcaggacagctttgcccacctggaatcgagggcacactgtttgctctcttcatgtcaatcaacaaccttggttcaacactaggctcgttcctgggggctgctctggcatcagctttgaacctctccacagcacagtttgacaatcttgctctgggtttgggtgtacagatgatttgtactctcttgccgattgggttcctatctctgattccaaaggaagtcacagggctaacatcataggttgaggtacgggcctgatcatacttgttttattcctgccggaaggtaatggtctgtgctcgaacctcaaatttctgactcacgtacagcacgcatacttacagctgtgtaccagagagaggaatatacacatcataggaaggaaattcaagatagttggaaaatagacagttggcgtcccagtatatgtacaagctctgtaccaggacgatgagaaaaatagagtgcaatagatctgtgggcaaagattaaaatcacttgatgttgacagatgttgatgttacttgacatgtgttgaaatgagaacaaacatgaaagtgacgttgcttatgattgaatcaaaatatatatttttaaagaactgctatttgttttaattttattaaattaat

SEQ ID NO: 272013 - DNA, 1673 bp, Zea mays
  unsure (1)..(1673): unsure at all n locations
ctgattcattctcttctcgctgcacgccgcactgcgccagcgtcagcatgggcggctgcggcctcggacgcggccgccgcaccgcctgcctgctgctgctcctcccgccgcttctcctgttcgccgtggccgatgccgccgcctcggggaaggagaagcagggggtgtccggtaagctgcggttccggcgggagagcgggacgttcaaggtggtgcaggtggcggacatgcactacgcggacggccggagcacggcctgcgaggacgtgctcccttcccaggtggccggctgcaccgacctcaacaccaccgccttcctctaccgcgtcttccgcgccgaggaccccgacctcgtcgtcttcacaggtgataacatctatggtgctgattcaactgatgcagccaagtctatggatgcagcaattgctccagccattgacatgaaactgccttgggctgctgtgatcgggaaccatgaccaagagggtacgctatcgcgtgagggtgtgatgcgtcaccttgtgggcatgaaaaacacccttgcaagcttcaatccggaaggaattgaaattgatggttacggaaattacaatttggaagtttccggggttgaagggacatccatggatgaaaaatcagtgctcaacctgtatttcctggacagcggtgactattccactgtgccgtcaatcaatggttatggttggatcaaggcttcacagcaagtctggttccaacaaacatcttcaagtctacaggcaaagtatatgaataagaacccgaaacagaaggaaccagcacctggccttgtatttttccacattccactaccagagttcagcagttttacggcatccaatttcacaggagtaaagcaggagggtatcagctcagcatcaattaactctgggttctttgcctccatggtggaggctggagatgtgagagctgcctttgtgggacatgatcacattaatgacttctgtgggaagctcagtggtattcagctctgctatgctggtggatttggttaccatgcctatgggaaagctgggtggtcaagaagagcgagggtactgtctgtgcaacttgagaaaacagacagcggtgaatggcgaggagtcaagtccatcaagacatggaagacgcttgatgataaacatctgagcacaattgactctgaggttctctggaacagaggctctaatgggaggcgcgggaaaaatcctgatggtagttaacttttgatgcagacaggaatggtgctccataagggatctctacatcggtgtgtattgttggatggccagtttactatagaatcagaaatatgcagaagtgtgtacatgggggagaaggtcaaatacagacacatacacgcaggtttctgctgttgcatttttccatgttattagaaaataagtaatcaaaattcagtgctgctgtcaattattgcaggtggtctcatagactcgtatatagtgtggtcaaaggaaaacgagaatgcaaggtcattgtagtctcatctcccggggattgttaaacccggtcggaaaaagaaagactgtccttcccattttttttttaaaaaagaccgaaacatggtttttgtccaaaaacaaaaccaaaaaaaaaaaannntngggaaaatataaaaaaanannaaaannaaa

SEQ ID NO: 272014 - DNA, 504 bp, Zea mays
caggaatctatctggcagaaggtttttaagagttttaatgttaccgacagagatttagatgatttttttggtggaccagctttccttgcttgggctagaatgggtgaacttgcatgggtggggtggaccactgtcgcgaaactggttggatcaacggttggcattgcagaagaaaattctatcccggatgattgagcttgggatggtccctgttcttccatcgttctcaggaaatgtcccagctattttcgcaaaattatttccgtcagccaacattacgcgacttggtgacgtgcgtacagttgatgctagtcctaagtggtgttgcacttatcttcttgatccttctgattcattggttatagatgtggggcaggcttttatcaggcaacagataaaagagtacggcgatgtaaccaacatctataactgtgacacattcaatgagaatactccaccaacagatgaaccggcgtatatttcatcacttggttctgctatcta

SEQ ID NO: 272015 - DNA, 566 bp, Zea mays
gaagatgccacttggaatcgtagccctgagaagaatcaccaccagagtgttgatgatgatcagaacaagttgctcactgaaaaggatcatgcacatataaataaagaagtgagaaaattcactcctcaaacaaaggcccatgctaagattagaaagcctgatgggtctactatcaaggaaaaggtggctccaaatcctaaacctgtaaccaaccttgtgaaggatttttccatgagcccacgagcatcaagtgacagcacagagggcatgccacaaagtgctaaccgatatagagttgcagtccggaaagtaccaagtaaaaggtatgaagagaccagtggaaactccaataaggcgagtaggaaagtaggctctggtgcaatattcaatgactctatcagcgaaggttctggtgatgaattggacaccaagactgtcatggaaagatcacctaataagtcatctacatctgctgattcaggtatttcatctgcagcttctggtgaaagcgaggttcctgatgatgatggcaccgtatcactatctcagaagagtttcaaaggtct

SEQ ID NO: 272016 - DNA, 385 bp, Zea mays
gtcgcgcccccctcagctctcctctctagtctccagcgtccagcgccgcgcctgcttcgtccatggccggctccctgcgtcgggcggccctgcgagttgctcacgtcgtcatcccctgagctctctctcccatgccgacgccgcgcgctctgcctctccctcagccgtcggcaacccgtggctatctgctcggccatggaggtcgcggttccctgatctcctgctcgcctggccgcgtcgagctccatgctgggccaaagtctactccctgctcggattttgtcaagcctgtgagcttctctatgcgctctgctctttgtcggtctcatgctcccagctagcctcctgttcccaaccatggatgtcaacccggcccttgctccca

SEQ ID NO: 272017 - DNA, 665 bp, Zea mays
cccacgcgtccggcagagcacaaaagaaatccatccgtctcattgcttccgcttgttcaccaaacaaaaccgcactctaccgcgctcctcccgaaccacagctatgctcgcccaccgcctcctcctcctcctcgccgtcgccgcggcgagcggcaccgccttcgctaagccgacggcgtacgaagccctcgctgactacgacttcccgccggggatcctccccaagggcgtggtcgcctacacgctcgacaacgccacgggcgccttcacggccacgctcgacgcctccgcgtccggcagcgggtcctccgtctgcgagttctccatccagggctcctactcgctccgctaccagaccaagatcaccggaaagatcgcccccgaccacctcaccgacctcgagggcgtctccgtcaaggtcctcttcttctggctcaacatcgtcgaggtcacccggcgcggcgacaacctcgagttctccgtcggcatcgtctccgcggacttcgggattgacaacttcctcgagtgcccaacctgtggctgcgggttcgactgcaacgacctgctcatgctccagaagcccggcgccgccaccgccaggctgcgcctgcgagtgccttctaaaattccactcatgcaaatccagatgggatagaagttcagac

SEQ ID NO: 272018 - DNA, 373 bp, Zea mays
cggacgcgtgggtcgggattgaaaacttcctcgagtgccccacctgtggctgcgggttcgactgcaacgacctgctcatgctgcagaagcccggcgccgccaccgccaagctgcgcctgcggggtgccttctagaactccacttctgcagatttggtgactgctgctgtaagctgcctcgactagtagtgctgtatgtctagtagatgtgggttaataaagagggcaaacttgaaagatcccagcttttagatgtgggatggggtaaccaagttcaggactcgatgtcatgtttcaccaactgtttcagacagttctaggaacagccagagaagcagttaagacctttcagatattttatttatacgtctcta

SEQ ID NO: 272019 - DNA, 581 bp, Zea mays
cacgccgcacgccagccagcggccagcgcccgccccgccgcgcttcggcattttcccattggctctctctgccgccgctccctcccgcggcggactcgataccccgcctctcctctcgcgaactagggggcagcgggcaggtgccggcaggcggctcgatcccttcctcctccctcgtcgcggggactgctgctgctgctgccgtgaccgcgagcatggccaccggcgccgttacgccgccgccgctggctggcgcgcggcgattcccccgtggacgaagcttcctccaccggcgcctcgctacctcgcctatgaaagatgaatctgtgatttccacagatggtggaaatgaggagacagacactgacagcctccatgttgctagaggattgtctcatcctgggctttcgtcaagtttatccaataaggcatcagtggtcccaacccctttgcttgcttctggacaatctgatctccggttcaatcgtcttcgaccctcaattgatgaaagcgattgcaaatacaaaagattatttggctgctatgttgctcgcgaggcttgtatcgatgaggaatactgg

SEQ ID NO: 272020 - DNA, 1359 bp, Zea mays
cacaagaggttttccggtgcgtgactccagctcgcgttcgccggcacctcaggatgacaactgatcccaacggcaatggcaatggcaatgacaagccgatgttggtctccatcagaacgaaggggcagagggactccacgctgccctcgatcgctgaacctgagccacttcctcctcggcacaactacaggcatcatcgacgacggccaaaggcgcactcaatgtgcgtgtgcaccatgctccgcaaccaggcgaggttcctcagggaatggatcatctaccactcgcgcatcggcgtggagcggtggttcatctacgacaacaacagcgacgacggcatcgagcaggtcctcggcaccatggacccgtcgacgcacaacgtgacgcgccacctgtggccgtggacgaagtcccaggaggctggcttcgcgcactgcgctctgagggcccgggagagctgcgagtgggtggggttcatcgacgtcgacgagttcctccacttccccggcaaccagacgaccctgccagacatcctgcggagctactcgaacaggccgcgggtgggcgagctgaggacagcctgccacagcttcgggccctcggggcggaccagaatccccaagcaaggcgtgacgacgggctacacctgccggctcgccgcgccggagcgccacaagtcgatcgtgaggcccgacgcgctgaacccgtcgctcgtcaacgtggtgcaccacttccacctgagggaaggcgcgaggtacgtgaacgtcgggcagggcgccatgctcgtcaaccactacaagtaccaggtctgggaggtgttcaaggacaagttctccgggcgcgtcgcgacctacgtcgccgactggcgggacgaggagaacgtcgggtccagggacagggcgccggggctggggactaggccggtggagccggaggactggccgcgccggttctgcgaagtgtacgacaccgggcttaaggatttcgtgcagaaggcgttcgcagacccggccactggaagccttccatggtagatgatgggggtatacatacagagagacagggaattaagaaacaagtaaacgaaaaggataggtagaagagtggtttgctctctgttagtcatttgaggttttcttttttttcccctgttcttacttcttttagagccatctgtttctcttttttttttctttttacatgtctaaggaaatgattcttttgtagataaaaagaaaggtaggtagtaagttatcttgacgaaaggagggaatgctttggatgatagtctgactttctgtcttcttctgatatttttacactcaattctgtaagcataagtcaaaaatcagagacaga

SEQ ID NO: 272021 - DNA, 768 bp, Zea mays
gaacaggtccgggacgcgtggcaaagttgtgcaccgtgacatcaaatccagcaatattttgattgatgatgagttcgagtccaaagtatcagatttcggtttagccaagcttcttggcgctggaaagagtcatgtcaccactagagttatgggtacctttgggtatgtggcaccagagtatgcaaatactggactcttgaacgaaaagagtgacatttacagctttggagtcgttctccttgaagcaattaccggaagggatcctgttgactatggacgcccaccaaacgaggtgaatctagttgactggctaaaaatgatggttgccagcaggcggtcagaagaagtagtggatcccaccatagagacacgaccttcgacgagagctctaaagcgtgcacttttgacagctctgaggtgtgtggatccagattcagagaagagaccgaagatgggtcaagttgtccggatgctggaatcggatgatccaattcctcgaggggacagaagatctaagcaccaccgtggagggagcacagaaatggattcgcaaaaggacaacaactccgacacggagaagagtgataatgcagattcgaaacctagcaggaccagagcatcgtcgtccaaatgagcaaaccagcatttcacctattacagtcttcggcacattgcatggactgggggctacgtctattttacattgctgacgaattggtaactgaaagctctgaagaaagacctatttttcttttcttttcttttctt

SEQ ID NO: 272022 - DNA, 425 bp, Zea mays
ggaattcccgggtcgacgccacgcgtccggacaccctctgagctaaagctgttgaattcatcatgtaccatgctgagatatccattggcggggttcaggagagcatgagcaaatcaatactagcagttctccctaagtgacagcgcaccttatagccattgttagtttcggagattttgcaagcgagatgaaagcggaagctgagagattgggcgtctcctgcttttcttgggaagagttttcttcaatgggaaaacaagactaccaacttcccaataaacgtaaggaagatatctgtacaatcatgtataccagcggaacaactggagatcccaaaggtgtgataatcacaaacaaagctatcgttgctggtgttatgaccacagaacacctcctcaaagagaccgataaagtgatcacagaag

SEQ ID NO: 272023 - DNA, 336 bp, Zea mays
tctaaattgaccagaaatacaacaattaacacatcttcagttgctccggaagattggtgctgggagcttcccatgggatctggaggctgacgataccaggttcaatatatttggcatttcctcctaccgatcaaatcaacgagaaataattaatgcagtcatgagtggaagagatgttctggtcataatggcagctggtggagggaagagtctatgttaccagctcccagctgtacttcgtgatggaattgcactggttgtcagtcctttactttcccttattcaggaccaggtcatgggactgtcagctttaggttttccagcatacatgctaac

SEQ ID NO: 272024 - DNA, 446 bp, Zea mays
  unsure (1)..(446): unsure at all n locations
cggaanncccggggcgacccacgcgttcgcggacgcgtgggtgcggaaaaggaagataaggatgactataagaagttttgggagagcttgggcaagtttatcaagcttggttgcatcgaggacacagggaatcacaagcgccttgctccattgttgcgcttccactcttctaaaaacgagggagatttgataagtcttgatcaatatgtagagagcatgcctgaaagtcaaaaggcaatctactacatcgctacagatagtctccagagtgcaaagactgctcctttcctggaaaagctggtccagaaagatattgaagttctctaccttattgagccgatagatgagggtgccattcagaacttgcagacctacaaagagaagaaatttggggatatcatcaaagaggatctggaattgggggagaaaatgcctatgccttttca

SEQ ID NO: 272025 - DNA, 375 bp, Zea mays
cccacgcgtccgactgtttccaagatacttgagctttgtgaaaggtgtggtggattcaaatgaccttcccctcaatgtttctcgggagattcttcaagaaagtcgaattgtaagaattatgcgcaacggacttgtcagaaagacctttgatatgattgaagagattgcggaaaaggaagataaggaggactataagaagttttgggagagctttggcaagtttgtcaagcttggttgcatcgaggacacagggaatcacaagcgccttgctccattgttgcgcttccactcttctaaaaacgagggagatttgataagtcttgatcaatatgtagagagcatgcctgaacagtcaaaaggcaatctactacatcg

SEQ ID NO: 272026 - DNA, 485 bp, Zea mays
gtctattatcctgatatttttaatatgcatttgcaggcattagcataaatcatatgaaggaagtagattcacatgcacccgtgaagcagaagctacaattatttccaataaatgaagctactcttaagccatttgagaagggtgatttagtagacagccccattgccagactacctgacatagagaccacaacacttggagccacatatgttgctagcttagatgcaggagtttggaccaaggaacaagtatttgcaggttagcacaaggagaacgcgacaatctttcgcccaaaactggatgaggtgcacaagaagaaggggctgattcatggtacaagacggtttcaagatcattcgatttggctgacctttctctgtaaatgtttcttgtcggcattgatctatctgtttttggaagatgcaaatgaataaattggtctttgctggtactattcttaactactttttatttactgtctttac

SEQ ID NO: 272027 - DNA, 847 bp, Zea mays
cagagctatattgaatacaatctttgacagctatggcccatgggctggagatcttagctcacgtgatcagggatccttggttgcttttgaagatggaagcactacttcttatgcacttcttaatgcacaagaaagaggtatgttgtttgtccaaccagggcaggatgtttacaaaggtcaaattgttggtatccatcagagacctggtgatttagcaattaatgtgtgcaagaaaaaggctgctacaaatgttcgttccaacaaagaaactacagtggttcttgatgaacctttaagctacagtttggatgactgcatagagtttatccaagaagatgagatagtggaggttactcctgcaagcatccgtatgtgcaagaacccaaaagtttcgaagaaaaagtaacataatcgcatccatttgtcgtcaatgcatcttctacacatagaagctgcatgctccgttgccaggtctcgtatgagtgacggctgcacggcgtcctcaagtcagtaatcaggatatttttggtggtctacagacaaagactaaaggtcgccagattaagatagaggattatatggcagttttgtgatgaataaatcagccgatacctggagtagtattatttggccacggataaggcgggcactgtttctcatctacttctccctgttctttttatttgtcgcgtttaagttcaaaaatgaactagacgacaaatatttgagaacgaagttagtattacacatatattgggtacgtcatacgtaggactattcgcattgtacacaattctttcaacgcttgtaaagactgggagaaagctttagcaaatgggataacaca

SEQ ID NO: 272028 - DNA, 455 bp, Zea mays
gaaaccctcacctcttcccttcctccccgccgccgccaccgccggaaggagaaaaaaaatgggtgccgatggggaagaagcgtcgcggatagtcgtgccaatggcggtggaggggacctcggagcagctggcgttcgtggaggagtcgaagctgcagaagcgcaaggagaacgcggactgggccgtcaggaaccgggagcgcagggcggtaaagcgccagcgcatccgcgacgagcacaaggtcaccgtaaggcggcccgaggacttcgttgcggcgttccggaacaaggaacgcgacttcctgcggatgaggacccgcctcaaggtccgcagccagccgcccgccgaggcgctcggctccaggctcgtcttcgcgattcgcatccctggctccgtggacttaaagagtgtgaaagagcttatctacatgaaaggccgcgggttctttgacatgg

SEQ ID NO: 272029 - DNA, 624 bp, Zea mays
taggaagaagcatgtccaggtcaagatgctgtacaggcccaatggaaccctagggccagcggaggctcccaagcctaggagacgcaagcagtcggatgaagaggtcccgcacaatttgcaccgcctcatgaatagctcgccgaggatctctcacgctggactgcccaagaggcctcgcacgaccgctgctggggatgccaaaaatggagctgtagcacccggtggaggtaacggcgctggtgtttgtaacggttcttcagttcaggtgccgacggaggctggcggttggttgggtaatggatgctctgaggcgaaatctcatgagagaaccgttccattgctcaaccacgaggtctctggtgaagactcatccaggcacgccgcgaagagtagcggcggcattgctgacaacggagtcggggttgggaactcgagtgctggtctcaaagtgaaggtcaagaggaaggagctgctcctgaatcaaaataccggttaagaaagagaagaaccagaagaggccacacaaacagagccctttgtacgttctatcacgctcgatgaatcgaaaccaaactcaaaaggaaaaggaaggtcaaacctaatatggaatggaacagaaaggct

SEQ ID NO: 272030 - DNA, 559 bp, Zea mays
agaatgtttgctctagttacatgaccgctgaatttgttccctgcgcttttttatcttttgaactgtttgctttccattcgagttcagaagtttcataaggtgtggggacagctcatgaagactgggtaccaaaattccagatttgctcatcaggttgagagatttgcttgcttgtacagcagccaggttacaaacttcggtttgtattcccctgacaaatactatcgtccgagcgaagattacatgccccacgagtttgatgtgcttgggctgtaggagcagcccctactgctggtcggagttcctcgttgtaattgatccatagcaggataggagggtgacatcgtagttgccgtattatataacaggaagcttcacccattgtgaaggagagaaggtttataactacagtagatacatttctacttatcagtaagtttacctgtatataaatatgtacataactgatatatgatgcgtgttatttgtgagcacgcgctaagtagtactggctccgccccgctggttttctaaaaaaaaaaaaaaaaaaaaaaaggaa

SEQ ID NO: 272031 - DNA, 992 bp, Zea mays
gtctcaatcacaagtggcttcaatattttgatattgtaataacaggcagttcgaagccaagggggttccatgatgataaccgtgcaggattgtttgaagttgagcctgattctggaaaacttctgaatgctgatattcagatcggaagcccaagatcaagtcatcaacactcaacaccagttcagaaagtttatcaggggggcaatgttggtcatctccacagattactttctgttgcttctagttcacagattctctatgttggtgatcacatatacggagatattctgcggagcaagaaagttctaggctggcggactatgctggtgattccagaactagaacaagagctgaagcttctctcagaatcaaagtctactcgaaaggagcttagacatcttagaatggagcgtgattcgattgaagacaaaatccatcatcttgaatggtctcttaagcttgatgatatctcagaaaaccagaaggagaaattgttctctgaacatgacaatctgctgaaacagagagggcatgttcgtggtcttcatcaagaagctcagaggcaacatcatcagaagtttcataaggtgtggggacagctcatgaagactgggtaccaaaattccagatttgctcatcaggttgagagatttgcttgcttgtacagcagccaggttacaaacttcggtttgtattctcctgacaaatactatcgtccgagcgaagattacatgccccacgagtttgatgtgcttgggctgtaggagcagcccctactgctggtcggagttcctcgttgtaattgatccatagccggataggagggtgacatcgtagttgccgtattatataacaggaagcttcacccattgtgaaggagagaaggtttataactatagtagctacatttctacttatcagtaagtttacctgtatataaatatgtacataactgatatatgatgcgtgttatttgtgagcccccgataagt

SEQ ID NO: 272032 - DNA, 515 bp, Zea mays
cacgagtcggcggtgagtttccatggatcgcccgagtcctcagtcagggcacacagcagtgggatctccatcaggttctacaagaagaaccattccaatgtgagaccacccagcgagaccaccgcagcccctgataacgtagagacagtttcaaggctcctggaaccgtaaccaagcgagaagaaggctagctcggtgaccgaacgctgcgggccgcggccaccaccacaggtacctgaacggaaaagctcgccacattctgaagcctctcaccttgacgaccggggctgtgtaaatcttccgagaccgccactggcgcttcctcctcgagcccctgctgtaaaaatgaacggactcctagcgttttgtgcgcctgggtcgcacgctgactagtgaatctgttggcagttgtgcgccgcagcccgcaggccatggctctagtgacgagagcgacgcgagcaagctgtttgtatgtgcctgatcacaacaataaaaggcttcgcgctgttgactgt

SEQ ID NO: 272033 - DNA, 785 bp, Zea mays
ggaattcccgggtcggcgcacgcgtccccgctcggcatcagcgctcgcaagcgcgcccgcctccgcaaggaggtgctcctcgccggcgaggactggagctacgatcctccccgcggggagatgcgtaccaagcgcaagggccacaagtgcgaccgcatctccgccgagaagcgagcaaatactgttgagctgatgaagaagatgccccagatgctgctcgactacaagaaacgtaggtgggagaagaagatgaaagcggaggagagcggcaagaattgataccacgcggctcgtccagggtgcttctcttcctaaataaggtccaaactttatccaggaggtttgcaggacggctagattctgacgcgtcatttccttgtggattccttctctcctgtgatgcgactttggacgcactatcctgattgtgatgctttccaacacttgtgccactggatcgtgatttcagtgagccccaacttctgcagcactagtattttgttgagacaaatcagctataagcatgccatctgcccaataaacttgttcatcatgtaagatcaatgctgttagtttttgtccgagtttgtgcttgcgtttgcttatacttacctgcagaagaatggttgtctgaaaagtttgtccttctgtaataagtgttgaatgttggaaatcctaaccctcggggttgggagattaatatatagacttagttggatgggccagacccattacaaaaaaaaaaaaaaaaaaaaaagggcggcagctcgcgatctagaactagt

SEQ ID NO: 272034 - DNA, 552 bp, Zea mays
tcggaagcgagcaaatactgttgagctgatgaagaagatgccccaagtgcgaccgcatctgcgccgagaagcgagcaaatactgttgagctgatgaagaagatgccccagatgctgctcgactacaagaaacgtaggtgggagaagaagatgaaagtggaggagagcggcaagaattgataccacgcggctcgtccagggtgcttctcttcctaaataaggtccaaactttatccaggagttttgcaggacggctagattctgacgcgtcattcccttggtggattccttctctcctgtgaagcgactttggacgcactatcctgattgtgatgctttccaacacttgtgccactggatcgggatttcagtgagccccaacttctgcagcactagtattttgttgagacaaatcagctataagcatgccatctgcccaataaacttattcactacagtgctaagatcaatgctgttagtttttgtcaaaaaaaaaaaaaaaaaaaaaaaaaaaaaaaaaaaaaaaaaagggcggccgctcgcgatctagaac

SEQ ID NO: 272035 - DNA, 382 bp, Zea mays
actgcaacggtccgcgaccgggcgacggggatgccagccaagcattctcacgttttcgtcgtccggccggccggcgagcattttgcttctgcgatcgatcggcgcgacgtgcacggccatggagatgatcgacgcagagctgcgtctgggtccgcccggcagcaacaacagagacgtcatcaacgtcgtgcagccggcgttggcggcggcgaaacggccgtcgtcgtcggtgctggagagcgaggcgtccgggacgacgaccatgaccatgacgacgccgcaccgacctccaaggtgcaggtggtggggtggccgccggtgagagtgtaccggaagaacgcgtttcacgcggcggcggaagcgaggaagaccaagcggggcg

SEQ ID NO: 272036 - DNA, 415 bp, Zea mays
  unsure (1)..(415): unsure at all n locations
cggaanncccggggcgacgcacgcgtccggccaagcattctcacgctagctgttctcttcttgcctcatccatcgtgcatctatatgctcggcgcgagttacgtctttttcgtcgtccggccggcgagcattttgcttctgtgatcgatcggcgcgcgcgacgtacggccatggtgtcgatcgacgcagagctgcgtctgggtccgcccggcagcagcaacagagacgtcatcaacgtcgtgcagccttcgttggcggcggcgaaacggccgtcgtcgtcggtggtggagagcgaggcgtccgggacggacgaccatgaccatgacgacgccgcaccgacctccaagtaagtctcggcagccgcgcacatggattttcccgttcgttagcaggcagctagcacctgagctgatgc

SEQ ID NO: 272037 - DNA, 420 bp, Zea mays
ggtcgagctggccatgggcgcccaggcccaggccgccggcggcgcaacgactgcggcccaccggcgtcacagctagcgccagacagagcgagaggcggtggtggtacacgcctacgggcctcggtgatgggctgggctgggctcgtccgtcagcctggcgtgacaggccgtcggcgtcgtccgtttctgccgccccatgctcggctcggctcccatcccatgtggagggaagagaagggtggggggagctggtcgtcggagttggtgcgtgcttcgtttgcttgtgctttggcgccatatcgctgcggagctgctgcacgtagccatttttcgccgggggggggtcctcaccctcctcggtggcttgctacgtgttccttgccgccattaccaaaccttaattgcttgctttcacgtttt

SEQ ID NO: 272038 - DNA, 1295 bp, Zea mays
tttcgtttcacgcgcccgcaataaatactgttggtgggaatttagctgaaagctttgattcacaaaagacgatacctcaagctgcatctgcatacccatctgatcagaggcttccactgccaataactggctttcctaattctcctacagccagaagaggagggactgttccaaattatcaaggcatctcatcctacattggagtgccaatgacttatcctactagtccagtgtttcagggacaaacattgcctggagtattgcctcctgttaggagaaacgactctgttggatttctgtccccctcaagaaacatcactggtagccctggaattcaagggcagcgagcaagacagaagtttgatgaatcaaagacctgctctttcttagaagagttgaagtccaacagagcgcgcatggttgagctttctgacatcacaggtcgtgtagttgaatacagtgctgaccaacatggtagccgattcatccagcagaagttggaaaactgcaccgccgaagagaaggcatctgtgtttgccgagattcttgctcatgcttcagcattaatgactgacgtttttgggaattattgtgatccaaacagttttttgaacatggaactcgtgagcaaaggagggatcttgccaccaagcttgttggtcaacgttttgcctttgagtcttcagatgtatggctgccgtgtaatccagaaggctctggaagttatggaacttgaccagaaaatagatctagttcatgagcttgatggtcatattatgcgatgtgtccgtgatcaaaatggaaatcacgttatacagaactgcattgagtgtgtccccacggggcatattgcttttgtagtgtctgcttttcagggacaagttactagcctttcaatgcatacatatggctgccgtgtaattcagagaatctcgtatcactgcggtggtaactcacaacgccagtgcataatagacgagatattacagtgggtgtgcatccttgcgcaggatcagtatggcaactatgttacacagcatgttctagaaagaggaaaagctcatgagaggagccaaattattactaaattggccgggcaggttgttaccatgagccaaaataaatatgcatcaaatgtgatagagaagtgttttcaacatggtgatatggcggagcgggatcttctgatcaggcggattgtggagcagacagagggcaacgacaatttgctggcaatgatgaaggaccagtatgcgtattacgtgggccagaagatactcgaaacatgcaatgag

SEQ ID NO: 272039 - DNA, 468 bp, Zea mays
ggaattcccgggtcgaccgcacgcgtccggcatccttgcgcaggatcagtatggcaactatgttacacagcatgttctagacagaggaaaggctcatgagaggagccaaattattactaaattggccgggcaggttgttaccatgagccataataaatatgcatcagatgtgatagagaagtgttttcaacatggtgatattgcggagcgggatcttctgatcagacggattgtggagcagacagagggcaacaacaatttattggtctgtttggtagtgtagtacaagtgttccctccattatcccttcctctctttgccaaacgggtcggggttctggaaggtagggctaggacatggggacctgatctcagttcggtacagccaatcagataacaccatgagtatctcagttctgctattccagctttctgggagctgcgaatcctatggattaccaagacatgg

SEQ ID NO: 272040 - DNA, 919 bp, Zea mays
atattgatagtgctctgtgcacataatctgtacgtggtatctgttttattgactgtttcttgaccgtggatcgtggatctcgagccactgtgctctcttgttgacccagatttaaaaccgaccagggttaggttattaaaccctaaccctaaaacatcgtatctgtttttaccatctcggaatcctctgggtttggccgagaccaaatctctgttagtggccaaaaccctacatttagggttaggtaaaccctaacccgagagatcaaaaatattctttctattttaatctatctgttctcgggtgataaaccatgaataaaaaaaatagttcaatcatgttgatccgagacttttctgtgatctcataaaactgatgcggattaggagatctagggttcttaggacggctttgataccattgttagaatctatactgcctaggatcgattcctaagtccctagaataccaatccgtctgtaactgaaagtaaaatcttgatgacgtgtagatctgatctactatctactgagaggaacggggaaacacacctttgttgttgttgctatcttcataccgtcgccctgcagagaagcagcaggcatcgggatccgagccgctgtaggttgtcgcgtttccaaacactccgacgcctaggcgatggggcctctgaggactagggttttggggcgaggtactagcgttagtctttcctgcgaccccttagtcctatatatagcgtcgtgtgtctgggggctccaaccgaggttagcgtgggccctcccgatcaagggcccgattaaagagaccgatagttgggttaagcccaatccagtctctattgaccggctgtagaggacacacccaacaccacggcctctctcgaccagcggcacgcgtacgccatcaccccttccct

SEQ ID NO: 272041 - DNA, 466 bp, Zea mays
ataaaaaaatgagttcatcacatatatcctagacctttctgtgatctcataaaacgatgcggattaggagatctagggttcttaggtggcgctttgataccattgttagattttctggtgcttaggatcgtttcctaagtccctagaataccaatccgtgtctaaaatacctcgatgatgagtagatctattctactgaagggtataggttaacataccgtcgttgttgttcctagccatcatagcggcggcgtcttgcagcgaagacccgcctcctccttcttgtcgatcaccctgctggtgtcgaggagattggttcccgtcgttgatcagcggtggatcagctcctccaatgttgcctgcacggggaatctcagatcccgatgggataacggggatctgagacatagtcacagcgattccagtcacaccgagcgcctaggggatcggttcctctcaaagtgtc

SEQ ID NO: 272042 - DNA, 661 bp, Zea mays
  unsure (1)..(661): unsure at all n locations
gaannnccgggtcgaccgacgcgtccggagaatagaaagaccttccttccatccatcccacagtcagtcgttgacacaaagagaaattccacagccggggggcaaggctttaattgccccctctccctccctcgcctccttcaccatcccaccgagctttgcaacagctagtagcatgggcaagctgtgctgcagccaggaagacgacgagccggcgttcaacctcctggggctgctcgtcaccgtcgtcctcgccctgctcctgctcatgctgtgcacgccgccccgccgcaggcgctgcgtcgcctactacccccgttactgctaggacaggacggacgcggtggcggtggcacacgccgtcgagcttcagccttcttcgaggtagggaggaaaggatcaatcttctgctctgctctgcgatgggcgccgaggtaggcatcagacgtggagttcaattcgagtccgagttgtggagtatacaataaatcatgctggattgtttgtttgtatgtaaaagcgttctgttattattggtaaatcaatgtgactactgcataaggctggtcggtctgtaacctgatccgagagtctgtctgttggtaaaaaattaattgactactggagtttgttgacttggtatctgacagatttcattttt

SEQ ID NO: 272043 - DNA, 354 bp, Zea mays
cacagacagataccgtagaacagaaagaaaggcctcccgtccagagtcgtgtcagcgtaaagaaattccacagccaacaagaagccttctcgcctccttgactccttcctccatcctatcgagaaccatgggcaagctgtgctgcagccaggaagatgacgagccggcgttcaaccttctggggctgctcgtcaccgtcgtcctcgccttgctgctgctcatgctgtgcacacctccccggcgcaggcgctgcgtcgcatactaccctccttgctgctaggaacattcgatttcaaggtagggactagctagggagggcgtggtcttctggtgggtgggcgcggggaggtgaat

SEQ ID NO: 272044 - DNA, 845 bp, Zea mays
cccacgcgtccgcccacgcgtccgccaagagtcaagagcatcatttcacctagtacccagtaaatggaggcgctcgtggtgcggcagctgggcgatcccaccctgccccctggcggtgaagcctccccgttcgccgcggtctctggggatcacccagtgccggagatctcatcgccgacggctgtccgagtgcgagtcgcggcgaccagcctcaacttcgccacgttcctccaggtgcagggcaagtaccaggagcggcccccgcttccgttcgtgcctggatccgactactctggcgtggtcgacgcagtcggtcccggcgtgcgtgggctccggcccggcgaccgcgtctgctcctttaccggcctcggttccttcgctgacttcatcgtcgccgaggagaagcagctatttttggtgcctgatggatgcgacctggtcacagctggggctttaccagttgcatttggtacatcacatttggcccttgttcaccgagcccaattgaaggctggccaggtgctacttgttcttggtgctgctggtggtgtcggggcatctgctgtgcaaataggaaaagtttgtggtgctgttgttattgcagttgctaggggggctgagaaatcggattatctcaaatccataggtgccgatcatgtaattgactcaagcaaggataatgttatagaaagtgccaagtctttcttaaaggctagaggcttgaaaggtgttgatgttttatatgacccagtcggggggaaattaactcaagatagcctgaaacttctcaattggggagcacaaattcttgtcatcggatttgccagtggtgatgttccagttat

SEQ ID NO: 272045 - DNA, 440 bp, Zea mays
actagaccaatttccttgcagagagtactgttttggcgatggacgttgccttaagcaccattgtgtttgtcatcgccattttcatcccggcactgctgacgctggtgcaaagaagccgtagccggcacgccggccataaccaaccacctccgccggagcccagagccattcccctggtcggccacctccaccagctcctgagaaagaagccactccaccgcaccctcgcccacctcgctgagcgccatggagacgtcctgggcctgcggttcggctccagccgagtcgcggttgtgtcctctgcctcagtcgcccagcagtgccttgtcgcactggacacctcgttcggcaaccgtccacggctgccgtccgcgaggatcctctcctatgagtggtcgaccatgggccattccaactgcgggccgtactggcgccaagct

SEQ ID NO: 272046 - DNA, 347 bp, Zea mays
gcaagcggcagcaaggcgttggcaatcccagtccagtcgtcggagcactcgcaatttcccgtcacagctggccaccgccccaccctcacggcctcacctcctcccgctacacgcacgcgcccacctacccaaaacgaccgcgcgcggcgccctcctcccgcggtgccaccaccaccaccacctcgtcggaccatcaccacaccgatcggcagctaagcagctcccgcctccagcaccgcgagcggcgatggcaatggacgcggccgtggccgtgaagagcggcggtggccgcgccggatcgaccggggtcaccgcagaggcctcgcagtccccgcaggctgcgacta

SEQ ID NO: 272047 - DNA, 1020 bp, Zea mays
cccaggcatccgcacacgcatccggccgctggccacaggcaggcaggaggatcggacgagtcagcgaggaagctgcctgctttcagatagagagagttattaagatggcgttgcttcggctgcttgccatctccctgctcttcgcagtggccactcctgtcagggacatcgcccacgatgcctgctcgtcagaagtgaaggatttccagcacctgaacaacagctcggggctccacctgacgctgcaccacccgcagagcccctgctccccggcgccgctgcccgccgacctccccttctccgcggtgctcgcccacgacggcgcgcgcatcgcgtcgctcgccgcgcgcctcgccaagacgccgtcctctcggcccaccttgcttgacgagagccgcgcggggtcgtcgtcgtcgtcccccgatgacgagtcgtccctcgcgtccgtgccgctcggcccgggcacgtccgtcggcgtgggcaactacgtcacccgcatgggcctcggcacgccggccaagtcgtacgtcatggtcgtggacacggggtcctcgctcacctggctccagtgctccccctgcgtcgtgtcgtgccaccgccagtccggcccggtgttcaaccccaaggcgtccagctcctacgcctccgtgtcctgctccgcgcagcagtgcagcgagctcaccaccgccacgctcaaccccgccgcctgctccgcctccaacgtctgcatctaccaggccagctacggcgacagctccttctccgtcggctacctcagcacggacaccgtctccttcggctccaccagctacccgagcttctactacggctgcggccaggacaatgaggggctcttcggccgctcggcggggctcatcggcctcgcgcgcaacaagctctcgctgctctaccagctcgcgcccagcctcggctactccttctcctattgcctcccgacggctgcgtcaacggggtatctctccatcgggccctacaacacggggcactactactcgtaca

SEQ ID NO: 272048 - DNA, 1478 bp, Zea mays
  unsure (1)..(1478): unsure at all n locations
ctcaaaacctcatgcacaagcttgctttttttcctcccccattaatctctcccctcccgctctttctcttccccatcagtctcgccgccatttccctgtcctgctgctgctgctactgctggtagtggttccccaaacccaagccttcgattcgcccgcccgcccgcccgcggtctcgagccagccttccgcgccgtcgtggttgctttacgcgcagctatccatggatgaggtccctgccaccgccgccgtcctcgacttccgacccggctcttctgtaccacgcgtctccgccgtcccgcgccgtgccgtgcagtgccccccggacaccggcggtgcagaggcggcgacgggaggtcgtccaggtatcgggaacactgccgccgtttccgcggagttgacggggtcaagttcggccggtcccgatatccaggctgtggattgcgatacatctggaggccttgccggcggtgacgctggagacgtgggggttttgtgcttagagaacgctgccgagcccgaatcggtggaaccaggtgtttcggacgtgagggtgggagctccagtggaggaacgccatggcaggacgctggatagtacgggattgggctctggtaaagctggtgagaccaatgagatttcactggttgaggtgtcccaatcaggtgccacttcaagcctagatgccactgcgtcgattggtggtggctactccctcgtggaggggtctctgccagaggcgagtggtgcccgcggatgtaaacctgaggtccatgaagtaccaacagggacccctgcaactgtgggattcccgattgaggacggtggctatggatttggaattcagcctaatgacgatgtggacggtacaaacgaccctgccggaggggaatgggaaccgcctactgatggcaatgatgccgaggacgtcacagatatgggtggaatattgtgtgacgaaagagtggagaggatggagatgaattcggtagaacgtgaggcctcgaatggttccaccgttacttctgaggaaggagtggacaggatggggacgagcttggacgactctgaggcttccgatggctcaaccacacaagattctgatacagacgtcgagaccgagtcaagtgtttctagtatagaggagcaagaagcaggatacggagcccacatccctcaaccggatccagcagtctgcaaggtggccaaagaaaacaacacggcaggagtgaagatctctgataggatgacttcagtgtccgaattaacacttgtgctggcttcaggtgcatcaatgttaccgcatccttcgaaggtacggacaggtggtgaagatgcatattttatagcttgtgatggctggtttggtgtagcagatggagttggtcagtggtcatttgaagggatcaatgccggactttatgccagagaactaattggatggctgcaaaaagatctngggaagagacccaaggagc

SEQ ID NO: 272049 - DNA, 522 bp, Zea mays
agccgtctcgtctcgtccggtcgtccctctccgtctccggtctccagtctcgctgcttccacaagtccacaaccgtaccagcaccaccgcgccatggcgtcctccgccgatcccgatgccgccacgccaccatccgcgccgcagccggagcccgcacggaaggcagtccgcgtggtggtgaaggggagcgtcacgggggtggggttccgcgactggacggcgtccacggccgagtcgctcggtctcgccggctgggtccgcaaccgccgtgacggcagtgtggaggccctcctctccggagaccccgcgaagatcgaagacatgataacccgccgcctccccgtcggccccccagccgccaccgtcaccgtcgtcgtcccgtccacggtcgagcccgtggatcctgccaccgggttcgagatcatgttcaccgtctgatccccccgttccgcgacaggtttgggtctcgccgcgcgttcttggactgtctattcgtgcactactactgcgaatctgtgatta

SEQ ID NO: 272050 - DNA, 728 bp, Zea mays
  unsure (1)..(728): unsure at all n locations
ggcgacgacacaacacatcatgacaacatgtgaagttgggcatctgggcctgcagtcgtaccaggtggctatctggctctagaacaagcgagcgcggtgagatcgggcacgactacgccacacacgcgttctaggctaagtactacaagctgcacgcttgccaccctcgtcaagtcgcttaggtaggagaaggtcacgctcgccgtgcaggtctgcgtaatttgcagagcatcaatctctctttcacattggttactgacattggtttgaagaagatctctggcttgagttcactgaagtctcttaatcttgacaatcgccaaatcacagatactgggtttagcgtctcttacaggtctcactggattgacacacctcgacctatttggagctcgcataactgattctggcatgagctgcttcagatttttcaagaatattcagtccctggaggtctgcggtgggttgattacggatgctggcgtgaagaacatcaaggacctgaaagctctgacgttgctcaacctgtctcaaaacggcaagctcacggacaaaaccctggagctgatctccggcctgactgcgctggtgtcgttgaacgtgtccaactcccgggtctgcaactcggccttcaccacctgaaccgntgaagaacctgcgcttcctatacctgagtnctgcagggtgaccgcagcgagatggatagctccgctggtcgccctcccaac

SEQ ID NO: 272051 - DNA, 634 bp, Zea mays
gtcttcttctaacaaaagagtactgactctgtcatgtgcaagtaatgctgataagatgaatagcagatgccagcctgcaatgacatcttcaaggaggatttggtcaacttggagtgctcgaacttggactcatgtaagattggtgatgagggtctatttcacctaaaaggcctcatacagctaaaaaacctggagctttcagacactgaagttggaagcaatggacttcgtcatctttctggtctgcgtaatttgcagagcatcaatctctctttcacgttggttactgacattggtttgaagaagatctctggcttgagttcactgaagtctcttaatcttgacaatcgccaaatcacagatactggtttagcgtctcttacaggtctcactggattgacacacctcgacctatttggagctcgcataactgattctggcatgagctgcttcagatttttcaagaatattcagtccctggaggtctgcggtgggttgattacggatgctggcgtgaagaacatcaaggacctgaaagctctgacgttgctcaacctatctcaaaacggcaagctcacggacaaaaccctggagctgatctccggcctgactgcgctggtgtcgttgaacgtgt

SEQ ID NO: 272052 - DNA, 825 bp, Zea mays
tcgctttacatcactgagcattaagaaatgtgctggtgttactgctgaaggagcaaaagcctttgcaaacttagttaatttggtaaacttagacctcgagcgttgtccaaagattaatggtgggcttatacatttaaaaggcttgaaaaaactggaaaaactgaatctgagatactgtaatggcatcacagattcagacatgaaatatttgtcagatctcacgaatttgagagagctacagctctcttcctgcaaaatatctgcttttggtgtttcttatctgagaggtttgcacaagctaggtcatctaaacctggagggctgtgcagttactgcagtttgtttggaggttatatctgagcttgcttcgttggtcttgttgaatctgagtcggtgtggcatatgcgatgaaggctgtgagaacttgaaaggtcttacaaaattgaaggctctaagtttagggttcaaccaaattacagatgcatgtttaattcatttaaaagatttggtcaacttggagtgcttgaacttggactcatgtaagattggtgatgagggtctatttcacctaaaaggcctcatacagctaaaaaacctggagctttcagacactgaagttggaagcaatggacttcgtcatctctctggttgatttaaaacgccttctggttgatttaaaacgcctgcagaaatgctagtattattggcaattgtttttttcttgttaatccattctggtagaccaattcaaatcgtctagtagttttttaatttattgtgtgttcggtttgaggaatgggctggtccatcattttctcctttact

SEQ ID NO: 272053 - DNA, 1856 bp, Zea mays
ctctcacctggaaagggaagacaagtcgagattcgagaaggcaaatcgaattcgccatgggcatggctgctccgcgcgcgccgctgcctctcccccaactgctgctcctcctcgttgctgcgctcctcgccgccgctcccctccctagggcggccggggcggacgagttcgacgtccgccgccacctctccaccgtcaccaggtatgatgtggccagggagtccagtagtgtcatctccatgccgtcaatcccagacgggtgccgtgtcattcacctcaatctagtggcaagacatgggactcgcgctcctaccaagaagcgcatcaaggagctggatagattggcagttcgactggaagcccttctgaaagaggcaaatcaggtccttgatagcgattctctgaagaaaattccatcctggattaaaggctgggaatcacgctggaagggtaggactaaaggtggtgagctgattagtgaaggggaagaggagctttacaatttagctaccagaatgagggagaggtttcaagatctatttgatgacgaatatcaccctgatgtatattcaataagagcaacccaggttcctcgagcatcagctagtgcagtggcatttgggttgggactactttctgggaaaggaaagcttggacaagggaagaaccgagccttttctgttctgagtgagaagtcgtgcaagtgatatttgtctgagattctttgacagctgtgagacatacaaggcatacaggaaaaggaaggagcctgatgtagacaagcaaaaggaaccaattctagagcatgtcacagctgcacttgtcaatcgttatcacctaaaatttacaactcgcgatgtttcttccctctggtttctttgtaagcaggaagcatctttgttgaatacaacaaatcaagcttgtgggctttttaatgaagctgaggttcgttttctggagtggacagatgatttggagggttttgttctaaaaggctatggtgagtcaattaactacaggatgggactgccattgctcaaggatgttgtccagtcaatggaagaagcaatcatagctagagaagaaaaccgtgctgatggtacgtttgaaaaggcaaggctccgatttgcacatgcagaaactgttgttccttttagctgccttcttggtctttttcttgaaggtccagaaattgagaagatacagagagaggaagcattggacctaccccctttgccgccacagggaagaaactggaagggcagtgttgttgcgccttttgctggtaacaatatgctggttttatatcaatgtccaagcaaaatttcggatggcagcacaatctctggaggccgaaacaactcttacttagttcaagttctacacaacgaagtcccagtttcaatgcctgggtgcggcaacaaagatttctgtccgttcgaggagttcaaggagaaaattgtgaaaccgcacctgaagcacgactacaacatgatatgcaaggtcaaatccccagcggcaagcgaggagcctgcctcgtacgcctacagggtgtccagtttcttcctaggactcctctcgcaaaaagggtaccgcggtgtgggcgccgagggcgtcaagactgagctgtaggcgtcaagacctagcttagcacggtgccgtctcctctcaccgtctgcgagcacgatcaaggaaccagactaacccatgcactaacccgcagtgtttttgtacggggcgagtcgaatgtgtgggacaccaccacaggaggcgccagttcggttggctccagggccagacgcctctgatactgtagtagcaataacataaataataaatgtgtttcgattcggcct

SEQ ID NO: 272054 - DNA, 1349 bp, Zea mays
cccacgcgtccgagaagagaaaaataaggttcctgctattgccattgtgggaagaccaaatgtgggtaaaagtagcattctaaatgctttggttggagaagatagaactattgtcagcccagttagtgggacaacacgtgatgccattgatactgagtttactacagcagatggggaggacagcagttatttctgctggcagcacaaccgaatcactttcggtaaagcgtgcatttcgagcaattcggcgctctgatgtggttgcccttgttattgaagcaatggcctgtgtcacagagcaggattataaaattgcagagaggattgaaaaagaaggaaaggcttgtgtcattgttgtgaacaaatgggatacaatcccaaacaagaaccacgagagtacaacacattatgaacaagatgtaagagaaaagcttcgcatacttgattgggcacctattgtctactgttctgcgacaaatggcaccagtgttgaaaagataatttctgctgctgctttggttgagaaggaaaggtctagaagactcagcacctccattcttaatcaagttattagagaagctatagcattcaaatcaccaccaagaacaagaggtggcaaaagaggtcgtgtctattatacaacacaggctgccgtcggtccaccaacattcgttctatttgtaaatgatgcgaagctcttccctgacacgtaccgccgttacatggaaaagaaactccggtcagacgccggttttccaggcacccctattcggttactgtggcgtagcagaaggcggccagacaaacgaggtaaatctgctgacagtagagcgcagagcccaggaacccctagtgaagtggctctagccgcctaactaaaccgcggcctccagaaatgctcgccacagatcagctcgaccactgggaatggaattctatcgaggcggcggcagttgcttgctccaagaacctggatcggctgaggagctagctgttcatggagtagcgctctcatgttcgggccctggagattttgttgcgtctatatactactagtacggatcagacggagaaagcccattgggcccatgaatgaatagtcccccttccccgacagagctccaagcacgctttttccccagcgctcttggaacatgtaagattgtaccgaaagaatggcgttagaatgaccatgtaaatgtaatcgtagactgagttctcggatgtgtgggtaaacagcatacttaggtgccgtttggttgttttgtttacgaaatgtaacttaattggtaccggtaatatgttaggagtattttattttgaacgagaaaaaggcgtgcggactgccc

SEQ ID NO: 272055 - DNA, 619 bp, Zea mays
cagctttgccactaaaagaagatcatgaagaatcaatgactgtctatggttgcgtctgcggtttattattatcatcacatccccagatcctccctctggtgcctgacgtcatacatgtctttgcccaagtggtggtatccccagatgagagcgatgaagtgaaaacaaatattggcaaggctatttctcacttgatatctgtctatggccagcaaatgcagccaatactgagtgcccttccaccagcccatgcaaacgcgctggcttcatttgcgagtagaagatgacctcggaggaccagcttttctttggttccttgttctgcttgattttgttttggttttgtcgacgattgccattttctgaggatctggtcacatggatcaggccagatgggagtgcttgcattgcacattggcaagggcgagcggagttgtcaggttggcgcatgattgattatatggtgaagcttggtttctctttgaggtacatagttgtgcttgctttggagccctgtacggttatgagtgcctgcctgtattcaggttccggatttggttatttatgctcttgttttttatatttttttgcctgtatttgcaattcattgattgctgtt

SEQ ID NO: 272056 - DNA, 1025 bp, Zea mays
gagaatcagagctctgaggctgctcacatcaggccaccaccaacccctcacgtcggcggtggcgtcgtcggcgaaggcagagatggcgtccgtggccgcggcggaggtcgcggcggcggcgctccggtcggtgctgtcgcgcgcgcagcaggcggcggcgcgggcggggcgcgcgccggggtccgtgcgcgtggtggcggtgagcaagaccaagccggtgcctgtcatccggggcgtctacgacgcgggccaccgctgcttcggcgagaactacgtccaggagctcatcgacaaggcgcctcagcttcctgaggatgttgagtggcacttcattgggaatctgcaaagcaacaaagccagagccctacttgctggcgtgccaaaccttgatatggttgagagtgtcgatgatgagaagattgctaaccgtcttgatcgagtggtagctgacttggggagaaaacctcttaaggttttggtccaagtcaacactagtggagaagaatcgaaatttggagtagatccctcaggatgcatggaactagcaaagcatgtcaaactgaactgcccgaaccttgtgttctctggtctgatgacaattgggatgcttgattactcctcaacccctgagaatttcaaggcgctggctaactgccgggaagaggtgtgcaaggagcttggaatacccgaagagcagtgcgaattgtctatgggcatgtcggctgattttgaacaagcgattgaaatgggaagcacaaatgtaagagttgggtcaaccatatttggtgcaagagaatacccaaagaaggactagggtgtttagctatatttggtgcccaaagaactagggtgtttatgcattcctgtcatgatggtagtggcacagaatctgcagcagatccaaatctgatgatgcatcatatatgtgcagttgtgtgcccattctactcagctttgtaacaaccccccacccttttttgaaaaaaacgccccaataaggagagttaataccgagggttaataac

SEQ ID NO: 272057 - DNA, 1151 bp, Zea mays
cggttagtacagggccgacgcccagtccgtcgactgccaggaaaaggctgctgacgctgctggtcaagtgaactcatgggtagaaaaaattacttctggcctcatcaaagagatcctgcccccaggttctgttgaccacaccaccaggcttgttcttggtaatgcgctctattttaaaggagcttggactgagaagtttgatgcatctaaaacaaaagatagcgagttccaccttcttgatgggagctcagtccaagcacctttcatgtccagtacagacaaacaatatatcgtggcttacaacaacttgaaggtgcttaagcttccataccagcaaggtgcggacaagaggcagttctccatgtacattcttcttccagatgcaaaagatggcatctggagcttggctgaaaagctgagctctgaaccagagttcctggagaaccatgtcccaatgcacaaggttccagtcggacagttcaaagtccccaagttcaagatatcctttggatttgaggcatctgagctgctcaaaggtctcgggctccagcttccgtttagtgctgaagcggacctgtcggggttagttgattcaccagagggacggaacttgtctgtttcgtccgtattccacaagtcatttggcgaagtgtacgaggaaggaacggaggccgctgccgcatctgctgcaacagttgtgctccggtcgttcacgatgcctcaggatttcgtcgcagatcaccctttcatgttcctgattcgcgaagacttgactggtgtggtgttgtttgtcggccacgtggtgaatcccctccttgctccatagtgtgttgttcagaagtgtggccttggtgcggttccatcccctcacagatgtgtggctttgacagctgatcaagctttatgtgtaatctgccatgttttgtttttgaataaatagatgcttgatcgatgtatgtaaggctgcgagatgatagttcagaattggtatgtgtggtcatggactcatggtacttactgtttccttcttcctctctgatgtttctggttctagtgacctttttccagtgacatctgtaagactgataacatatatggtgctgtttagtttatatgtttgtaatgtaatagataacaaataacgttagatc

SEQ ID NO: 272058 - DNA, 837 bp, Zea mays
cggtacgcgtgggattcaccatgccgaccgaagagggttccgacggcggtggcggcgccggagccggagccggagccggggagaagaagagctcgcaggcgcccgcaaagcctggagcgtgcggcgccgcaaagttcctcgcggggttgccgtcgcgcggcaacttctcttccggctccgccccctccaatctgggagggttcagggtttacgtctgcgagcacagcacagatcccccagaaggacaagttataaagacggattcaacgaatattttaatcaggcatctccagttgaacaagcagaagactgagggcaaagatgtggattccagaactgtcggcgaaaacaacagagggaaaagatctgctgccagaagtttggatgtcaacaattcagcaaagaaggctaacttgggtacttcatctggatcatcagcctatgaggaaatttctggcttttcacaacacacactgcagtcatttacagtggagagattgcgtgcacttctacgacaaagtggtcgatcgaccaaaggcaaaaaggatgaactgattgctcgcttacgggagtcgcagggttgacatgaatctggtacttgtttagtcaatcaaaccccttcaggcaggggttacacgaccaaatgagtaccaggctgtacttgtcaatggctgctctgcctagatttaatacaatgtaatggcatatgtaggttgagactttgccggaccttattatactcagaatttgttaactagctgttacctgtcagtagtcatgaattcactgttttctcatacccggtaggttaaaaaatgcaggtatgtgaattcaatt

SEQ ID NO: 272059 - DNA, 1148 bp, Zea mays
gccacatggcatcgcattatacgtgtagatgctattcgagcaaatacagaatgggttctgtgggcccgtaaccaggctgaagtctctaaagagaaagcgctgcagtctgcaatatctgtcgggttgaaagattttgaccatttagagccttacatgatctatcatgctgcacgattagttgcactgcttgaggcatatgcactttatgatccagagatcgggtactgtcaaggaatgagtgatctcttgtcaccaataattgcagtcatggaggaagatcatgaagcgttctggtgctttgtgggtttcatgaggaaagccagacacaacttcaggcttgacgaggttgggataaaaagacagctgaaaaccgtctcgcagatcatcaagcgcaaggattcacacctctacaggcacctgcagaaacttcaggcggaagactgcttctttctgtaccgaatggtggtggttctcttcaggagggagctcacttttgagcagactatgtgtctgtgggaggtcatgtgggctgaccaggccgcgatacgagctgggattggaaggtccacttgggcaaggataaggcttcatgccccgccaaccgacgacttgctgctctacgccatcgcagcctgcgtcttgcagaagaggaagctgataatcgagaagtacagcagcatggatgagatactgcgggagtgtaatagcatggccgggcagctagatgtctggaagctcctagatgatgcccaccacttggttgttgaccttcatgacaaaatctgatgcgacggcttccctcagttatgtttggtagagtatgcagacatgaaccacttttccgaggtgtatttagtaatctgttgtgtactgttcatcacccggaattatgggcatatatctagagaaccgtgtggcttcaagtgaggacgaagttatctccacttcggttaagctgataaaccattggatagcacaatggtttatgcaagccatccatagtttaacttgatgtaaaatttcgtttttttgcttccagtatctgtcctaggcgaaaacatcattttccatcaagccttttatagcaaaatttaaagttcccagattttggggtgtaatgcggagtaatatatgatggattcagagtc

SEQ ID NO: 272060 - DNA, 1477 bp, Zea mays
cgtttctccactcggcagttacaggatgcaggacccaggattccgacggctcgaccgccagttggagctgatgaggtacctcatacgcgagagaaccgcggatatccagagagatcatcaacctgagaaacgacgcgggccttacagctcttcacctggctgtggttggctgcgcacacccggatctcgtcgagctactgatggccaccccgtccatcgacctgaacgctgaagacgctaatggcatgaccgcgctggcgctgctgaagcagcagctgcgctcagcgacgtccgaccggctcatcaagcagatcgtctctgccggaggggtcttgaactccagcatcctgagaacccggtcagccatcgcttctcagatcaagatgcagggcgggatcgcgagcagccccggcaccactttcaaggtatcggatgcggagatattcctgttctccggcatgggagcggcggagtctctgaggccaagctcctgctccagcaacgggaaggatgatgaccctactcacgcagacgcagactgcgccgagaaccgtggatcgtcggagaagaggctgagctccgcgagccgggccaaagaccgcctcaagatgatgctgagatggcctcgccacaaggacaagacgcccaagaagtcagaggacagcagcccgctggggtcgatcagcaggctgaacgagcacggggccgagacccctgctccgctgaggcagaagtttaccaagacgacggcgctcaacggcaagcggaccctagcggtgaagagctccaccccgagctcctcatccaccaagaagaagctcaacacgaagctcatccacggcatcatggaggccatgccacagctggcgccatctacggcgcggtccgcgtccccgacggacactttcctgaggtcctcggtatcgtccacgccgcagccgctggcgaagctgaaggacatctgcctcgacgacgagatctccatggtgacgccgcccgccggcaggctgaaggatagtgacgacgccatggaggacccctcgtgctccaacaactcgtccatggacgacggctgtggcgccgggacggcagagagcgcggcccggaagcacgggtgcggcaacgggaggctcatcaacatctgctttggcgcgcagggcctcaccgtggaggactcggcgagcgggcagcagacgagcaagatgttcaagcagcagtgcctcagggtgtcctgattgacggcgtggtgtctcgactacaacagcgtggtgtgattggtttggtgtctcgcgtgcagctatgtgtgcttgtttgctttgctccttgcacagccagcggtgaactggtgatccaatgaacttgtgcttgtgttaactgtgacgttgacgaatccacagctctttaacttcctcagtgtcaggtcgtgcattcttcaaacaaatcaccgttgatcaatcacttcctcgaattttatttt

SEQ ID NO: 272061 - DNA, 533 bp, Zea mays
  unsure (1)..(533): unsure at all n locations
gtcaccgtgaggaactggaacgacaaggactactcggtggtgaccatcagatgcaacgacaggtccaagcttctgttcgacacggtctgcactctgacggacttgcagtacgttgtggtccacgcgaacatcgatgccaaggacaatcaggcttaccaggaattctatgtaacgcatgtgaatggatcgccaatgagcactgaaaccgagaggttgcgagtcatccaatgcctggaagcagccatcgaacggagggtatctgagggtgtgaagcttgagctgtgcaccaacgacaaggtcgggctgctatccgaggtcacccgcatcttccgcgagaacagcctgacggttacgagcgcggaggtgaccacgcggggcaggatggccgtgaacacgttctacgtgcgcggctccgcgggagaggccgtcgaccagaaggcgatcgactccatcagggaggccataggccacagcctccaggtgaaaggccaggccgagccaccggagccgcagaagtaagagtcccncacgtg

SEQ ID NO: 272062 - DNA, 548 bp, Zea mays
tacttactggttgccgtattgtctttagccgggttttcccggttggagacgccagccctcacttgcatcctctgtggcagactgcagaacagtttggtgcagtctgcacaaacctggttaatgatcgggtcactcatattgttgcaaactcccctgggacagacaaggtgaattgggcattatccaaaggcaaattcgtagtgcatccaggatgggtagaagcttcagctctgttgtaccggcgcgccaacgaacatgactttgcagtcaaataacaccctccctgagcccgaattcatcatataggcttcggggaagaattcttctcagggatggaatgtgttcatggtaacctaacatgattaaaaaaaaaccataacaacatatctaaaatgggaccatggtaagaaggaaaaccaccacccaaagaatttcaggccttaaaatgaatggtaacgaagaaaacgctttatgatagcctggaagaggagactgggtctgttgtggatgtcattacctaagtggtgggtggtcaagatttcttttta

SEQ ID NO: 272063 - DNA, 406 bp, Zea mays
gctgagcaaccactcccatgctacctgcacagggttaccctgcaatgtggaacgcggcaatgaggagcgacttggagcctccaccatatgccgcgacgcatggagtccatcatggttaccaccaccctgtccagccaggctggcctggggttcattgcgcatcgccgttcatagggaccctctccacccgggtaccctcctcctcagttctatcccaggtagcagtccctgctgtgttgaggggtgttgctccatcgcccagtataacatggattacgcgcaggagttcagttaggactttggagaaatagagtggtatgttttcttcagtgatctgaaagacgggagctgttttttttccagcctgacagactggcatgtatatatatatttttctgcgtggccc

SEQ ID NO: 272064 - DNA, 1360 bp, Zea mays
cccacaggccacagtcccacccgttttgcagtgcggaagccggcgaaacttccaagcccaacggcacgccacacccctccacccttaactcgatcccctcttccccgcccgagtcagagcggcggcgccagacccggtgccggagctgacagcttccggcaagcggccggctacttggtgcggcgggctatttccgcggttttgtgccacagcggactgaactgcccgcccaggcttccctgtcagggtcaccaagattgaacaagactgaactgccgcgcttcaggatactgaactgccatctcagttaaatgatacactgcacaacagtgggcagcgatagtttgagacacattaacaatgagttgtttttctcactttttcaagagaaaaagggggccacaacaacaagacgatccatctgacaattatttcactggttctgagaatataacaagattcagctacagggaactggttagagccacatcaaattttgaccaaggcaataagattggtgagggcggctatggacctgtctacaagggaacactcaaggatgggacagttattgccgtaaaggttctgtctttacattctagacaaggggcaaaggagtttcttaatgagcttcttgcaatctctgatgtaacacatgagaatcttgtcaaactctatggctgctgtgtagaaggaaaccacaggatccttgtctacaattatcttgaaaataatagtcttgcacatacccttctagattcgcgacacagcaacatccagttcaactggagaactcgggtaaatatctgcatcggtgttgcccaaggattagctttcctccatggcagtgtcagccctcacattgttcaccgtgacatcaaggcgagcaatatacttcttgataaggatatgacgccaaaaatatctgattttggtctggcaaagcttctacctccggatgtatcacatgttagcacaagagtcgcagggaccctaggttacttggctcctgaatatgcaattcggggacatgttacacggaaggcagatgtctacagctatggcgttctgcttatcgaaattgtgagcggaagatgcaacactgatacgaaattgccctatgatgaccagattctccttgagaagacatggagatactatggtcgcgggaatctggagaagatcatagacagctcccttggcgacgacctggacgttgacgaagcctgcaggtttctgaagatcgggctcctctgcacccaagacggcacgaaacgccggccgggcatgtctgcggtggtggccatgctgagaggcgaggcggacgtggacacggagacgatcagcaagcccgacgtga

SEQ ID NO: 272065 - DNA, 398 bp, Zea mays
tattctcattcttttcaccatgagctggtggaattatcaagaatccagccgctgcacatgtcaagtaagcagccagagatggctgttccatcagctaatggtgatcttgacatcccagaatcagtggggctttccgctccccagccattcctcaaaagacttgttgaggccgagccgatgaggcgcagtaccaggaggcggcggtagtaatgaaactagtactgtaattaatagcgtagtgaatttgttggttaagtgttgttatgacttgtaacttttagcagtttaggtttttattttcttttggttgttgtgttgattatgtgcatctcgggttagaatttatagatttggagaactgttggattgacaacattctgagtggtaaaataccaatt

SEQ ID NO: 272066 - DNA, 965 bp, Zea mays
tgaagagcatgtgggattcgtcttggaaaccattactcacaggaagggtgaagtagttgacatgggcccggttcctggcacaactggaagaactcgaatcttcatgacctgtccatctaggggtttggtgggtgttaaaggaattttcagcagctttacacggggaactggatttatgcaccgtgcttttcaggcatatgctaaatacagaggtccactgggcagtgtcagaaaaggagttctgatatctgttggtaagggacttatcacttcacatgcccttatgagtttagaagctcgtgggatcctctttgtatcccctggaatggaggcatatgaagggatgatagttggtgagcactcacgtgacagtgatcttgaggtgaatcctgtgagaactaaagaacttacaaatatccgagcccctggaaaggatgaaaatgtccgtttgtctccaccccgattgatgagtttggaagaggcaattggatatgttgctgcagatgagcttattgaggttcctcccaaggtcgtacgtcttccaaagaagttcttggattccccttagcgttagatgatgaaaaaacaagcctatgaattagaactccagagacaacatattttcatcaagccctgccagcactactatataagtttatcatgcaagactcttgcagcaagagtgttgctgtctcttgcagcaagagacagcatttatgtataggttggtgttcaatgttgcaacctgagctcttttccagcagcttcacccaggttttacgtgcacacaggattggctgacagaataagcccaccgtagcagctactggaggtaggatcctcgttggttatatctatttagacttttttatggtgaaatttcagacacccacaggttctttgaaggttgtattattctttggaagttcaagaaatgcaggccaatccccataggtattttgttt

SEQ ID NO: 272067 - DNA, 313 bp, Zea mays
acgggacaggcagccacggccctgaagctgctgagggagaagaaggaccagtttgaccttgtgatcagcgacgtccacatgccggacatggacggcttcaagctcctcgagcttgggggcctcgagatggacctcccggtcattatgctgtctgcctatggggagacacagacagtcatgaaggggattacccatggagcatgtgactacctgctgaagcccgtgcgtattgagcagctgatgactatatggcagcatgttgttaagcagaagaattgtgacgccaacaacaatggctattacaacgattatt

SEQ ID NO: 272068 - DNA, 890 bp, Zea mays
catcttttcccccgctgctccaaaaggcgggcaccaaacaccaacccgagccccgagcacgagcgcccaaccaaatggcgccgcacaccaccgctggaggcgggggcggagccgaggatgaggtgtccgaggcggcggctgcatcccccgccctgcggcaccgccacgcgggcaagggcgaggggctgggcggcaatggcggcgctggggccgacggccaggcgtccgtggagcgggtgttcgcggacaaggcggtgccgtcgtggcgggagcagctcacgctgcgggcattcgtcgtcagcgcgctgctggccgtcatgttcagcgtcatagtcatgaagctcaacctcaccacggggatcatcccctccctcaatgtctccgcggggctgctcggcttcttcttcgtccgcatgtggaccgccgccgccgagaggatgggcttcctccgccagcccttcaccaggcaggagaacaccgtcatccagacctgcgttgtctctgcctacggcatcgccttcagcggtggctttggcagttatctatttggaatgagtgacaaaatagctaaacaagcaacagaggctaaagatgctaataacataaaggatcctcaccttggatggatgatagggttcctattccttgtcagttttattggtctctttgcacttgtacccctaagaaagattatgattgttgactacaagttgacctatccaagtggcacagccactgcatatctcatcaacggttttcacacacctgagggagccaagcttgcaaagaagcatgtaaagacgttgggcaagtactctgtgtttagctttttctggggcttttttcagtggttctacactgcaggggatgagtgtggattcaaaaatttt

SEQ ID NO: 272069 - DNA, 470 bp, Zea mays
ccctcgcgcccgggaacgcacctgcgccctacgcctccatccgccctccatcgcctccaccgcaggccatagagcccgtcgtccgccgcacctagcgccttcggctccggtcacaggccccgccggaccgcccgcaggctgcagcgccgcgccgccggccgccgcagcagtcccgcgcggtcgcgcagttctggtcgtctggtctggcctgatgcccgtagcgctgcgtgcccgcctgagaccctgagtaggactgccggagactaggaggtagtagcaagcagcagcgtgctccgcggctccgcactccgctggtctgcttgagattggaagagttatttcggtcacggttctagtggaagcggaccagacactcgtgctagtggaagttgcaatgaacccgaaatacaagttcatgttcaagagaataatagtgaagaaattccaatggttcaagaagagaatgcaca

SEQ ID NO: 272070 - DNA, 714 bp, Zea mays
ctcccatccccgcacttcaccggcctcctcctccttcccgtccatcgccgtcgccggggcgccctacaacttcaaaatggcggctaccgccaccgccatggctatagcaactatctcccccgccgctccgatcccatccgcgcccttcccatccctccccctcggcctccgcctccgccctcaacccctccttttcgctgcttcccgccgccgcctcctccatgttcccaaagccgcctcctgggacgaatccgtccccgaggatggtggagatgcggaggaatccgttgccgctggggacgacgaggacgaggacgagaagccgcggcccgagccggtgtcctcctccgagttccagttcgcggcgccacccgagggctacgtcgagcccgcggcgtttgacgagctaccgccggagtccccagaagacgtggcggcggcgtacgaatctctctacgggccggccttcagcggcgagacattgctggggaacaatgtctttgaggtcaaggtggtcgaccccatcgacatggaccgggagcagcgcccgaacgacgatttcaccgagcgcgtcgtgcaggtcaaccgcgtcaccaaggtcgtcaagggagggaggcagctctcctaccgcgcaatcgtcgtcgttggcgacatgaagggccacgttggtgtccgcgtgggaaaggccaatgaggtcacggaagccatcaccaa

SEQ ID NO: 272071 - DNA, 603 bp, Zea mays
ctcgactcctcctaaccctagccgccaggctctagtgctccaccgctccagcagatcggggacccggaagcagcgaggaaacacagggcggccaaggcccgtctggactctggatccgccggtccgccactccgcccctcatctccgacctgagcgcgccgccctgccccgccccgcctctccctcgagcgctgtccgcgcctccgcgcctccgcggtccgcgtccggccgtccgcccagggcccaggcagttgctgcctgctggcttgctgccgtccgccaggccgcctaggcacacagcacactacttctacagttctacggccagcgcccagcggtccagtccagcttccaaatggctagtgaggactcgaaagatatgctgaagaacgtggactggaagaaccgtgggcggtgctgtgactactgaatctagccagccagttgtcaagaaacgccttccgaagaagatcagacaagtccctgagtgctattttctgcctcggcgatctttgccttctgcactggcaatctatggtgccgtgtgtgctgctggagttggtgcaggaatgctgatcgaggtgtggataaacaaaaagatca

SEQ ID NO: 272072 - DNA, 517 bp, Zea mays
  unsure (1)..(517): unsure at all n locations
cggacgcgtgggcggacgcgtggggttttggaaaggaagcaccggatcggagcaggcgatacggcgccgacgacaatggcagcaacaagggcttccccggtgcttctcttgctgctgctcaccgtccagctcagcttgctcttccgcctccccgactccccctccaccctcgccctcgccctcgccctcgccgcggaaccagaccaacagaacgccaagcagcatcgccagcccgcgctgctggtgcagtcgacgtgcaactccaccagcttctacgacctctgcatcgccgcgctcgccgtcgaccccgccagctacaccgccgacgtcccgggcctgggcgccatcgccgtgtccgccgccgcaaacaacgcctccggcacggccgccttcctcggcaacgccagcgacgccgcggccaccccgcaggcgggaccgcgcgctctncgcgcctgcgccgggcagtacgccgncgcccgcgacgcgctcgtgcaggcgcgcgcgtccctcgccgagc

SEQ ID NO: 272073 - DNA, 702 bp, Zea mays
cctaggtttgctcgcgtacccttcccggtctatatgttgcctcggtctagaaatcggcgcggtcttctcgcttctcggctacatctaagcatgcctacacctgcggtttccagatagggtgtttggtacgatcgagcaacggtgaatctcgctctgatatttgtttgttcgaaacgcgtggttttgattttgagatgatgtgcaggttccgatctgattggttagattgatgagtggcgaatcggattgaagcgagacgaggctgcatggtttacgcgctccgaggcttctgatctgcgtgtttgctccgagactattggtgcctgacccggcaaattgcactctgccgaccttcagagccgggtcgttctggcgagatctagacgtcgaagggctattaaagcgtggctggatctctttctgcaccgcgcctctcgatgatgtctctgtgttgataattattggatgaaatttcgataattattagatctgagagatgttggtcggagcgatccgcgcctaaatggcaaggtaagttaaacacatgtaactacagagttgcgtgtgtgaagtcaaaagagggggaaagatactgagaagggaggaaaaaatatgaaagaagtgaggtgtgacatcttgaaggcctttgccattgtgggtgcgctcgcatggcaggcccccataataaagatgctggttttg

SEQ ID NO: 272074 - DNA, 448 bp, Zea mays
gatggttgaaaaccatatgatccatacataggatttccaacgtccagaacacaaggacaagggcgcagtagccatggaattttcaagggcaacatatcatattatcatcgcgcttcgtgctgataacaatatgaacttggctagttcaaccactgggtctatcaaaatgtgtgccctatatactaataaataccaaactctggtctagaactgatgtggggaacaccgataattcatgagaaacacgtgcctgctctcatccagagaccattaacaacatcttggtggcgcagcccccagccctgagctctaagtttacctagttaaacaagtactcattggctcttaccaaccattatcattgataatcaagcattattgttcagcgtcacctgtctctgccccctaaaaaaatctaacctatccaaatgttgacctttcaatagga

SEQ ID NO: 272075 - DNA, 630 bp, Zea mays
aaatcagcacatcctatcttgtccgctgcccccgccgccccgcggttgggtcgtgtcgtgtccccacctcgtcttcgttctgctcctaccaattccagtcccagccatccgcccgcccaactatggcggcaacggctctgctactccccagcctcgcggcgctcacggacacgccgcgccgcgcccacaggttgctgcagccgcagctccagctccagcgcggctcccttgtctctcggtccctccggcctccgcggcgtcggcggctcgcggtctcggccgtgcaagagacgaaggagggggaggccaagacggccgacgagataaccgagaagtacgggctcgagttcggcctctggaaggtgttcagctccaaggaggaagagggaggcgaggggaagaagtcgcggacggaccaggccaaggaactcctggccaagtacggcggcgcgtacctggccacctccatctcgctctccatcgtctccttcactctatgctacctcctcgtcagcgccggcgtcgacgtgcaggacctgctcgcgaaggtcgggatcgtgacaggggaaaccggagggaaggtcgggaccttcgcgttggcctacgccgcgcacaaggccgcgtcgccga

SEQ ID NO: 272076 - DNA, 788 bp, Zea mays
ttcctctcgtccgccggttacttgaccctctctgttccccaccccacccacggaaagcttcgagctttctctctataccccagggagaaggaaggaagccggcacagtctactggccttgtggagccggcaactgactaggatcgagaaatagggttcttggagagcggccggtccatggcacagctgtgcgagctggggcggcagctcccgctgagaggccccctcaaagccctagaggcatacatccaccacgctaacgccatggcagatgctattcagaggaattatggtggcgcatgtgtgcagatgaggctgtcgttcagctccctggctccattgtttttgtacttcatccaatggctggactgcggctgctgttatgcccttcccagctatttaggattgtttcacattctcatatgcaaggtttatgctgatggagatagctcagtgtcgacatatgaaaggcgggcaagccttagggaattctacgcagttatctatccgattctgcagcagcttgagagtagtttgatcgagagggacctgaaagggaagggccgatgcaaggatatagtgagtaggaggaggatggaggattggaaaaaggtttccggtagggatgtggaaagggaggatgaatgcgggatttgcatggaggcatgcaccaagatggtcctgcctaattgcagtcatgcaatgtgcataaagtgctataaggactggtataagagatcagagtcttgccctttctgccgaggaaagcctaaaaagaatccgctcgac

SEQ ID NO: 272077 - DNA, 644 bp, Zea mays
aaagaaggtccattggtgaactttctgactcctataaatccaattgaaaagctggaaggagctgcaaaagctggaagggagatcagattttataactcagagatgcatagggcagcatttgttctcccgacctttgcaaggagagagctagaagcatattgcgtttccactgaaacagagcaagcggaggaaacaccggcggcaccactgaagttgactcttgcatccaggagtgaaattttcgctacatcctagctagaccaggactcgcgatgtaccacaagatatcaagaaaccattccttccttcctggtgccgtacctccagtatcgccattggttcatagtcttactatcacatgctatgagacgcataatgaggcatcatgtcagtaattcagtatccaaacaatgagatgagattggcatgctaagaaaggacgagctgatattacaatgtactcccttcaccatgtcagtaatttattgtccaaacaattagatacattgcgttatatgaaggagtttcttaggtgtatctagtgctcggagaaccgaaacgtagtatctaggttgtacatgttcacccttgtacttctacttattaagtgatgtaataaatgcagagatagtcttgctcaatac

SEQ ID NO: 272078 - DNA, 517 bp, Zea mays
  unsure (1)..(517): unsure at all n locations
accggaantcagggncgacccaggcgtccgatcgagtctttctccgacgtctacttccagcgcctagcttctccaccgcgttggctgctcctccggcgccagtctgctcgccgggatgcccctgccctactcctcggtctccctcttctgccacggccgctgctcatcgcgcccagctgaagctcgccggacttccctgtttctctctctccgctgctcgctcggtgtccggtcgtggtactgcctgcgcaccacgagtttctccctgacgcccagcgacagccgcagctcggatatcccaggccgcgtgctcgccagtctcgagcgcccctcccttgctcctctagctcgtggagcttctcctcgacagcgcccctgtttctttttggccggagcgccctctgctcggcgtccctcgctgctcgccggggaaactctttccctgctcgccggcagcaacatccagccgcgcagctcttgactcgccggccgagccccagccccagcgtcgtggagc

SEQ ID NO: 272079 - DNA, 701 bp, Zea mays
  unsure (1)..(701): unsure at all n locations
cagctatagtgaacaagggagcttgtgcaagatttgcatttgctgctgcgatttttggtgatttccaagaagcacttttctggctacagctgcctcaagctcttcgccacttcctgggtaaatcaacaagtagatcaagagagaagatctcacaatcaagtttacatcctgattctgaacaaagctccagatttaatcggatagcttcaagagagagatctgcttctgaaaagttcacgaaaaatgctgcgaattatgggcaattaagctcaatggcatttaatcaagagcaactatggttcaatgcaagtgaaaggataccttggcatgacaagctcgatggtgaagatgctttgcaaaagcatgttcatgagcttgtctctctcgggaacttagaggctgcggtttcattgttactttcaacgccccctgaaggatcaaatttttacccaaatgcattaagagcagttgtgctgtcatctgcagtctcacaatccttgcatgaacttgcagtgaaggttgttgcagccaatatggttagaacggacaaatcgctatctggcacatatcttctctgtgctgttggaagatatcaggaagcatgttcacagcttcaagatgctgggtgttggaatgatgcagctactntggccgcaagccatttgcatggatctgactacgcaaggtgctgcagaggtggg

SEQ ID NO: 272080 - DNA, 481 bp, Zea mays
  unsure (1)..(481): unsure at all n locations
agggtgggcgagcctgctcttcctgtctgggagagagaccgaagaagaggagagagaggcgcagcgcagcgcagcgcaggcgcgcatctcccccctccccttgccggctggcccctgctgcagctctgctccggtcggctctgcccccccgctctgctgactgctctgccgctgctgctgtcgcaggcgcgccaccaacccgccgatgcgcgcgtagcggcgtaggtaccatcatcatccatccccgcgacgacccaccacccacccctgcagtctgcagcatccccttccccactcccggctggtctgctgcggccacccctgcgccgatccacctccgctgcttcctgcctcaatatattcgcccgcctcgtcgcctccgaccccgccacagaaggccttccagaaccctccgacccctcacctcacccccgctccactcttctccttctnccgggccggccgactccgatggccgtcg

SEQ ID NO: 272081 - DNA, 447 bp, Zea mays
cacgggcctcccggcattggtggctggaggagagctggacatggggtcgtcggcgcaggtgcctgccccatgggacgacgcccagaggaaggccaacggccgcacgatcctgtgaggttttctccttttttttgggtgacctgaccttcttagaggagttcggtttgcccattctttttcagtcgcagctttgcttttggtggggctagaagctctgtgaggtgtagcagtgcagtgcaggcctgtacatagctcgacctcgacgctcctcccgatcctgcatctgtgttgtgtctgaaaaaacaccgagttgaggctgctattatagccacaattcgatcccggcaggatggatggaaatggaacctgactttgatttgatgccccgacgctttgggataatcggatgtgacggggcaacagggttattataaatcttgcggtgat

SEQ ID NO: 272082 - DNA, 840 bp, Zea mays
  unsure (1)..(840): unsure at all n locations
cgggncgacccacgcgtncgcagcatttcttgagaaattcattgctggaccttttcaggaccgggggactaataattggtcgggctttgagtcacaccatcaatttcagtttcagtgaagccttattcaatttcacccaggaaatctgctatgttgatgaagtcttctggttgtaaagagaaaacagtgaactctgggtttcccaacctgtctttaaaggcttgccacaggagggattctttgtctctgtgatatgtagttgtctatttctcgatcctgtatcttcgatatcgagcgggcattgtcaccgatgagatgctgtctctaccacagaaaccttttctagctgtaggactcttagaggcctttggagcagcagcagggatggcagctggagctgttctttctggagcttcaataccaatactgtcacagacctatcttgtctggcagcttcttctatctgctatattcttgaagaggcgttatagaattaatgagatagcaggatgttttctagtggcaattggtgttcataataactgtagcaagtggatctggtactagcgcttcatttaaaagtagtggaattttatggccgctgctaatgataatatcgttctttttccaagctgccgttacaatattgaaggaaataatatttatagatgcttctaagaaattgaagtgtggctcggttgatctttttgttgtcaattcatatggctctgcttatcaagccctttttatgtgtatcttgctgcctttcctgtcaaagttatggggaggtccattccatgtgttaccaacctacataaaagatggggcagcctgcttttt

SEQ ID NO: 272083 - DNA, 572 bp, Zea mays
tggtgacaatagcttccagggccatagggagtggctggctgaggttatatttcttggacagctctctcacccgaatttagtgaagttgatcggctattgttgtgaagatgaccacagggtccttgtttacgagttcatgcctctaggaagtgtggagtctcatttgttttcaagggttatggtgccacttacgtggtcgatcagaatgaaaattgcgctcggtgctgcgaaaggacttgcttttctgcatgaagctgagaagcccgtcatctatcgggacttcaagacatcaaatatattactagatgaggaatataatgcaaaactatctgactttgggcttgcaaaagatggaccagttggcgataagtcccatgtttcaactcgtattatgggtacctacggttatgctgcaccagagtacattatgacagggcatctaacggcgatgagtgatgtctacagctatggtgttgtactactggagctcctcacgggccggaagtcactggacaagtcccggccagtcagggagcagatgctggcagactgggcactcccattgttggcac

SEQ ID NO: 272084 - DNA, 492 bp, Zea mays
agatcactatcctatcaccctctctcggtctcggtggctcgtgtcctactacgccaattgctacccgtcgtcgcgtcgcccccctcctaccgtcctacgtcttccacctctccccgcttcctcgtccgccctgctgagcggaagcgcccaagcaatcgctgccttttcttggcgtgcgcagctcctggtcggcacggcagccccccgcgggatctcgcttgctggcctggccgcgcgacattgaggcggggcgcctggagctcggagccgccgtagctggtgttggtgcctcggagccgatcgggtgtctggttcctgatttgatctgcagctgcagctgcggcggcggcggccgacatggcggcttctggagggctcgagcagtggcagaaggacgggttcttccatgcggtcgatgaggtgcatgagtccgcggacttagaattaatgggctagcggagagaaagcaaaattattttgacaagttggaag

SEQ ID NO: 272085 - DNA, 448 bp, Zea mays
cccacgcgaccgaaaaatatctgcctcttcttcttgctctcgtcgtcctcgtctccgtcccaatggagttgagcgccgtcacctgtcgcactgccgctgctccagttgcagcctgggcgccatttgggcgtccaagggagcagacgacgaagcgaacaggcctcacagacaggcgaggcggccggccggcgagcagctcgcgttgagccctctcgcaccactacatacgctgttgcatgctttgctgcgagctgtgcgcgcgcgcgcggagcatggagatgcatggaggcggcagaggtggtaccgtgcagtgggtgtgagcgcgtacgtggggaattgaggcgtcatggtccgagatatatacatgtctctcttgctacgtaccttagattaggcttagttctgttgttagtacgtacttcgtccgacgatcctggaatattgtgtt

SEQ ID NO: 272086 - DNA, 492 bp, Zea mays
  unsure (1)..(492): unsure at all n locations
gcataaagcagatggaaaaatgagaacaaaagctggtgttcactttgttcaactactcgatgatgacggtgtggctttcgataaccttttctgtgtagcatttcaggtgcttgattctcaatggcttgcaaggcgagcgagttatatggaattcaatgaggttctgaagtctacacggggtcagttagagcaagagcttactatcggaggtatttctcgcattcaagacatgccatcattcagaatgctgagaaggtagcgctgtttgtacttcacaggaaaagagatacattttagattccaatatattgtttaaatttgttgtccgttcttttcactggattttgaagacgtgactttgtgtatgttattgagtatattgtttgtactgtcgcagcttaaagctacagatcataatatatgatatgatatcttgaaaagaaaaaaaaaaaaaaagggcggccgctcgcgatctagaaccgnacgcgtggg

SEQ ID NO: 272087 - DNA, 598 bp, Zea mays
  unsure (1)..(598): unsure at all n locations
atgactgctcctccgtcacgcatcaggatgccctgaaagaactttggaggttggcttaccctaacagacaacttcctcctctgaagtcagatctctggaaggagatgggctggcagaactccgatccatccacagattttagagcagctgggttcatgtccttggagaatctaatatattttgctagaaattacccagattcctttcacaggctactgcataaagcagatggtaagagagctgaatgggagtatccttttgcagtaggcggcgtaaacatatcctatatgttagttcaaatgctggatttacagncagcatttcatgtgcttgattctcaatggcttgcaaggcgagcgagntatatggaattcaatgaggttctgaagtctacacggggtcagttagagcaagagcttactatcggaggtatttctcgcattcaagacatgccatcattcanaatgctgagaaggtagcgctgtttgtacttcacaggaaaagagatacattttagattccaatatattgtttaaatttgttggccgttctttcactggattttgaagacgtgacattgtgtatgttattgagtata

SEQ ID NO: 272088 - DNA, 688 bp, Zea mays
cccacgcgttcttccactcgtccgcccacgcgtccgcccacgcgtcctccagagtccaggctccaggactaccaccacttcgtctcgtcctcacacctcactccaccacctctgccttgcaaagccttccaccgatccgccgcctcgtccgcgcgctcgcaggcagcagtgtggactacccgccccatactccatcccctactcgaaggatacaccgtgagtaggcgtgatggtgcttgataccccgttttcgtgcagcttgttgctaattcgttttagtttgagggatcaagaaccaccttgttctttctttctttctttcttggaacaattatgatgaatcattgcaaatctcttgaatatatttttcactgtaaaatactgccttgcctttgagctccttggttcacgtgcaatgtttctttgccctccgattttgcaggacctcgagttaagttgggcgaggagaggtggttcattccagcagggatccttctcgtgagcccagtcgatctgaccgtccttggtatctgggggggttgttctgtactctctctttaatttggacctccaaagtagtgctgggatgtatcgcctttgggattttctgggtgatggccggcttccccaccgccccgtcatgcctgttgggcggacggatgggtccctccttggtgctatgctaatg

SEQ ID NO: 272089 - DNA, 437 bp, Zea mays
gtccagagtccaggctccaggactaccaccactccgtctcgtctcgtcctcacaccccactccaccaccacctctgccttgcaaagctttccaccgatccgccgcctcgtccgcgcgctcgcaggcagcagtgtggactacccgccccatactccatcccctactcgaaggatacaccgacctcgagttattaagttgggcgaggagaggtggttcattccagcagggatccttctcgtgagcccagtcgatctgaccgtccttggtatctggggggggctgggtctgtactctctctttaatttgtgagtcgtgacaggttcttgaagtgcaattgttaagagttttagttggagaggaagagaaggggtttgctaatatggcgttggcagggacctccaaagtagtgctgggatgtatcgcctttgggattttct

SEQ ID NO: 272090 - DNA, 662 bp, Zea mays
ttgacgcgtgggtttctcgcttcaattgttgcaggatacaccgtgagtaggcgtgatggtgcttgataccccgttttcgtgcagcttgttgctaattcgttttagtttgagggatcaagaaccaccttgttctttctttctttcttttttggactatgatgaatcattgcaaatctcttgaatacatttttcactgtaaaatactgccttgcctgtgagctccttggttcacgtgcaatgtttctttgccctccgattttgcaggacctcgagttattaagttgggcgaggagaggtggttcattccagcagggatccttctcgtgagcccagtcgatctgaccgtccttggtatctggggggggttgttctgtactctctctttaatttgtgagtcgtgacaggttcttgaagtgcaattgttaagagttttagttgtagaggaagagaagggtttgctaatatggcgttggcagggacctccaaagtagtgctgggatgtatcgcctttgggattttctgggtgatggccgtcttccccaccgtcccgttcatgcctgttgggcggacggctgggtccctccttggtgctatgctaatggtcctgttccgcgtcatcttcccggaagacgcgtacgccgcgaatgaccttccgatcatcg

SEQ ID NO: 272091 - DNA, 806 bp, Zea mays
agtctcccaacctcggagaattgatgggaaggaaacaggtgatcaggttggttcatcatcgcataaatctcaagacgcacaagtaggttctctagtcaacctgctgagaaatgccagcccgctgcgaaatcctagcaattcatcacagacatcaagggccgagtccagcgaagtagcctcagcaagctcggtcacgtcccgcaggacatctgacgcccttgaggagctccagtccttcaaggagataagggagcgactgctgttccggagcagcgcaaaacatcaagagccaccaggaaaaccataaggccattctttgctttgtttctcttaacgtgatcgctgatagactcccaaccgggaaaccatatgcacagcgaactatagttgctgtgttcatgtatatacgagtgctaaagttgatgcttttgattgaagagaaggcaccggcttccatttatttcagcggaacaatcactcgtcgttctcaagagtgatggagtgatgccgctgttgatactcttttgtagatgggaagcgaaacccatacacgtaggtgggagcgagggagcctgtgaattgtgatggatgaaagcaggtctcattgtgtgcgtgtgtttgtaaattatgtaactgctggaaatcaaatgttcattagacgtcaacctttgaagagttgctcgcacttcgcaagactagttttatttgctcttgctatttgatctggtaatttgtggattggcgacctgcaggctgcagttgtaaaaataactgtcagttttaaattataagatgttttgactttt

SEQ ID NO: 272092 - DNA, 490 bp, Zea mays
aagaaccgggccgacgcacgcgtacactcctcgccatcacataaaaccagtgcaagcagaagcagcgcaatggcgagcagcaccatggccctctcctccacagccttcgccggcaaggcagtgaacgtgccgtcgtctctcttcggcgaggcccgcgtgacgatgcgcaagacggcggcgaaggcaaagccggcggcgagctccggcagcccgtggtacggccccgaccgcgtgctctacctgggcccgctgtccggcgcgcccccgagctacctgacgggcgagttcccgggcgactacggctgggacaccgcggggctgtcggcggacccggagacgttcgccaagaaccgggagctggaggtcatccactcccgctgggccatgctgggcgcgttgggctgcgtgttcccggagctgctcgcccgcaacggcgtcaagttcggcgaggccgtgtggttcaaggccgggtcgcagatcttcagcgagg

SEQ ID NO: 272093 - DNA, 650 bp, Zea mays
agggagcagctgctgttcaagggcaacccgggccccaagaagctgctcaagatgaagaaggtgaagccgtacatcccggatttcaaactggcgttcgagcacttctgcatccacgccggcggccgtgccgtgctggacgagctggagagcaacctggcgctcacggattggcacatggagccgtcgcggatgacgctgcaccggttcgggaacacgtccagcagctcgctctggtacgagctggcctacagcgaggccaaggggaggatccggcgccgccaccgggtgtggcagatcgcgttcgggtcagggttcaagtgcaacagcgccgtgtggagggcgctccggtcggtgaacccggcggaggagacgaacccgtggatggacgagatcgacaggtttcccgtggatgttcccaaggtctctaaggtttcaagcgactgaaatgcatttcttgcgtgaatgatggagcttgcaattgtttggatagaagatctggttgaaatttttcatagttcattactatatagttgtaggagataggaaaggcgatcgacttctctaagcttgaattatacatctgttcatgttgtttctgtatggcactcggcccctggcctatctatatagttgactgctcggtgttctga

SEQ ID NO: 272094 - DNA, 648 bp, Zea mays
tctgcatccacgccggcggccgcgcggtgatcgacgaggtgcatcgcgggctcggcctgtcgcgacgaggacgtggaggcgtcgcggatgacgctgcaccggttcgggaacacgtccagcagcctggtgctgtacgagctggcctacatcgaggccaaggcccggatgagggcgggcgatcgggtgtggatgatctccttcggcgccggattcgagtgcagctgtgtggcattggagtgcgtcaagccgccggccgacgccggcgggccctgggccgactgcatcgaccgctacccggtgcatctccccgaagtcgccaaggacaacatctgatcaaccccttcttctggatctggggcatgctgcatcatgctggacatgaacatgcccaaggcttccgtcgtcgtcgatgtcgtcgtccttagtgccgggctgtcggccgccgccccaacatgtcgtgctctgtctatgatcgatctcttggaaataatgtagccctacccctacggtgtccaaaacgcaagtagagtatggcgcgtttgtgtttgttaccactgcacttgtttaccacgctgcactgcgtttgtgtttgttaccactgcacaaagttaattaagacgccagttacgattaaaaaaaaaaaccaaa

SEQ ID NO: 272095 - DNA, 735 bp, Zea mays
cgtgtccgtcagttatttctcttcctcctccaaaccaccgatgtcgctaccggttctatccctgcgctgccattgctcgcccgcatcctccttgattttcactcccaggctgatgtgagctgtgcaggaaggttagggttttctgatgcgctcatacatggggcagcaagaagatgggatgtctgatggcttgtacacttacaagcatcaccgcgagcgaggagctgatatccacaccatctttgtgaagaagagcaaattcaggattctgctgtcatttatcggcacaacgttccttcttgtgtctgtttgctgcgccctgttatcgaaggatggtttatgtctttgttccctttggagcatttcatttgccagtgtaattgcgaaatgcctgcgatgtgaccctgtgaagaaagagtcattggtgatcatgccgacttttggaattcaattagagcaacacttttggagtggaagagttcatcgcaaatttgtgcccattggcaagattctaagaccagtgctgaatgagcatgtgacccctgtctcatgctactggagcttggccttgcttgtacgcgaagaatatgagctcatgcttgttttcaagagcttgaatccaccagtcaagatgttggttccaatctggaaagcgttatgtgcattcgtagactccaatacgctgggcaattctgcattgcctcaatccacatgattacatgaacatgcttaaac

SEQ ID NO: 272096 - DNA, 509 bp, Zea mays
gttatttctcttcctcctccaaaccaccgatgtcgctaccggttctatccctgcgctgccattgctcgtccgcatcctccttggatttccctcccaggaaggttagggttttctgatgcgctcatacatggggcagcaagaagatgggatgtctgatggcttgtacacttacaagcatcaccgcgagcgaggagctgatatccacaccatctttgtgaagaagagcaaattcaggattctgctgtcatttatcggcacaacgttccttcttgtgtctgtttgctgcgccctgttatcgaaggatggtttatgtctttgttccctttggagcatttcatttgccagtgtaattgcgaaatgcctgcgatgtgaccctgtgaagaaagagtcattggtgatcatgccgacttttggaattcaattagagcaacacttttggagtggaagagttcatcgcaaatttgtgcccattggcaagattctaagaccagtgctgaatgagcatgtga

SEQ ID NO: 272097 - DNA, 570 bp, Zea mays
gaccacgcgtccgcaaggcgcatggtctttttcgggacttcagttcccaccatattcaaaggtctaagaacaggagaaatgcagcagtgcttctggaggggatttgtctgtgtgcgaggattcgacatggagactagagcaccaaggcctctgtgcccccatttgcacattatagcaaggccgaaggcccgcaagacagcagcaactgagcaagtactctaatcagcaaagatatcagttttatgaacatcatgtttattgtgatatgacatcaatagctctcgacctatgcatggaatcatattacttcctgcctggcgatggccattgtttaggaaatttaagccatggatggggtccgagactgttagttctgagacgagaggactaatgaagcatcaggaagcaccaataattttcacttttttgtttcagatctactgtatgtaaattagcatctagctgttagtccatgtaagatgccattgctatcctttctgagacaaactaccttatcaacatttcatttggttaccaaaaaaaaaaaaaaaaaaaaaaaaaaaaaggaca

SEQ ID NO: 272098 - DNA, 544 bp, Zea mays
atacttgtaaatagcttggactggtcgaaacttagaccaaatctcccgtggcttgtagaatcgggaggatgtgttttgctggattcttgtattattcttcagttcctttatttccattatcggaaacgaagggagccttcggatgagcacgacaacgcagacaaagcctgactgatatagaaactactgtttcttcttcggctcaaagaactgaagctgaaatgggtaccgataccgacctgcctcctacaacgggctctggatagcagcagcatcgttgttacctgaagatttggagcgtcgtttcactggttgctgcttggagggtacttctcaccgccgtcatgtcctgtggagaggcttgtgaactattatttgtctcgtagtgtcaaaatgtcttggttttctattgatttatatcagatatttgatgttggctggtctgcttttgttttatattctttttttttgtgtgtgtgctgcagaaacttgcacgagaaatgtacattcgccgaataaaaatgtgcttattctcgttttcaac

SEQ ID NO: 272099 - DNA, 1088 bp, Zea mays
gagctccggaagccacatgtggggattgttggggacgcgaagagagtaactgagctgatcggccgggagatcaaggacaatccattctgcctggcaaggtcgcacccatgggtcgaagcgatcactaagaaggccaatgacaatgttcttaagatggaggcgcagctagtgaaggatgttgtgccattcaatttcatgacaccattgcggatcatccgggatgcgatccttgccgaggggagtcctgctccaatagtggtctcagaaggggcaaataccatggatgttggcagggctgtgcttgtgcagaatgaaccaaggacaagactggatgcagggacatgggggacgatgggggttggattggggtactgtattgcggctgcagcagctgaacctgaacgactcgtggttgctgtggagggcgattctggattcggcttcagtgcaatggaggttgagacgttggtgaggtaccagctgcctgttgttgtaatcgttttcaacaacaacggtgtctacggcggggaccggagaagccctgacgagataaccggaccctacaaagatgacccagccccaacctcttttgttccggcagcagggtaccataagatgatggaggcttttggagggaaaggctatcttgtggagacaccagacgagctcaaatctgccctttcagaatcgttccgcgccaggaaaccagcggtgattaatgttatcattgatccttacgctggcgcagagagcggtcgaatgcagcacaagaactgaaggcgcttgcttggcttttgtaccataccatagcaggatgcagatgcgacttgatacaaataagcagcaaccgtcaatcaatccatttgtttcttccttacgacctcgcttcgttgttcgtggtacagatgtggggcgcttttaattggaagtcccatttgaaggcatgtgaatgtgttatgattatctaaatgccacgatgcaaactttaaaggcgtgttgatgatgatgtgtggaaaacctgtgcccatatatgagcctgtataattatttctcaaagtaataaagtcagcgttttagggcttgtttgg

SEQ ID NO: 272100 - DNA, 468 bp, Zea mays
  unsure (1)..(468): unsure at all n locations
ccggcttgaanacgggccgccacgcgtacgcagacctgctagatttgctcggaaatctacgcatctgcctggtttcagccgtctgcggaccgggcttgtgattctgaatcgttccaagttaacgccactgaagaggcctgatggtcgtctgttttgatttatatatggcacgtaaggcgtgagcttggagaagttccattggctcagcgaagctggcattcaggatatgactgtgtaggatgttatttatttatatatagaaaaccaactttatgtatgtatcctgctgtaactgtgtagtgctgaacagaacatctgttggatttggaggtgagctagttgacttatttcctcccaaagagaacaattgtgagtgcatagcaacagcttaaggcttaagcttgtttaggaacaatggaattggagaagatcgagcgctggttcggaggaaatctcattctattcaat

SEQ ID NO: 272101 - DNA, 739 bp, Zea mays
cgggcccgaccgcgacgcgtccggtacagcttctcagtctcccccacccacctggccggcgaacgacacatgtacgctccgccaatggctcaacaccggcagcgcagcttccagtcgtttgcaaggacgtggctgcctctcgccgttatgatcttgatgtgcttcgccgcttccacgacggcgcagcagcaaccaccgccactgccgcagccgacgacaacaggcactgtaccgctaccgagcgtgccagcgtgcctgccagcgcaggccacgctgtcgccgtgcgtgagctacctcatcggcaactcgtcgtcgccgcccacggagtgctgcgcccagatacgggccatgttccagtcgcaggcgccgtgcttgtgcgccgctttggcgtcggcggtgcccgcccagcagctcgggtccgcgctcggccagctgctgcccacctcgtgcgacctgcccgccgacgcgtgctcagcaggaacgacgagcgctgccccggctggtcccgcgtcaggcacgacctctgccgcagaaccgcctgcggcggccactgagccgaacgctgtgagcgacgacccgacggcgccaagccggtggcgcagggatcaagtcggttccaggcttgcttgcctcggctacagcagcaggcttccagtggcatacctgctgccgctctctttgtgtcctttggtgggtcgtttatttatcttctttcaactctgatatgattatatgcttc

SEQ ID NO: 272102 - DNA, 389 bp, Zea mays
  unsure (1)..(389): unsure at all n locations
gggccgacccacgcgaccgcggacgcgtgttcaaagtatccatctttgtttcgttccttgcgtatcgtttggtggcggggctgcccattcctatgaatggacggnagggagtccacggtggcgtccgggcccaacttctcgtccttcttcgcgcagcaccggagcatcggggcgccgggtgtccccggccactcgcaggggcttcacgccccgccgcccggtcggtaccggcagcatcttgatgctgtctctgcggggtatgcattccagaccccgcatgttgggggtcccagcattgggcaggggtacgaggcctcacctcatgcggcacagcacagcgcccgtggctgctctggctccggtggttgtcgtgatatggacattggcat

SEQ ID NO: 272103 - DNA, 795 bp, Zea mays
gcttgctgaggttccttgttgacatgaggggagctgacgctgatgatcgccagcttcgagatgatcttatgacaatgcttattgctggacatgaaacaactgctgctgttctgacatggtctgtttttttgctagcccagagccctaccaggatgagaaaagcccaggcagagcttgattctgttctcagcaatggggcaattactgtcgaatctcttaagaaactggagtacataaaactgattattcttgaagctcttcgcttgtatcctcagccaccattgttaatcaggcgttctctccggccagacaagttgccaggcgggtgcaatggagcaaaagagggatatgaaataccagctgggaccgatatatttgtttcggtatacaacctccacagatccccgtatttctgggaccggccaaatgagtttgaacccgagaggttttccgttccgaagaaggacgagagcatagaaggctggtccggttttgaccctgaccggagtcctggcgcaatgtaccccaacgagatcatagcggacttcgccttcctccccttcggcggggggcctcgcaagtgcgtgggggaccagttcgcgctcctggagtcgacggtggctctggccctgctgctgcggaagttcgacgtggagctgagagggtcgcccgacgaagtggagatggtgacgggcgccacgatccacacgaagaacgggctgtggtgcaggctgaggagaaggacttgacggcccaacattagctttgcatgttgcactgaatgagaagtagctc

SEQ ID NO: 272104 - DNA, 381 bp, Zea mays
gatgaagtgaggcgtcgactccgaaagctgttacctagtcaatcaccctgagttttttaaggctttgatttgaggttccattgagcacttcgaacgattcaacagagtttaatgtactttctatattgtatctactgcctcgttgggcaacgtgttgaagtgtgatttgagccggttgaaactggattatgtacactttctgtcctgagtttaactaaagcttagcccgtgtcacgtacattgtctgaatatcaatatggggtaatgatcgtaacacttttttgaattttttttaagttttcattttctatttaatcattaattctataaaaatttcctttatatttttaatataggggggggccgttttaaggatccaat

SEQ ID NO: 272105 - DNA, 687 bp, Zea mays
cctttaatccaaagctgatgatgcagatgatttgtaatttttacagcctgactgtatcacatacacctgcttgattatgcacactgtgaaaggggattcctaagagaagcaagaaaattttttaatgacatgatctcagatggtttgccaccctcagctgtgacctacactgttattattcatgcatattgtagaagaggaaacctttattcagcatatggttggtttcgaaagatgctggaggaaggaagttgaacctttcgaaatatcatataatgtcctcatacatgcgttatgcgggatgggcagaactcaactggcttctcgtcattttcatgagatgctagaaaggggattggtggcaaacaaatacacatatactttgttgatagatgggaactgtaaagtgggcaactgggaagatgcaatgagattctattttgaaatgcatcagaatggtattcatccagattatttaacacataaggccttgctcaagggatttgatggtcacgtgcaccatacaattgagtacttggataacgttattttgggtgaatagattgattgacctctgaaagcttgtccttttgtcctcgcttcgctgatatctccctgtcagaggtgatagatggagttcctgggcccttcatttaaactggaaacaaaaagagagtttgaataaca

SEQ ID NO: 272106 - DNA, 519 bp, Zea mays
cccgggccgaccgcacgcgtccggtcggatagcttcagccacgacgatgacgactctaggccgagagacaaggttcagagacgggtcgcgcagaacagagaggcagctcggaagagccggctacggaagaaggcgtacatacggaacctcgagacgagccgcgtgaagctggcgcagctggagcaggagctcataatggccaggcgccagcaggtacgcacggcgcgtacggcgtggtgaggaggagtcgcaccgccggcggcgcccgtggacccgcgcgtcgctgcgttcgagctggagtacgcgcactgggtggaggagcagagcaggcaggcgacggagctgcgggcggcgctgcagtcgcacgcgccggacgtccagctgcgggtcctcgtcgacgccgcgctggcgcactacggcgcgctgttccaggccaaggcgagggcagcccggtccgacgccttcttcgtgctgtccggcgtgtggcggtcccccgcggagcgcttcttcctctggatc

SEQ ID NO: 272107 - DNA, 647 bp, Zea mays
ccgggccgacccaagcgtcagagctactacaaatgtacaaacccgggctgttcagtgcgcaagcttgtggaaagagcatcgcacgatctgaaatcggtcatctcaacgggggacggaaagcacaaccatgaagttccagcagccagaaatagtgggcaaggcagttccagcgctccatctgcatcacaagctggtggttctcaccgtaggcaagaacctgcacaggccagctttgctcacttcggtacggcttctttcagctcgttcggtctcccaccgagtggtcagttgggaccaacaactggcaatttcggcttcgggatggttcccccaggcatgacgatcccagtgccctctctaggatcgcttgcccctgtaaagatggttggaaattcatcagctatgcaggggtacccagggcttatggtgccgggagaaccacaggcagagcctgtctcgcaaccactcatccaaatggcaaatgcatctccaccagcttaccaacagatattgagcaggcctcctttcggtcaccagatgtaaatataggaaagagaaaggggataatagatttgcttcagcttgtatacatgatagctacgctgcaacatggctttagtgttcatggatcgtccaatttttcattt

SEQ ID NO: 272108 - DNA, 517 bp, Zea mays
agtcataggcacgcagttggatggtgcttcagttccagaccttcttataccgctaaatactaatgaagacgatacatacagcatagatctggtcatggcaatagtggaggaattcatgtcgttacagaatagcgacagtggcaaggagaaatttcaagatgatgaagagatcgtggagactgagaacgtggcatcggtttccagcacgtcaaagctggcagttgcaaagctgatcgatggatatcttgctgaggtcgccaaggatcccaaccttcctcttccgaagctgaccgcgctcgctgaaatggtgtcttccctaccccggccaacgcatgacgggctctatcgtgccattgacatgtatctgaaggagcaccccagcctatcaaagagcgagaagaagaaactgtgcgggctgatggactgcaagcagctgtcgcaggacgcgtgcatgcacgccgtgcagaacgagcgtctccccctgcgcgtggtcgtgcaagttctctttttcgagcag

SEQ ID NO: 272109 - DNA, 430 bp, Zea mays
gggccgaccgacgcgaacggtgcggcccaatgtagagttcaattttcctttttgaaggcatcctcaggaagaggggcaccgttatctactgctacgactacccctgccgccacaccccctaatttgattatgatgaagaacagtagcctccaccagcaacaagcaaaagtccctatgcaggctctctacactcctggtcaccaatcacagacttccttaagttcatcaaaggtaggaccttctctaacaaacctttctaccggacgaggggatctatctcgatcttcaaacgcccctgttgcttctggttcaccatccaattcggcgtccaaaagtaccggtggcagcccacccgccacaggaaatgcaaagggtgttcagcagcctgtccaactgccatcaccacagcagcagtcagccaagaactccg

SEQ ID NO: 272110 - DNA, 273 bp, Zea mays
ggcgggaaaatcttctggagggaccaaggttggcacattctgtgtcagggttgatcaattaccacgggccaggggcttatgaagagggccttgaaatcaaccatttcttttatctggaggatgtagggcagaatgcaaattgtatgacaaccgagtacatgatggctgcaacaaatgggatggttgacaatttggaatactctgatgcttcttcggttctacctgggtcatttgacacaattggattggtagctgaaaatcaatattttgata

SEQ ID NO: 272111 - DNA, 1105 bp, Zea mays
tcgacggtgggctagttctagatccgcgagcggccccacgcgtccgacgatttagaggctgttgtttgtgtttgtgagcttgcagcggagtggcgccagacttctcactccgatgtggtggttgatctgatttgctaccgccgtttcgggcataacgaaattgatgaaccttccttcacacagccaaaaatgtatcaggtcattaagaaccatcccagctcattgaagctttatgagcagaaactgctaggaacgggtgaagtcatgaaagaagatgtccagaggatccatgacaaggtgaaccgaatcttgaacgaagagtttgctaagagcaaagactacgttcccaacaagagggattggctctcagcttactggactggctttaagtcaccagagcaaatatcacgtgttcgcaacactggggtgaagcctaaaatactgaaacgtgtaggtcaggcaattactacactgcctgaaaacttcaaaccacacagagcagtgaagaagatttttgagctgcgtgcagctatgatagagagtgctcaaggaattgattgggctgttgccgaagccctggcctttgcaacacttatagtggaaggcaatcatgttaggctaagtggacaggatgtggaaagaggaactttcagccatcggcatgcagttctgcatgatcaggaaactggagcaaagtactgcccacttgaccatgttgcaatgaatcaaaatgaggagctatttactgttagcaacagttcactttcagagtttgctgttcttgggtttgaattgggttactccatggagaaccctaattcattggtactttgggaagcacaatttggcgattttgccaatggtgcacaagtgatgttcgaccaatttttgagcagcggcgaggcaaaatggttgcggcaaaccggccttgttgttctgttgcctcatggttatgatggccaaggtcctgagcattctagtgcccgcttggagcgcttccttcagatgagtgatgataatccttttgtcatacctgagatggaaccaacacttcgcaagcagatacaagagtgtaactggcaagttgtgaatgtgacaactcctg

SEQ ID NO: 272112 - DNA, 556 bp, Zea mays
  unsure (1)..(556): unsure at all n locations
gggccgacgcggacgcgtacacgctaaggcgttgtctatcacttctcaactatctaatattatctcccctacgatgaaaaaaattgacggccgtggctggggacttggtatatagatgtgacgggaatgcgactgaanaagtgtttgcgccggagaaatctgtcatctcattgcactacccaatggcaacatgaaatcctttggcttgaaattaggtattaccggagtacaagaaagtacctggaagaggtttccttgtccgaggagaatcgatttatggaccgagtgcaacgtaaatccgtgacgtagagttggacccgaaacgagaacgattgcgtgaatctgtgacgcagagttggatctgaaatcagaacaactggaatagacatcagctagcctcactgaagtttgtgtcggcaaattgtgaacgagaatgaattctggtggtggagctaggatttttttgagtggagattccaaacatgaaagtagtaaacactaatatatatacggtagtataaatttgagtaaatgatggggactacgtgatccatcc

SEQ ID NO: 272113 - DNA, 668 bp, Zea mays
gtccatccatgaggatgtgagatatctccacattgaacttttaagacagtttcacatgcacgagatggaaatgtcaggcgtgctgaacttggtcctggaaaaggtggaaggcctgacaaaagaagtgcagcaactaagaagggagaaccaacagctcaggcagcagcttctctaatatgtgcctttgggcgcctctctggcaatcttatgctgtggaaggtgcaatttgctcaggagtcctaggtaggcccagaacctatgtagaggcctggcgatggttgattctcatattggttggaagctcgtgtttgacgttgacacggttgtgcatataagtcctcttaatttagaagcatattttgatcgaattattgatttgtctgtttaaaaaaaaaaaaaaaaaaaaaaaaaaaaaaaaaaaaaaaaaaaaaaaaaaaaaaaaaaaaagggcggactatttaaaagatcggggggtcggtctacaggattcaagcttacatacctgttctttcgaggccataaattttatttagtgggccctaaatttacatcattggcagtgggataacaactgtcgtgactgaaaaaaatctgcttttaccaaatttaatttttttgaagtgcattaatttttaacaggctggttaaataccgaataggccacaacc

SEQ ID NO: 272114 - DNA, 361 bp, Zea mays
ctggcaatcttatgctgtggaagagtgcaatttgctcaggagtcctaggtaggcccaaacctatgtagaggcctggcgatggttgattctcatattggttggaagctcgtgtttgactttgacacggttgtacatataatcctcttaatttagaagcatattttgatcgaattattgatttgtctgtttgccgtgcttcttggactggctccatgtatcttggtggaccttgggcgtcctgatggcatatgtgagaggtcaacacaggtttccgatgtagcttttgttaatataattccttgattaggctcaaaatactctcttaacgatggtatataatattttgtgatgtgagtagctt

SEQ ID NO: 272115 - DNA, 803 bp, Zea mays
  unsure (1)..(803): unsure at all n locations
tcntctcagcagaaattacacggggaatctggaaacttgttccaatgaatggatcttaatggcctagtcctggtgcttctcttcattccattgaagctgaagtaaaggaaattcttgcatctgctggtgttcagattaacagctgctatccacgtggtgtgccgccgatgcttcctttgcctatggctgcacttgtcagcttgacaattacatttaagctagataggagtttggagtacattcaaggggtcattggacatgcactagagaactgcgcagggggaagttcctggccaagcatgcccattatcggggcattgtggacacagaaagtgcgaagatggcatgacttcattgtcctctcttgtatgcgttctccatttggcagagacaaagatgcagttgcgcagctcatccaaagctgcttttcgtcctttctgcagtcatcatccagtggttctgacataattgcaaaccgtggagttggggctttattaggggactcaatcacggatcaaggtcttaggctcccaatggcacctggtttcgtctacctgagaacatgtcgaactttccatgacacttacttcgttagtgaagtgatcctcaagcaagtgattgagtgggctcacaaacttgcaaacggatggtgtttcaatggtcctccgcagttgaaatcagggcggacaccactatcttgtgcagcatccatggtgcagcaggtcgcgttgcttggtggaggtctcctatgcatagcaggtggaccacttgtggtccaggtgttgtatgaggaaacactgcca

SEQ ID NO: 272116 - DNA, 487 bp, Zea mays
cgcgccgccgtcgccgaggtggtgggcgctggcgacgtctccgaggtctccctcgtcgataacgccaccacggccgccgccatcgtcctgcagctcgccgcccgcggctgcgccgagggtcacttcgcgcgcggggatgcggtgctgatgctccactacgcctatggtgcggtcaagaagtccatccacgcgtacgtcgcgcgtgcgggggccaccgtcgtcgaggtgcccctcccattccccgtcgcgtccgccgacgcaatcattgccgagttccgtgctgcgctcgcggtcgccaaggaaggagggcgtagggtcaggctcgcagtcatcgaccacattacctccatgcccagtgtcgtcatcccagtcaaggagctcgtcgccatctgtcgaaaagagggcgttgacaaggtatttgttgacgctgcccactctattgggcaggtccctgtggacgtgcgcgacattggagccgatttctata

SEQ ID NO: 272117 - DNA, 1068 bp, Zea mays
cctacgcgtccggccacgcgtccgcccacgcgggcggtggtgaggctcgtccatgcctgctgctagcttagctcgctcgctggcaacaacaatgaaagccgcaactggctcgtcatcagtcgctcgcgctcttgcgttgctcttggcggcgtgccttctctggaaggaagccgcgtgcttctcggcgtccgggctaaacaaggcgttcgccaccttctatggcggtagcgacgcttcaggaacgatgggtggggcctgtgggtacggcaacctgtactcgacggggtacggcacggacacggcggcgctgagcacggcgctcttcaacgacggcgcctcgtgcgggcagtgctaccggatctcctgcgactaccaggcggacccgcggttctgcatccgcggcacgtcggtgaccatcaccgccaccaacctgtgccctcccaactacgcgctgcccaacgacgacggcggctggtgcaacccgccgcggcagcacttcgacatggccgagccggcctggctcaagatcggcatctaccgcggcggcatcgtgcccgtcaactaccaaagggtgccgtgtgtgaagaaaggcggggtgaggttcagcatcaacgggcgcgactacttcgagctggtgctcatctccaacgtgggcggctgcgggtccatccagtcggcgtccatcaaggggtcgcgcaccgggtggatggccatgtcccggaactggggcgtcaactggcagtccaacgcgtacctcaatggccagagcctgtcgttccaggtcaccagcagcgacggccagaccaaaaccttccccgacgtcgcgcccgccagctgggggttcggtcagacgtttgcgacctcgcagcagttctcttagtatagacacatctttgttttctgcctcgttcgcttgtcgtttatatatatccctcactcggctcgactcggctcggctcggccctcgatcaataccttgtaaagtttacccggcctttgttgaaatgccccaccacctgccgcgcgcgatgcaggagatatatgatatatatgctttgacttgtgctt

SEQ ID NO: 272118 - DNA, 448 bp, Zea mays
cagcatcaacgggcgcgactacttcgagctggtgctcatctccaatgtcggcggctgcgggtccatccagtcggcgtccatcaaggggtcgcgcaccgggtggatggccatgtcccggaactggggcgtcaactggcagtccaacgcgtacctcaatggccagagcctgtcgttccaggtcaccagcagcgacggccagaccaaaaccttccccgacgtcgcgcccgccagctgggggttcggtcagacgtttgcgacctcgcagcagttctcttagtatagacacatctttgttttctgcctcgttcgcttgtcgtttatatatatgcctcactcggctcgggggccctcgatcaatgccttgtaaagtttaccggcctttgttcaaatgccccaccacctgccgcgatgcaggagatatatgatatatatgctttgacttgtgctt

SEQ ID NO: 272119 - DNA, 958 bp, Zea mays
gcttgggatcttgcatattctattggcagttgtgtgttcagcagtggttctgactccaagtcgcaggatgagcgaagaaggctgtacttgtatagtgcattattcaaccccctccgaagtatgttctacctggacaaaagatctaagaaggctcctgtttctagctttattatcaaggactcgctaaagttgaaaaccagcgatgctgaaacggttgtcaacctacatgctgctagcgaaaagtttgctgagctgattcctctcctcgagtcaagcgctgacgtgcatgctctcaaagagaagctggaagatgagtaccttgagataccaggagacaccgtgaagcgtgtttttgcagggcttatactccgagaaataaaggagttttggcgggtggcgctgcttctatccattctcttctaccgagaaactgaaaccgctgctggcaccctcaacgagcatgacgagctgcgtcggaggaaagagaaatacatcagagtcgagcgttccataaccgacctagatcttgacggggtgtggaagctgaagccgatactcgacgggaaatcgattatgggagtcatgcaagtcaagtccggaggtccactgataggaaaatggcaacaacgtgtgctgaagtggcagcttgcgcatccggacggaaccgtggacgagtgcgtcgagtggatgaagcagtcgcagtcaaaacgacagaaagtggagtccagcacctgataatcaaaattgacagtttggtcgtagtcagttttcagataggttagcaactgcctgccccttgcaaacagtttttttgcgtagacggtgaactcttgctgctaagacagccagttctcccttgttcgaaacctgtcctgaacgtagagtgagagacgaaagagagagagagatggtaatctataatattaaaatatagcatgaatataattgtcctgagccc

SEQ ID NO: 272120 - DNA, 645 bp, Zea mays
cccacgcgtacgcagaaacctgcagtcgggtcatctcgtccacgaaacgtacggacttcgggcatcggccccaacgccagcggcaccgcaccaccacgcccgtcggcgacatgaatccgcccgcagcagccgcgtccaccggcgcaggaggccacgccgcggcgcctgcggcagcccgggagtacgtgcactacccgaggctctcgccagaggaggtggccccgcccccgcccccgccttatcacgccgccaccgccgcgccgtccgcctacggaggcaacccctacatctactcccccgccggcggcgccgccacctccccgaagaatacgatggactccgtgaaggacgtgctcggcaagatggggaagaggtttggcgaggcggcccgcaagaccgagaccatcaccggcaatttctggcagcacttgaaaactggaccaagcattactgatgcagcaatgagcaggatctcacaggtcaccaaagtcattgcagaaggtggatatgacaaaattttccatcaaacttttgaggtcgcccctggtgaaaagctcaagaagccatatgcatgttatctgtcaacctcggctggtcctaatatgggtgtgctttacctcgccatggaaaacgggcatttggaag

SEQ ID NO: 272121 - DNA, 1136 bp, Zea mays
gcaagttgcacttaaccctgataagtggctagagttcaagctccaagagaaggcaacagtcagtcacaactcacagttattcaggttttcatttgatccatcaactatactgggacttgatgttgcctcgtgcctcatcacaagggcacctataggcgaggaagctgagggaagaaggaaatatgttattcgcccgtacacacctatctctgatccagactctaaaggatattttgacctactgatcaaggtttaccctgatggaaaaatgagtcagtattttgcaagtttgaagccaggagatgttgttgaagtcaaagggcccattgaaaagctcagatacaacccgaacatgaaaaaacaaattgggatgatcgctggtggttctggtataacaccaatgctgcaggttgtcagggctatcctcaaaaaccctaatgacaacactcaggtctccttaatttacgccaatgtgtcaccagatgatatattgctcaaaagagaactggatagacttgccagtagctatcctaacttcaaggtattttatacagttgataaaccgtcaactgactggaggggtggtgttggttttgtatcaaaggacatggttttgaaaggtttgccaggcccagcggaggactctctgattcttgtttgtggtccaccaggaatgatgaatcacatatctggagacaaggccaaggatagatcacagggcgagctctctggcgttctgaaagacttaggatacaccgcagagatggtatacaaattctgagaagacagtagtagactctgctgacgcacacacattcttgctgccctgcagtcaataaaccacacctgaactttttgttgttgttgcagcatctggctctgaaccggaaacagttttgacttgtttccctatgtaataataatgttcatccgagaattctaggtctagcttcgggtgttctgcttctgcagatgccacgctgcgatgtttgcgaaaattctagtatgctggcacttgagatgagagctaccgagttttagtggacagctgcagcgaattatggtatgttggaagttggaacccagtcatttgtcgcaaaaaagaaaaaaaagggcggcggctcgcgatctagaac

SEQ ID NO: 272122 - DNA, 412 bp, Zea mays
cgagggcttcagagcagtcctcgacgagatgtccagagacccgaagtcgtccacagaaggagggtgggcgctgtaccgggacctcgcgtccgtgtacgtcgacgcgggccagcttctgggctctgtgaattcgccgccggtggaggccggggaggcgaggatcagccagagggaatggatcacctacgacttcctcgtcatcttgcacgccggcctcggcaggccagagaggataagggacatctggaggtccatggtggcgacctcgcagtcgcagtcgcagcagcagcagcgcatgacgagccggaactacgtctgcgtggtctcgtcctacctggcgtgcgggcggctggaggatgccggggaggtcgtcgaccagtggcagcgctctaaggcccccgagttcgacgtc

SEQ ID NO: 272123 - DNA, 358 bp, Zea mays
gttatattgggcgagcctgggtcaagtaggtggtcaaggccttcggagtctccaaccataagaagaacgaggaggaggccacagtaggtactcgagtgttgtcactcccttcagtaaaatctacagaccatgccccagtgatagttattaccatgattatctccaataacatctcaaggttaataatgtagaaatgtatatgccatcactggtttctgcctttctcttacattccatgtatcatctattatgcaaaacgagtcgaaatatcagttccagtatctatgataatcttgacctttgtatactgggaatatattttctgatttagcctcaaaaaaaaaaaaaaaggcgggcc

SEQ ID NO: 272124 - DNA, 412 bp, Zea mays
  unsure (1)..(412): unsure at all n locations
gcgggcggcaccgcctccgcctcgccgcccttcgtgctcacctccgcctccgcgccctcgtccaccggcggcggcggcccggtcgtctccgagcagttcggcgtgctcgtcgacagcaagcccccgccgccgcaccaccacttcgtgccgcacccgtacggcaacgtgaagctcgagcccgtcagttcccaccacggcgggttcctggacgactctgtcctgatgcagatgcactgcgggcagctgcagcctctcggatgactggctgtttgtgcagcaacaatggtagaaagagggaaatgcctctcgtctctttggccagttacgaggggtggagggtaccataccgctctgttgcgttgcgcgtgtctgttgttggatttcaatcaggcaaataacatttgggtncagc

SEQ ID NO: 272125 - DNA, 751 bp, Zea mays
  unsure (1)..(751): unsure at all n locations
atcgcttcttcctgctccggcgatatccgccgccgcctgcggtccggccgagatggggagcacttcctctatgctcacccaatacgatatcgaggaggtccaggaccattgtaaccacgcattctcgcagcaggagatcgtatcgctgtaccaccgcttctgccagctcgaccgtaacggtggtggcttcgtctccgctgacgagttcatgtcggtccctgagttcgccgtaaatcccctctcccagaggctcctgaggatgctggatgggctcaacttcaaggagtttgtagcatttttgtcagcttttagcccccgcacaagcctgcagcaaaagattgaatttattttcagggtttatgatactgactgcaacgggaaggttgcttttgatgacatcttgagcatcttgcgagatctgacaggttcatttatgacagagcaacagagacagatagtcttgattcatgtgttagaggaagctggatacacaaaggattcacattttacactcccagactttatgaagatcatgggcaattctgagctcaggatggaggtggaagttcctattgactaaaaacctaacaagcatcatctagttgcttcaagcctgtatcttcatttgtgttaaattaagtagatggtatatttatatncttgcaactcaaatcatgatcagagatgtaattaaggaaacatatgtacctgctatttggagggttagttggctcgcacttatactcaacgc

SEQ ID NO: 272126 - DNA, 509 bp, Zea mays
cccacgcgtcctgacctgcctcgcttctcgtctcccgtctcctccgcgttcccgctttccaccccccgccgccgccgccgccgcccaccttaccgtcccctgccccttgcccagcatgtggggtagcaccgacggcggaacgccggaggtcaccctcgagacctccatgggcgctgtctctgttgagatgtactacaggcacgcgcccaagacttgccggaacttcgtcgagctcgcgcgacgtggctactacgacaacgttatcttccaccgcatcatcaaagatttcattgtgcaaggtggggatcctacaggaaccggcagaggtggcgagtccatctatggagcaaagtttgaggatgagataaagactgagttaaagcacactggggctggaattctgtccatggcaaacgctggcccaaacacgaatggaagccagttcttcatacctcttgcccttgtcagtcacttgatggggaacatacaatttttggagggtatgcaga

SEQ ID NO: 272127 - DNA, 607 bp, Zea mays
  unsure (1)..(607): unsure at all n locations
acaacatcaaccagccgcgccacttctgcaagaactgccagaggtactggactgccggcggtgccatgcgcaacgtgcccgtgggcgcaggccggcgcaagagcaagagcgcgtcggccacttcccacttcctccagagggtcagggccggtctgcccgtcgacccgctcgtctgcgcggcagccaagactaacggcacggtgctcagcttcggctctgccatgtccagcttagacctcacggagcagatgaaacagctcaaggaaaagctcgtcccgatagcgggggacgagcgctcagttggctctcgcactcaaggaccttctgccaaggcagaagacccggacgaccggaaggagaatgttacagcagataaatccgcgagagttgttcagcatccatgcatgacgaacggggtggccatgtggccatttagctgcgcgccaccagtaccggcctctgcctgttacggcccaggcagcatcgcaatcccgttctacccggcagctgctgctgctgctgctgctgctgcctactggggttgcatggttccaggagctnggagtggcgcatgggccgctcactccggccagtccgagacgggctc

SEQ ID NO: 272128 - DNA, 496 bp, Zea mays
cgtccggtccaaaggagacgttcgttacgattaaggttaatcatggcgactgtggtcctgttgagtcgatgaaggtgcagaggcaggtggttactcgaactccagttttctatcgtttggagaaaagagaaaacaatgattcatctgttgggtatattcacattacagagttcaatgcagtggccaaaaaagatttgcgctaaaacgtctacagaaatcaggcgcctcctattttgttctggatttgagggacaatcttggtggactagtgcaagctggaatcgagacagcaaagctctttctgaataaaggagacacggtcatttatactgctggccgggatcgcctagtccaaaaggcaattgttgctgaaagtggacctatgattgctactcccctcatgttgctggtgaataataggacagcaagcgccagtgaaatagttgcttcagcacttcatgacaattgcaaagctgttcttgttggcgaaaggact

SEQ ID NO: 272129 - DNA, 499 bp, Zea mays
gcaccatccaactggctcatccgcaagcgttcccgatggatccaatcacaaggccggcagctccatcgttccatcggccagcagtcgcgaccgcgaacatctccatcaggccgccgccaccttggctcggaggaatggagtcagcaggaggtgccttctgacgctgctgatgtccactgcggccatacctggcggcagcgaatcgaggaaggctctactgcaagagtatctgaagaaatcgaaggagaacaaggaaaagaacgacaaggagaggctggatgactacaacaagaggaactacagggactacttcgggctcatcgagggccaggtcagagagaagacggaagaggagcgcacggagtcggagaaacggatcctcgagtggctcgacaggaccaggtagtctaatgaccaggatcgaatggtcgatcatggagggccggccgcacggggtgaaaattctcgcagcattcttcgtgttcccgcttatggcacg

SEQ ID NO: 272130 - DNA, 772 bp, Zea mays
cggacgcgtgggcgcggcgccggcgcgtcgggtcgtgcccatcacgttgtctccactccgtcgcctctcctctcctctccgtccctgcgccacgcgggggagattaaagcgaagcgcctccccgctcacctctcctctcgtcgtgcgttggatcaaagtatcaaaccaatctcccctcgccgtcctgccggcgtgcgcgcggggcctctttttgtggagcctttcgccgcggcccgtcctcctgtccgaaataatccgcctcgacgtgttcgcctccccctccccctctctcccctcccctcccatcgcgactcgtctcgtgcgtgactgcgtgctcgctctcctttttggtgcgctcatcttggtatctgtgccagcgctcgcttctccccgtccccgccctccttcctttccttgtctagccgaaggccgaagccactgtgcgcgcgagcgcgacgcgagaggtagctgctgctgtgcccggcgcgcgcgtgcgtgcgacgatgtcgtcggcggtggaggccgtctcctgccccaaggtcgacgtccccgccggcccggagccgggggagccggccaaggaagcggcgccgtccgcggagcactgcgacacggcgcccaacggcaagtgcgcgccgcgttgccacggggaggaggaggacgacgacgacgaggaggaggaggaggaggagaaggcccccaaggccatcgacctcggccccatggtcagcatcaaggagcagctcgagaaggacaaggacgacgagagcct

SEQ ID NO: 272131 - DNA, 546 bp, Zea mays
ctcttttctcctctctgccgctggcgctgccatcgtcgtgcgttggatcaaagtatcaaaccaatctcccctcgccgtccggccggcgtgcgcgcggggcctctttttttggagccttgcgccgcggcccgttcctcctgtccgaaataatccgcctcgacgtgttcgcctccccctccccctccctctctcccctcccctcgcgactcgtctcgtgcgtgactgcgtgctcgctctcctttttggtgcgctcatctcggtgtctgtgccagcgctcgcctctccccgccggcccgccctccttcctttccttgtctagccgaaggccgaagccactgcgcgcgcgtgcgtgcgacgatgtcgtcggcggtggaggccatctcctgccccaaggtcgacgtccccgccggcccggagccgggggagccggccaaggaagcggcgccgcccgcggagcactgcgacacggcgcccaacggcaagtgcgcgccgcgttgccacggggaggaggaggcggacgaggactaagactaggaggaggatgag

SEQ ID NO: 272132 - DNA, 395 bp, Zea mays
ttgttatatgaacaagaacggaagaagagagggggaaattcgttgtacgtacgcggacggcagcaagattaatcgcgctgacgacacgatggtgtgttctttaatttgattgatctgcaggatgttcgctagcacctgcaggaagctgaggatcatgaagagatctgaagccacaggcctgggatcggcgagacaatgaagaaggtctgacgacgaccgagggcccgacaacgttcatgtcgatctcttctttttttttctttttgccccattattttattttgttcttcttggccgagagaccccaagccaaaaggatgagcttggtgggtggcgcatcaatctacaaagcgcatgcatatacacggatgtgtgtgcggctttggttctgtaag

SEQ ID NO: 272133 - DNA, 505 bp, Zea mays
caaggttagcatggacgccgctccgtgcttccggaagctcgacctgaggatgtacaagggctaccgggagctccgggagcccctggaggccatgttcgtctcttccggcagcgccaacgtcaacaacaacctgtcggagttcgccgtcacctaccaggacaaggacggcgacctcatgctcgtcggagacgtgccgttcgagatgttcgctagcacctgcaggaagctgaggatcatgaagagatctgaagccacaggcctgggatcggcgaggcaatgaagaaggtctgacgacgaccgagggcccgacaacgttcatgtcgatctcttctttttttttctttttgccccattattttattttgttcttcttgtccgagagaccccaagccaaaaggatgagcttggtgggtggcgcatcaatctacaaagcgcatgcatatacgcggatgtgtgtgcggctttggttctgtaagacgacgactagtacctaggtcttttttag

SEQ ID NO: 272134 - DNA, 522 bp, Zea mays
cccacgcgtccgcccacgcgtccgtgatcataggtattagtgaagttgatcccatagggtggcctggatcaaaatggaaatctctcctgataaagtgggatggtgctactaagtacagccaccagaatagagtatctccatgggacatcgagggagttggcagctcagtttcagttactcaccgtctttcctcttctgtttcgaagcgaacgaaactgtgcttccctccaagcgatttggacacgccaattctagatggaaacggtcgtccagactccgtggaaactgaacgtttccacagggtcttgcagggtcaagaattggtgccaccctagtatccatgggcctgcatggctctcattcatcagatagccccagatgtcaagggctcttatgccaggagattctctgctgatgcgtggaactgcaagatgaatgatgtaatgagtgggcctcgacacctaaatgccactgggtttgcttaccagcccctaggcttcagtgaatctgtcaaattctcag

SEQ ID NO: 272135 - DNA, 727 bp, Zea mays
caaactgtaagagcagagagattttagaaagagagagagagagagaaggatctaggtcacaatatagacgaaaaccaatcggagacgaatggtcgtcgcactcgcacgagggctgattcctttccagctcgcaccgcggttgaacagcgtttcgttgtttcctccccaacttccaacacgcctcgatctagatccactcttcccccttctccttccggtcctccccccgagactattcatataggcgggtaggcgtccgaggcctcgtttgttctcggcttcttgtctccaagggtgctactccgtccgcgcttggtctgctctcgtccttccggaggccgcggcgcaacatggcgaagatcaagccgaaggccttgctcgcgcaaagcaaggtgaagaaggtccccggccaaatcagcgtggccacgatcgtcacctacatgatcctcggcgtcctggttgtgtcctccgtttacgctgcctacaggtactgctgggcaggcacaggagcagcggaggcagtgggcgcccaggggaactgatcccccttccgactgcgtggctgatctcgctgttgttgtatcatccggttggggtaaaatttttggttgttgctgtctagcaaatggggttcatgggacatggataggttgtatgttgatacggttacaccgtagccgatgatatgtatgttgaatttcttcccttttattatcctttgatgatc

SEQ ID NO: 272136 - DNA, 587 bp, Zea mays
ggttcatctaggcctgatatgaagatcgatcgaggcttgcctagcgataacagtggtcctgataaggcaaattccaaggaattatgtccgagtaccgaggatgcggaagcagaggctgaagcagctgcttctgctgtggctgtggcagctattagcactgatgagggatctccagctgatgcaactactgcatcggctccagacaagagctttacaagcaaggatctcagtgggttaacatcaggaggggcaagaacaggtcaagctggtcaatcatccacagaagagccactcgcagttgctcttcctgcagacttatcggttgatactccatccatgtccttgtggcctcctatagccagtccacaagcatcagggccaatgctttctcagtttcatggtgcacagccatcccacttttcctgctttgatatgaactccatgttaggagggcacatttttgcatttggcccaagtgacgaatctgctggttctcaaggtcagcaccctcaaagaagcaatgcattgccttcagcaccattgggagcttggccacagtgtcattctggggtagactctttctaccg

SEQ ID NO: 272137 - DNA, 443 bp, Zea mays
  unsure (1)..(443): unsure at all n locations
gccttgcctcccactaaaccctagatctctctctctagaatgccgacgccttcggctctcagcaagcgcggcggcgacggcggggacggcatcctggccgccctctcccgttcgcaggtggcggcgcacgggcgagaggcggcggccgtggcgaagaagctgctgcggagcacggggaaggcggcgtggatcgcggggacaaccttcctggtgctggtggtgccgctgatcatcgagatggaccgggagcagcagctcaacgacctcgagctgcagcagcagacgcttctgggcggngccccgccgtcgccgccgccgaccaagtagatagatccgtgcatcgaccctttcgtccccccccccctctccctctctagaggtatctggtactgtcaagttcatcattcgaggtactatcaagttcatcattccaagtaactatc

SEQ ID NO: 272138 - DNA, 1282 bp, Zea mays
aaattccacttcaataaacgtgagattaatgggcggacgcgtgggtccaaataagacctaaggattatcataatgattgaacaacaaagcagttgacttctgtgcccacatgggttgggtaccatggcagctgatttgctgagttgagactacctatagactacagtaacaaaaacgacctgcaagccggcaggctgcagcccacttccacaaactatggagcacgaacattggtgatggcaatatatacacactggtatgtacagcttcagcgctggagtctgaagaatcacaactcaaaaccaccattcagttgaacagataacgacggccttccaatgttattaagaggtgtttccaaggtgattaccactccagaactgcccacttgaccattccactttgatcgtccaatagatagagcagtataagctgatggatgctgtgagcaagagaggccacacatcagattcaattcctctttcaatgaatggacaacttctgcacgtaccccaggatcacttcctccaaacgtagggcacacactgacttgtatgctgggtctcaccataaggccagatcttttccatgccaaggcttgagtaactcctaacgaaacagacttatcgggccattggaccataggagtgaaccttgtgccacgcttattcttgcaagaaaaactcactcttgtttctccaggatattttccatgagcttgaagcaacccaccaaataacggaagaaagccactggctgatattccctcaccagcaacatatgttagttgcccattagggaattgcagatccataaacgaacaagctattggattgagacacatcattgacatcatcaaccatctcctatgttttgaccatatagctggacagagggaatgaactccattcttgcgatcataaccgtaccaaagcaggtgttgctttgatagatgaacaggcaagagaagtgtagagtctcgaacaaatagtagaggccccaactgaacaaggtacagaggcgaagtgccatttccagaagttgatccaccacgcgatgcctctagcctccagaggtctccatgtgcaacaacagaactctcgatgtcttgactcctggaattgtatgttgccgacatatttacagtaccgttggccttcttaaagtttccaagagtcccaataccgcagccgaagccttcgtcctcctcgtccaaatcgtccccgctaacagggccgctgacgctcgacgcggccgcgctcccagtgaatacaacggcggc

SEQ ID NO: 272139 - DNA, 1224 bp, Zea mays
gggcatgtcaggggaacagtaaaacagggatcgctagtctttggttcattgatcaatgcatgtggagaaatacaaaaatccccccgcttgtttgtttcaacatccaacaaagcaaactaaacagacaattgttaacaatgtccaactgcgagtttgcgacaggtagtcagtcttgctccaagaaaatgtgattttggacgaacatattccatggcagcgagccctccgctttcatgaacttctgaaaatatgagctgaactgctgcaagtatcgcaatcccttcaaggattgttagaatcgtacgagtggaaaacaaagcagttgagttctgtgcccgcatgagtataccatagcagctgatttgctgagttgagactttagacctatagactacagtaacaaaaacaacctgcaagcctgcagcccactttccacaaacttttctaggttgatcagctgagtagccgtctccatgacaatggagcacgaacattagtgatggcaatatatacaatagtatgtacagcttcagtgcaggagtcataaggatcacaactcaaaaccaccattcagttgaacagataacgacggccttccaatgttattaagaggtgtttccaaggtgattaccactccagaactgcccacttgaccattccactttgatcgtccaatctgccatgtagagagtatgttacatccacactaaaatcctagaaaaaaccaatcagaaatgttaactagagcttacagagagagcagtataagctgatgggcgctgtgagcaagagaggccacacatcagattcaattcctctttcaatgaatggacaacttctgcacgtaccccaggatcacttcctccaaacgtagggcacacactgacttgtatgctgggtctcaccataaggccagatcttttccatgccaaggcttgcaagaaaagctaattcttgtttctccaggatattttccttgagcttgaagcaacccaccaaataacggaagaaaaccactggctgatatcccctcaccagcaacatatgttagttgcccattagggaattgcaaatccataaacgaacaagctattggattgagacacatcattgacatcatcaaccatctcctatgttttgaccatatagctggacagagtgaatggacaccattcttgcgatcataaccgtaccaaagcaggtgttgctttgcccacgcgtcct

SEQ ID NO: 272140 - DNA, 389 bp, Zea mays
ctataggtccttatgattgccaccgccttctattattgccgccaccttctattaatataataccgcgaggtgagggtggtctttcccttccaacacgagtttatttaaggcccatataatatcgataactgttttgcaatgatacctgtcatctaacttgatgtttctgtaatccatacacctctttattgtatggataatactgatatcagaacttaaatatctgccagacataaatgctacaatgtcgtccatatgttttcaagaaagcttacctgacttgtatactgggtctcaccataagtccagatcttttccatgccaaggcttgagtaactcctaacgaaacagacttgtcaggccattgaaacataggagtaaaccttgtg

SEQ ID NO: 272141 - DNA, 504 bp, Zea mays
ggagactgaacgcgcagtgagctgctgcttcaaccgtcaccactgcaaccagatgccatgccagcagcataatggtgaactgcacaggattgcagaagtcagaatcctgtgggcagccatggatcctgaaggacggttgtttcagtttgctgcatgacttgaaacagatcataccgtgatcgccagcgaccggcaccatgtggcgcattgatctgcggtgtaggagcacctggtgtagcctgcacccccactcaagccctcccgagattccaaagattgcatgtcctcgtgttcactacacgatcagctgacaaaatttagataatggttgccgatttgaccgcccggccccccgtgttagaaagggtacaagctcacttggatgcccttttaattttgcatctttgcaagctttctggaacctttgcaggttaatgggttcatttttaaaaaagaatggatggttagctaacattctcaaattcaaattttgtctggattttt

SEQ ID NO: 272142 - DNA, 659 bp, Zea mays
ctgcagcccatactgctgctcctgaccactctggacgatgcgaatcagtcgcatgacaacgcacagcggcagcaggataccagcagcgcgaagcaagtacatctgcaaagaaacataaccttgccaggagactgaacgcgcagtgagctgctgcttcaaccgtcaccactgcaaccagatgccatgccagcagcataatggtgaacgtgatcgccagcgaccggcaccatgtggcgcattgatctgcggtgtaggagcacctggtgtagcctgcacccccactcaagccctcccgagattccaaagattgcatgtcctcgtgttcactgatcgtgaccgccgtttcaaccaccggagttttctttggaggcattgtgtaccctggctcgaaattctgaaggcaaatctcacagatggcggtccccttctcatcacaccatctctgcacacatcgcctgtgagcgtacttgagagagccggaacatccacaaggggactccatggtcgcacgccctccgtcctcttcctcgtggcagatcctacacagcatcaggtagcccaaggaggaagaaggtgaaggcagctcctcctcttcatcatgctccattcccttttctccccttccaatgatctcctccctcgagccgattcggctcgag

SEQ ID NO: 272143 - DNA, 494 bp, Zea mays
gaagtaagtacatctgcaaagaaacataacctcggcttttagttcatcgaatcagtgctctgctgcttcagccgtcgcccctgcaaccagatgccatgcgagcgtcacaatggtgaactgcccaagtcagaatccaggggacagcatggatcaggactcgtcctaaaggatggctatttttcaattcgctgcatgacttagaaccactacataccgtgatcgccagcgaccggcaccatgtggcgcattgatctgcggcgtaggagcacctggtgtaatctgcaccgtcaaccaagccctccggaggttccaaatgttgcatgtcctcgtgttcactgcacgatcacttgagaaaatttagatggttgccaatttgactggaacccagttacaagcctacttgaaagctttttttattttagattttctttccgaactttatgaaacttttgcaggttaacggttttttttttgaaagaatggttaacattctc

SEQ ID NO: 272144 - DNA, 1347 bp, Zea mays
tctctcggaccacggggcaccaccacaaaccagacgcgacgcacgcgcgcaaaatcatccggcggagccagggcggaggcaagccagagacgcggcacgcgacgcgggagggcgagcagcagcggcggcgcggcgacatcgcgaggccagggccagaagcaacagccgaggaggggcagcagaggcgaccgccgagagtcccggccaccatggacaccttcttcctatcgcacggctcgcccacgctctccatcgacgacagtatcccggcgcggcacttcttcaagtcatgggtgccggcgaaggtcgcgggcgaccagcccccgcgcgccatcctcgtcgtctcgggacactgggagacggccacgccggcggtcaacgtcatccgcggcagcaacgacaccatctacgacttctatggctttcccaagcccatgtaccagctcaagtaccccgctccgggcgctccggacttggccctgcggaccgtagagctcctggagcaagccgggttcggccccgtgaagcaggaccacagccgcgggctcgaccacggcgcctgggtgccgctgatgctcatgtacccggacgccagcatccccgtgtgccagctctcggtgcagaccgaccgcgacggcacgtaccactacaacctcggcaaggcgctggcgcccctgcgggaggaaggcatcctcatcctcggctccggcagcgccacgcacaacctgcgcaagattagcccgtccgacgcgcccgtgccgcagtgggccgccgagttcgacacctggctcaaggactcgctcctcaacggaaggtacgaggacgtgaagcggtacgaggagaaggcgccgcacgcgagggtggcgcacccgtggccggaccacttctacccgctgcacgtcgcgctcggcgccgccggggacggcgcgaaagcggagcagatccaccagtgctggtccaacggcacgctctcctacgcgtcctacaggttcaccaccaacacctgacgcgctgctcgtggtgtcggtggaataccaccgtcccgcccggccagctgctgaattcgggggaagcatccatcgacgggtgtggcactggcagcattgcacatactgtatttctaataaacccccgtgtgcctgccgttccgttcgcggtagatatgcgtttgttattgttttgcattgtttggtgcagcagcttaggctgattgattgcctgcatggtggtgccgggttctcgctggcctagctgaagcgtgcattctatcgagaaacgttttgtttgttaatgtattctatcatcgtttttaaattgaattccattctaataaaataaaaaaaagaa

SEQ ID NO: 272145 - DNA, 484 bp, Zea mays
cgctcgtgccgcagtgggccgccgagttcgacgcctggctcaaggactcgctcctcgacggaaggtacgaggacgtgaaccggttcgaggagaaagcgccgcacgggagggtggcgcacccgtggccggaccacttctacccgctgcacgtcgcgctcggcgccgccggggacggcgcaaaggcggagcagatccaccagtgctggaccaacgccacgctctcctacgcgtcctacaggttcaccaccaagagctgacgcgcccgtgcagctgtcgggtggaggacccccggggccagctgctgaattcgtgggaagcacatccgtcgacgtgcgcgacagcatgcatattctcgctccgcatgtagaaatgtgtttttctcaataaactcccggagtgccgatcgcggtagatatgtcttgcattgttcaacgcagcagcttggttccagaagcactctagtgtaaatctcattccatcatca

SEQ ID NO: 272146 - DNA, 314 bp, Zea mays
gccaaaccagagacccggcccccgacgcggaaggaccagcagcggcggcgcggcgacatcgcgaggccagggcagaggcgaccgccgagagtccctgccaccatggacaccttcttcctatcgcacggctcgcccacgctctccatcgacgacagtatcccggcgcggcacttcttcaagtcatgggtgccggcgaaggtcgcgggcgaccagcccccgcgcgccatcctcgtcgtctcgggacactgggagacggccacgccggctgtcaacgtcatccgcgtcacaacgacaccatctacgacttctatggc

SEQ ID NO: 272147 - DNA, 1280 bp, Zea mays
aatcaactcacttatccggcacgttcctttgacatggcgcattgctctcgttgcctcatcccatggcagctttacgacggcctgtacttgatagaggttgatcgtatcctgcgtcctggaggctattggattttgtctgggccaccaatcaactggaagaaacactggaaggggtgggacaggactaaagaagacctggatgcagagcagaaagccattgaggcagttgccaggagcctctgctggaagaagatcaaggaggcgggcgacattgctatctggcagaagcctactaaccacattcattgcaaggccatccacaaagttagcaagtccatacccttctgctctaaccaaaacccagatgctgcctggtatgacaagatggaggcttgtataactcgactcccagaggtcagtgacttaaaggaggttgccggcggtgcgttgaagaaatggcccgagaggctcactgcagtgccacccagaattgccagtggcagcatcgagggggtcacggaagagatgtttgtggaagatactgagttatggaagaagagagttgggcactacaagtccgtgattgcgcaacttggtcagaaaggccggtaccgcaacctactcgatatgaatgcaaagtttggcggcttcgctgcggcattggtgaatgatcccttgtgggtcatgaacatggtccctactgtggggaactcaacaacccttggggcaatatacgagcggggcctcattggaagctaccaggactggtgtgagggcatgtccacttatccccggacctacgacctcattcatgcggattcactgtttacactgtacaatggcagatgtgaggcggacaacattctgctcgaaatggacagaattctgaggccagagggcacggtcatcatcagagatgacgtggacatgttagtgaagataaagagcatcacggacgggatgagatggaatagccagatcgtggatcacgaagatggtccgctcgtccgggagaagctcctccttgctgtgaagacatactggactctggacgacagcaaacaatagcaataacgtggaatagagagttagaatgattattgacgtgatcggcaaatcttgcgactgccttaccgtttgccctgtgaatctggtggactttgggttccattttctttttgggtattcattggggggagatagttcacataatggagatataatctccttggtaagatataagactgaacccagcacagattttgacataaaaaacatac

SEQ ID NO: 272148 - DNA, 713 bp, Zea mays
tcgttcagccatccccaaccccaactcccttcactgtatatatgatacatccatccaccattcgtgaggacagcagcatctgtgcgtctcttccacgagaggcaacctaccgtatagtactgccgacatggtgctctccggcggcctagtcgtgccgtggctcgcggcggcggtggcggtggccgcgctggccatcaccgccgccccggtcggcgccgatgcctacaagaactacaccgtcggcgatgacaagggctggtacgacggcctcagcctgcccggggtcgactaccaggcgtgggctgacggcaagaacttcagcctcggggatttcctcatcttcaacacggacaagaaccactcggtggtgcagacgcggaacgtgacgctgtacgagagctgcgactacaacgactcggggcccgacgacaccgtcgagtgggtcgccgcgccgccggagttcagcaaggacgccgtcaccgtcgccgtgccgctcctcgacgagggccgcgcctacttcttctcgggcaactacgacggcgagcagtgcgagagcggtcagcgcttcgccgtcgacttggcccacggtcagggcctgccgcctgacctcaagccgtccgtcgccgacgcgccggcgcccttctccgcggggcccgccgactgatccgtcgcgcttgacttcatccaccccaagaacgttaccactccgagcg

SEQ ID NO: 272149 - DNA, 1789 bp, Zea mays
cccacgcgtccgcccacgcgtccgaccgtctcggccgagagagtgcgctcgtcgactccactcagctctctcgctcactctcctcccccaaggtcctagagacaggcagccggcgaggcgcgccgccgcgaagcaatggatttcaaggggttctgggagtccagattcggtggcaagaaggaacccgagccggagcagaacgggcacgccaacggggtccagaaccagaagaggacctccgatctggcggtctacgagcagttcgagcagcaggccaggcagacccaggtccgagccgccgcgattcgcgacggagacgctgatgtcatccagaagccccttctaccttcatttgagtcagctgaaatgcgtaatctcgcagagacattgttgagggatattattcgcgggagcccagatgtgaaatgggagagcatcaaaggactggaaaatgcaaaacgccttctaaaagaggctgttgtcatgcccataaagtacccaaaatacttcactggtctcctttctccatggaaaggcatcttactttttggccccccagggacaggaaagacaatgctggcaaaagcggtcgctactgagtgcaaaaccaccttcttcaacatttcagcatcatcaattgtcagcaaatggcgtggagattcagagaagcttgtcaaagttctgtttgagcttgctaggcatcatgcaccatccacaatattccttgatgaaatagatgctatcatcagccagcgtggtgaagctcgcagtgagcatgaagctagtcgtcgcttgaagactgagctacttattcagatggatggtttgacaaagacaaacgacttggtatttgtacttgcagctacaaatcttccctgggaattggatgcagccatgctccgccggcttgagaagcggattcttgtaccgcttcctgaaggtgaagcaaggcaagcgatgtttgaggaacttctgccagcaactacctcaaagttagaaatcccgtacgacatactagttgaaaagactgaaggttactctggttcagatattcgtctcgtgtgcaaagaagctgccatgcaaccactgagacgtctcatgtcagttcttgaagccagtgacgagttggttccggaggaagaactgcctgaggttggccctctgaaacctgatgatattgaacttgcattaaggaacactaggccgtcagcacatctccatgcgcatcgctatgagaagttcaaccaggactacggtagccatgtcgtttgttcagagctagcatgatcttattatcgggttgatgtttcgttcaatcatggaaccagagcagagctaatatatgtcctgctccggcgcatcagtttgttggcatgttgatgggggtcgcgtgttgtcaaaacggttgctgcgctggtaacgcgactcccaacatattgcagtttccctctggccgcagtaccttgcattttgcatgggttaaagtgcgaggtgcaggtgcttgctgctcagatctatgtgggcatgtggctttgttcatgcaatctgagattttcccgaatccttgaactcagaaaaaaaagattcgttctctagttacgtgtctaataaatgttagttaccctgcagaaaagtacactctggtttatatttaaaggaaaacgagccagagagcttgtataagtttcttctgattgttggtgtaattacccagctcgttaaaccaagctttaacaacaaattcttgcatgttgtggtcaaaaaaaaaaaaaaaaagggcggcaacaaa

SEQ ID NO: 272150 - DNA, 853 bp, Zea mays
cccacgcgtccgcccacgcgtccgcttacgcgtgggcggacgcgggggcggacaccagcctacatggcttgatggagcttcatttgctcatgttcgggatggccaactccaaccttgctgacatctatagcttcctcaagacctgcccgtgtcctcagttagagcgcctctttgtgcagctcccgacaaacaccggtgatgcattcacggagaacttcttgaaggtggaggaggaggacccgccaaaaggtggattagaaaaccttcgcttagccaagctgacaaatttcaaggggcaccgtaatgagatgcagctagtagcatttctgcttagacagtctagtagtctgaagaaactatttctgattgctcccaaggaggatcaccctcaaggactgcgcaaggttcattcagatatgctgcctgattttcttaaaaaagaaatatcgcatctggaaagagcttcaacagatacgcagatatttttcagtgagcctgatgctcagacgcagcaattgcattcggaggtctttgtcaggttttagcttgaaatgaggaaatgctgttgtagtccagtttctgctcctatagttttagatttctagcctttagagaacagacatggggaaaaaagtatctgcaaggcatacatagttttgatatatgttttctttttgcaatttgtgttactaaagaagtcctgcatagcggttgaaatgcgagttgttctgatctgccacattttcttatccctctcttctctccctatttgtgtccattgtccaagatctctttggaaaaaaaaaaaaaaaaaaaagggcggccgctcgcgatctagaaccggacgcgtgga

SEQ ID NO: 272151 - DNA, 548 bp, Zea mays
tattgtacgagcgctcgtatgatgctcgcaaggcccttcagaaaaatgttatccaactaagcaacagtctgatagttggagtaaagcctattgatgcagtgcaccggcagcagctggacgagggtttcgctcaaagcaatcaaggtggatttatggtttccttgccttcgaagtcactgggcttgaagagcgcaggcgcatcgaaccagttaggagccttgccccgcccgtatgaccccaaagctaacacgaatgtcagccgagatgctggccgtcgggcaactggcagtgttgctgcaccagcaaaatcaattgtaaccaatgtaatggatttggtatttggcatttgatttggcaatgaggattgaggaccaatgcatccggaaccttctctgtttcttccgtttacttgttcgagaatgccaccattccaaagattcaacagcaaattttgctgaagtctgagaccttactgagtgaacttccttttggcgatgtaacattaataccatgcattttttcacgtcttaattgtactaatgttgtct

SEQ ID NO: 272152 - DNA, 1324 bp, Zea mays
ataagattcactttgtcgctggtgacatagtgaaggttggtgaaactttactgaaaatggttgtgggtgacagccaaattgtttccccagataatatagttccatccgctggtaagtcccttggagtagagtctgcagttttctcaagtgaaggcaatgttcctggtggaaatctctctacaccagctgttaggcatctagcaaagcagtatgggatcagcataaatgaaattgttgggacagggaaagatggtagggttttgaaagaagatgtgttgaattatgctgtcagcaaaggtgtttgcaaacaacaatcgttagcttcggaagggaacattggtcaagttgagttactagaggaagggaaagcattactcgatgaggacttctatgaagataagaaaatccttctcaggggataccagagatcaatggtcaaatcaatgagcctggcagcaaaagttccacattttcattatctagaggagataaattgtgattctcttgtgcaactaaaaaccacatttcaaaatgagaacaaggatcaaactatcaagcacactttccttccgttcctcataaagtcactttctatggcactgagtaaataccctatgttgaacagttctttcattgaggaaactaacgaagttgtgttcaaggggcctcacaacattggggtggcgatggctacaacacatggattagtcgtgccaaacatcaagaaagtgcagtccctatcaatattggaggtcctaagagttcgaacaatgaactacaatcacgaaggaattggcgcgattgcatgagatggcatcacataacaggctaagcgctgcagatattgaaggtggcactataacacttagtaacataggtgccattggtggcaagtttggctctccacttctgaacctacctgaagttgccatcattgcccttgggcggattcaaaagcttcctcgcttcgatgatgacgaaaacgtttacccttcatccataatcaatgttactgttggagccgatcaccgagttgttgacggggccacggttgcaagattctgtaatgaatggaagagcctcgtggagaagccagagctgctcttgttgcatatgcgatgacccagtaatgtaccggtacatactacgacctgaaacggaggcattttggcataaaaaaataaatccatgtattcaaataaataaccaacgtggcttctctgcctggaaacagtggaaataaattgggagttattttcggagtccaaaataaaaaaaaaaaaaaaaaaaaaaaaaaaaaaaaaaaaaaaaaaaaaaaaaaaca

SEQ ID NO: 272153 - DNA, 434 bp, Zea mays
ctgctatttccctttccatgtattacaccattttgactattcaatgcattattttgtggtgaaggtgatgaaaaatagtttattttgttagggcctcacaacattggggtggcgatggctacaacacatggattagtcgtgccaaacatcaagaaagtgcagtcgctatcaatattggagatcacgaaggaattggcgcgattgcatgagatggcatcacaaaacaggctaagcgctgcagatattgaaggtggcactataacacttagtaacataggtgccattggtggcaagtttggctctccacttctgaacctacctgaagttgccatcattgcccttgggcggattcaaaagcttcctcgcttcgatgatgacgaaaacgtttacccttcatccataatcaatgttactgttggagccgatcaccgagt

SEQ ID NO: 272154 - DNA, 496 bp, Zea mays
ttctttttctcttgagcaacgaaagaccacattacagattgagaacaaggaccaaactgtcaagcacactttgcttgcgttcctcataaagtcactttctatggcactgagtaaataccctatgctgaacagatgtttcattgagtgaaactaacgaagttgcgttcaaggggcctcacaacattggggtggcgatggctacaacacatggattagtcgtgccaaacatcaagaaagtgcactcgctatcaatattggagatcacgaaggaattggcgcgattgcatgagatggcatcacaaaacaggctaagcgctgcagatattgaaggtggcactataacacttagtaacataggtgccattggtggcaagtttggctctccacttctgaacctacctgaagttgccatcattgcccttgggcggattcaaaagcttcctcgcttcggtgatcggctccaacagtaacattgattatggatgaagggtaaacg

SEQ ID NO: 272155 - DNA, 420 bp, Zea mays
accaatcaatcagcatgaagctatggtcattcttcactacatgacttgctgaagaggtcgtcatgtaggttatttctagcttttgtggtttcgattcatgataccccattcttggaactgtaggtcgtgtgcttttggtgattatgtactagatctcccacttgattgtgcttctctcccgtgtaattgaaatatatttgtagtggacatagtttgatggcactcacagaagtagctgatgagatgtacaatggcgatgatggtatgccctgtaaggctgtaacaccagtagcttggtttgtaattgttcttttcccccggttcgtgttacttcgttgaccttattccggggaaatattttagtgctgtgatgatggtctaaatgtttgttcgcctattgaagctaaatccaataaatta

SEQ ID NO: 272156 - DNA, 572 bp, Zea mays
cagcagcagcagcagcacagcggcgcgggcgctggctcgtccccgtcgtcgtcttccgtgaccacgtgctccgtgaagcgccgcggcggcgtggagcaaggcgacggctgcgactcgccctccggcggcgggatggcggccgcggcgtgccccaggtgcttcctgtacgtgctcatctcccggagcgacccgcggtgcccgcgctgcgagtcccacgtcccggccccgccggcgccggcgccggccgcgagcaagaagccgcggatcgacctcaacgtcggctacctgggcacatagcttgtggtttaggcatatggggcgatggcgtagcctcctagatggagcggctgccggtctcctaccgtaccgtacgtgacgccataaattttgcttaggctcgtgtaatgtgatgacccacggaccgagtcgggtacgtaggagtacgtagacaggggaggggggcgccgttttttgaactgaaacagaaatgcatgccctcccctgtcaggaaatttatggccgatcagacaccgcatacaagaacatgaatgaatggtgacactgctttcaaa

SEQ ID NO: 272157 - DNA, 1134 bp, Zea mays
cccgcgcgtgcgcccgggcgtgtccttcctcctccgtctccatcttggcccaaccgagcccaaacctctccccttttctccgtcctctcctagtccacacggcagacgccgccgccgggggagaggagaggaggggaggggatcggctccaagggaacaggtgagatggcaatcctgtacgcgctggtggcgcgcggcacggtggtgctggcggagcacagcgcggcagccaccaacgcgggcgctatcgcgcgccaggtcctcgagcgccttcccgacggcggcgccgacagccacgtctcctacacgcaggaccgctacgtcttccacgccaagcgcaccgacggcatcaccgcgctctgcatggccgacgacgccgccggaagacggattcccttcgcatttttggaggatattcatggaaggtttgtcaagacatatggccgggctgcgctaaccgctcttgcatatgcaatgaatgatgaattctcaagggtcttgagccagcaaatggactactattcaaatgaccctagtgcagatagaataaaccgcatgagaggtgaaatcaatcaggtccgtagtgttatgattgataacattgataaggttcttgaaagaggtgatcgtttggaactgctggttgacaagactgcaaatatgcaaggaaatacagttcgattcaagagacaagctcggcggttcagaaacactgtttggtggagaaatgtcaaactcacggccgcattgatacttctcctcctggtaataatatatgtcgttctagtcttcgtgtgccatggtttcaccctaccaacttgcataaggtaaggcatgatgtgcacatagtgctttttgctgtgcatgtttgtgcctgtcaccggggtccggggggcagcagccattgcaattgtttcttgtgtagaggaaagctacatattatgaagtgattgtgagaactcaattaaagatgtgaacttaacataaaaagtgcttcttgtgggtttggctatgaccttgtaggtctatgagaattcggtgtttggattggtgtttatttgtggctattcttgtgtctgtacatgaattcagttacgacgagtattttatggctatgctaatgtaatattcttg

SEQ ID NO: 272158 - DNA, 1277 bp, Zea mays
aatgattggccaacaagctatcatggatgcatatctctgtctacttcacctgactgctgggatattggttgagtcactcttcaatgccttcgcaacggctgcattcttcaaatttgttgtattttctatttttgaaatgaggtaccttctcgccatatggaaagcaagtaggcctttaaacagtggagaaggttgggagataatgaggcgagagctgtctgttctttacagccgcttttatggcattctgttgggaggaatccttctaatgtatgagctgcacaatttcttacgcccacttctcctcctgatgtactccttttgggtacctcaaattgtcacaaatgtcatcagggatacaagaaaacctctgcacccacaatatattttaggcatgacagttacacggcttgctattccattgtatatatttggttgccctagtaatttcatgcgtatcgagcccgacaagaaatggtccatagctgttacagtattcatgggtatccaagcagcagtgcttctgcttcagcactatcttggttctcgctgctttattcctcgccagatactgcctgagaaatactgctaccataggaaggtagaggacagcacaaatcagcccatcgattgtgttatttgcatgactacaatcgaccttacccaaagaacaagtgaatacatggtggcaccttgcgagcatatatttcactcaggctgtttacagcgttggatggacattaagatggagtgccctacttgccggcgctccctaccaccagcttagatgaggctttgtatcatatataatagtgaacaagaagtaggtagctcagcttatacaaggtgggggaactgatgtacaataaggtgaggctgcaatcgtgtgaaagctatgaacagaactgtagaaaagttttatactattgatttcaagaggtcttgtgttgtgcaaactagcgtatcaagcatcccacgaagaaatcgtccttccccgctcatgcggttatcactgttgcatgcctttgcctgctaccagtatttcggcccagcgttttggtctgagctttgtgcaaagtttgttaacgccgtgaaagagttcgagatgtgcattcttgatttggtggacacattagtagcgtgtttggtttgaggaatgagatctctctcactcacttttttgtttggtttgtggaatgaaatgaattaatctatcaccatttcatttctcgtaggctcatgattagtaataatataaaacctccgtttattccact

SEQ ID NO: 272159 - DNA, 630 bp, Zea mays
  unsure (1)..(630): unsure at all n locations
taagtattccactttaagcttgtaagcctttataagaagacatgagtataaataactgactacttggaaccatttgaatttttttaatctactgctcaagataactcttaccccaagtattccttggctactatcagactcgcgacagattgcatgttctttcgtgttatcttcagaacttcgacttgaggcatacagtgatcagaccagttgatttcacttgattgaggacgtcttgaactttgatctgctaatttcacagatgaagagattgaacaaagctatgaagaattttatgaagatgtacatacagaatttctgaaatttggtgaacttgtgaatttcaaggtatgtagaaatgggtctttncatcttcgagggaatgtttatgtgcactataaatcgttggattcagctcttcttgcctacagcagcatgaatggacgctattttgctggaaaacagataacatgtgaatttgttgctgtgacaagatggaaggcggtcatattcggtgagtacatgaggttaagaatcttgacatgttcacatggagttgcttgctattttattcactgtttctcctttctcgatgattttatgcgttggcttatctggcatctatcctct

SEQ ID NO: 272160 - DNA, 436 bp, Zea mays
cggacgcgtgggttccgctacaagttcgccaacgagaagctcaggcgcacggcgcggtactactcgtcgcaactggcggacgtgggccgccgtcaacatccagctcgcgtggcgcaggtatagggcccgggcatcgacggacctggcggcgatggccgcgccgccgttggcgggcggacccgacgacggggaccggcggctcagacactacgcggccatgttcatgtcgctccggccgcatgaccacctagagtgatcaggaggggggacgggaccatcctagcctgtgccggccgggtcatggtgtctgtacagtgtacactagtggtatgttgttgtcatcttctgcgtgagtgaactggtggttcgggatttgtcatttaaagaaggtcaataatggagaaatagtttcttaaaaaaaaaaaaaaaataaaaa

SEQ ID NO: 272161 - DNA, 474 bp, Zea mays
gcagtatcagttttagttccatgcagcagtttggcattgcaggttcttccacagtgcaggacaaatgggaggcagtagacagcagtaccccttttggctttccccagaagtttgacaccgtgagttccgcttcagaggatatgtccaaagcagactcacctgagccgacatttttttctgggaatcataatgtgcaatcagaaaattgcagttccctgttcacacagagtccaggaaataatttgagttccaaatcttcagaaaatttgaactctggaagctcgcatagttttgcagatttcaccagttggttcagcatcaatgtgctctagcccttcgaattcaaacttctctgttttcttgggctgctggcttcaggtgcaagaactgctccaccatcttcccctgctacaagctcatcttttgcttttagttccagtccagcattttcagcacaaccagtattcgccagca

SEQ ID NO: 272162 - DNA, 409 bp, Zea mays
cggacgcgtgggctccaacccggaaggccgatccccgccccaaaccccgtcccctcgtcgccgcccggtggccgtcgcccaagcgcacccgcggaagatgtcgctgtcgaagccggtctcggcacgccgcctcgtgccggcgctcttcccgctcgcgcacgcggacgccgcctcggccacggcttcccagccgcgagcgccgtaaggacacgtttcgtcgcgacgcccccgatccccgcgccttccccgcgggcagtgcgcctcgcggagccgctccccacgctggcgccgtcacgcctcgcggtccacaaccggatcctcgcgctcctctcggggccccaggccgacctccccgaggcggtgcttctcacccgacacgcgctccactccaactggcgccccttattct

SEQ ID NO: 272163 - DNA, 327 bp, Zea mays
tcggaaccccggggttcctatgctgggaagcagtcatgactgatgctcgggttgttcgcttgatgtggtctgggcccgctaggggaagaaggatggttgaagaaagctcgctggaaagccgcctgatgatggctctgcgtcatttgtacttcagttttcaacttttcatcatgttatttcgttgcatgagacgttcgtccgactgagcagggagatttccgaacagttatgccactggctgggaatgagaatttttgaacactgaactccggctgaatcatgtagtcaggagctgtaatagcattcagatagtcaccggttgggagc

SEQ ID NO: 272164 - DNA, 436 bp, Zea mays
cggtcgtagccatggagaccacttcccctgcctcttcacctgggcacatctccctcccagctgctgcaggtaggactaagtagtaaatagccatatacataggttgagtggatcgttaagagagggtagccatatacataggagtactggatagtatacaagaacggtagatacagggcaggggacatgatgctgggaaagagatctgggcgcccgtcgccggcgtcgcggcagcacatgcggcggaccacgagcatgacggagttcgcggcaccgcacgtgctggtagacgtcgcggaggaggaggaggacgaggagctgcagcttctgccggcgcacgccgaggccacaggggaggcggccgagcaggaggacccctacgggtgggccatcggcggcgccgcggcggccgggcgcgcggactggctggcggcgt

SEQ ID NO: 272165 - DNA, 820 bp, Zea mays
  unsure (1)..(820): unsure at all n locations
cgggcgggacttggtgctgttgccatatcgtccaactcagttaggtctcatccccaggatggcccaggtcggatggcttaagaagcagagctggtcaaatatcctttcccatatctttacgatgaggtctggccgcaccgtgccttggattcagagatttttcagcgaccatgaagatgcttttttaggccgagtgatatcctatcctttttcagcattgaagttcttcctcgtgactaattttgnttatttttttgttaccaccgcaacctacagtctcaagaggtagccaaggcttttggagcggtctgcacgccagagttctacttgttcaaaaaggatggccggaggccctttgaacttttctaccatggacagttcgatgactcaagacccagtaacaacgtgcctgtaaccggaagttttgcagggacctaagccgcgcgattgactgtgcgctcagtggccaagaactgccctttgtgcaaaagccaagtgtcggctgcagcatcaaatggcacccatgaggtgcccaccgtcttcggcatttgattcggcccaggctcacaggggctgaagatgagacagatctgtgggggagaaacagaaacatgggaacttctcttgtgtgacggcgaaatagtgtagcgctagcgcagcaaccagcaaaaggctcatgtaaagaattgttcacgaaacagaagagcttcacttctaccttctgtaggacatggtcatcgcaaaaggcgttggtattgtttcctgctggaagtaatttctgccgggatggatattcattttcaggatgaatttttttttt

SEQ ID NO: 272166 - DNA, 800 bp, Zea mays
tcctcgcgttcgcccacgcgtgcgcccacgcgtccgtccacgcgtccgccatgctccagagcctactcgcatgactggacagagtgtccgttcgtgcaccctggcgagaacgcccgccgccgggatcctcgcaagcacccatacacggtggtgccctgccccaacttccgccgccctggtggctgccccagcggtgatagctgcgagttctcccatggtgttttcgagagctggctccacccgtcgcagtaccgcacaaggctctgcatggagggcgcagcttagtgcccgccgcatctgcttcttcgcccacgatgaagatgagctccgccatgtgcctcacaatagtggtgcaggtctgctgtctccccgtgcctcttcatccattgacatgaccgctgctgctgctgctctagggcttctacctggatctcctaccaggcactttgtgccaccacctctgtcaccatctgctgccaacaatggtggaggtgctgctgctcattggctccaaggtagcaggctgcgctcttctttcaatgcaagagatgcacaggctgatgaccttggctcgctcctggaatgggaatctcaatacctcggagcgctcagcctcccacatagcagccgatcccagccccgtctttctactggtctgactattcgtccaacagcagttgctccatcctacctcgaagagatgtatgcttcagacatggctatgtcgccaaggttcaccaatgaccaaggtcactcagtcttctcaccagcacacaaatcagctcttctaaacaagtttc

SEQ ID NO: 272167 - DNA, 453 bp, Zea mays
tctgtcgatccatgcatcgatcgagatgtatatatatcctggttctagatcccatagagatcatagaactagagccagctccttgttgcccatggccatgacgagagcactggccatggtggccatgttggccactgctgccttgttcttcatgtccgctcgcgcacagcagtgcggtacgcaggccggcggcgcgctctgccccgactgcctctgctgcagccagtggggctattgcggctccactcccgactactgtaccgacggctgccagagccagtgcatcggcagcggctgcggcggcggcggcggcggtacccctgctactcccccgagcggcccggtgtctgaaatcatctccgagtccctgttcaacgagatgctgctgcaccgcaacgacgtggcgtgcccggccaccggcttctacacctacgacgcgttcataacggcaaa

SEQ ID NO: 272168 - DNA, 738 bp, Zea mays
cacgccctcaagctggccgcgcccgtcgtgtccgccgcctccaagcaggccacggaggcactccagggcgccggcctcgaccccgcccccgttctgtccgtcgccaagaccgcagcggagcagagcacgaaggtgatcgacgccgcgaacccgtggcctcggcggccgtggagaccatcacgtcgctgggccccgaggactacgtcgtggccgccggagccgcgtttctcgcgtacctcctcgtgccgccggtctggtcgctggtctcgtccagcctccgcggttacaaaggcgacctgaccccggcgcaagcactggacaaggtgaccacgcagggctacgtcctgatcgacgtgcggagcgacaaggacaaggccaaggcaggattgccgcagctgccatcgaacgcgaagaacaagctcgtctctgtgccgctggaagaccttccgagcaagctgaagggcatggtgcgcaacgcgaagaaagccgaggcggagatcgccgctctgaagatatcctacctcaagaagatcggaaagggctccaacgtcatcatcatggactcgtacagcgacgtcgccaagactgtggcgaagacgctggacagcgtggggttcaagaactgctgggtcatggccggcggcttctctggccggaaagggtgggcgcagagccgtctcggaacggattcctacaacctatccgtggtcgaagtcgtcacgccgtcacgtgtgatcc

SEQ ID NO: 272169 - DNA, 560 bp, Zea mays
cccacgcgtccgcccacgcgtccgcccacgcgtccgcggacgcgtggggtaactttctggtgggactattttttctggagcttgtgaacaagtttggggttggagcagtctatgcaggttttggtggggtctccctgctgacagcactctttgcctacaatttcatagttgaaacaaaaggacgttcgcttgaggaaattgagatgtccttgagcagtgctacccctggcaagcaagagtagaacatctcaattgtatggacaaactgaacaactgacgggaggaatttaataagagcagagggggcccaatcccatgaatcttcagcagcagcagtttgttgcaaacaacatcaactcctatagataatgagcacaatcaaattcagcttttctttggtagcatgagaatcgttgtacaatattaaaaagggtgaagaaaacgccccttttaatttgtttttttttgtacatctgatgtatatattttacgccttttgtagtacgtaaaataaagggaacatatctttctgatattaacttgatgatgaatttggaatt

SEQ ID NO: 272170 - DNA, 429 bp, Zea mays
agagctcagcagtgctcggacacgctcaaaagttatgggcttcagtttcactgtgcattggatatgtaactttctggtgggactatttttcctggagcttgtgcacaagtttggggttggagcagtctatgcaggttttggtggggtctccctgctgacagcactcttcgcctacaatttcatagttgaaacaaaaggacgttcgcttgaggaaattgagatgtccttgagcagtgctacccctggcaagcaagagtagaacatctcaattgtatggacaaactgaacaactgacgggaggaatttaataagagcagagggggcctaatcccatgaatcttcagcagcagcagtttgttgcaaacaacatcaactcctatagataatgagcacaatcaaattcagcttttctttggtagcatgagaatc

SEQ ID NO: 272171 - DNA, 1014 bp, Zea mays
gctcacttggacccctcttcggctcttcccacaatctcacagccctcgaaggcaccacccgcgccgccgccaccgctccgaaattacagccatcgtagtgcggcggctaggtcggccggcgtttggaggagctccgaagatgtggtgccagtcgtgcaaggaagggtacgacgaggaggacgccgggacctgcaaggagtgctacgaggaggccagcgagacggaggaggagctcaagcgggagatcgacgacctccgctcccgcctcctcttcctccgcctcccctcccctaccctcgacgccgcatccgcccccaactgcgacctcctcctccacgccatcccctccaccggcgcgggaggcgaacgcgatgctgggcgcacccccgacacacccgccgtgcccgcccatcgcgtcatccttgccagcagatctcctgttttcagagcgatgcttgagaatgagatggaagagagtaggagtggcgtcatcaagatctatgatgtgtcttatgacatccttcgtgcttttgtccattacatgtacactgcagaagctcttctagacgaacagatggcatctgacctcttggtgttggctgagaagtacgaagtaaagcacctgaaggcatactgtgagaagttcatagcatccaaagtgaatgacgacaatgctaggacccactacgccttcgcgcgccgtcacagcgcaaagcagctgcgggaggcctcgctttctgtgctcatggccaacatgtctacgctatcggatcgtgaagaatacaacgagcttgtggagaaggacccaacgctcgttgcggagatttatgaagcatatctcaaccggcaagtcaacactgcagctgggaaggacacaaattgtagcaacaggaagtgataattacgaacagaactcgtgcagtagcaatattctaactatgcatttatgcattcatgtaagcaagttaagaacatcatattctaaccaagaacaaacatgcacgcgagaagaat

SEQ ID NO: 272172 - DNA, 840 bp, Zea mays
  unsure (1)..(840): unsure at all n locations
ctcatgtcattatcacggatctattttnaccacctaagctgaaaaagttgacgaatattttaaaaaagacgtgggcgccaactaaagcatctgaagaagcagctaacgttgatggcgaagatgacaaagctactcctaatgaacaagagactggtgttcctgataaagatgagaaaactgtcgagataaaaaatcataaaaatgtgactaatataagaacaagtgtcaccaaagagaatggaagccataaacgtgaatccaataagccaggaaagcatctcaagaaaaataagaataatgctaccaaagaaattgatggctctgagagcagtgaaacaaatagaggtgggaaagaagagcatcgcgaacaaaccaagaaaatgagtcacaagaggaagtttgcttctgatagatccaaaaaatctggccccgagagcttctcgggtgtcaaagagaagagacaggtcagtgacaagaagcggaaaaagaaatggcaattcaagctgaggcgtgactgggaagctgaaaagaaaggtgacaagaggaggaaggtatgaaggagtattcagatgtccacaggccccaatgaaatttgatgggtgtgtaagggcaaccgagaattttgagcaagcacgagtttgcagccaccgaaaattttgatgtatgaaatagcgattgtagtttattattttttattcagtgtacgtctcaagttttatctttaatgagtgacatatctggcagggaaactgaagcatattattatcttgctgaatgctatgtgaatcctgctgtacgtgttataaaaaaaaatcatatctgacttactagctgcaaaaa

SEQ ID NO: 272173 - DNA, 952 bp, Zea mays
cccacgcgtccgcccacgcgtccgcccacgcgtccgcccacgcgtccgaagactacgtacattggcgctcttatgaagaataccggaatcatctatgcaaatgagttcaatgagaaaaggttgcatggacttttgggaaatatccatcgcatgggtgtgacaaataccatagtttgtaactatgatggtaaagagctacccaaagttcttgggatgaattcggttgacagagtattgctggatgctccctgcacaggaactgggaccatttggaaggatctacaaattaaaacatcaaaggacattgaagacatcaggaactgtgcctttgtccaaaagcaattgctgctagctgctattgatttggttgatgccaactccaaaactggtggttacattgtttactcaacttgttcgataatgattccagagaacgaggcagtaattgactatgcacttaaaaagagaaatgtaaagcttgtgccttgcgggttggattttgggcgtccaggattcatccggtaccgggagcatcggtttcatacttctttagaaaaaacaagaagattttatcctcatgtcaataacatggatggattttttgtagctaagctgaaaaagttaagcaatacaatcccggtgacgtctgagccgtctaaagcatctgaagaagcagctaaggctgatggcgaagatgagaaagctatttctaatgaacaagagactggtgttcctgataaagatgagaaaactgttgagataaaaaatcataaaaatgtgactaataaaagaacaagtgtcaccaaagagactggaagccataaacgtgaatccaataagccaggaaagcatctcaagataaataagaataccgataccaacgaagttgatggccctgaaagcactgaaacaaatggagatgggaaagaagagcaacgtgaacacaccaagc

SEQ ID NO: 272174 - DNA, 989 bp, Zea mays
aatggacttggccaatgctgctgcagtctctgctcccaagtacgatgatctaactaatgctgggcacgccaaaagaattgtgcactctcaggccaccgcaaagaggaagcatgctggtctgcatcaggaccaaccttgtgggatccccaggaagaaggataagtctcgtccgctctcggagctctgtaatggagacatgtggggtggttccagaccaaatggccagaaggccgatgaacatttgttgggtgtggctacatgttcaagcagctcctctggcacttcaaccttggacactccattggacatgaacaactgtcatcgcagcatggcattcaaaacagatcaagcaaagggcacagaaatatcctgcatgacaaggctactgagtgatgattcccggcatggaaatgattttgtcggaactcctgctgcacaaaatattgtggaaccagatcatttgcatagatatcaaccttgtggattggcaaagaatcctacctggaaacccaataagcaaactaatgacgcccgcaaagctgagaaacatgcacgcaaaaatatgaagatgagaaccataagctctgttgatcaggagaacaagaacaggacaagagattctaatgatcatgaccaccacaaaccaaagacaggaaagcacaaatcaccaagagctggggttgtccttttggagaaaaggacaggagaagcgttctttggacaagaacaagcccgctgaacatgatattaaaatgcatattgccgtagttcctagtggtatggattgtgttggcgcctttcagcagcagcgctttaaaagcaggtgtgatcctgaagagtcattggaaagcttaagcaaccattcaaactgtgagagtggctcggtatcatcgctggtgtttgagaagccactgcaggcattgccgcccggaaagaatctgctgggttatgaaatatgtcatgcagcgaagcacatcaagacactgcat

SEQ ID NO: 272175 - DNA, 1077 bp, Zea mays
gccgcctcgcctcccgcccgcactagcccactccggagtccggccctcgccctgctcgccgcaatgcatcaccggttcgcgggcctcgtgcccaccgcccgccccgctctgccgccgatccacggcggagtcgtcggccggagctatccgcccgtccaccggtccttggcgcttcgcctggcgccgtttgcctccgcgtctgtccgacgcgcgtgccgccccctcgccgtctccgcccaatccaccagcctccggccggagaagttttttgaagtggagatgaaggtgcgcgactatgaaattgaccagtatggtgttgtcaacaatgcaatctatgctagctactgccaacatggtcgtcacgagctgcttgagagcgtaggcatcagtgcagatgcagtggcgcgcagtggggaatccctggctctctctgagttgaacctcaagtactttgcccctttgaggagtggcgataagtttgctgttaaggtgaggcttgcaggcatcaaaggtgtacggatgatattcgaccacatcattacaaaactgcctaatcatgagctaattctggaggcaaaggcaacggctgttggcctgaacaaagactactatcctacccgtattcctcgtgaactatggtccaagatgcagctcttcttacccgtggacagcagagggtcaaatgaagacggtaataatcggaataacagctgcaactaattctggaggcaaagacaagggctgtttgttcgaactgaagactaccatctcatctccaaaactgtttatgtcatccaagctgcagctcctcatcgaagaatatagtagaatccctccggtcttttttatttgtcgtggtttagttcaaaaatgaactagcggacaataaatattcgagaacggatgtagtagaatctagtcttggagactggcggctgcttggtcctgcagtgccaacgaaaaccacctatgtatctccatctcaggagcgctgccatagaagagcacagcccatcttcattctttgtaactgttcacccgaaacatttgatccgttactgcagtcgtttggtacag

SEQ ID NO: 272176 - DNA, 893 bp, Zea mays
gtgtaggcgctcatcgatcggtccgggttcatctggctctgggtggttttttgatttggttagggttttgtttgtactgatatatggagaggaactgagaccaactgcggtctgcggcactgcgctcgccgccagcctccctagggtttccttccccgtcgaccatcagcgcctccccagatttggacctaagccctcgcggacgtgcgcgccggccgcctggttgccggtcgaatccgccctccagccgctgccaacgtcgatctgctactgacgcaccgcaagggagcatttagctgtagtgagatggatatcctttatcagtgtaaggaggttttgaagatccagaagtttcggcgtatggtgtcatatgctggattctactgcttcacttccctcattacttatgcttacacaagcaatacgacaagggctgggatgtcaagggctgaccagtattattcctcctaccctgctggtactgaactactaactgacactgcaaagctttacaaggctgcattgggcaattgttttgaagtagatgaatggggcccaatagagttctccatcatggcaaaacattatgaccggcaagggaaaccaccatatgcctaccatgctcaatatctggcacaccttctctcccatgggcagctcgatggaagcggttaaatgcaggatgtattgttggtaactgcatcaacgcaactagaatttcactatatcttgtataaaaatgttgcctttgctagaacaatgagttcagactgcaccagtttagaagttacagaactggcatcagaaacaagttctgaatttttttggtcattggctggtacgatatcagtgttgaatttgggcgatcgccgaacaatttctgaaaaaaaaca

SEQ ID NO: 272177 - DNA, 358 bp, Zea mays
ggaccgtggcgcgcgcggaaccttccctccctcgtgttccgctccggctccagctccgtttccgcgtcacctgctctttcccgcggctcgagcaagggagatgtggtttagggccgccgggctgggcacgagcgagagacgggcgtcaggcatgccgggaggggaggacgtccgtaaggtctcgcgccaggacatacagcttgtccagaatctcattgaacgttgccttcagctatatatgaaccagaaagaagtggtggacaccctatctttccaggcaaaaatagaacctagtttcactgagcttgtctggcagaagctcgaggaagagaatcgtgattttttcaaggcatactat

SEQ ID NO: 272178 - DNA, 775 bp, Zea mays
attctccagaatgtcaacatctttacatggatattcaggaattttttgaaggtttgaacatgaaagtagaacagcaaattccattacttttggttgagaggcaggctcttaatgaagccttggaagccgagaaaaatgggcaccacctaccggaaaccagaggtctatgcctttctgaggagcaagttgttagaacgatcttaaaaagaccacagattggaccaggaaacagaatcttagatatgattataggaccatacaagctgtctcggcggtgtgaagtgactgcaatccttagattatatggtctgccaagattacaaactggttccattcttgcccatgagatgatgcatgcatatcttcgtctcaaaggtaatttatttatgctaatacttttttgtgattcacatgtatcactatcactttctgcactaattttcttccaaaaaagatagacagttgctactgttgttgctgacatgattttctctttttaggattccgaaaccttagtattgaggttgaagaaggcatctgccaagttttatcccacctgtggttagagtcggaaatcatcgctggttctagtagcaacgttgcattcagttcagaagcatcatcatcttcatcatcctcagctcctacctcttcaaagaagggtgcgaagaccgaattcgagaagaagcttggggcattcatcaagcaccagatcgaaaccgattctttcgaggcatacggaggtgggtttagagctggctatcggctgttgagc

SEQ ID NO: 272179 - DNA, 301 bp, Zea mays
  unsure (1)..(301): unsure at all n locations
attttgggtcgaacaacgcgtccgtttgtctaccgtcgctgcgctagccctcctccctgcttctggctttggcctgagcctgcagcctgctgcaagctttggctttggtttaggtgcttcttttccacccctttactgttccccccacttttgcttgctttgtcacgcacacgaaaagctcctgcctttaccttatctccgcacccgtagtgggatttggtgggagctgcgctgctcgcccctcgcgtttcgttgctcaantgggggtcacggtcactgcccgcgggtgctgcgcgtgctc

SEQ ID NO: 272180 - DNA, 1142 bp, Zea mays
cacccgatacgtgttcgacgccaaggtgacggcgcaggatctggcggacacgtacaaccctccgttcaagagctgcgtggaggacggccatgccagcggcatcatgtgctcctacaaccgcgtcaatggcgtgccgacgtgcgccgactacaacctgctctccacgacggcgaggcaggactgggggttttacgggtatatcacctcggactgcgacgctgtggccatcatccatgatgcgcaaggctacgccaagacggcagaagatgcagttgcagatgtgctcaaagctggaatggacgtgaactgcggcagctacgtgcaggaccacggcgcctctgcgctgcagcaagggaagatcacggagcaggacatcaacagggcgctgcacaacctgttcgccgtcaggatgaggctggggctcttcaacggcgaccccaggcgcaacctgtacggcgacatcgggcccgaccaggtgtgcacgcaggagcaccaggacctcgccctggaagcggcgcaggacggcatcgtcttgctcaagaacgacggcggcgccggcgcgctcccgctgtccaagcccaacgtcgcgtccctcgccgtgatcgggttcaacgcgaacgacgccatcaggctgcgcggcaactacttcggcccgccgtgcgtgacggtgacgccgctccaggtgctgcagggctacgtgaaggacacgagcttcgtcgccggctgcaactcggccgcctgcaacgtcacgacgatccccgaggcggtccaggcggcgagctcggcggactccgtcgtcttgttcatggggctggaccaggaccaggagagggaggaggttgaccggctggacctgacgctcccgggacagcagcagaccctcatcgagagcgtcgcgaacgcggcgaagaagccggtgatcctggtgctgctctgcggtgggcccgtggatgtgagctttgcgaagaccaaccccaagattggggccatcctgtgggctggctaccccggcgaggccggcggccttgccatcgcacaggtgctcttccgagagcacaaccctggcggaaggctgcccgtgacatggtatccccgagatttcacgagagtgcctatgactgacatgcggatgctcgcctacc

SEQ ID NO: 272181 - DNA, 727 bp, Zea mays
ctggatgaacgaccccaatggccccgtggactacaagggctggtaccaccgcttctaccagtacaaccctgacggcgccatctggggcaacaagatcgcgtggggccacgccgtgtcccgcgacctgatccactggcgccacctcccgctggccatggggcccgaccaggggtacgacaccaacggcgtgtggacggggtccgccaccacgctccccgacggccgcctcgccatgctctacacgggctccaccaacgcctccgtccaggtgcagtgcctggccgtgcccgccgacgacgccgacccgctgctcaccaactggaccaagtacgagggcaacccggtgctgtacccgcccccgggcatcgggcccaaggacttccgcgaccccaccacggcctggatcgacccctcggacggcgcatggcgcgtcgtcatcggctccaaggacgacgacggccacgcgggcatcgccgtcgtctaccgcaccacggacctggtgcacttcgagctcctcccgggcctgctccaccgcgtcgacggcaccggcatgtgggagtgcatcgacttctaccccgtcgccacacgaggcagggcgtcggccaacggcgtcgacatgtccgacgccatcgccagcaacggcgccgtcgccggggacgtcctgcacgtcatgaaggccagcatggacgacgaccgccacgactactacgcgctgaggaggtacgac

SEQ ID NO: 272182 - DNA, 832 bp, Zea mays
cccacgcgtccgcggacgcgtgggcggtcgcgtgggcgccgcaccatcccttaagcgcggcagagccagtgccagtgccagtgccagtgaagcagagcagcagcatggctcgggacacagcagcaggcacaatcagcctagcgaggcggtcccgcccagccggtcccacagctccaggtcagagagagaccccagacatggcggcagcagggatcagcacctccaggacggcgccgctgggttgctgcaccctagcgacatgttcatcgtgaagaagaagaggcaagagcgcgcgaggagcggcatcgggtccccttccagctcgggccgaggcgccggacctctgtcgccggccaaccctgggcgtccgggccctgccccctcgcccagaggtgccaggacgccgttccagagggatccaccgccacacccgtctcagcagtcgatgcattcagctgggtctggatggggcagcggcggtgcgcattcggatcatcaagcgggggcaagctcgtcagcacccggcatcggagacatccagtgggcgaagcctgccaagaggctgaggaccgacagagcaggcagaggcggccgagcctaacggttggttcttctttagcgtcatatggatgtgtaaatgcatccacgtagcggatggaggcgtttgataataatcgtcagtgtatttagttcatcgtcctagcaagtcaaactttgctggcagtttttaaaacagttttttaaggaaaatcaggttatatttcaaaaaaaaaaaacacaacaaaaaaaaaaaaaaacccaaaccaaaaagggcagccgctcgcgatctaaa

SEQ ID NO: 272183 - DNA, 1280 bp, Zea mays
ggaattcgaagatgaagaagacaatgatgactcagtacctgataacaaggatgaatcagaggaagaagagcctatgaatgatgatgtatatgaatttactgaaggattaagaggcagaaaagctaataggatggaagaagctggttcaacaggctcttcttctggaagcaggagattaccaccacctgtaccttcctcatcttcaaaaaaattgcggtctctatctgcattagatgcccgcccaggcactttgtcaaagagaactccggatgacctagaggaaggtgagattgcaatgtctggggactcacatatggacctccagcagtcagggagctggaaccatgaacgtgatgacggtgaggatgaacaagtactacaaccgaaaataaaacgcaaacgaagtattcgtcttcgtccaaaacctaatgcagaaaagcaggaagatagatctggagaaggggccttccctcagcgtgctgccaggcagcaagacgcggttcatcctatagtgaaacagaagcgcaacatgtcatctaggaaggtttcaccggcttctaggtctgggaaattgagtcacttgtctgggtctggtgaggggtctgctgaactctccaaggaaaattggagcagtaaggccattgattccactgcccctgagttcggtggcacaaagatgtctgacagtatgcaaagaaagtgcaaaaatgtgataagcaagctttggaggaggattgacaaagaaggtcatcaaatgatacctaacatatcttcttggtggcggaggaatgagaattcgtcgttcagaggtccggctggtagcacacttgacctacaaaaaatcgagcagcgagtcgatgggttggagtacggcgctgtaaccgagttcatagcggacatgcagcagatgttgaaaagcgtggtccagcacttcagctataggcatgaggtccggatagaggccgagaccctccacaacttgtttttcaacataatgaagatcgccttcccagactcggacttcatggaagctaagaacgccatgtcgttttcgaatcctggaagcggtgccgccgctgccccatcatcgtcaaagcacgccgcaccatcccttaagcgcagcagagccagtgccagtgccagtgccagtgaagcagagcagcagcatggctcgggacacagcagcaggcacaatcagcctagcgagggcggtcccgcccagccggtcccacagctccaggtcagagagagaccccagacatggcggcagcagggatcag

SEQ ID NO: 272184 - DNA, 817 bp, Zea mays
gtcaaatatgctgttggttatgggttgtgctttctttgctggtggtgttgttcaccgcaacaaagaccaaatcttcagtaaggcaactgcagttgtcaactcaggtttactgttgatggctgtcatgggattgatgtttcctgccgttcttcatttcactcattcagaagtgcgtcaaggggcatcagaggttgcactttcaaggttcagtagttgtattatgcttgtggcgtatgccagctatctctatttccaattaagtggacggagcaacatttacagtccaataggcagtgaagaggcgcctattgaggatactgcagaggaagatgaagaagctgagattggcatgtgggaggcagtaacatggcttgcggttttaacactctgggtgtcttttctttctgagtacctagttaacgccattgagggagcatctgattcattgaacctaccggtggcttttatcagtgttattttgcttcctattgtgggcaatgcagctgaacatgcaagcgcaataatgtttgccatgaaagataagcttgacataacacttggtgttgcaattggttcatcaacacagatatcaatgtttgtgattccattttgtgttgttattggttggacgatgggacaaaggatggacttgaattttcagctatttgagacagcaactctcttcataacagtgcttgtggtagcatttatgctacaggatgggactgcgaactacttgaaaggacttatgctgatcctatgttatctaatagttgctgccagtttctttgttcatgttgatccaccatccagtgat

SEQ ID NO: 272185 - DNA, 820 bp, Zea mays
gattttcacacgaggatatattgacagaggtggatcttttgagttcaagaaaaccaggggatgtgatcttacctgtactcggtccttataatataggatacacctcaaacggccgctacatgctagtaggcggacgaaaaggccaccttgcaatgatggatatgctgcatatggatcttatcaaggagtttgacgtgagggaaactgttcgtgacgtgacattcttacacaatgagcagttgtatgccggcgctcaaaaaaagtatccctacatctataaccgacatggtacacaaatacactgtctgaaggaacatggaaaagcactgaagctccaatttctgtctaaacaattcctcttagcatcgataaacagcttcgggcagctccactaccaagatgtgagcactggcgaaatggttgcaaattataggacaggtctgggccgcaccgatgttatgcggggcaatccttacaatgctgtgattggccttgggcatgctggtggcaaagttaccatgtggaagccaaccagtgtgaaaccccttgttaccatgctgtgtcatcatggcccggtgactgctgttgcatttgacaggggtggcaatctcatggcaacagcaggtgttgacaggaagataaagatctgggacctgaggaagtatgaggttgtgcgttcttacccaatgcgcgctcagtctttggattttagccagaaggggctgttagcctgcagcaatggatctcaggtagagatatacagggatttcggtgggcatgactataggctttacatgaagcacaagatagtgaagggcta

SEQ ID NO: 272186 - DNA, 417 bp, Zea mays
cggttctacaggtctggacatgtctatatctgcttaaaaattcgagggagcagcggaatcttcagcatgctctctcttttctgtcagccggcgcttgtggactgcctgattctgtacatcaaacatcttgcattatccaattcaatggtgccagcgagaacagcagtgaccttcatgtaacgcatggcaggaactctggtccagcatcatgcgccgatgcgcagcatatagctgcccagcctcagtctcagctggttcattttaccacagataccggcaatactgtttatgagcccagtttctttggtgtaaaccagataaattaaccatggaagacacatgccacttgatcacttggatgaatagccctgaagatggtctgggcctgtgcaagttcttcaaccaaccaccggacat

SEQ ID NO: 272187 - DNA, 1711 bp, Zea mays
ctcagcgggctccaaagccgacgaggataaagaggagcccggctccgcacgcgggagcgagaggatcgccggcgcaggatgtggtgcgcatcgtgcttggcgtccgcctgcgcgggctgcacctgcaacctctgcacgtcggcggcatcggccgtgtcccgccgctccgcgcgcctcgcttactgcggcctcttcgccgcctcccttatcctctccttcttgctccgccagttcgccgcgccgctcctcaagcatatcccatggataaatgcgtttgatcaaacaccaccagaagaatggtttcaaatgaatgctgttcttcgtgtaagcctggggaacttcttgttctttgcaatattttctctcgtgatgattggtgtgaaagaccagaatgaccggcgagatgcctggcaccatggtggctggattgcaaagattgctgtatgggctgttctcattgttcttatgttctgtgtgccgaacattgtcattactatttacgaggtactttcgaagtttggatctggcttctttcttctagtacaggttgtgatgcttttagacttcacaaataattggaatgactcatgggttgagaaagaagagcggaaatgggaaatagctttgctggtagtgactgtggtttgctatctttctacattggccttctctggtgtgctcttcatgtggtttaatccatccggtcatgactgtggtctcaatgtgttctttatcgtcatgacactcatccttgcttttgcgtttgcaatagttgctttacatcctcaggtccatggaagcgttatgcctgcttctgtcatttctgtttactgcgcatacctgtgctacacgagtctctcgagtgaaccggatgactatgagtgcaatgggcttcacaggcattctaagcaggtttcaatgagtgctcttatactcgggatgctcactacggtgctctctgttgtgtactcagcagtccgtgctggatcctcgactacattcctttcaccgccatcatctcctagatctggagccaaaaacccgctactcggtgacgaggaggacggcaaaggcgatggcaaagaaagcgaaccgcgccccgtgagctactcctacaccttcttccacctcatcttcgcccttgcaagcatgtattcagccatgctcctgaccggctggacgagcgctgcatcagagagctccgagctgatggatgttggatggacgaccgtctgggtgcgcatctgcacggaatgggtcaccgccgggttgtacatctggaccctcatcgccccactgctcttcccagaccgtgatttctcctaggcacccacgcacccatagcctatgagttgtttggtggtgttagttgcgattgtgaatatgaataagccgaagctgggagctggtagggatctggtattgtctctgtatgctatctggcatgcctaatgtgatggcactggttagtacctgtttgtatggccttgtatagaatatatttcgaccgagtgtaggttgtggactttaaagtcatatagctatacttgacctgatgtcaagtcgcggttgtgtgtaatgacgacaattatcatgtgtaagaatacgtctattgctcgtaatgttgtaataactacgactgtagcttgtgtttagggcatctacaacctactacataaatacataaataacatatatcttagggttcctc

SEQ ID NO: 272188 - DNA, 695 bp, Zea mays
cattttctacatcaatttgcttccttttttctgccgaggaagttaaatggaaacatgaggatttagctgtggcctatgggttttgctgcattcactaactgtccgaatcggagatggagagagccaaacaacatttacatcaatgtgtggtgtcatccacaatttcttcatatgtgaggaatgccgcacacacttctatgaaatgtgttcaagtgtatcagtccccttcaaatctgcccgtgaccttgccctctggctatggaccgcgcataacaaagttaacgagaggttgatgaaagaagaaaaggagttagacaatgctgatccttcatttcctaagatcatctggcctccaaagcaactctgtccattgtgctaccgatcttctagtaggacggctgatggagccatgcaggttgagtggaatgaagatgaagtattcaatttcttggttaactactacgggaagatgcttgtatcatcctacagggagacctccatgcagtcctttcaagtaggctcaatttctgacgattcttccgcatccagtgccgcaacagtacctattggagctgccctgggtatcgcccttgctagctgtacatttggggcgctagcatgcttctggaggacccaacagaagaacagaaagtactacccattacgttctttaaagaaaattgactaaacatttt

SEQ ID NO: 272189 - DNA, 566 bp, Zea mays
agatcatctggcctccaaagcaactctgtccattgtgctaccgttcttctagtaggacgcctgtcggccccatccagtgccgcaacagtacctattggagctgccctgggtatcgcccttgctagctgtacatttggggcgctagcatgcttctggaggacccaacagaagaacagaaagcaaagaaagaactggaactgaatatcttgcaccacttgcaaaccctaaactgcatgtctgcatcagaaggagcctccgtgagtgtaaattttctggaccggttatcttgacgatgggcccaaaagagtcgaaaacagatgaaaaacatacagagtagatttagtagtgccgagtcacgtggtagtgttgcgcgacggcgcgaactttgttgcaacaggtaatacagattgaacgtgtaaactctgtccttaacatgtttctcggatacctttacctggttatcgatgtaatattatcaatttaatgagtgaaaaccctgtgcctttaaaaaaaaaaaaaaaaaaaaaaaaaaaaaaaaaaaaaaaaaaaaaaaaaaaaaaaaaaaa

SEQ ID NO: 272190 - DNA, 594 bp, Zea mays
gcaagagttcgaatctcttagcaaccacccttcaaggccgtgcaccagcaggagcacctgagattgtccggtacagtattcgagtggatgcaatggattggatgtccgaccggggtaaatggaaggatgctgatgtactgatcttcaacactgggcactggtggaacaatgagaaaacaatcagggggggtgcctacgtgcaagttggcgatgaggtccaaatgggcatgagtgttgctgaggcttacagaagatcgatagagacattgtccgattggcttcgcagagaagtcaacacgagctagacccatgtcatctaccgcacatatgctcctgtgcatttcagagatggtgactggaagactggtgggagctgccacttggaaactcttccagacgcgatgccagtgaagtccctggacgaatgggccgacttgctccaacccgtggacgaatttctagggagcgatcttggatccgagctggctggtgtagacctgcttcgcgtgacgggaatgacggcccagagaaaagacggccacctctcggtctacctgagcccctcaggacccgtgccccgctacagacaggact

SEQ ID NO: 272191 - DNA, 1727 bp, Zea mays
gagaagaccaggaataaaaaagaggcgtggtagtgtacagtgtgagctgacagggacagtgcccaccaatggtccccttctcacggtcacgctagcagcagtagccctcccccatcaccgaggagagagaagcctgtcgccgcgcgaccgccccacatggctaccgcgctcggtggggagcccaaccccaccgccgacgccctggaggtcgaccctccgcgcgcctccgccgacgagaagcatgtcgccactattattgcggggggtagtgatgcagtgacaggccacataatatcgactacgattgggggaaagaatggtgaaccaaagaggaccatcagctatatggctgagcgagttgttggaactggatcgtttggggttgtcttccaggcaaaatgcattgagactggtgaaactgttgcaattaagaaggttctacaggacaaaagatacaagaatagggagttacaaataatgcgatcaattgaccattgcaatgtcatttccctgaagcattgtttcttctctaccacaagtagggatgaacttttccttaacttagtcatggagtttgttccagagtcactttatcgcgttctgaaacactacaaagacatgaagcagaggatgccccttatatatgttaaattgtatatgtaccagatattccggggactagcttatattcatactgtaccaggaatttgtcaccgagatattaagcctcagaatatcttggtggatcctctttcccaccaagtcaaggtttgtgacttcgggagtgctaaaatcttgattaaaggtgaagctaatatatcatatatatgctcacgctattatcgtgctcctgagctcatatttggtgcaactgaatacacaacatctattgatatatggtcagctggatgtgttcttgctgagcttcttcttagtcaaccattatttcctggggaaagtgctgtggaccagctggttgagattatcaaggttttgggcaccccaacacgagaggaaattcgttgtatgaatcccaactatacagaattcaagtttcctcagataaaagcatgtccatggcacaagatcttccacaagagaatgcctccagaagcaatagatcttgtttcccgtcttcttcagtattcgccgaatctgcgatgtagcgcacttgaggcgtgtgctcattcattctttgacgaattacgagaatcacatgcaagactccctaacggacgcccatttcctccactattcaactttaagcaggaactagcaaacgcaccaccggagcttgtcagcaggctattaccagagcatgctcgacggcattcaggattcggttccttatttgggagtggaccgtagcccgtaggaaaatctcgttttaatgttgggctgctgtacgccgtcagagggcaatctgcatatcccaaatctaagttttagaacctgaccatcttgttgagaagttgccagccttagaaaaacccgaggtggcctcttgtgtccatgctctgccagtaacggcacataatgctggggggatggttaggtgtaattgttaagcccagagggtaactgactgagctaatgtattttcacgtttcatgtctgtatcgaacttgtacctgtgtaccctgtaccaatcgcagctgatgtaatcatgtaaatgcttctaaactacttcaagctatcatgatggccaattcgcaatttttcagtgc

SEQ ID NO: 272192 - DNA, 296 bp, Zea mays
cgacccacgcgtacgcttcgacatccgatgcctcattagctcgtttttttggcattggctctccccctcgcccgcctcgtccccgcctgccagggccagccttggccccacctgcgctttcggaagcgccacgtctccttcgccgctcacgccagttctcgcgccgccttcgctgcctgcgcggcggcccctgccctacaaaaccacacacccgaggctgatgccgaggctgatacagacaaacaagtgggccctaaaacacgcctcgtcttacataacatcccgcgggactgcac

SEQ ID NO: 272193 - DNA, 515 bp, Zea mays
gcgcgctgtccaacctccggacgctggacgtgagcttcaaccagatctccggcgccatcccgccgtccgtcgccgcgctgccgtcgatcaccaacctcatcctctgccacaaccagctcaccggcggcgtcccgtcgttcccggactcgtccccgctgctccggctggacctcaggcgcaatgcgctctccggcggcgtgcccgccctgccggccgggctgcagtacctgtcgctgtccgcgaacaagctcagcggcacggtggaccaggtgctgccccggctggcccggctgaacttcctggacctgagcgtgaaccagctggagggcccgatcccggcgtcggtgttcgcgctgccgctgtccgtgctgcagctgcagaggaacttcttcgcggggccggtgcagccgtcgggcgacgtgacgatcccagtggtggacctgagctacaaccggttctggggccagctgtcgccgctcctcgcgggcgtcgggcagctgtacctgaaacaacaa

SEQ ID NO: 272194 - DNA, 583 bp, Zea mays
cgctctgccaaacgtcatcggcttcagcttcggtgtggtccagatgggtctctacgcgctgtagcgcaacgcgacgcccagggtgcctgccaaggacgtggccgacgaccccagcaaggacaaggcgcccggcgaacatgtggtggtcaccattgccaagctgaccgcggcgacgacggcacctgcagctgccgtggcggaggatcttgtcaaggtccacgacggccacccggaggaagcagccaagggcgccgccaagccggcggagaacggcgcgggacgcagcgacgccgagcaagtctagattcctcgctcgatcagatcagaattcatgaagaagaacatgcgtatgtatgtgtatccggtaggtcgtaacataacataaattaagtgcgcatgcagtttggcaactcatgttgtttcatttcgttctcgcgcaatatgcgcatgtattaattttagattgtcattgttgtagttcttgcctccgattattattagtgtgtccgtcaccttccatgtaataccaaaaaaaatatatataaatcgtcctattaaagcaaaagctaaagttcgttttatt

SEQ ID NO: 272195 - DNA, 871 bp, Zea mays
ccacttcgcaagcttcgtcgcacacttttttcccctgcctccaaaaactcagaagacgcgcttaccgacggggggggccatgcttctccaccaccgcctcctccctcgcctacttcttgttccttccacacatacctccacactcctctgcccctcccgtttgccgcgccgcctctccctctcgccacgcttctacgcgctgccccacctcgcggcaccccagaccgtcgaccactccgacgatgagggggcaccccagggggaggggcagatcaagctcccgctcgaccatctcttcgtgccgcccggggcaacaatggatgcgggggaccaggaggccgtgagcgcacgggtgcttaagggctccaacatcgtgctgggcccatacgcgcgcggcgacgcacaggtggtcaacgcagattttgtaaagagcagcgtgcgtcccgatgactgccctcgggacggccttccggagtttgcactcgttggccggtccaacgtcggcaaatcgtcgctgctcaactcgcttgtccgccgcaagcgccttgcccttacctccaagaagcctgggaagacccaatgtatcaatcatttcaaagtaaatgacagctggtatcttgttgacttgcctggttatggatatgcttctgcaccacaggaagctcgtaccaattgggatgaatttactagaaattactttctcagtcgggagaatttggtatcggtttttcctcttatagatgcaagtatacctgccaagaagattgatcttgactatgctagttggcttggccaaaacaaggttcccatgacccttgtgttcacaaaatgtgacaagcgcaagaaggagaagaacggcggcaggaaacct

SEQ ID NO: 272196 - DNA, 686 bp, Zea mays
tccacgcgtccggtatatttaaccataagaaataggttaatcccacagcagactttaatactatatgctaaataaagtgttatctttctggatcatctagtctttgaaacacatgcagagcttggtctaaatattctttgcggtagcatgtaatagaaatcattgacttgggtgtttgacatagcaagcacttgatggttttaagttactaatgttcaatttttctgagtatccatattaatgcagaaggccatagttcatttccttgtcgttatttgtcactgagaaagaacaaaacattgacttcttgggggagtagacttattaccaacgttggtgtcctgttatctagtttaacctgaacctgttcttgaaaactgtgtcagaaagtcggtttgttctataatatattgtctgtgctatgagctacaataagcaagagtattttaaattagaaagcagttttctaaatgatgcaaaggcagattggtttgagattgcacatggaattcttttagtgaacatcttatcttagtcaagcagtagttaagattaactgttttacttattacccccaagaactctttgaaactcgactaactattctgtggtttctttcaggtagatgactgttttggccacccgcagtgggttgtccataccatgtcctgaaggaagcaaagtgc

SEQ ID NO: 272197 - DNA, 986 bp, Zea mays
gcttgttctcaagaaaaggttagaactagaaggcatctgtagaaatgcacacatggagcctgatatgagcacagcaccagagaagatcaccgcgctgattgattccggtttagtggatccttgcgaactcctttccagcattgaagtgcaaataacaaaagcaaatgaagagtccttaacgaggaaagatatcatggagagagtggataaagggctatcagcttgtgatgaagagacttggcttgaggaatataaccaagatgataataggtatagtgctggcaggggtgcccacttgaatcttaagcgtgcagagaaggcaaggataactgtccaaaagattccaactatgattgacagcttgatagccaaaacttttgcatgggaggatgaaagaaatgtgccatttttatatgatgggattcgtttggttgccattttggaagagcaaaaactcagaagggcacaaagggaggaagagaagagacgcagccgggatcagaggaagctgcacagtttattgcttaaggagaaggagttgattttcgggtccaaacctagtcctagaaagacaagcagcttcaataggaggaccagcaaccaccatccaaacgcaaatggcgctggattcatgactccggtgccacgccgagtttcagctggcagtgccaccccagagcttctgaccccacgctcgtattctggccggtacaacaactacttgaaggagaacaggcgcctgacagctgcactcactgaacttctcagttggttccaaggaggatagcatgtcatccttcgcatccatcagtggctcggaacctgattcgccattgtttttgcactaagtgttggttagggaggagacttcttggtgagaagggtggatagcctcaagatcggaccattgtgtgtgtgtgtgtgtggcagctgttaacattgctgattggtaacaacaggttgtgacaagtttagatgcgattgct

SEQ ID NO: 272198 - DNA, 1188 bp, Zea mays
gccgtctcgggcaagttctccatggaggaaggccgcaacaggctgttccgggagctcaccgacatcaacgcgggactcctcggagggttccacatccaggactacttccctagcctgggccggatcgagctcgtcaggaaggtggcgtgcgccaagaccaggcgcgtcaggaagcgctgggacgacctcctcgacaagctcatcgacgaccatgcggccaggatggcaacccatcaggacgaggacgacgataaggacttcatatacgtattgctgtctcttcagaaggagtatggcctcaccagagaccatatcaaggctatcttgatagacatgttcgaggccggaaccgacacctcgtacatgacgttggagttcgccatgacggagctcatacggaagccacacctgatgaagaagctgcaggaagaagtgcggcggaacgtgccggcggggcaggagatggtcaccgaggacaacctccccggcatgacctacctcaaggccgtcatcaaggagacgctccgcctgcacccgccggtcccgctcctcctcccgcactactccctggacgcctgcgaggtcgccggctacaccatcccggccaacacccgcgtcgtcgtcaacgcctgggcgctcggccgccacagcggctactgggagcgcgagaacgagttcgtcccggagaggttcctcagcggggacgtggccggcggcgtcgacctcaagcccaacgagttccagttcctggcgttcgggtccggccggaggatgtgccccggggtccactcggcgtccgcgaccatcgaggcgatgctgtccaacctcatgtaccggttcgactggcagctgccggcggggatgaaggcggaggacgtggacatgaccgaggtgtttgggatcacggtctcgaggaaggagaagctgctcctagtcccacaggctgcgtgatgatgatgataatctagtgcaatgcaatacagggttttaaattagtaacaccaaaggctgtgttactggaccttaattaataattaataaatgtgctactactatatagccaggcttcacagtgacacatacttctattgcccatgctacatatatgtgttcttatttacatccccaataagtgttattgtgttgtatcacatttacctatatatatatcaaatggaacatttcttc

SEQ ID NO: 272199 - DNA, 524 bp, Zea mays
caggcgcgtcaggaagcgctgggacgacctcctcgacaagctcatctacgaccatgcggccgggatggcaacccatcaggacgaggacgatgataaggacttcatatacgtattgctgtctcttcagaaggagtatggcctcaccagagaccatatcaaggctatcttgatagtaagtaaatagtgccttatttatttatatatatacatcatatatatatctttgtggttcgaggccgccgcccgccggaaccaatgaccaccattatatcgcaggacatgttcgaggccggaaccgacacctcgtacatgacgttggagttcgccatgacggagctcatacggaagccacacctgatgaagaagctgcaggaagaagtgcggcggaacgtgccggcggggcaggagatggtcaccgaggacaacctccccggcatgacctacctcaaggccgtcatcaaggagacgctccgcctgcacccgccggtcccgctcctcctcccgcactactccctggacgcctg

SEQ ID NO: 272200 - DNA, 1040 bp, Zea mays
ccttattcacatttcactgcggccttcaaaatgtttgacgttgaccacagtggggtgatagacagagaagagtttaagaaagtaatgtcactgatgcggtcctttaacagacaagggtccactcataaggatggtttacgtattggacttaaagttggccagcctgtggagaatggtggggtggttgagtacttctttgggagtgatgggaacgagcctctacactgtgtcaggttctcaaattttttgaaggagttgcatgacgatgagattattcaactggagttcagtcattatgatgtcaaatcgtctaaaacaataccagcaaaggattttgcattgtccatggttgcttctgctgacatgaaccatatcaacaagctgcttgatagagttgatagtttggtcaaggagccagatctgaaggacatacgcatcacctttgaggagtttaaggcatttgctgatttgcgacgaagattggagccactgtcgatggctatctttgcttacggtaaattgaatgggttattgacgaaggaggatctaaaacgtgcagcgcaacatgtttgcggggtcgacttaacagatagagtagtagacatcattttccatgtgttcgacacaaatcaggatgggaacttgagcccagaagagttcttaagagcgttacaaagaagagaaactgatattcgtgaaccaacaataccaggtccattggggttcttgtcttgctggttcagtggtaggaagtgttcttcactaaaacatgtggttatctgattgagcccctatttgatcctcacggcgcagaaggtaatcaccaagcagtgcattgctgatcgttacaacggacttcactgtatgtcgtcttggtggccgtagcttgactagcagtaacagctctaattgtaaatcgtgtcttctgtagccctaggactgagtgatatacatcgttattctcacgtgtaaattaaaccccatatggccatatggcttcaatatactcaaacattgtcatttagctttttttttagttg

SEQ ID NO: 272201 - DNA, 470 bp, Zea mays
aacagcttctcttttcattctacacaatttatttatctgatactccctccgtctcaaaatatagttcattttagactaaacatatattcattagttaacctatgaatatagtttgtatgtatatctacattcattatcaattattcgaatgtggacggagaactatattttgggacggagggagtactacttggctttatctgataccatttatttattttgctttctacacaatttactggcgctctatttcatacaattattcagattattcaactggagttcagtcattatgatgtcaaatcgtctaaaacaataccagcaaaggattttgcattgtccatggttgcttctgctgacatgaaccatatcaacaagctgcttgatagagttgatagtttggtcaaggagccagatctgaaggacatacgcatcacctttgaggagtttaaggcatttgctgatttgcg

SEQ ID NO: 272202 - DNA, 521 bp, Zea mays
tgacgagattattcgattggagtttagtcattatgatgtcaagtcgtctaaaactataccagcaaaggattttgcattgtccatggttgcttctgctgacatctaccatatcaacaagctgcttgatagagctgatggtttggtcaaggagccagatctgaaggacatacgcatcacctttgaggtatgacttgcgttcttgatatcaaaattatttttgcactcagtttatctcttattattttcatgaatgtgtatttgcaacttcaggagtttaaggcatttgctgatttgcgacgaagattggagccactgtcgatggctatctttgcttacggtaaattgaatgggttattgacgaaggaggatctaaaacgtgcagcgcaacatgtaagattttcttaccaggtttggcatgcttatttatgttattttgcttctaactgatgtctagctatgtaatttttcattttggtttgtgatgtaggtttgcggggtcgacttaacagatagagtagtag

SEQ ID NO: 272203 - DNA, 375 bp, Zea mays
cggacgcgtgggctactcacgccgtactgtctgattggcaacacctcgtgtacacgtaggcccggagatatggcatcgccggtggccagcggcacggcggtgttccagcgggggccgctccgcgtggaggcgaggcacgtcgactacagccaggtccccagcgtgcccaagccgctcatggtggtcgcccccaccgacgccggcgtgtaccccgtggccgtcttcctgcacggctgcaacacggtcaacagctggtatgagagcctcctgtcgcacgtcgcgtcccacgggttcatcgccgtggcgccccagctctactgcgtgacgctcaacatgaacgacttgaaggacatcgacgccaccaggcaggtcacc

SEQ ID NO: 272204 - DNA, 402 bp, Zea mays
ttagcagccgaggttgatgtaggcgacgaggccctgccatctgcccctaactgttattctggagcagcatgtatgtatattaccaaaaacatgatggaaaaaagcacaaacacccgctgctccaatagcacccgtaaataaaccaatgcacgcatggacttgacttacaaatagcgtgcgggagcagaccagacaggacaaagttttgccctaaaataactcttacaaaacaatccgaccaagaatgaaatgcaaagacaatgcaagtggatgaaaggaaaagaatgctaggaaattaacatcctactatcagcatggacttggccaccctgatcgatacaaaaataattctgggacaatgcgtttgagcccgctcttgcttactggagcagcaacaagcaa

SEQ ID NO: 272205 - DNA, 703 bp, Zea mays
gggtcgaccaggcgtccgctccgaaatactcacaaacacccccaatcccacccagaatccggcggaagtcaagccaacctccgtcctccatccatgggcgagcgggccctctcccagcccaaggcccagcctctctccccgttcccgtcgcctcccgcctccgccgcgttgccgccccccgcctctgcctctgcctctgcctctgctgcctccacctcccgcaccaccagcgccgcggcctcgcgccccaagaagaaggtgacgaacccatcgcccgaccgtaacccggcaaagaagccccgcctgacgttctcgatcccgggccggcccctgtccgcagtcggcgaggtgggcgtggccatccgctacctgcgcgccgtggaccccgccctcgccgccgtcatcgacgcgcacgagccccccgtgttccagtgcccgcaccgcccgttccactccctcgtgcgatccatcctgtaccagcagctcgccttcaaggccgccgcctccgtctactcccgcttcctcgcgcttctcggcggcgaggccagcgtggcccccgacgccgtcctcgcgctcaccccgcaccagctccgccagatcggggtctccccgcgcaaggcgtcctaccttcacgacctcgcccgcaagtatgcctcagggatcctctccgacgcctcgatcgtcaacatggacgaccgctccc

SEQ ID NO: 272206 - DNA, 440 bp, Zea mays
gctgcactgcactgcacaacgcaacctcctcccctcaactacagggaaatcagccatgagtgcgtcgtcggcgaagccagccaccggcggcaagacgtcgtggccggaggtggtcgggctgagcgtcgaggaagccaagaaggtgattctggcggacaagccgaacgccgacatcgtggtgctgcccaccaccacgcaggcggtgacctccgactttgggttcgaccgtgtccgcgtcttcgtcgggaccgtcgcccagacgccccatgttggctaggctagagcctcagcctagaggtcgtcggcaccgccggccatgaccacctgctatatgtcactactagtaataaagtataaataacagggaggatgcatgctcatccttggaatctgtacgcttgttggactactacttggctacttgaaacgactacttggct

SEQ ID NO: 272207 - DNA, 582 bp, Zea mays
cggacggtgggtgagtgccgctccactgctcagctagcgtccacctccacttcctatcgccatctctccccctttcgtcatccttctctctcctctgccatcgcgtccgccgccccaccgccatccgcgccgaagctgaagtgcggcctccgctacctgtctccgcggcggagtcagagccccctgacgccggcgctgtggaagccgaaggtcagggacccgtggagctccgcgctccgacgctcttctcgactgatgacaatcccaccccgctccagactgccaccagtctcctcctcaccggcgccatctcggtcttcctcttccgcgccctccgccgccgcgcccgccgcgccaaggagctcagagtgcggtcgagcgggttgaagaagcccaacaatctcaccgaggaggccctggagaggctgagattgatgagcgcctcaccgatcgagaccgagaaggcaacttcgcccatccaggctctgctcggcgggattgcggcgggggtcatcgcactcatcctctacaagttcagcaccacagtcgaggctgcgctcaaccgtcagaccatctccgaca

SEQ ID NO: 272208 - DNA, 854 bp, Zea mays
cgttttaaaaaaaacagcacaaggtattagtcccgagtggtctatggcctagaaatgtctattatgagataaagtttgaatgctagaattaatgaagttcgctactttcttcgtaggggtctatggcacatactacacaattgatgtttcatgaatatatatacatatctaccaaaaaaagggttacacctgcagagttgctgcagctaattgtacaatttacataaactgaagcgatggaaggacgaatcagctctccaaggtctctagggctgctatctggagttgtcctttgaagcatctggtgtggaggtgctatcagaattccttgcctctgacttttcgtttgagtacgtcgacagtattgtgacccagacaagctccacacagtcgacccatagaagtctttgctcaacaggaaccacaccatatgtaactaagtgtgcaaaaggccacaacttccatccagcggtaagcatgggccagaatgtggacttgagctcgttgtagatagtggtaggtgattccaaccgaaggaaacctaagaccacgaagtagatactgttccagattgcagaccaaacggtctgatcgaatgcaacctttgcagggacaacccaccaatccttgaatgggaatagtgcctcacagatatggtagtagtaatgtgaaagtgacccatgaagcgtgaacccaacaagaccagaccggaacatccgagcacggtcgaaatcaaagattggcttgccttcgtagcactgtgcaatccagtcaccaagggagtagacgacaccactgatcatcatcttggctagaaccgggttagctttgagggcctcccggacgcgtgggct

SEQ ID NO: 272209 - DNA, 766 bp, Zea mays
tcggggtatctctttctccgggtagtgcaccagcggaacggcgaggagcagaagggaacggggatgggaagcacaggggcgctgctttggcacccgtcgccgcaggtgcactccggtggcgtcctcttccgccagagccggcgcatcgtacgccagcgcaacttgcctctattatcgctagctgacgcggcgcttgagctcgagcgccgccgcgggcagcgtctccgctgcgctgccggcgacggggacggcgggccccgggaggctcagaaggagtctccgagcggcatcggcgcagcactcgaggatccgtctccaggacctcctgtggaaaacggtgccttcagaagcccctcacaggaagaacagagtgctctgtataattttctctatccaagcaaagacttacttccagatgataaggagatgagtatatttgatcatctggaggagcttcgcgacaggattttcatctcagttttggctgttggggctgcgatattaggctgttttgctttttcaaaagatttggttatttttcttgaggcaccagtgactgctcagggtgttcggtttttgcagctctcgcctggggaatttttctttacaacattaaaggtttcaggttattgtggccttttacttggaagtcctatcattttgtatgagatcattgcatttgttatcccaggtttaacaagggacgagcggaaatttcttgggcccattggggtggggtcctctggtctattctatctaggcattt

SEQ ID NO: 272210 - DNA, 438 bp, Zea mays
tggtagcgcaccatcggaacggcgaggagcagacgggaacggggatgggaagcgctggggcgctgctctggcacacgccgcagcagctgcacggccgtggcatcctcttccgccagagccggcctctcctgcgccagcgcaacctgcctctaatatcgctagctgccccggcgctcgagcccgagcgccgccgccggcagtgcctccgctgcgctgccgtcgacggggacggcgccctccgggagtctgggccactgccacagaaggagtctccgtccagcggcatcggtgccgcactcgaggacccgcctccaggacctcctgtggagaatggttcctttggaggcccctcacaggaagaacagagtgctctatatacttttctttatccaagcaaagacttacttccagatgataaggagatgagtatatttgatc

SEQ ID NO: 272211 - DNA, 492 bp, Zea mays
tcgctatcatgtaccgcacagctcgcagcacctgaaccacttgagaaccagccagctagctaaccaaccggcggagccaagaacaagcaagagacaacttgccccgtccaggcagcatgtgcaactccaacgtcaagtccgcgggcgtcgcccagatcgacggccgcccggtgctgcagccggcgggcaaccgcgtggcggcgccggacgccgcccgcccgctcaagaagtccctgcacaagtccttctccatgccgccttcctacgacaacaatgccaccgtgcccgcccgtcccgcccctgccgagaacacccgtgccggccggcggcgccggcggcggcctctctgctgcctcctacgacgccggccccggccccggccgccgcgagggcgaccaatgcggctggcgccgtgcccgcggagaagcccaggtccaggccaggaagcccggcgccgtgctgccggtggcgacgtttcgcgcgccgaggcgt

SEQ ID NO: 272212 - DNA, 641 bp, Zea mays
cgaagctaattctaggttgcagcagaatgggatcaccaatgataatgctacagaagatggttctgagcaagatttgcagatgcatcctttactgtttcattatcctcgagatgtggtttcgtcatatagtcatccggttcaaaatcttattaatcagtcaagaaaatatgatcttttcccctttgagaaagttcaagttgagagaagtaacaaccagactacaggttccaccaaaaatggtactgtaaatgctaacactatcgacttccatcctctcttgcaaagaacagaagttgatgtgcataatgatgtaccagaatatgatagtaaccttgattaccatcagtctgataataacatgagcaaagttccagtagatgaccagtcaacggctgggcaagcatccacaggcccttctgagagggagacaagtattgacttgaacattcatttatgttctccaacggtcataaaagattcaaatgacttcagaagtagttttagcagatcaaatgttcaagatgaagtttctaggaaggacaaatctagtgttccagggctcgagattgtaaattcctattttcatcattgcattcaagaacctaatgaagaatcaatgcaggaattgtaatggaacaaga

SEQ ID NO: 272213 - DNA, 509 bp, Zea mays
agccgcgagcctccaaaaccctaaccctaaatttgggggcgcttgggtcaaagagacggggggaggaatcgagccggcggcttgcggcggcatcagcgatggcggcgaagcgggagatctcgagcaccctcaggaacctcaagtttatgcagcgcggcgcggctgcgcagaaggccgaggagaaggccgaggtggaggtacaggaggaggcggtggtgatggcgccgagtggaggcttcgcctcgtccgcgcaggtcgttaggaagtgcatagttatcatggagggtaatcctcatccaggagctataaagggtcggatgtctttccaaaatttcaatccatctatcgataaactaaatgaagaggcaagaggggaccagcaaacagaatcagcttaccccagtaactgtgaccaagacaatgcaaactccagcatagggaatgaagttccagcatcaagatgtagagattttggcattcccagttcaaaaagcatatctctaaatgaa

SEQ ID NO: 272214 - DNA, 553 bp, Zea mays
agccattcctgatcccgccccaaccccaatcgacaaacgccgccccttctcgtctcgacctctccccaccggctaaccctagcagcggcacgcgggcgacggcgaccagtagagggctagtcgcgccaccggcgaagggattcagcggtctacccgtcctccgacacaggcgcggcggcgtcctgcagattattattggtttgttgcaaaatgtctacggaagcgactttgaacaattctggtggttctgaatctgcattgctgttactggaacagcttgctgaagtttttggaaagttaaaaactcacaccgaaacatttctgcatttgcaaaatggcataaaatgggaagatattgaagggcatttcctcagccttgatgagtcgtacagaagcaagtttgatgaactggtagagaaggagaaggcattagaagaaaagaaagctgaagcttgtaggttgattgcagagaaagaggctaaagtttctataaaagagcgtgcctccctgaatcagcttcaggagctaagggatgctgctgtctcttctctag

SEQ ID NO: 272215 - DNA, 476 bp, Zea mays
  unsure (1)..(476): unsure at all n locations
cgtgacagacagagaagaaaaactgcagccgccgagctcagcctcagccgccgcgacggggacagagaaagatggccgacggcagtgcctccgcctcaccgccttccgtttctccgcaccagtaccaccgcgacgccatcaagtcctcagtgcgcaatacagctgctaataggaggagagaacatgctattgcaatagggaaggaaagaagggaagccttgatgcgtgcaaagcgtgtatgccgagctcctctttctggcagtgatgaggctgcagcagaagagggggacatggttgttgatgaggagaaagcagatcttgagactagaacgactcaggctgttgaggagctgaaatctgctttgtcaagccagggaaaaggtgcacagaataggaagacagaagtgcttcgtgctttaaggcgtttgttgtcccagtctgaagtacctncagttgatgcagcaattaaagctgga

SEQ ID NO: 272216 - DNA, 516 bp, Zea mays
attaggacttgggtctctttcttgggcgggacaccaaatccatgtatctttaccgattaaccaatttctcgactctggtgttgatcctaaagagataccacttcctcatgaatttatcttgaatcgcgaccttttggctcaactttatcctagttttgccgaaggagcaaccccttttttcaccttgaattggtccaaatatgcggaatttcttagttttcgcggaggactagatccaataaccggtggtctatggttgagcgatattgcacaccatcatttagctattgctattcttttcctgatcgctggtcatatgtataggaccaattggggtattggtcatggacttaaagatattttggaggctcataagggcccatttacaggacaaggccataaaggtctctatgaaatcctaacaacgtcatggcatgctcaattatctcttaacctagctatgctaggctctacaactattgttgtagctcatcatatgtactctatgcccccctt

SEQ ID NO: 272217 - DNA, 537 bp, Zea mays
gcggataaatgcttgcccctatttgctcagcccgctctcggacgaacccattcacccgtccggccgtccgtgcgcggcgcgcccacccggcaccggcaccagcaccaccgcccgcccggcgcccgtcacgctcgagaggaggaggaagaagaagggactgggcgacagcgcgcgatggccgccgtcgtgtgcgtcaccggcgccggcggcttcatcggctcgtggatcgtcaagatcctcctcgcccgcgggtacgccgtccggggcacctcccgccgcgaagctgctgaccccaagaacgcgcacctgtgggcgctcgacggcgcggcggagcgcctcaccatgctgcaggtggacctgctcgaccgcgccagcctccgcgccgtcttccgcggctgcgacggcgtcatccacaccgcctcgccgatgcacgacaaccccgaggagatcatcgagccgattatcgcagggacgcggaacgtcgtggaggcggcggcggacgcggcgtgcggcgcctggtgctgtcctccaccatcg

SEQ ID NO: 272218 - DNA, 486 bp, Zea mays
gtcccacccctcctgcatttcaaaataagcgtatctccctgcgcttttcctagccctttgtcatccaaggaaacaataaacaaccggcgcttttacacccccgccaagaacaggagcaacaacaacaaggctcctcgcaacaatccattctcatccatggcgaagctcatgaacaagttggtcgattcgttcgagcacgacgagataccggacgtcggctgcgtgcgcgccgtgctggccgagctcgtcctcaccttcctcttcgtcttcaccggcgtctccgcccgccatggccgccggatccgacgggaagcccggcgacgctatgccgatggcgacgctggcggcggtggcaatcgcgcacgcgctggccgctggcgtcctggtgacggccgggttccacgtctccggcggccacctgaaccccgcggtgacggtggggctcatggttgcgcggcacatcaccaagcttccgggcggtgctgt

SEQ ID NO: 272219 - DNA, 493 bp, Zea mays
aaacaaccggagcttttaccccacccgctttcccctccccgccaggaacaacagggcgcctcgcaataattcgtccatccatggcgaagctcgtcaacaagctggtcgattcgttcgaccaccacgaggcgccggcgccggacgtcggctgcgtgcgcgccgtgctggccgagctcgtcctcaccttcctcttcgtcttcaccggcgtctccgcctccatggccgccggggccggcgggaagcccggggaggctatgccgatggcgacgctggcggcggtggctatcgcgcacgcgctggccgctggcgtcctggtgacggccggcttccacgtctccggcggccacctcaaccccgcggtgacggtggggatcttggttcgcggccacatcaccaagctccgggcgctgctgtacgtcgccgcccagctgctggcgtcctgcctcgcctgcatcctcctccgctacctcagcggcggcatggtgaccccggt

SEQ ID NO: 272220 - DNA, 608 bp, Zea mays
actacacgtccgcccacgcgtccgcccacgcgtccgaaacagacaaaaaaaacacctgggaaatccaagcagctgttgcaaccggttccttcgaggagaacgtgagaaagaagcatgaggccccaggtgctgctcgtcgcactggccgtcttcgccgtcctcgtagctctgccactgggcaaagcgcacgaggaggaggaggaggaagggcttgaactcgaagccagcaggaggcggtggccgtgctgcgaccagtgcggcatttgcaccaggtcgcagccgccgatatgcgagtgcagggacacgtcgacgaccggctgccacccggcttgcaaggcgtgcgccctgtccatctccgacggcctcttcgtgtgcaaggacaagatcgtcaacttctgcaagcgccgctgcacccgtcgtactgatgatgatgatgcgtgacttataatctaagttggcaaataaccttgccaataaataatttccgttcggagctccatttgcatctttctcaagatgcagacgacagggtttaaataatcaaggcgatgcttgcttgctcgtcgccttgttactcgtacagtttctgaaatagagagcatgggtat

SEQ ID NO: 272221 - DNA, 162 bp, Zea mays
ccggccggttcgcccgggcaggacagtactactgcttgacaatgtagtatgatgtgcatattaatcactacatagataactattcatatttaggattaaaatctaagatgaccactaatattgcttcaaaaagagcagcttttgtgaggccattcacttctc

SEQ ID NO: 272222 - DNA, 480 bp, Zea mays
gtacggtccggaatcgggaccaccacggtaccggcgggggtcccgacgccaacgacagagaagagagtccatctgctcgttgccttgattttgtggaacgaagcgatggctcgcagcggcgccatggtttcctgcatgctgctcctggtggtggcggcgcaactgctcatggtggtgatggccacgcagacagcggcggcggcggcgggcgaccaacgcggagcagcacgccggctgctgtggcaggtgacctgccactacagcgcctgtaactgccgcacttgcccgacatatggctgggcgtgctgcagcacttgctgctagctagctagctagctagtgtgagttcttccgcgcgcgcgggcgcagcctttgcatacccctcttgcttagctcatgtccagtagtagccggttgctgccctcgtcgtcggcggcggctgttgcggcgtcatctctggcgtggttacgttctcatctg

SEQ ID NO: 272223 - DNA, 657 bp, Zea mays
cccacgcgtccgatcgtctcaagttttgttctcctctcctagctagccagcacctgcagatctgctcgttgccttgggctactgattttgtggaacgaagcgatggctcgcagcggcgccgtggtttcctgcatgctgctcctggtggtggcggcgcaactgctcatggtgatggccacgcagacagcggcggcggcggcggcggcgggcgaccaacgcggagctggacgccggctgctgtggcaggtgacctgccactacagcaactgtaattgccgcacttgcccgatatatggctgggcgtgctgcagcacttgctgctagctagctagctagctagtgtgagttcttccgcgcgcgcaacagcctttgcataccacccctcttgcttagctcatgcatgtccagcagtagccggttgctgggctcgtcgtcgtcgtcgtctgcggcggcggcggcgggggcgggggcggcgtcatctctggcgtggttacgttctcatcagcgacttctaatggcgctcgctcgatctttatttcctgcagtcctttttgtaataagaagccaattgatgtgtgtgcacgcgcaatcctaataataaatagatcttctttgtgccttgctttgtttgatatatataataagagtcttcgttgc

SEQ ID NO: 272224 - DNA, 286 bp, Zea mays
cggacgcgtgggccatctgctcgttgccttggtaattcatcatgtagcatcagctagtctttatctcaagtatatatacatatgcatatgtgtcgtcgcagtagtactttccctttatctctatacacactggatacagattttgtggaacgaagcgatggctcgcagcggcgccatggtttcctgcatgctgctcctggtggtggcggcgcaactgctcatggtggtgatggccacgcagacagcggcggcggcggcgggcgaccaacgcggagcagcacgccgg

SEQ ID NO: 272225 - DNA, 427 bp, Zea mays
ctcaagttttgttctcctctcgtagctagccagcacctgcagatctgctcgttgccttggtaattcatcatgtagtacgtagcatcagctagtatttatctcaagtatatatatacgcatatgtgtcgtcgcagtactttcccgtatctctctatacacactacacgcatacataccaataccatccgtcttaactcttaatctttgcctgcatacgtacactgcacgtacgtactgcagggctactgattttgtggaacgaagcgatggctcgcagcggcgccgtggtttcctgcatgctgctcctggtggtggcggcgcaactgctcatggtgatggccacgcagacagcggcggcggcggcggcggcgggcgaccaacgcggagctggacgccggctgctgtggcaggtgacctccactacagc

SEQ ID NO: 272226 - DNA, 643 bp, Zea mays
aagatctctccaggaaagatttttcttccctcctccgacgccccagcccaccaacacactctataaagcagccctcagtcacacacagaacgcacaagcgcaagccgggcaagaaaactccgcaggccagtctgcgagttggatggccttcttcttggccctcgtgtgcatcctcgtcttgctagccatcgcctcctacgtccagtacactcgctggcagaaggggaaaggccgcttcggcggccatgggaggtctgctcccttgaagctgcctcctggctccatgggctggccttaccttggcgagaccctccagctttactcccaggaccccagcgtcttcttcgcttccaaacagaagaggtacggcgagatcttcaagacgcaccttctgggctgcccgtgcgtgatgctggcgagcccggaggcggcgcggttcgtgctggtgacgcaggcgcacctgttcaagccgacctacccgcggagcaaggagcgcatgatcgggccgtcggctctcttcttccaccagggcgactaccacctccgcctccgcaagctcgttcagggcgcgctcggccccgacgcgctgcgcgcgctcgttcctgaggtggaggccgccgtgcggtccactcttgctttctgg

SEQ ID NO: 272227 - DNA, 1225 bp, Zea mays
gaatgatttttcttccctcctccgacgccccagcccaccaacacactctataaagcagccctcagtcacacacagaacgcacaagcgcaagccgggcaagaaaactccgcaggccagtctgcgagttggatggccttcttcttggccctcgtgtgcatcctcatcttgctagccatcgcctcctacgtccagtacactcgctggcaaaaggggaaaggccgcttcggcggccatgggaggtctgctcccttgaagctgcctcctggctccatgggctggccttaccttggcgagaccctccagctttactcccaggaccccagcttcttcttcgcttccaaacagaagaggtacggcgagatcttcaagacgcaccttctgggttgcccgtgcgtgatgctggcgagcccggaggcggcgcggttcgtgctggtgacgcaggcgcgccgctcctgagcgacgagcagatcgccgacaacgtcatcggcgtgctgttcgcggcgcaggacacgacggccagcgcgctcacctggatcgtcaagtacctccacgaccaccccaagctcctcgaggccgtccgggcggagcaggcggcggtccgcgaggccaccggcggcgggaggcagccgctggcgtgggcgcacacgaagagcatggcgctaacgcatagggtgattttggagagcttaaggatggcgagcatcatctcgttcacgttcagggaggccgtggccgacgtggagtacaaagggttccttatccccaaggggtggaaggtgatgcctctcttcaggaacatccaccacagccctgactacttccaggatccacacaagttcgacccttctagattccaggtggcgccgcgtccgagcacgttcctgccgtttgggcacggcgtgcacgcgtgccccgggaacgagctggccaagctcgagatgctcgtcctcatccaccacctggtcaccggctacaggtgcgtccatctcctctcagatcctctccatatattccccgcttgtcctatagcttgtggaccaggatgacacatggctggctgctgccgctctccatggggctccggctctctctctccgtgcatgctccaaatctcctcctgtctgtatgtatgcctgtatcgatcatgtatatactcctgtaccataatctgtggggtcctcgaaatgtacgtcttcactagccccgctgtgctctccttcctcct

SEQ ID NO: 272228 - DNA, 532 bp, Zea mays
ctagttctagaggcgatgcatgcgcggcggcggctgcacggcgtgctgtgcgacatggtgcgggagcgtcgtggccaggcccaggcgggcaccaccggcctgctgggctgcctgatgcggtcccggggcgacgacggcgcgccgctgctgagcgacgagcagatcgccgacaacgtcatcggcgtgctgttcgcggcgcaggacacgacggccagcgcgctcacctggatcgtcaagtacctccacgaccaccccaagctcctcgaggccgtccgggcggagcaggcggcggtccgcgaggccaccggccgcgggaggccgccgctggcgtgggcgcacaccaagagcatggcgcttacgcatagggtacgcgcgtgcgtgctgggaaacgcaaaactggctctttattattattactagatcaggaggcgcacttcgtgcgccctacagtaaccatagttatgataaggcatatcaaattggaactataataaaatcttaatctgcggtaacaattagacaaagcaatatg

SEQ ID NO: 272229 - DNA, 838 bp, Zea mays
cggacgcgtggggaaagagccacgcattgcacttggcttgcacaagcccggaggagccccaaacgcgggcggcggacggaatgcggctgcgcctgcctcagtcagtgaacattctgctgtgatggcgaaggagtactacactacgagcagccttgtggttgggtacgcgctgtgctcgagcctgctctcgatcatcaacaagtacgccgtgacaaagttcggtttcccaggcctcctgaccgctctacagtactcgacatccgctgctggtgtctggatcctcggaaagctaggcttcctcacacatgaccccttcaacctggagaccgcaaagaagttcgcgccggcggctctcgtcttctacctagccatattcaccaacacgaacctcctctgccacgccaacgtcgacaccttcatagtcttcagatccctgaccccgctcctggtcgccatcgccgacacgacgttccggaagcagccatgcccttccaagttcacgttcctgtccctcgtggtcatcctgggcggacggtcggctacgtgacgacggattcggcgttcagcctcacggcgtactcgtgggcgctcgcgtacctggtgaccataacgactgagatggtgtacatcaagcacatcgtcaccagcctggggctcaacacctggggcttcgtgctctacaacaacttcctctccttgatgctggcccccgtgttctggttccttacaggcgagcacaggtcggtcttcgcagcgatggagtccaggggcgaaggctggtttcaactggacgccgtcgtggcggtggcgctgtcgtgcgtcttcgggctgctcatca

SEQ ID NO: 272230 - DNA, 490 bp, Zea mays
gtgaggcaggaactgctccatgcaaatcaaattttcgcccaacatccaatgtggccagtcattgcggtcactgcaagtgctttggaggaaacagctgctgtcgttgtgagggttctccatgacaggttgctgaggtactccatcccacgcatatcaaaacggttctaaggccacgttgggcttcattagtctctgtttggttccagggactaaaagtgttaagaactcattaaattactcataagaatactaaaatgccctttaccattctcccgccattactcttcttccactgcattagaaataaataaggggcaaaatgtggaattaatatggcttagtcccttttagtcatcccttgagggactagatactaaagcagtttactctctattttagttctactgtttagcattttggggcctaaattggactaaaatgctggtaataatttttagtctttgaaactcaacaaatcctaaattgtttt

SEQ ID NO: 272231 - DNA, 608 bp, Zea mays
  unsure (1)..(608): unsure at all n locations
acgcgttctccactgctattccgcctccacccaagtgcctgctctggttccctccgctgggctccaaatcaagcaattcatgagtgggagatggaagagatctagccagcagaagaaaaatcaagcaggccaccagcagaatcgatgaggagacagcggaatctagggggcataggcatgcgaataatgcgacgaggcatcacctaacccctgaggggaccttcgaccgctctggcgcttaagcaccgcttaagtgatgccttaataacaatggctgaaaaggtgctccaaagatgagctatccaacctaaaagcaaaattccgaatgatgtgctgtaaaactgtattctgtaatagcatatatttattatttttctattcagtccattttcttccctttcagcacaaacagaaaaattaatctgcaattggttctgttgcaaatgatttattattaaacaaaatggcaggctgctacttcttgggnaaaaaaaattatataatattataaaatattttttaatatatataaaaaaattatgtaatattatataaaaattttaaaatatatttaataaatttttaaaataaatatatttttatatatt

SEQ ID NO: 272232 - DNA, 465 bp, Zea mays
cgggcggcccgggggccggctattgggctttaagccccttcttcttctttttgggtttcttcccctggcctttaaggggagggcccgggggccccagggccataagcttgttgtattccgccaccccaaccttggcggccgtttggtgggctcccgctcttccaagtccgcgttccagcgccaggttgtcccgagcagccgggcgtcgtcgtgcaggtccgtccgcgcgcgctccgccgcagccgccgcgccggctgcgggaggcatctccgggcatagcaattacacggttggtgacttcatgacaagaagggacaatctccatgttgtccaacctactacaccagttgaccaagccctggagctgctggtgcaacacaggatctctggcttccctgtgggttgacgatgactggaacctggttggggtggtctcagattatgatctcctagctttggattcga

SEQ ID NO: 272233 - DNA, 1249 bp, Zea mays
gatagatctgggcaaacctgttgcgcttgacgtcgttgttgatggcacagttcctcaaggctctggactgtcaagctcagcagcgtttgtctgttcagcaacaattgctatcatgggaatccttgacaaaaactttccaaagaaagaagttgctcaattcacttgtctgtccgagcgccacattggaacgcaatctggcggcatggatcaggctatatctatcatggcgaaacctggattcgctgagttgatagattttaatccaatccatgcaactgacgtccaactaccttcaggtggtacatttgtgatcgcccattgtttggccgagtccaagaaagcagagacagctgcaacaaattataataaccgcgttgtggagtgtcgcttagcagcgattgttcttgccatcaaacttgggatggataggaaaaaggctatctcctccgttacaaccctctccgatgttgaggggctatgtgtttcttttgctgggagagaaggttcatctgatcctgcagtagctgtgaagaaacttctgcatgaggacccatatacagctggagaaatagagaaaattacaggagaaggcctgacatctgtcttccagggctctcagacgtcattggatgttataaaagcggcaaagcactacaagctatttcagcgtgcgacccatgtctactctgaagcaaggagagtttatgctttcagggatactgtctcttcaaaactcagtgaggaaggcaagcttaagaaacttggtgatcttatgaacgagagccattacagctgcagcgtgctatacgaatgcagttgccctgagctggaggagcttgtgaaggtctgcagagacaacggagcactgggagcacgtctgacaggagctgggtggggtggctgcgcggttgctctggtcaaggagcccatcgtccctcagttcattctgaaactaaaggaaatgtactacaaatcaaggattgacaggggagtaatcaagcagggcgatgtgggcctgtacgtgttcgcatccaagccgtcgagcggcgcggccatactgaggttgtaggcaggcaggaaggcagaggcagccgctattcttttcacgagtgtggtggccctgtaaaacatggaataaagttgccatgaacaccgaacccttgtagtagcgttgaattatctcagacaacacacgcattaaattgatatctatctataggagtgacacacgagcgaaccatgctgtttt

SEQ ID NO: 272234 - DNA, 646 bp, Zea mays
gctgtcccctcgctgtacacagggtgtctgtcaccgagcagcgggcagccggcaggcaatgcgatgatagtagctgctgctgcccctgcgccgccagttccagcaccgccgggcaaaccgcccttttctctctcctcctccagctcctccttctccctccgccgccgctccttcagcttgtggttctcaaacggcaacgcgcatggaagagacagcgccaccgccaccacgagcagcagggcgaccaggaggtggtggtggtccgatcccggcggcagccgagaagactacggctcctcttttctagaggaggaggacgtttacgattacgaggatgaggctgcgttccccagatttggaggggccgcggaactgttcgatgagccctggttctccaaggtatataagacttacggaatcctgctaccgttgatgcttgcgtccatgcttgctgcgacagggccaaaggcctttctaatggccatggtgatcccactcagtcagtcggccatatcgtttctgcttgacgctgtatggggaaggaggtaaggcaaccgcgacgacaggaggagaccattccaagaggaagattaccctgaggacgccgctggctttgcggcaggtggtcgaggcatggctaccgcag

SEQ ID NO: 272235 - DNA, 439 bp, Zea mays
ccgacctgcctcgaggttgcgtgttttgttctctgtgagcgtcgtgggtgttgatggcgtcaacggcgtactcgcggccatccaagccgccagggccggcggccggagacaggagcggaccgcggctggccaaggagctcggcaggatcgagcccaagaagctgggcatcgggctggttgccggctgctgcttcgcgctgctcacctacctctcctttgcccggctgtttgccatctactcgccggttttcgacagctcgtcgtccatggtgttgaagaacatgccgccagcaacgacgacggtgccgggtacagctacaggggcgctgccggtggagcaaaaggcccaagtggaggagcagaaagaggttcgtgaccctgaggcggacccgcacatgccaaacttaccggaggtcacagaaaaggatcagcaggagga

SEQ ID NO: 272236 - DNA, 489 bp, Zea mays
cccacgcgtccgcccacgcgtccgcccacgcgtccgcccacgcgtccgcggacgcgtgggctagccggcgacatccgtgtcagtcctaaggagaaaaccatgtacttcgttaacccgtccggcgccggcccgttcgactccaacggggagaagaagatccgaccgttcgcccgcaaggacgacttcctcctccccggcgtcgtggaggtcacgatcaagtccgtgtcctcggtcgcagccgcgccgtggtgcacccgtcggcacgacgtcccggtggtggtcttctccgtggccgggtacacggacatcttcttgcacgacaacacggacgtgctgatcccgctgttcctcaccacggcgcacctgcaaggagaggtgcagctcctcgtcaccaactacaagccgtggtgggtgcgcaggttcacgcccctgctcaggaagctcttcaactacgacgtcctcgactttgggcaggactacgaggtgcac

SEQ ID NO: 272237 - DNA, 278 bp, Zea mays
cggacgcgtgggcggcgacgaagccagccggtggtgccattattacagaggccaagatcacctgcgacgagaacggcgtcgacgagggcttcccgtacgcacggccgccggtttgtgagctagccggcgacatccgtgtcagtcctaaggagaaaaccatgtacttcgttaacccgtccggcgccggcccgttcgactccaacggggagaagaagatccgaccgttcgcccgcaaggacgacttcctcctccccggcgtcgtggaggtcacgatcaag

SEQ ID NO: 272238 - DNA, 659 bp, Zea mays
actacccagtttccaagactttcttttccttcttttccccacatgtctcctggcgcgggggattttttaaaaaggagggtggcttcaaacccaagcatactgattacagttgatgaggctctgcatcatccatacttggcttcacttcatgagatcaatgatgaacctacctgccctgcacctttcagctttgattttgagcaaccatcctttacagaagcgcatataaaagaacttatctggagggaatctttagcatttaacccggatcctccctactaatatcaaaaggatgatgagttatctgctaagaggcatatgaagatctctagctccagcggacgcaagaacttatgtcagtgtcagtgtgcgttgattatttacgtgcggtttgttgggcatgcgggcatgggttggtgctgcaatagcaactctattatggcttgtgagagcaaacaaacgtctgtattcattttcaggtgcctgaacccaggcttgtattataccgcttgactccataaattattcttgtgtatctatgcttgtaattttgcagacaattacttgaacgccccttgtatatctgagttgacatcccttttctattgtaacatcccaaacataatttattgtgatcttactaagggcccgtatggagc

SEQ ID NO: 272239 - DNA, 620 bp, Zea mays
  unsure (1)..(620): unsure at all n locations
ccggnctggaaaaccagggtcgacgccacgcgttcggctttgagcacttcggcgacgtcgtgaagatctggttcaccttcaacgagcgggagacgtggtcctatttttgctacggaaccggcatctttgccccggggcggtgctccccaggacaaaaatgcgctaacccaaccgggaactcgctcaccgagccttacattgttgcccacaacctcctccgagctcacgctgagactgtccatgagtccaacaagcattacagaggtaacaaggacgcacagatagggattgcgttcgacgtgatgggccgtgtgccatatgacaatatgtttctcgacggccaggcccaagaaaggtccatcgattataacctaggatggttcatggagccggtcgttcgcggcgactaccctttctccatgagatcattgatcaaggatcggctaccctactttaccgacgacgagaaagagaagctagtgggttcgtatgacataatggggataaactactacacctctgaggttttccaagcacatcgacatctcgccaaagtactcgccagtgctcaacaccgacgacgcctatgccgcccaagagacgaaaggaccagacgggaa

SEQ ID NO: 272240 - DNA, 660 bp, Zea mays
ggtctagatcgcgagcgaccgccctttttttttttttttttgctttgactgtttgggaaaaaaaagggtcagttcatgtatgtgtaaaaaatctttcttgaacggctaacagcaattttacactctactagggctacatcgatccgagcgtcattcctactcgacgactcaacaaaatcctgggcgtggtaaagagtgctctacgacctcggcagtatcttgccgttatacatcttgtcgagcagctgcttggcttctgggcgtcgcaggagccccttgttgtttggcaggccagttccgagacagacagggcacaccaactttccgcggccgtagcaattcgggcactcggtgaattcataaacatctttcgccctcttccgattgagggccttccatttccctgtgccaccacacatgtcgcatatcacagcaccactgccattacagttcctgcaaacagctttctgtaccccggccttgttcatcgcatccgcagcgagtccgtttggtggtcctgtcgcgctgatcaaggtaacagcgccgagacagaccagacatcttcgtcttgatgaaggcgtagtttctttttcttcattagtctcggccttggaaacgtttgcgcaccccttcgaatcctcatctctagcaagacacctg

SEQ ID NO: 272241 - DNA, 578 bp, Zea mays
  unsure (1)..(578): unsure at all n locations
gaaanccggggccggccgcacgcgtccgaaaatttttcgttgtatgctaaactggagttttaaacatggaaatgctgctgaaagtggtgtatgagctgtacacggacttggttttgaaaaatccgttctatgagatggagatgccgatccggtgtgagctgtttgatcacaacctggctcagatgatccagaaggaccgtgttgcgcttctgggtcggtgaatcttgaaaactcatggtctcagcccttgaaaaccttacttttcccgttttcgacgcttggacttgctctgctggaaccttaaattctaccttgcggcactgctgtgctgtgcataaccgataacttgaatagtgtgtggctcgcttgtaatcttcttgcggtgtgatgaaatgtagagctttgcgggcataaatgccgctgcaaatagtaacaacatggaagcagcttttgttcttgcatgttttccctgcaatgagcttgagcagcttgatcagggctggttttgtggaagtggaattgaaggggatccatagagaggaatttccttgctatttttgaatcgaaagtgaatttct

SEQ ID NO: 272242 - DNA, 1045 bp, Zea mays
  unsure (1)..(1045): unsure at all n locations
tcttccagcgtagataaacgtcgaccattatgggaccttacagcaccgccgtcgccgtaagcgcatcgccggtcctgcaggcttcctcactcttgacgcgagcccgtggttcttggaggcccacggtggcggcgttgcggctttctgcttccgtgaaatgccgtcggcgggcactcaccgtgacctgtgcgctcccggagaaagaacggccggcggcattcaacatcccgcccactgctctgctgtgccccgtgcccccgccggacggcaaggaacggtgggacatcaaggaggaagatgaccgcgtcacgctgtggctccaggtgccagggctgtcggcgagcgacatcgaggtgaccaccagcgaggacgtcctcgagatcaaacgcagggtcgtcgccccacagcagccggcgcccgtggacgcgcacggcgtcggcgcgttccacatccggctgctgttgaccaaggagtacgacggcagcaacgtcacggccgatctcaaggccggcatgctggaggtcaccgtccacaagaacccgcaacgccccggcgaacgcgccgtgttgatgggggcgaccaagccccccgcccgagccccgtcgaaacgaggagagcagtaccaaccaaaggtcctcgaccgcaagaaaggaaaccggaacccccatggggagacaaaatccaaatggagtctagctggttgagggctcggaccctgctttgaataagcttctcatttctagctgcggatggactcaaaccagcaatcgccttctgttatatcaattgcctggagagagcttacgctgcttgtagtatcatgtgtgtttccttaaaaaaacccttctttgtttctttatttattatgagggtttttttttggtgtgcggtcacacagagtgaaaacaattccattttctaagcaaaattccaatggtcgtcttccctgtactgcaaaatacaccttagactttgtttaggtattggaatattaactctaatccacgtgtgtngaagtggatggatatataaattagtctaagtt

SEQ ID NO: 272243 - DNA, 351 bp, Zea mays
gtttaattgtgttttttcgaaccttggtttttacaaaatgttgataatgtggcctgtatagtgcaatatcaatgttcttattaatccactttaaaaacatatataattattgtgttcatattatcttggtttactggtactttgataaccttcagattctcatcatatgcatgcaaagcaaaaaatgattgtgctgtttttcggtcacatgtgcatggatagcttatggttgatcattgatcatttgatcgttatccatattttattccttgagtttctttttgtctctcttgagtgaacaaaatattgggtctggtactgagatgattcttcttgttgggcgtttgagca

SEQ ID NO: 272244 - DNA, 384 bp, Zea mays
gtagcacgaagtagttttgtggcctgacaaaccaattatgtggtccaatccaagagcctaattatgtggggaccgtgctggcagttcggcaacttttgtttgtatatggccaactaaacctatttcacatatgtgattcgatgtttatgtagttgcttggatcttggggttttgggagtctgtactcctgcctccgctacctcaaatccatgccgcgctgcacctactctgttttcaatgaaagagttttctgttgcgtctgcactgaggactggtcatggcattaacagggtcagatggtaggcgataatttccattggtcaagcggtagttgcgtccagagagatctcttgacacttatttaggaccaatccctgttccatc

SEQ ID NO: 272245 - DNA, 354 bp, Zea mays
  unsure (1)..(354): unsure at all n locations
actcgctcgctcactagcaaaatgcaggcctgttccctccggcgagccctccttctgcggggaaccgcgaggcgcccagctcttccccattcccgtaggcaacaagccccgtgccttctcctccgcgtcccccgcggcagcgcgctctcccaaagacgctcataatgcgccgccgccgattatgccgacgctgccgtggggtgatgcgctcgcagccacgcagcgcaccttctgcctgccgctcgctgggcgcgtcctcgccgcctcggcgaccgagaacgcggccgtggccccccgcgcagtctacgcctcgctggcccctggccgccgncggcgcgcgcggcgacacgcggc

SEQ ID NO: 272246 - DNA, 640 bp, Zea mays
cagggaggaagtgttcctccgcaagctcaacgtctgctgcgtggtgttcgacttcgcggccgagcgggggagggactcgccggaggtggaaaggaagcggcaggtgctcgtgtccctcgtcgactgcgtctctgaggcggaggagcccctcacggaggcgatgctctcggcctgcgtacgcatgttcgccatcaacctcttcagggtcttcccgcccaagctccggtccggtgccagtgccgtcaccgacgaggacgagccgttctttgacccctcgtggtaccacctccaggtcgtgtatgaattgctcctacggttcgtcatgtccccggccgtcgatgtcaaggttgctaggaagtacatggacaactccttcatctctaggcttcttgaccttttcgattctgatgatcctagggagcgggaatgcttgaagacagtgctgcacaggatatacgggaaatttatgggcaatcgcccgttcattcgcaaggctgtgagcaacatcttctataggtttgtgtttgagacagatcaccacaatgggattgccgagctactggaggtgtttgggagtgtgattaccggctttgcgatgccattgaaggaggagcataagttgtttctatggcaggcattg

SEQ ID NO: 272247 - DNA, 592 bp, Zea mays
aaaaaaactaggtcttccactcttcctccactagtctactcggcagatttcactgactctcaccggcggtctttgtgcctccaccggccgccgccatgccgtacctcgtccgcgagcggctctacttcggcggcatcaaagacgccattgccgccctcacggagtcttcctccacgccggacttcacccacgtcctctccgtggtcagctccgcctccatctccttcatcaccgattgccgcccgggcctcgagatccccaccgaggaggtcctccgcgtagtcgccggcgaggagggcgcggcaccgactgccgcggttcccccggggacgctgatgcgggtggtggagcgcgccgggcacgggctgcgggtcacgcgcatggccgtgccgctgcgggacaccgaggaggaggacctgctcgaccgcctcgagccctgccttgagttcatcgatgagggcaggaaggtcgggaatgtcctcgtccattgctttgctggggtgtcgaggagcgcttccatcattgttgcttatcttatgagagcagaaacagaatctcttgaagaagcattagaagctctgaaggagatttc

SEQ ID NO: 272248 - DNA, 532 bp, Zea mays
gtccaggccccgctcgctcctaccagtggcccgtgcgtgcggccgccggcgccctgatcgatcgacccgcgcctcggccggatggaggcgtcagcagcagcaggaggtgggggaggcagcgccgccacgcggagcagcccggcggccgtgcaggccaccaacgacgacgccgcggccagcaagctgtcctgtgttaacaaaggatacatgaaggatgattatgtgcggttttttgttaggcgaccaacaagaagggctccaataatcaaatcgtgggtattatgcgcgttggtctgttctcaggacgcttctgcatcaattcctcaatgcggggaagaatagtaacaatgacaagcctaaacaaatattatcccttggtgctggctttgacacaacattcttccagttgcaagatgaaggaatggctccacactgctatgtagaattggatttcaggaggtaaccagcaaaaaagccgccatcattaccattatagtgaaatgaaggaaaagtaggctcagaagctcaattt

SEQ ID NO: 272249 - DNA, 578 bp, Zea mays
ctcgcctcctcccacgacgacgcgcacgggcgtgcgtgcatgcggccagcggtcacggcccctccggcaaggcgaccaccgccgtgcgcgtgagaacaccggctcggctcgtctcgtcggacgactcgctcggcgccgcccgcgtccccatggcgcggccgcggccgcacggccgcatcgtccacgtcgccttcgccttcgcgttcgcgtctgccgtcctcctgccgccggccgcggagggtgtccaggagggcgacgtgctggtcgcgttccgggacacgctgcgcggtctggacggcgcgccgccgggcccgctgcggaactggggcacgccgggtccgtgccggggcaactcctcctcctggtacggcgtgtcgtgccacggcaacggctccgtgcagggcctgcagctggagcggctcggcctgtcgggtggcgcgcccgacctgtccgtcctcgccgtgctcccgggcctgcgcgcgctcagcctctccgacaacgcgctcaccggcgccttccccaacgtgtccgcgctcgccgtgctcaagatgctctacctgtcgcggaaccgcctgtcc

SEQ ID NO: 272250 - DNA, 474 bp, Zea mays
cgcaccctccagttcgtctccccagctctgtctctaaaatccactcgtccaccacctcctcggcgcttcgcatcctttccccctccgcaagaaagaagcgaagcaactctccgccgtctccgtttttctccacaccacccaaagctctctccgaccacagcctcgcccccagcgcctccttccgcagtcatgtaccgcgcggccgctagcctcgcctccaaggcgcggcaagccgggaacagcctcgccgcccgccaggttggaagcaggcttgcctggagcaggaactatgctgcgaaggacatcaagtttggtgttgaggcccgtgctctgatgttgaggggtgttggggagttggcagatgccctcaaagtgacaatgggacctaagggccgcaatgtggttattgagcaaagctttggtgcaccgaaagtcacaaaggatggtgtgactgtagcaaagagcattgaattt

SEQ ID NO: 272251 - DNA, 648 bp, Zea mays
atcaagttccacaaaatcgcatctcatccgcttcgaccccaccgaggacccccttctttcctcccactcccatctgctctcctcgccgccacctgcgccgtcagagcacggagcagtccgcgaccacgctttcgctgccgctctccgacaggcgacggagccgcagctccagtcgcagtcggctcccctgaattcgggctcgccaaataccctccaatcgtctgcgtccgtcgtccgggacttccggtgcaactgaatccggcaccacctgtgccgcctgtcatggcacttggaagaggagggaggagggactcaagaggttaaggtaccgtatttatagatttggctgaagaaaactggttgttgctattatgaagactaagacgagtaggagcttacagaagtctgggagaggtaaccatgtccaaggagaagggccaaactgggttcttgttgctggcggggttttgcttagcacgctttcagtcaaggttgtgtgcaaactaaagcagttgttagacgggaagcagcaaaataatacttccgaagctaaaggaaggcctgaagcatgcaagctgcattcagatctctaccggttcagtgaccaaactggctgctactactgtatgtcacggcttgcaaattggt

SEQ ID NO: 272252 - DNA, 447 bp, Zea mays
gttttcctcgcccctcgcccaggcacagccgcacagcaagcatagccgccaccgccagtcgccactgctcagctcggcgctccatggcgtgcccccaaattccgtgacggcgtgactcgtcttcctcctctcctctctgccgggctgcacgtgcagaccacggacggacacactgcccccaaggccccaatccaagtaagcagctgctgtcgaagtgtacatgagcaatggtttgtgttgggtccaaggcaattagacccaaggggagcacaataaatggcttgggagatggagctttagacgatagctcacacaagaagaggacaaggaaggatacgagcgagaaacacgggaaagggggtcacagctcaagtaaaggaccttctgtagggaaacctcggcatgtgaaggatatgaagcagaggaaagatgatgggaagaaaggga

SEQ ID NO: 272253 - DNA, 811 bp, Zea mays
atctttagtttttgtattcagccgggaccagaattcaggccagcaatgtctcaaatcgtccaagacctagctaggattgtaggtgctagtggtgcggtatcagagtgacagataaagggggaacagtaaacatctagcttgactgtatgcacttgtggagacgccagaacgtttgtttcctttatctaaaaaaaggtaaaacatctagcctcagtcgtgtggccagtgaagattcatacatcctcagcgcagtgccaggggcactctcagtatttatgttggacgatattgcggctagtgtacatgccattttggagccccatttgcttctggaaaggtgtagtggtactgtggtagtatggcacaaccagtgagatatggcttctcattgttgctagcagatattcctgagctcctctagacatgataatttcacctgcaggcagtgtatctcttgtaactaattccaattttttattactttattattacattatagctagttatgtcaaatatggtgcttttagcttgtcttgagacctatgtttctcctgggaaaagaactggcttgctgattctttgcagaggcaaagcaacctttttctgacctgtacatgaagattctcctccttgaagcgaaagcacctctgctaggtatgcgtggtgtgcttggttcctgacttttcttcgtgtggtttcttcaagatgtagaataagttatgacagtgttcaactatgctgattggggattagataaacttttgtattgatccgttcttacctgatagatggccccctgtggttgattgcc

SEQ ID NO: 272254 - DNA, 504 bp, Zea mays
  unsure (1)..(504): unsure at all n locations
cgacaccacgcgtcctgatccatctatccgaggagtattgtttagtgatactattgtcatgttttgggacatgatcaatcggggtatggagnccccaccagaattcaggccagcaatgtctcaaatcgtccaagacctagctaggattgtaggtgctagtagtgaggtatcagagtgacaaataaaggaggaacagtaaaacatctagcttgccagtggcgtggccagcgaaagatcctctagatccatagcgcagtgccaggggcactctatctatcagcatttatattggacgagattgcggctagtgtacatgccattttggagcctcatttacttctggaaagatgtagactggtagtatggcacaaccagtgagatatggcttctcattgttgccgagcagattcatgtgctctagacatgatagtttcacctgtaggcagtatttcttgtaactaattctaatttttattactttattacattatggctagctatgtt

SEQ ID NO: 272255 - DNA, 462 bp, Zea mays
gttctagatcgcgagcggccgcccttttttgtttttttttattttttttttttaaatcagagacgttaccgagcaacatagaaaatgagattctgtcgatacagctcgacctccaaaccctacacatatcctgaaaaaagcaacgaaccggtgcccctcccccaaccacaagtacaggggcagttctagccttcaaatttacaggattacattggggaaaaaaacataagaaacgaacattaaagactgacagttaacacattgggtccgggacaatccatgatctaagatttctaggtaatgttcaaccaatgtacacggcaccattggcgctgagtgccagaagctccaaattgcggcgcggctcggttgctgaatcatcagtgagttcctagcagatttgtccaagagctaaatatgtatccacagttgtcaagacgatttggttctcttgtgtcgagc

SEQ ID NO: 272256 - DNA, 486 bp, Zea mays
agggctcctctgtttcctttcgtcaccgtcctcgccgttgtgttcccctctcagtctcggggcttcttctcgcgggcacctccggctgcttcctttgccaccgcagcaccagcgctgtccatggagcccccgccgctctcctcgttgcaggaggagggggaggaggggcctaccgtcgaggactcgtccgtcttctccgccgccgttgtgccgcctcgccccgccacgcacagccactcgctccacaagtacgcgccgctggactggtccgcctacttcgacgaggagcgccgcgtagccatccccgacaccgacaacgttttcaatgcgtacacgaccggatcggaggggcccgtcgtgttctgcctgcacggaggcggttattcggggctttcatttgctctagcagcaagtcaaatgaaggacaaggctcgtgttgttgccatggatctaagggggcatggaaaatcaacaacgaatgatgat

SEQ ID NO: 272257 - DNA, 334 bp, Zea mays
cgattattttctgaatatccttcgcaagttgatagagtcattgaattaagcttggactatttaacttctttgtttggcctctggctgaaatacgttgaattcttgttaaggatagtcttgggcactggaaacgctctgaactcccgtggcgatttggtccgtcagatatttgataaagaaattgataaccaccatgaggagaagctattgatatgtcaaatctgctgttcaaacattcagaaaacttctgcattcaaaatgccagatggaagcaggagcagagactaaactgttcctgcagaattggagggagatatttctaaagcagctcaca

SEQ ID NO: 272258 - DNA, 356 bp, Zea mays
tgttgttgatgtcgacaacacgttcatggggggtgcggataacattggcgatgagcatgtggtcggtgacaacctcgccaatgaccatgttctgccatgttcttgaatttgcggtagtagtccatgttggaggttgccttggacgaagttcgaggtggaagcatcgaggtaaggggcaccctgcttgcggttggcaatgaattggttttcgagagcgagtcaaatggcacgagcagtagtactgtgctcagacgatatcctcgggactgctagagatggtgtcgtggaggcacgttgaggacaatgcagtccatgcgtgcccaacccggtatgatgttgtcagtgttggtgtcaag

SEQ ID NO: 272259 - DNA, 424 bp, Zea mays
cccattcccatccgagctgcagcgctcgacgacggggagaatagcgtggcgtgggcggcgccatgaagtacagcaaggaagataagcccgagagggcgggcggcgccggcgcagggtccagggcggtgccggtggcgctcgtcgtcgtcgtgctctgcgccttctccttctacctgggcggcatctacagcacgggacggagcctgctggactccatccagccggcgccgacggctctcctcgccctcggcgccgccacgacgacccgccgtccctccgacgacggccaggctcggccggcactggcgtccacggccgccgtggcgttccccgagtgccccgccgattaccaggactacaccccctgcaccgaccccaagcgctggcggaggtacggcaactaccgcctcagcttcatggagcg

SEQ ID NO: 272260 - DNA, 659 bp, Zea mays
tgaccctgagatctttgagcagcggtaccctgcccttctgcacacatttagcatcagggagaacagtggaggttctggtttacacagaggtggtgatggccttgtaagggagattgagttccggcggcctattgttgtgagcgttctatctgagagacgggtgcatgctcccaggggactcaaaggaggacgagatggagatcgtggtgcaaactatttagtcagagaagatggtagaaagatttaccttggaggaaagaacactgtaacggtcagtgctggtgatatccttcagattttcacgcccggtggcggtggctttggctgtccttgatggcacttcctgcagacgcggaccttcctccatttgtttcctacctttgtacaccagtagctctatttagatcgcgattaaaataaaacgtaataaaaccgccaacaactggagattccttatgctattgttgctccccgaggcattggatccgaatgcagcatgaatggtgctattgtttatcagatatcatttatgtgaaaccagcaatcccaaaattggtgatgaatgatgcttgctctttcttcttgttttgatattagtcggaaattgccacgctaatcttttatcgtttatataaacatgccctcgtatgccttctcat

SEQ ID NO: 272261 - DNA, 556 bp, Zea mays
aagccaaccagcacaaaaaggagcacaaagctctctctccctcccccctctctctctctctctcctgttccccgcgagagtcgctcaaggccgcggcgaggagaagcggcagcgcgtcacctctccaatggcatccccgtccctcctccgtgcaacctgtgcgcttctcgagtgctgaggctccctgtccctaagacaagcttgcgcgcgcgatggagggtttttcgagggacttgctgtgcgggattggcaagggggacgcgccgccaccggagaagaggccggggcagctgcgggaggagatggaggaggtggagcttagcctcgggctgtcgcttggcggccgattcgggctcgacaggaaggggagcaagctcccccggtcgtcgtccgtggcggccatgctgacaacgccggtggaggtgccggcgccgccctccctctcgcgggcgagctcgctgccggtccaggcggaggcgtcggaagttgagaggaagcaggggctggatggatggggttcttgccgtgagggcgctggtttcggtgtgcaacacgc

SEQ ID NO: 272262 - DNA, 647 bp, Zea mays
cgactcgatccgcagcaagctaagcgcaaccgaccagctacgcaaccatggctttcgcttcctcgaatgccaagcagagcctctacccggatgtggaccagtcccaccctgatctcaatacccctttcttctccgcacccaccacctccacctgcgccggcgccggcgccgccacgggcaactccctctaccccaccgtcgaccccaacgagctcgcacagaacctcttccccgagacggtcgaagaggacgcggcaccgccaccgcccaccacagaggagaccatcatcgctgtccccggggcgcagctccacctcatcgaccccgaccgcagcgtcgacctcggcgctggcacgctctccatcgtgcgcctccgccagggggaccactccgtcgccgtcctcgcgcgcctgatccacgagaagtcccaccgccgccgcggcctcttccgcttgttcagcagcgggcggtctgacgctggcgccgagcaggagcccgtccagtggccgctggcccgcgatgtcgcggcggtcaagctcgaccccgcgcactacttcttctcgctccatgtcccacacacggaccacccggacgacaaggatgacgcggacggtgccgaagcggacgcggaggctgcgctgagctac

SEQ ID NO: 272263 - DNA, 539 bp, Zea mays
tcgagcacaagatttcgcgacgcccatcggcactagctagctagctagcaggacggcggcgatgagctccaccaccacaaccacaacacgtcttctcgtcatcccgcttgtctacttgatgctcgttgccagtgccagccatagtgccctcagctccgcttctctcttcttcgatgtcgacttctccaacgcctccacgttcagcctcgcggacttcacgaccgccggcgacgccgcgttccacggccaacgcttcgacctcacggcgaacgcgtacagagcggggatctccgacagcgtcggccgggttgcgtacgcgcacccggtgcctcttcgggacaacgccacgggccaggtggccagtttcaccacatccttcaccttcgccatcaacatcaccgacatgaacaacatgggggacggcatggccttcttcctcggcaattacccctcgggtctgccgcccaggtcggagggaggcgcactcggcctctgcaccgactactgcgtcaaccggaccgctggcagggacaggttcg

SEQ ID NO: 272264 - DNA, 1068 bp, Zea mays
tccacctcgcaatgcgggaacaacggcaaaatgctagctagtgtagcgaaattccaatcccgtcgacccatgacttggcaagcaccaggatcaacgagtcaggcactggtcggctgcacgaagtgctgcgccacgatgcggcgctggatctttccggtggccgtcttgggcaggtcgtccgtgatgaacaccttcttgggcaccttgaacgacgccaggttccgccggcagtgcgccagcacctcctcctcccgcagcgccgacccgtcccgcgggatcaccgcacagttgatctcctccccgtacttgtcgtcaggcaccctcgaacgacaccgcctgcgccacaccggggaggcccagcagcacggcgtccacctcgatcggggagatcttctccccgccgcggttgatgagctccttgatgcgccccaccagccggacatacccttggtcgtccaccacgccgatgtcccccgtgtggaaccacccgaaccggaacgccgcctcgttcgcctctgggttccccttgtaacccgccgtcacgttgtccccgcggacgcacacctccccggggctccccgccgccacgagccgcccctcctcgtccagcaccgccagctcctgccccaccgcgcgccccactgacccgggcttccgtggcccgtcctccggcagcgggtttgacgtcatcaggtgcgacgcctccgtcatcgcgtacgcctccagcaccggcgcgctgaacgccgcctccagccgctccaggatcgccggcgccagcgacgcgctgcagctgcggatgaatcggagcgccgggtacgcctccggccgcgacgcgtgccggtccaggatgatctggtggatcgtcggcaccgccgtgtaccaggtggcgcccgacgcccgcatgtcggcccagaacgtggacgccgagaaccgccccgccgccggcagcgccacggacgcgcccgaagccagcgagctcagcagggcgcagaggagcccgtccacctcgaacagcggcagcaccaccaccgtggcgtccgtctcggcgaggcggtacacggaccggat

SEQ ID NO: 272265 - DNA, 415 bp, Zea mays
  unsure (1)..(415): unsure at all n locations
agcggactagcttctgcagggtaccactagtaccagtaacctctggggattttactgtgagaagagggattgccattggactggactggagcttgggggggagccagaagcagaaagaagcccaggattagcgtgtggcggattgcgtggctatttcgggaggcgagagaacgagacgcgtggggcctaggccggcggaggcggcggctccttggaccggccagtgatggcgccgtggagcggcttctggggcggcaagcccggcggcgacgcctaccggggcacgccggtggtggtcaagatggagaaccccaactggtccatctccgagatctcctcgccggaggacgacgacgaggacatcttggccgncgncgncgncgccggccggcgcaacaaggggggccgcaccaag

SEQ ID NO: 272266 - DNA, 379 bp, Zea mays
gcacaacgtggggacgctggcgcggagcgcgacggcgttcggcgtcgcggaggtggtcgtcgtcggccgccgcgatgtcagcgcctttggcagccatggcgccacctcgcaccttcgcttccgtcacttcgtctctctcgcgctcgcccgcgcctacctcaaggatgagagaggatgtgacatttgcggcgtggaaatcaccgacgacgcgcagccggtgaccgcccacccgttccgtcggagcactgcgttcctcttcggcaatgagggtactggactttcacaaaaagagtgcgagatctgtgacttctttgtctacatccctcagtatggtggtggaactgcatctctcaacgttactgttgcagcttcaattgtt

SEQ ID NO: 272267 - DNA, 1129 bp, Zea mays
aacaaggacaaatccaatattcagaaattgccttccagatctgatcgcctatcattttattccaagagtttggagataataggagttgcaccagagaggtttgagaagaataaccagttctggaagaaccaggttcacaagtattggtcatttcttcatgttgaaaagactagcattcgaaacgtcatggacatgaatgctaattatggtggatttgctgcagcactaagcagtgaccctgtctggattatgaatatagtaccctataccatgatgaacacattgccagttatctatgaccgtgggttactcggttcttaccatgactggtgtgagccattctcaacatatcctagatcctatgacttgttgcatgctttccacctcttttctcattataaacgccgcaaggaagattgtttgttggaggatatcatgttagaaatggatcgcatcattcgaccacagggttttatcattattagagacgagaatgacactctctcaagaatcatcaatctagcaccgaagttcctttgggatgttaccacgcacatgttggaaaatgaggaaagcgggacagatcaagttctgttttgcaggaagatattctgggctattgtttgagttatacctgggtggaaatttgggaagctgccatattttatcctacttttggttgccctttgtatcagtgacagagcagagcgtaaggagagctgtttggcatgatagatgttccaatgaaacataatatttcattgcacgttctctgcagttgacagtagtgcattgttgagaaggcatatggtacggtggtgcggttgacagggttatccagaaactagctcggataatttttgcttttgagctgtactatttgtctacgaaggacatgggtgagccggtaaggtgtagtcttactgacagtgtttgtagtttctctcataatgaatagccgttaattcttttgttatcttattcactaatggctgattaggtttaggttctcaagttctcaacaacatgttggtagtgctgtttctgttgttccatctggggagcatctgtagtactataaaccttatgtaaggtactgtttccagccaatgccgaggggcatttgttt

SEQ ID NO: 272268 - DNA, 512 bp, Zea mays
cccacgcgtccgctcgtgcgttgtctctctctctctgtctctctctctctcgtccccctctcgctctcagacgaccggtgggccgccgccgccgccctaagccaggtgctgaggctcttgttggtctcttcgccagcgaggagcacccagcaggacaaggcaacaggctgttggaatatggaccaacaaggcatgcatgaccatgaaggggtccacgttgttggatttgaagtcccgccttcaccggattccagctacgacaaccctgttcctgggaatgaagacgaaggccgggagcccccactgatgccacctcatctgcagcacacgctgctgagcttcccaccaagccaagacgagtcgagcccgctgccccagccccagaccgtggttctgaaccacctttacatcgagaaagaagacacgaggtccatggttgctctggggatcacgcactcgttcaaggccaagttcgtgaccgtcgtgctttacaagccagtgctgaggccgta

SEQ ID NO: 272269 - DNA, 774 bp, Zea mays
gttctagatcgcgagcggccgccctttttttttttttttttaatgcataacatgtcctttcagttaagcatctgtgcaaatacaggttaccaactcatacatgatacataaccgctacagatctggcagttgcagcagatttccaactcagttcactaatgagaaaaaaatccactgcagttatacagatcctgatgcaaacatgagccccaaacgctgccggagaagctgtccgcccatcaatggagcagatgcgcttcataattttcatgcactcttcctatgaaatatgaatcattcaagtaaacggtcttcagtcactgcgatttcttcacctgagatctgaactcatgcctgggcttcagtcacgggtgattgtcttcttaattgtttatgctgagctgtcgcaaatggaattgcgagggtggggcacttgttaaggtttgaggtctcaaagcggccgttcaggattgtgataagagcattccttctatttattccaagcacaaggtttgaatacagatggagggggctgatgcttaaatcatgttctcattccattcatttgtacagtctgttgaatctatccatgtatcccattgtattgataccctaagcttccatcttcctcctcaccaatccagtgaagaaatcaaagctgttgccatctgggtgcaactcatagcttttgttatcctcaccaatagcatgtaagtacccagttggtgttaacccctggatggtgacgacactgcctgacttgttttcatgtgc

SEQ ID NO: 272270 - DNA, 988 bp, Zea mays
attgtgtgtgtgtgcagcacatataatccgctctctctcccccggtttctcttgtcttctggctgcggcgatggaccaagaaacctcacgggaaccccactccttgaggagccgtccagtgccgcattagtgggttccattcttctttggatcgctgctcgcgatcgcattgcccgcgtttcttttggccgtcttggttcgttcttgattcttggacgaggtgggatttggagagccaagggcggcgcggcagcggcgggtttctcggtcggactagattgtttccatcgagatggtgggcggcggagggcattcgtcgatggaccaccctggcgccaaggacctcgagcgcggcgagctgcgccgtggcgcgcctgagtttgcggacggcgacgatggagacggggaagaaagccagtacttctcggacgcggaggaccggtcgtggccgtcgcactcgcgccacgactccaccgcctacgaggactacgtctcgctgtgcgtgtccgcccgcgcgagctccgtcgacgccgacgccgatgccgacggcgaggccgtcagacaacactgcaggaagtcgtcgtgcgtgtcagagggctcgctggacgacgttgacctggaggccggactgagcgagatcatcaaggccagccctgagaaggccgaacagaactgtcgcatttgccaccttggcctggagagcacggcggccgagtccggtgccggcatcacgctcgactgctcctgcaagggggacttatcctacgcccacaagcagtgcgccgacacctggttcaagatcagaggcaacaaatctaaacttttggagttgcgaagggaatctcaaataaaaaattgtcgatcttaagtttcttcatcaaccagcattcatcaaacaaccgacatgctctaggaaggtggtgcactgctcctaccgctgcttcatgtccaacagcttcatgttcagctcccacgccagggcctccac

SEQ ID NO: 272271 - DNA, 659 bp, Zea mays
cttgttcaacctcaagaggtaatctggtggtccgttgcgcggaagttttgatctgctgctatggcctatatgagaatgggttaaccgttttgttagtgtcactggagtcgtagtagtagtatcttactatcagctggataatagactagatgaacatgtatggcacgtacctttactttctgaagttttcaatggtaataagagtcgtgaacacaaacatgaggtataattgagttcttgtctgatcttttgagttgcacctgatcttttgagttcttgtcttggttcgttcttgattcttggacgaggtgggatttggagagccaagggcggcgcggcagcagcgggtttctcggtcggactagattgtttccatcgagatggtgggcggcggagggcattcgtcgatggaccaccctggcgccaaggacctcgagcgcggcgagctgcgccgtggcgcgcctgagtttgcggacggcgacgatggagacggggaagaaagccagtacttctcggacgcggaggaccggtcgtggccgtcgcactcgcgccacgactccaccgcctacgaggactacgtctcgctgtgcgtgtccgcccgcgcgagctccgtcgacgccgacgccgatgccgacggcgaggccgtcagacatcactgc

SEQ ID NO: 272272 - DNA, 461 bp, Zea mays
cttttgagttcttgtcttggttcgttcttgattcttggacgaggtgggatttggagagccaagggcggcgcggcagcggcgggtttctcggtcggactagattgtttccatcgagatggtgccatggtgggcggcggagggcattcgtcgatggaccaccctggcgccaaggacgatggagacggggaagaaagccagtacttctcggacgcggaggaccggtcgtggccgtcgcactcgcgccacgactccaccgcctacgaggactacgtctcgctgtgcgtgtccgcccgcgcgagctccgtcgacgccgacgccgatgccgacggcgaggccgtcagacaacactgcaggaagtcgtcgtgcgtgtcagagggctcgctggacgacgttgacctggaggccggactgagcgagatcatcaaggccagccctgagaaggccgaacagaactgtcgcat

SEQ ID NO: 272273 - DNA, 478 bp, Zea mays
tttacaatttttccttttccacaagaacattgcacggcgatggcaaaaccttccgtcggaggatggcttccgccggcgctggagaaggcaaggagacggggacggctgccgggagcagcctccacagcaagactctcctcaagagccaaccactgtaccagtacatactggaatccaccgtcttcccacgcgagccggactgcctgcgggagctccgcgtcgccaccgccacccaccccatggcgggcatggctgcgtcgccggacgaggtgcagctgctgcagctcctgatcgagattcttggcgccaagaacgccatcgaggttggcgtcttcaccgggtactcgctgctcgccaccgccctcgccctccccgacgacggcaagattgtggccatcgacgttacccgcgagagctacgaccagattgggtcgctggtgatcgagaaggccggcgtggcgcacaagatcgacttccg

SEQ ID NO: 272274 - DNA, 321 bp, Zea mays
  unsure (1)..(321): unsure at all n locations
cctttctaccgacatcgacgccgacggcgatgtgcctccgcaagcgccagcgctcggcgagcagctnccgcctcaccgccttctgctcgccaccgtcccctcccgctcccccgtctacttccagctctcccaacccgcataccttccccaacgccgacgtcgtcctccgcctcttcctcaacccctcctcccccgacgacgtggacgtcaagcccgacatcgaccgccacctctccgcagccgtctcatccggaaccttcgtcgacctgcacgtgtcgtccgcgtccctcctccgctcccgctacttcgcagccctccttt

SEQ ID NO: 272275 - DNA, 289 bp, Zea mays
acgcacagtaagtaccagaaacaggagagggaggcggcaaagcttgtccagaaacagagtacttacaagctgttggtcaacgaggatgacaatactgacaaccagacactggcaagtcaaaagacctcaacaaatccatcatctaagagtcggaagcatttcaggaggaaagcagatcaagacagtgatggtgatgaagtagtggcaacagattctggaaggaatgtccgtcgacgaacagaagaggaggatgaagaaggtggcatccgcagttctgatgaagagaaag

SEQ ID NO: 272276 - DNA, 619 bp, Zea mays
ctggacgcccgcggaccggccgaattcccggtcgccccgcccccgtaggatacaaagatacccagtctcgtgcatctggtgaagcatgcaatgatggtcagtctcatggtgatgaaaatatgaaacttggtgaagcttacactgaactgcagctggcaccttcctctggtgaggaggccatgacatgtatgtgtagtgagctgcccagccaggaggtggaggctccaagcagtgaccctttggagaataatgaagaaacgaaaaatgaagctgctgctcaaggatcagtaaatgaggattctgctcctcgtgctgaaaatgcaaagattgatgaagctgacacagaacaggaactgcttccatctggtgaggccacggtagacgaatccagcgagctactcagccaagacgaaaaggtggctcgtaaagatgcaaagatggaagagtctgctgctgctgctgctgcacagagacagctaactactgaagttgctcatgcaagtgaaaacgcgaaacttggtgaagatggcacggagctgcaactgccaccaccttcaatggtagacatatctagggagcaactcagccaggaagtggaggttgcaagctctgggccttc

SEQ ID NO: 272277 - DNA, 2486 bp, Zea mays
ttgacgcgtgggctggcattgaggctgaaacagtgggtatccaagagtcagctcttactgattttgagggaacaaaaggaactggggatttgggtgacagaactaacagtcaactgcatgatgatgttcatgggacatcatgttccacgatagctcttgtatctgagaaagaaccttccgaagatcttaccaccggtagccattcagaagcatctaatttacttgctgctgtagaacaaactcaagaaactactgttgagaaccaagagatcatagatgcagtagtgtttatggatgcctgcaaggcagaacctgttggtgattttactattgctaaaggagctgaacagactgtagaaatggttcattatgttgataagcaatctgctgtattagactatgttgagacacagacaaaacgaacttcggtttgtggttctacgctaaatgaatcccctcaggctgcagggttggaagaagactgctctgtactgaagcatggtgatcctacttcatctgagcttcttactgtagcacctaatccaatcggtgaaacttctgttattcaagtggaaccagaggcaagaaactcagatggatactgcacaacagaggctggcagtgctttatctgaaactgtcatgggattggagccaaataaagaaactgcggttccaatgcaagagaatattggagaagctaatgataattttaataattgcgaagcacacaataattcggagattcatgcatttgaagtgtcgatggaaacgcagtcatcagaagtcaaggaagtatcttctattcagtctggtgcagcaaatttgagcacacagacaactgcactgcctgatgtaacaggacaaaccagtatggcatcgactggagaactagtatctacaaatgaacacatacacatgcaaggcactgaaatcaattcagagcaacaaacaaagatggtttcacctgctgaatcagcacctgctaatgatgaacacgtgcaagacctcgtgatgcttagttcagaacagcaaacaaagatggttttagctgcgagattgacgcattatgcgtccaggagactgcaattattgatcttgggggagcaagaggaacagttgacctgaatgacataagaacacaggttcctgcattacctggaagggatgtgctagatgtggaggcacatattttggagcaaaaaaaagcatcttcaccaggtgatgaaattaagggttcagaacaagcaaaaatcgaatcgattgcagagatcgaaacagtgggcgtcaaggagaatgtcattgctgatcataaggaaacaggtaacaacagtggcgtaagtatacatgcgcctctattagttgaatctggacaaaaggcatcacctggagttgaattgcgtggtattgaggttgatgctcatgttttggaacaagcaaagatggtttcagctctagaaccagactctactccagaagtttgtgctgacaagttagaaccttctggtgctgatgatgttggaatgattgttgtccaggaggctgcttctgttgatgatcacaatagagcacaaggtggtgaggctcattgttcagaacaaataaagatggcttcaattgcacaagcggtgtctagcatggctttagtaggatattcttcttcagaagactcaatggtggatgctgctgcccgagtaactgatgctgattttgtggatagtaaagcagctggtgtttatcgccaagaaactatgcctactcaaaccacctctaccctcccagagaacatggattctcctgcaactgctgctaccatggttgaatcgaagtttgctgcctcgtctgagcacgttgcaggacccgagccaattgatgaaacttctgttatgcaagtggaactggcaacaagcacaggggatggatgtgcagcagatggtcacaatcttgtttcatctgaaactgttgttgaagtgaagcttgctcaagaaattgttgttcctagtccaggtggtagcatagaagctaataatacttctaccatcagcgaagtatacaaagatacccagtctcgtgcatctggtgaagcatgcaatgatggtcagtctcatggtgatgaaaatatgaaacttggtgaagcttacactgaactgcagctggcaccttcctctggtgaggaggccatgacatgtatgtgtagtgagctgcccagccaggaggtggaggctccaagcagtgaccctttggagaataatgaagaaacgaaaaatgaagctgctgctcaaggatcagtaaatgaggattctgctcctcgtgctgaaaatgcaaagattgatgaagctgacacagaacaggaactgcttccatctggtgaggccacggtagacgaatccagcgagctactcagccaagacgaaaaggtggctcgtaaagatgcacagatggaagagtctgctgctgctgctgctgcacagagacagctaactactg

SEQ ID NO: 272278 - DNA, 556 bp, Zea mays
ctcgcgggtcgacgcgagttccgactccctcactcatctccgtccgtccgccgcaccgtcgccgagcgccgctccgcgccggagacgtcctgtttttttgccgcctacgagcgctgtccctcttttctttccgcggctctgccccaacttctgcatccgaatctcccacgaagttgtcacggcgatggcagcgaccggcggcgtttcaactgacgatatcccgatcctgcaggcagagaacctcaccagcaacgtcaagtccgtccactacagtcgaacattcttgtcgatcattggtggagttgttgctggaatctggggattcacaggcttgacgggatttgtcttctactttctgataatgatggttgcatctatcgggctcttagcaaagtcaaagttttcagtgcagacatacttcgatagttggaccaggatttcaattgaaggagtttttggtggccttatgtcattcgtgctggtctggacatttgcttatgacattggtcatatcttctgatggacgtagaaagagcttccctccaagaaaaatgga

SEQ ID NO: 272279 - DNA, 308 bp, Zea mays
cgaccttttctcgtttttttctctcgctagcaccttgcctccttgcgatttgcgagcgccgcatcgacccccaccgccgacgaacgccgcgccgccgacgtcctgccttctcctcgccggcgagcgccgttccgctgtaccctccgtgattccgccccaacctctgcgtccgaatctcccgcgaaacagtcacggcgatggcggcggccggtggcgtttcaactgacgatgtcccgatcctgcaggcagagaacctcaccagcaacgtcaagtccgtctactacagtcgaacattcttgtcaatcatt

SEQ ID NO: 272280 - DNA, 1415 bp, Zea mays
atcgcggatcctccggatccgcgccccctcgcttagcctaaaccgcggggcagctagtctcgccaccgcaggccgcaccggtcatcacaccggagcgcacgcggggagcccccgtagagttccggggcgaccaggccaactaacgccatgaaggaggaaggcggcggcggggacgcggggttcgtgcgggcggaccagatcgacctcaagagcctggacgagcagctggagcgccatctcacccgcgcctggaccatggagaagcgcaaggaggaggcctccgccggcgctggcgccggcgccaggcagcaccagcagtcccggcgcccgcggagggaggactgggagatcgaccccgccaagcttgtcgtcaagggcgtcatcgcccgcggcacctttggcaccgtccaccgcggcatctacgacgctcacgacgtcgcagtgaaactacttgattggggagaggatgggcatagatcagaacgagacattgcagcactaagagcagctttttcacaagaggtctctgtttggcataagcttgaccatccaaatgtaaccaagtttattggagctataatgggtgcaagggatctgaatattcaaacggaaaacggccacattggcatgccaactaatatctgctgtgtcgttgtggagtaccttcctggtggtgcactaaaatcatttctgataaagaacaggagaaagaagctagcttttaaggtcgttgttcaaatcgctcttgaccttgccaggggattaagctatctccattccaagaagattgtgcaccgtgatgtgaagactgaaaatatgcttcttgacaaaacgagaaccgtgaagatcgctgattttggtgttgctcgccttgaagcttcaaatcccagtgacatgaccggcgaaactggaacgcttggttacatggcacctgagggtctcaatggaaatccctacaacaggaaatgcgatgtttacagcttcgggatctgtttgtgggagatatactgctgtgatatgccatatcctgacttgagcttttctgaggtcacgtctgcggttgtccgtcagaacctgaggccggagataccacgctgctgcccgagctctctatcgaacgtgatgaagcgctgctgggacgccaaccccgacaagcgacctgagatggccgaggcggtgtccatgctggaggcgatcgacacgtcgaagggtggaggcatgatccctgtggaccaccggccaggatgccttgcgtgcttccggcagtacagaggtccatgacagataggtggaaacctgttggagctgcggcctctagatctcgtggatgccgatcgatcgcgtgttgttttctggggaagccaactggttaatggagctagcccgccttcccggctcgtgtaaatcctctgtcc

SEQ ID NO: 272281 - DNA, 818 bp, Zea mays
ttcttgtacagtttattggagctataatgggtgcaagggatctgaatattcaaacggaaaacggccacattggcatgccaactaatatctgctgtgtcgttgtggagtaccttcctggtggtgcactaaaatcatttctgataaagaacaggagaaagaagctagcttttaaggtcgttgttcaaatcgctcttgacctcgccagggggttagtattttactggatcatcctcggtctccctaaatctttatcgtaccgtttcttgttggataattattgtctgcattgactcttcaatcttcgttagattaagctatctccattccaagaagattgtgcaccgtgatgtgaagactgaaaatatgcttcttgacaaaacgagaactgtgaagatcgctgattttggtgttgctcgccttgaagcttcaaatcccagtgacatgacgggcgatactggaacgcttggttacatggcacctgaggtaccctttcctgggcagtgacagacactcaacccctcctccactcctagctgctcttttatctcgtggtgtcatcacttttagctagctctggcacaataatagtaataaaaagacatccttgcatgaagcacttgtattagtctatgttatgtgccttgcaggttctcaatggaaatccctacaacaggaaatgcgatgtttacagcttcgggatctggttgtgggagatatactgctgtgatatgccatatcctgacttaagcttctctgaggtcacgtctgcggttgttcgtcagaacctgaggccggagataccacgcttgttgccgagc

SEQ ID NO: 272282 - DNA, 402 bp, Zea mays
tttccctgattgagtataaacttgctgggaattcctggtcatcatgtcagaacagaaatggggtcggcctagtaactccagactctactgctgtttcctgtgggtagatgctgatcttcaagtcctggacagttatgtcaacaaaagggtcgattgcatgatggatggtggtctgctggacgaagtatgcagcatatatgatgcggatgctgtctatacccaggggctgcggcaggccattggggttcgtgagtttgatgagtttttcagagcatatttacccagaaaagaatctggtgagggttcctgtgcaagcctgttaggtatgcatgacgatcagcttaagagcttgcatgacgaagctgtttcccagctgaaggcaaacactcgtagactagttcg

SEQ ID NO: 272283 - DNA, 636 bp, Zea mays
cgggcatcggggtcggaggatctcactgttttcttcctgctgcctgctgcatttttcgcagggtgtgggagctgagttgggaggaggactgctgctgcagccatgaaggccctcattctcgtcggaggcttcggcacccgcctgcgcccgctcacgctcagcgtgcccaagccgctcgtggatttcggcaacaagcccatgatcctgcaccagatcgaggctctgaaggaagttggtgttacagaggttgtcctggccatcaattaccagcctgaggtcatgctcaactttctcaaggacttcgagagcaagcttggcatcaagatcacctgctcgcaggagacggagcccctcgggaccgcaggcccgctggccctggcccgcgacaagctcgccgacggatccggcgaccctttcttcgtgctcaacagcgacgtgatcagcgagtacccgttcgccgagctcattgagttccacagggcccacggcggcgaggccacgatcatggtgaccaaggtcgacgagccgttcaagtacggcgtggtggtcatggaggagggcaccggcaaggtggagcggttcgtggagaagcccaaggcgttcgtgggcaacaagatcaacgccggcatttacctg

SEQ ID NO: 272284 - DNA, 579 bp, Zea mays
tcgtggacgcgtgggcggacgcgtgggcgaagccagtacattaaacacttcgtcaaccccaaccgtagtagtgctcaaggggagacggaggaggaggaggaagcggtataaagccgcggcgtcgttcgtcggcagccgcgtcctgagtcgctcgcagtcgcagccgacgccttttcctcctccttgtcttcttcctcgctgcagctctcgccgccgaggtcctgggcgccgtcgacaaaccacctccctcccccgtctctcgtcgtctcggaaggaacggccgcccgtcgcgccaaggattcaagggtgtgggagctgagttgggaggaggactgctgctgcagccatgaaggccctcattctcgtcggaggcttcggcacccgcctgcgcccgctcacgctcagcgtccccaagccgctcgtggatttcggcaacaagcccatgatcctgcaccatatcgaggctctgaaggaagttggtgttacagaggttgtcctggccatcaatttacagcctgaggtcatgctcaactttctcaaggacttcgagagcaagcttggcatcaagattcactgctc

SEQ ID NO: 272285 - DNA, 696 bp, Zea mays
gaagtagggaagtaatactttctgtaaatgttgtgagctgtgaactttcaagagtgagtccccaggattcagattattcatggaatgttcttgcagttgataagaacaacattcttgcagtttccagcagccttattacactccctcagatgtactatgggattaaggtttctcagactgaaagcaattgggagtggcagggagtttcaactcctttcccaaagccatctgataagatcagctccgtactagcagagcataagttcagcatactcaaaatcccaattagcaacccttctgatgaacttgccaatggggctaagcttccttttgaggctatttttgtgtcgcataaggattctgcaggtaatccaacaatcggtggtccttcatggtggaccacactcagtttatccatcaaggtattccaaatccttggcttttcttttttcgcagggatataatcttcttggtgtgaactacaggggttcattaggctttggggaagaagcactgcaatcccttcctggcaatattggttctcaggatggcaatgatgtattgacggcattggaccttgttataaagagaggactaatagatccatccagagttgccgtagttggaggttcacatggaggtttcctgacaacacatttgattggccaggctccagacacatttgttgcagcagct

SEQ ID NO: 272286 - DNA, 313 bp, Zea mays
cggacgcgtggcggacgcgtcggcgagaaacagggctgcggctgttgcttcttccacctctccggccatccggcggtccatcgttccgtgccggcggcctcccctcctacgcccctgccgattcttcaatcttcaccaacgtctgcgcgtacaggctagcagtcggcacggcttcctcagatctgccggacgacttgctgttcgtcaccgactcaccagcaaccaacgtcagccatcagccggcagcaggggaagctgggcggagggtcattgcggcacggcgtccaggcgtacagaaggcaccagcaacagc

SEQ ID NO: 272287 - DNA, 316 bp, Zea mays
cggacgcgtggccccagaagtcgactcctgcccctgcctcgccgccgccgttgcttaccaacctcccgccatggcgacatcgccgttgccgacggcgaccgcctctgcctcgaagaagcggcgttccagaggcgggacgctagccctagatgaggtgaagaagctgggaaccgagctcctttcctctcgctcccacctcaaccacgcccccgccctcctcgctctcctctctcccaccgcgccgctcgacctcgctctcgaggcgctcatttcgctccaggccttcttcggaccacttaatcccttcattcccttc

SEQ ID NO: 272288 - DNA, 1157 bp, Zea mays
atcccgtggaagatctggataaacctgcaagctttgatggcaaagctgccaatagtactgctgatgacgatagtttattcgagcaatcaagtgcttttgaccaggctccaaaatcagatcctttgtttacctccgaattcaatggtcatgccaaggacacaaaaccgccaagcgcagtccgcgattcgagtcctctacaccattcaatggatagaaattcagcgcgtcaatcttctatggaagactttgataatgtcatgcccaagtcacagtctgcaaggtattctgacgttcgtggtaatgatacggaggatcagtcaccaagatctactgaatctgaagatgatatatggcttacagtttccgagattccccttttcacagcaccaactattgctccaccaccctccagatcaccacctcttctcaaacgaaagccactgagagcaaatgcaaaggagaatgggcatgctcgtcagtctaccccaaatcagaaccattacacagatttgccaaagcaaccggaggtttctcaaatagatgacctggaaggcttttccatgggcaaacctcagatgcctgcttatggcaacactgtttttgatgaggactatgaaagaagctcatcagatactgaagagaaagacaggcaagaaagattggagaaagaaagagaaatgaagctgagggaggagatggagagggagcagagaaggcttgaaaaggagagggagttggaactacagtgagaaagagagagagaacgacaggcagtggagagggctacaaaggaggcacgtgagagagcatctgctgaagctcgtgcaaaagctgaaagagaggcccgccagcgttcacagcgtgctgctgtgcaaagggctcaacaggaagcccgtgagagggctgcagttgaggccaaagaaagagcagctagggtagctgcagaagcaagggagagagctgctgcagaagcaaaggagagggctgctgctgaagccaacgagaacgcagcagcctgaagccaaggagagggagagggctgctgctcgggagagggcagccacagaaacagctgctgctgagagagctcagcacgaagccaggaagagagctgtaccagctgcagtggaaagagctgctactgaggctcgagaaag

SEQ ID NO: 272289 - DNA, 769 bp, Zea mays
ggaaatcagaaggttggcgagcaacaattgtgctgagtttctagagagctaagttcttgctgacaaggtacacttagacttaggtgggcatgaagtgaattgaaacatcattccagacaaggtttttcttcctatacttcctgtcaaattaagcttgtagtttgatatgatctgaactctatgcctgcctttctattcttttcattgattaactgtttggatccattaaaagtcaatgaaacatgtgattcgaagcggtttcgaaaggtgatgcaggggtgaagtttgcatagcattgataggccggaaatcggatttgaggacccaatgatatgccgctgcatggaaagtttcatcatttcatgcctgtggtcggtttgctcgtgaagattgcttttgtttgctgtggaagcgggtgcaagtattacacagcagcaatatcgggactgttgtgaaggatgaagttgagagtcaacatctgagaaccatggagctcaccatacgccacaaaggaactaaagctgctagtttaggcatggttaagagagtcagtgctggtcctttaggttaaataaaaactttgcggggccgcacggtgtgcagaaaaggttgagtctagggcactaggctgatggtctatgtatgtgatgtacgcagataggcagatacctatgcgttcaaagtagcgcatcaaattttggccccattattttcactgcagtatcatgatgtgatgttgatagttaaaaaaaaaaaaaaaaaaaaatat

SEQ ID NO: 272290 - DNA, 450 bp, Zea mays
cctggacatttgtccaacgtaaagctttgtttttggattcagacattcatctatgggcagtcaattgttggcatttgttcagacttgccgtgactgttagagaccaatgcaggagtgtccgcttgtgattgcaggaagctgaacgcagcttttttttcattttcattttgtaggcaagatttcagacttcagcaacgcggatgttgcagttgaccagtaccaccgtttccaggaggacgtgcagcttatggcggacatgggaatggatgcgtatcgcttctctattggctggtcaagaattctttcaaatggtacgggccaagtcaatcaagccggcatcgaccactacaacaaagtgatcaatgtactactatctaaagggattcaggcatatgttaccctgtaccactgggaccttccccaggcccttgaagacaagtacaacggatg

SEQ ID NO: 272291 - DNA, 1260 bp, Zea mays
cccacgcgtccgcccacgcgtccgcggacgcgtgggtccactctctcactctctctctaatcacactttcgacactgatcggctagtgtccgactcgtcacaattttagcgagagagagagagagagaccgagcgagcgagcgagcgagggagaggatgggttccacttccacggggccggtgagcgggttcgcggcgccggagcgggacatcgacgatctgccgcggaacgacgccaactacacggcgctcacgccgctctggttcctcgagcgcgcggcgctggcgcatccgggcagggcctccgtcgtgcacggccccgtgcgctacacctgggctgacacctatcgccgctgccgccgcctcgcatccgccctcgcgcgcctatccgtcggccacggaagcacggttgctgtgatagctcctaatgtcccagccgtctatgaagctcacttcggtgtcccaatgtcaggagctgttgtgaactgcgtcaatattcggctaaacgccgagacaatagcattcctccttgaacactccgtggcagaagttgtgatggtggaccaagaattcttcaccctagccgaagaatcgctgaaaataattggcaagaagaagacatcggctttcaggcggcctccaatcttgatcgtcatcggcgacccgacctgtgatcccaagtctctacagcatgctctgggaaagggagctatagagtatgaagagtttctgaaaaccggtgacccggagttcagttggaagccaccgaaggacgaatggcagagcatcgccctaggctacacttctgggactacttccagcccaaagggcgtcgtgttgcatcaccgcggtgcttatctcatggcactcagcgttgccatcgtgtgggggatgcctgaaggggctgtctacctgtggactctgcccatgttccattgcaatggttggtgctacacttgggcgctggcagcgttctgcggaacaagcatatgtcttcgccaggtgagcacaaaagctatatacgaaggcatcaccaagcaaggagtgacgcacttctgtgccgcacctgtcgtccttaacaacctgatcaacgctccggcaagcgagaccttcctgccgctgccccgcgtcgtcaatgtcaacgtggccggagccgcccccacgccgtccctgctgggcgcgctgtccatccgtgggtttcgcgttacgcacacgtacggcctgtcagagacgtacggtccctcgacggtgtgcgcgtgg

SEQ ID NO: 272292 - DNA, 458 bp, Zea mays
  unsure (1)..(458): unsure at all n locations
tcggtcttactctctctctaatcacactttcgacactgatcggtactctagtgtccgactcgtcacaattttagcgagaacgagcgagcgagcgagggagaggatgggttccacaggaccggcgagcgggttcgcggcgccggagcgggacatcgacgatctgccgcggaacgaccccaactacacggcgctcacgccgctctggttcctcgagcgcgcggcgctggcgcatccgggcagggcctccgtcgtgcacggccccgtgcgctacacctgggctgacacctatcgccgctgccgccgcctcgcatccgccctcgcgcgcctatccgtcggccacggaagcacggttgctgtgatagctcctaatgtcccggctgtctatgaagctcacttcggtgtcccaatgtcaggagctgntgtgaactgcgtcaatattcggctaaacgccgagacaa

SEQ ID NO: 272293 - DNA, 585 bp, Zea mays
aaggccaaggagttgtcgtccttgggtttcaccattgtctggtcaccaccaccaactgattctgtgtcacctgaaggatacatgccaagggatctatataatctaaactcacgatatgggtccatggatgagctgaaggaacttgtgaagattttccatgaagctggtatcaagggtcttggcgatgctgttctaaatcataggtgtgctcagtttcagaacaacaatggtgtctggaatatatttggtggtcgtatgaactgggatgatcgagcagttgttgctgatgatccacatttccagggaagaggaaacaagagcagtggagataatttccatgcagcaccaaacattgatcactcccaagagtttgtgaggaatgatcctaaaagaatggctttgctggatgagaaaggaagtcggcttccatggatggagactcgactctgttcgtggtttctggggtggatatgtcaaggactatctggaagcaagtgaaccatactctgcagtaggagagtactgggacttcctcagttatacttatggtgaaaaatgactacatcaagatgccccacagcagag

SEQ ID NO: 272294 - DNA, 812 bp, Zea mays
tgaaatgagatgcaggtatagacaaaagcttcctatgccgtggtctgccataaccaatcctttgggcacatttgtcatatggatgcttcttgggtatagcattgctgctgcatattctcgatatgacaaagttactgaagattgcagaaagatggaagagctaaaaacgcaggcagaagctgctgatgttgcaaaatctcagttcctggcaactgtgtcccatgagttcagaacacctatgaatggcgtccttggaatgctggatatgcttttaggaacagatctaactatgacacagaaggattatgctcaaactgctcaaatgtgtggcagagcattgattacactgataaatgatgtccttgatcgagcaaagattgaggctggaaagttagagcttgaagcggtgccttttgacctgcgttctctcatggatgatgttggttccttggtttcttcaaagtcacgggagaagtgcattgagcttgccgtatttgtatgtgacaatgttccgaaggttgttattggagatccttggaggtttcgacagatactgacaaatttggtcgggaatgcagtcaaattcacagaacgaggtcatgtatttgtgcgggtgtgtttggctgaaaactcaaatatggaagccaatcaggtcctacatggagccatgaatggcaaaggtggtagagttgagtcaacagctaatggtgccttcaatactttgagtgggtttgaagcagcagacagacgaaatagttggcaatattttaaactgctcctctctgataaggagtcgcttttggatgatcttg

SEQ ID NO: 272295 - DNA, 406 bp, Zea mays
tcgtccggtttcgctggtgctttcgtcgccatctcgcttcggtccccggcggtgctccaagtgggagccaagtcatctctctggccgaagatccaagttgagtcggcgtctccggcagaggcaagagacttcggcgcgatgtcgttggactcggaggcttcctcgcagggtggggacttccggagcttccgccagatcacgcgagatcggttattatttgaaatgctcagatcaactaggaagaattcgaaatcaacatggaaggttcttatcatggataagtttacagtcaagattatgtcatatgcatgtaagatggcagatattacagaagaaggtgtttcattggtcgaagatttatataaacggaggcaaccattgccttcactggatgccatatatttca

SEQ ID NO: 272296 - DNA, 476 bp, Zea mays
atgagttggatttgaccaactcatcttcagctccaacggttccactggcagttagtacagagaatgccgacagcacagcagtaaccactgcacatgttcctgggacagatacaagctcaagaagaccatcttctgagggtactggtgagcctggagtggaaagcttcactggttccgctgttgaatgtgacgaaagcaagaggactcacaaagttgtgaaagatcctagcaaggataatatttcttctgatgctaccaaacatgaattgcctaaggaatgtgcagtggactctactgaacaagcatcagcagtgacttctaacactgatgattcatatgcagcacctctagtaactaatcaggagcagttgctgaaagggtctgcttctgagaaacaagctgtgatgaataactcatccaagaattccgatacttcagcacatttttttgatggcaatgatgtgggcgtgacaact

SEQ ID NO: 272297 - DNA, 980 bp, Zea mays
gttacatgaagccatagaaccaaaagtgtcactcggatatcaaatcgagcaatatctgaaggatgaaaatcaatggcagctttctgatttggactgccaagctctgggtgctggcaagagccatatacaacgcggttatgggcgctttcgggtatgtggctcccgagtatgccaatgcaggtctgttaaatgagaagagcgatgtctacagtcttggggtgctactactggaagcagcgactgcgagggatccagttgactatggtcggcctgctaatgaggttcatctggtggagtggctgaaaatgatggttggcactagaagagccgaggaggtggtggatcctgacatggagttgaaaccagcgattcgtgctctgaagcgtgctcttctagtggcactgcgatgtgtagacccagatgctgagaaaaggcccactatgggtcaggttgttcggatgctcgaggcagaagacgtgccttcacgggaggaccgccggagccggagaggccacagcagccacgcagacaacgagtccaaggcaagttcaagcgagtttgagataagcagtgaccgaagagagtcggggccgtcatcgaggttccaggcctaactcccagtgagagcacggcagattaccatctccaagaacccggtttcagttcagtacgccgggttatcccttaccttgcctgctcgatcatggactcaggccgttcgaaatatttgggaatccttgcggggtggggctttattggatggttggtactgatagagataggggaaggcttgcatcttgtgctggagtaggtattttactcccatttccttggtggtgggcggagtcggatcgattccgtgggaggggaggttgagacttgtggatgtggatcctattcgtgttctgtttgcccagcagcatgtacagaaactttattattattccctggttcttcgtttaggactcatcggcgagtag

SEQ ID NO: 272298 - DNA, 338 bp, Zea mays
ggttcactcttgggcccacgccttcatggtcaccgccacgacaaccccgccgcaatgctggccagggctccccgccttggcccgggcacctccacccctctcctctcctcttcggccgcgtgccgtagcggctgcggctcccatctatcctctcaggcgccgcatcgctattactacaaccagaggaaggcgaggcacactggactggtcccccaggtgtacgctggaaaccgccggccctggcttcgaccctctggggctctacgaggaggggtcttattctctggcgcggtcttccctgtctaccttctttggtatcatggcgccggtatttggga

SEQ ID NO: 272299 - DNA, 465 bp, Zea mays
cccacgcgtccgcccacgcgtccgcggactcgtgggttttactatcaggaacatctctggattggcactgagttactacgggcaaatctttatgagtttcagaaatataaccagcagtctggtgacgaggtgtacttttcactgcccagaatacaggctatagctcgacaatgcttggaggctttggtgtacttgcatcatttaaacatagttcactgtgatctgaaaccagagaatatccttctgaagagctacagcagatgtgaaatcaaagttattgatcttggaagcagctgcttcttgtcagataacttaaacttatatgtccaatcacgttcttaccgatctcctgaggtcatcttgggtttaccatatgatcagaaaattgacatttggtctcttggctgcatcttatctgaactgtacactggtgaagtactctttcctaatgaatcaatgccaatc

SEQ ID NO: 272300 - DNA, 421 bp, Zea mays
ttttagaaaccccggttgggtacccttggtcttgagtggcggcctccctttggaaattttgctggtggccccacttacaatgcaacaactggtggataccaaactatcccaattattgatccggataggggggaaccggtttcagagataacagatttcattgagcttgaacctgaaaatgaagttatctcttaccatactgattctgagtacaatggcatggattagtattcaagtgaaggggaacagggtattattagggggggatctttcaggaccttatattccaggggggaaaatggtgccaattaccctggatgggcttaatttccgccgtccaggagaaaggaggaaaaatttgggggttgacctggtaccttaattgggccgggaggcatttaggaaaggattttgggatgat

SEQ ID NO: 272301 - DNA, 302 bp, Zea mays
tcgtaacacgctgctccgtctccatctccaaatctcaaattacctatcctctccgtcgaatcagaaaccctaacctcaccgtaccacggcctacgagccggaatgaccacatcagccgccgacgatggcagctctttggcgcctaccatcaccgagggagaaaccacagccgacgccggtgctggggcaggtgttgagtgcgtcgagggcaaagagatgaaggttggggccgcggctccagttgaggagccggataaggaggtggcgcgggacgaggatcctggtgatgatgatgactatga

SEQ ID NO: 272302 - DNA, 393 bp, Zea mays
tcttgcgagcgggcggcctttttttttttttttttttaaggcccaagggggacctttttacaattacccgtcagttttccgcaaaacatgcatcaataaattaggaaaaaaacatctacacaagaacccaaaccaaaaaaaacaaaagtctactgttcccctttatctactgaaaaagagcgggatctgtataaatgtggaggccggagcacctatattattaggggttcagatagctccatctcattggacgtctcatctgcctccactggaggaaaccgcacgtatttgtagttcagccccaaccactgccatggccagcacatgtccctcctatggccattgcaatttaccgagtctattctactatctgattcttcgagctgcctgtta

SEQ ID NO: 272303 - DNA, 510 bp, Zea mays
tttcttctctccccctacactgtttccatcggcggaccgctcccatggaggcggccgagtggagcagcccccttgccagccagccatcgtctctgcgctgcttccgtggcccggatctgggagcgcggcgctgacaggggaggacagtggactacgtcgtcagctgcaatacttcttgatccagatccaggcgttcttccaactcttccttctgcattcgtgtggaggggggattcttctggcctttcgagggacttcttttcttgtagtgcagtattgggagatacaacatcagctgatccaatggcgacatataagctgggtgtggaggtcgcaagtgctcatgacctgatgccaaaggatgggcaaggttctgcaagcgcttgtgttgagctcaactttgatgggcagcgcttccgaactgctgtcaaggagaaggacctgaaccctgtctggaatgagcgcttctacttcaatgtatcagatccttctaatcttcctgagctggcc

SEQ ID NO: 272304 - DNA, 588 bp, Zea mays
ttttccacgcgttcggccacgcgttcggtcctggaaggcgaagcaaagctaccaacgcatacaagagtgagagcagggagcacgagcgctctgagtgagtggaagacgagaggagttggagttccccagggctagggtttcattcgccacccgcgccgcccttcccttccccagcatccgtccgccatggtgaggaagaaaagaactggccctggagagagttctggggaggcttctggagcgcctggtcatggctcctcacagcgtcctcaggcaacacaacagggtacccgtggtggagggcaacaccaggcccgtggtggatatctgggccctggagtgccgccttcacagcaccctggtggtggcccacctgagtatcatcaaccgcttgactaccagggacgtggtggatatcagggccgtggtggaccaccttcacagcatcctggtggtgggacaccccctgggtctcaaccgcgtggctaccacaggcacggtggataccagggccagggcgggccaccttcacagtatcctggtggtgggacacccgctgtgtctcatccacgtgactaccacggacgt

SEQ ID NO: 272305 - DNA, 331 bp, Zea mays
ctctctcctctctaaacccaagccagtgtgctgccccagcacccagcagctattggagctcagccatccagaacaccagggcgctagctgttcgttgatagaaaccctcctgctgcttcccttcccttcctgctcacccacgtcccaatcttcgctgcggctttccgatctgcggtacttccggcaccgcgacctaaagctcgccaccgatccgctgggtcctcggcattcctttttctccagcaccggcaaagcttccatcttttcgccagcagacttgacaaacggggtgcatgacgctgcttggagtagacgcaagctttgtggaagg

SEQ ID NO: 272306 - DNA, 635 bp, Zea mays
ccacgcgtccggtggagagctagtccgtgtccttcgtccaaatctcgagacaacctcagttgattttaagccatacattggtccaatctataatgcaatactgggacgtttggccaatcaagatcaggatcaggaggtaaaagaatgcgccatatcttgcatgagtttggtggtctctacttttggtgatggtcttgaaagagaattaccagcatgccttcccatactcgttgacaggatgggtaatgaaattacaagacttacagctgtcaaggcattttcagttattgcgaattcacctctacgtattgatctctcgtgtgtcctggatcatgttgtttctgagctcacagctttccttcgcaaggccaacagagctcttaggcaggcgacgttgggaactctaaattctttggttgtcacatatggtggtcagattggctcttcttcgtatgagacaataatcgcggaactttcaaccctcataagtgacatggatttgcatatgaccgctcttgcattggaactttgttgcacaataatggttgacagaaaatctattcaaaacgttggtttagctgttagagataaagttttgcctcaggcccttgttttgatcaggagtgccctgttgc

SEQ ID NO: 272307 - DNA, 334 bp, Zea mays
gtacggtcggaattgcgggtcgaacacgcgtccgggaccgtgggtattttatagacaccagtagtctgctaccctgctttcagataggtatataaggtgtcaggattcaaatcgcaagttagatctcaattcggtatagcacaagatgaatccataaagtcagaactttgcatgttaagggcttgctccttttgatctgaatccatatggattaagtgagattgagcggggttaaataccaaacaagtcaaaatctttcataatttttttcaatctcatataatccatatgggataggaattatcgaagaaaccctaaggtggatctgatgttc

SEQ ID NO: 272308 - DNA, 739 bp, Zea mays
ttcgtcttgctagcatggcggtgaaggtgtgggtgttcgccgtggcactgatgatgtgcgctggtgtagggcttggagctgacgacgacggcggcagccgccttattagccgctgtcgtctgagctcgcccaactaccgcggcgccctggcaaaggccatcctcttcttcgaggggcagcggtcggggcggctgccggcaaaccagagagtcaggtggcgcggggactcggcgctcaccgacggccaacccgaaaacgtgaacttgacgggtggctactacgacgccggagacaacgtcaagttcggtttcccgatggcgttcagcgtcaccctcctgagctggagcgccgtcgagtaccgcgacgaggtggcggctgcgggtcagctccgccacctgcgggccgccatccagtggggcgccgacttccttctccgtgcccacaccacgccgaccaccctctacactcaggttggcgacggcaacgcccaccaccaatgctgggagcggccagaggacatggacacgccgcggacgctgtacaagatcacccggagctcgcccgggtccgaggccgccggcgaggcggcggcagcgctcgccgccgcgtacctggtgttcagggacgaccgggacaagaccttatccacgcagctcctggccgcgttcagatccctattcgacttcgccaacgactatagcggatcctaccagttgtgctgcccattctactgctccta

SEQ ID NO: 272309 - DNA, 622 bp, Zea mays
ggattatcattcattgcttgattatgctccaagggccattcagcttacataggcatcaggctgccaatcagtcctcaaatctctctcaattattaagtttctaaattagcaccagctaatgtccgcttcccattgacagcagatcagccactttcctggctaggtgttcctgccttcttagtcctgcggctaaactgctttccccacatgacacatgcacgatccaatgctattgatcaggttcttgggacttctttgacaatatttttcttatattttatgcctcatatgtctgtgcatatgggtgggcatgaacttctataagaaacagcggtagtagtcattctttgttattgtaaaagcaataaacactaaatgtattttttcatcagtaagctgcttattcagaaacatgccaaacagctctctgctgtaaatgtctggcctaatgtacgctgtacccccctccccaaaaaaaggaaagaaaattccacgatgcctattgagtcttgacccgtgttttggccttttatcacaaacattggttaattacttaattatggcattcatgtacatgcagatagataccaaagatattctttttatatgtggtggcgctttc

SEQ ID NO: 272310 - DNA, 357 bp, Zea mays
cacccttcttgatttggcacgcggattatcctctttgcataaatggcaactgatgtttctttccagcctaattttgtgcagtttttgagctcaactcctccgctcttgcccctgcgcgtgtcaactggagtagttaagcggcgccatgggtatgcggagcaggcacccaaaggcgttgggtttccgctggtacccggcggcaacccaccggtccctaactctggtactgtggagcctagcggcattggtcgtcgttgtgaatttccatcttctcatcattcataaggaggagggtgagaatatgagttcacacgagatccgccgatcgattatgagggaactggaagtggtggagga

SEQ ID NO: 272311 - DNA, 410 bp, Zea mays
tcgggcgttgtcgactccatgaaggtgcgcgttgggccggaaccggccccggccccggcggcggcggacggggccgcccggcgcggcgggggtggcggaaggggattgtattggcgcgcggtcgcgttcccgcttgtcgttgcgctcggatggcttctgcccttcgccttcatcctcgccgccgttcccgcgctcgaggcaggcggaagcaagtgctcctccgtcgattgcttggggaggcgaatagggcctagtttccttggtaggcaggggggtgattctacaaggctggtgcaagatctgtatagatcttttgatcaagttaacaacgaggaatcgccacccgatggaaagttaccagaatcattcaaggattttcttttggagatgaaggataaccattatgatgc

SEQ ID NO: 272312 - DNA, 490 bp, Zea mays
gtctttagcacttgaggttgtgcaacatcttaaagatacataccatgaaggaaaatgtgaagttgcggcagttgagggtggaaagttgatggcagatgctgatgctggtgaattctggggtctctttggcggatttgctcctttaccaagaaagacattttctgaactcaacgggaaagattctacttccacttcaaaattgctttgtgtaaacaagggccaatttgcccctattgattgcgaaattcttaaaagggagctattagattcaacaaaatggtacctactagactgggggtctgaaatttatgtctggatgggtagagaaacaactcttgaagaaaggaaaccaggcggctcagctgctgggggattactacgtggagggaaccggcaaaaatctcatattattcggctcatgaaggatttgagactgtcacatcaaatcaaaagttgataatggcccaagaagctgatgcagtgtgtcgat

SEQ ID NO: 272313 - DNA, 330 bp, Zea mays
gcaactctaataactgtggagttaaggatcgcactagtgtcacagcaagggcaaacataactgagagtcttggtattcaaaaagcttcagccggtgctggcaatgatggaaggctgagtatagaacacaccagatctgtggccccaagctctttgaccccctgctctgcgctttctattcatgtaataaataagaacggccatgaggacgctttgcctgtctgccttgaaacgaggcctgtggaacggggtgctggagatatgattgggggtggtgcgctttcaacaaaagaaactgagataaaggtataaaaggtacaaaaactctttg

SEQ ID NO: 272314 - DNA, 421 bp, Zea mays
tctggtgaatcccccctttccttttacgcttcaccactgatcatggggctactcagcattatccgcaagatcaagcgcaaggggaaggagatgcgcattcttatgggtggcctggacaactcggggaagacaaccatcggtcttaagatcaatggggaggacaccagcgtcattagcccaacccttggattcaacatcaagaccatcaagtaccacaaatactctttgaacatatgggatgttggaggacagaagacaatcaggtcttactggagaaactactttgagcagactgatggattagtttgggttgttgatagttcagacataaggaggcttgatgattgccgtgctgaactccacaatctcttgaaagaagagagactagttggagcttcattgttggtttttgcaaataagc

SEQ ID NO: 272315 - DNA, 1066 bp, Zea mays
ttactccctgttgttcttggtgagttttggtgggtttttgatcctgccctttcggaatccttctgaggagcacgagatttgatgctgcggtggagatttccgcttaattctaaacttccggatgccatgtttccccttgatcaatgctgccgattgttatggaggagtgatctgtaatcgtagggacttcttttgtgatggctcgctgatagatttgttactgctgtcctaaacggagctgtatggttgactcgctgctaatgggtgtaaactttgtgtgtaacaaatcgctcattggcgatagtcacatgtaaattttaatttgatggatcgttctgtatatatcatatcaaagtttccttttacatttcatttctgcgggattatagctgctttagttttagatcctccaaatcatgtttcttcttttgtatcacatggataataaattctagcattggctactgttatcctaacgttgattcttgtttggcagatatctggctgagttgcttgcagagaggcagaaattggccccatttgtgcaagttcttcctttctgtaccaggctcttgaaccaagagattttgcgcgcatcttctatggcgcctaaccataactttgttgatcctgagagtccggagcatggtagcccattaaggttacctggccacccagtgaatggtcagccgatggatctggagggctggtcagggattcaaacagaggcttctcagcatatgggggttctacaagcatcatcaatgggctggaatggtgctcctgtacttgctgccactcctgttgtcaagaaagtcatgaggctggatgttccagtagacaagtatcctaactacaacgcttgttggtcgtttattggaggccgcgaggtaactccctgaaaagggttgaagcttcaacccaatgtagagtttacattcgaggacggggttctgtgaaagactctgttaagagtttccagcagatatggttgatgtgcgtcttaatcaagctgtgtccatcctagaggatcttcttaaaccaattgacgagtccatgggctact

SEQ ID NO: 272316 - DNA, 431 bp, Zea mays
ctctggaccaaagcttgaaagcagctgccgttcttgcctcttttttaattcttcatttcgtggttcctggatttttgggttcttaggtttcttgtatcttcccccaaccttgcaaaatcttgtggtgaagtttcttgcgttcgctgtttcgggaccatggacgaaaggattccgccgctcgtccctcttgcaatactcgcagtcccctgctcattcttccccccatcccctcaattctatgaggtattcttcctctgatcgagaaagatatctggctgagttgcttgcagagaggcagaaattggccccatttgtgcaagttcttcctttctgtaccaggctcttgaaccaagagattttgcgcgcatcttctatggcgcctaaccataactttgttgatcctgagagaattgagcatggtagcccattaa

SEQ ID NO: 272317 - DNA, 390 bp, Zea mays
tttctgtcgtccttgccatttcccaccctacttgggctaggcggcaggacggacgcggaccggcgggggaggagaacacacgaccgcgacggaatcgcgaggggtaggcgaggcgaggcgaggcggccaccgagggaggagcagtccagcagagcgtagggggcgcgagggatggacgccaacgggtgcggggagaatgacgacgcgcgggcgccttttctggtcgggcctgggcggcggtgcatcttttttgtgtccatgctcggggtgttcttgttcctgtttttcttattttttttttcttttttctaattttttctctcttttttttttttttttatcttttaaatttattctctttatttttttttttttttttttctaatttat

SEQ ID NO: 272318 - DNA, 520 bp, Zea mays
  unsure (1)..(520): unsure at all n locations
catgncgttcgccgcctccagttctgtggtcgtgttttctgccatcagccagcccgtctgccgtcgtgagatctcatggcaacgagtgcatctactgatgctagcagcagcgaaggaagttttccagtcgcaaataacactgccatcgcaaaacaagtcttggctgctgcttgtatggtgatgatgagaaaaaaccattggggaggtatgccgagatacttgaaagaactggaaagggtttgggagggcaacacgaggattaggtgtagactctgtaaccatgtttataatggaagatattctagagttaaagcacatatgttggaaaattcctggttttgggtgaagttttgtcgagtggtgacagtacatgttcttgaacaattgaaagctgaagttgctgcagccagagttgttgctgatagaaccatgcctagagatacccgacttccagttgagggcaatgagaagaggaaaaggaggggtgtttcagctattgaatcaagcttcaatttgggtg

SEQ ID NO: 272319 - DNA, 357 bp, Zea mays
tttttcctgaagaatgatgatatactggccaaggaggcaaagttgaagataaaacgagtcgatccaacattagacatggaggcagacactggagatgattacattcatcttccggaccatgggattcaccgtgatggtagcaaagagacagtcgatgctgacagtgagttggcgaggaggacgctgtctcaggacctgaaccgtcatgcagctgttgttcttgaagggagatctcttgatgttgagtcaactgatccaaagactttagctgaagcccttgcaagatccaagaaagaaccaccttctacttctaatgttgatgatgataatcatgagagactaatgaaggtggctaga

SEQ ID NO: 272320 - DNA, 507 bp, Zea mays
tatgcaatggtgaagaagcatcgatccgggaggaggttcagcattagctctagctagagctagatagcccgaggaggagctagtaggaagaggcatggataatcatcaacttgtcgccatggcagcgggggctcagccggcgagcccgacctcgccgcacgtcgcgcacaagatcccgcccggcgacgggccttacgcgagggccaagcacttccagctggtggagaaggacctggacgcgtcgatcgcgtggttctggaaggcgatcagcgcgggcgacaagttggacagcgcgctcaaggacatggcggtggtgatgaagcagcgcggttacctggcggaggccatcgacgccatcaggtcgctgcggcacctgtgcccgaagcagtcccaggagccgcttgacaacattcttctggacctctacaaggccagcgttcggaccaggtgggagatcgagctgctcaagcagaagctccgcaagatctacctcggcgaggcggtcca

SEQ ID NO: 272321 - DNA, 608 bp, Zea mays
aagtaaatgggaaaacaactcagtagtaatgcttttcgaattataaattatttctatttcacacgatgcttctagggacgtgatgagtcctccaagccgggaagcagggcatggtaaagcactccaagctgctctttcatcgggaattctacagcgtgtagggactgatcactgcacattcaactccacacagaaagcttttggttctgatgattttcggaagattcccaatggtgtaaatggtcttgaggaacggatgcatatactttgggacagcatggccgagactggcaagatttctgtaaccgactatgtcagagtgacaagcacagaatgcgccaagaccttcaacatattccctcggaaaggagcaatcctggaaggatctgacgcagatatcataatcctgaaccctgaaaggagctttgtgatgggtgctctcacacaccattcgaggtccaacaccaatgtgtacgagggcaggaaaggaaagggaatggtggaaataacaatctcaaggggccgagtggtatgggaggatggcgttctgaacattgcacctggttcaggacgatacgtcatgatgccacctttcggctacgtctttg

SEQ ID NO: 272322 - DNA, 335 bp, Zea mays
cccagacacctcctacttatcttgcgcgccaagggccagcgcgcgagcgacctcacttgatccgctcccttcgccgcgacgacgttcctacgcagctgcggtcgacgcgcgcacggcagctcgctcgctagctgatcacgactgctcgctcggctcgaccgaatggcgccgcggctgctggcgtgcttcgggcgcggcggcggcggagcgacggcgtcggcgccggacgacgcgacgggcgagggccagctggaggcgccccccgctggcccggtgctggtggagctggtcgggtcgcaggggtgcggggcgtaacacgaaccaaatcccgccgc

SEQ ID NO: 272323 - DNA, 553 bp, Zea mays
acgcccacgcgtccgcccacgcgtccgtccacgcgtccgggttgagccattctcatctccagcggcgcaagcgcaagagccccctgaacctgcaagcgagaagaagactcagcatccctctaggaacgtggccccgcggctgaccgtggatgctggactgccagcattgcctggattagatgacatattggacgtccctggagggctggatgggcagggcaacgacatcagctcgtggttcacggatggccttgacgactcgttgcaagacattgatctttcaggcgccctggagatcccggacgatgacctcacccagctgggttttatatgagaaggaagcacttgttgcttgctctgtgcatatatgttctttttttgggtgcttacctaatgtatggtagtagatataattaaccggtttaatctccctgccacaaccctgtaatcgaacctgcatggcatggaatggttagttgcagatgagttattcgattctcgtagcagcaagaacatgttgagatttgctaccggcatcatgtggttctgcctc

SEQ ID NO: 272324 - DNA, 552 bp, Zea mays
tcgggtatcagcaacactggcgctggacgaagtgtgccaaccaccaacagtgcctacaccaccaatttgagtggtccaaggtatggcgagtctgcaaaccagctcgcgcagcaggaaagcacgtacaccggggtgaccactccagtgtcggcggcacggaatgtgcagcagacctgcgtgtcgggcgggtcaagtgggcacaacgtgcagaactgccctgcaggaacgtacaggcagcaggcggctgcaagcgcagcaagctcctacggttcttcgcagcctcgcaatggactgtgcttcaaatgcaatcagcctggacactttggccaactcttgtccactactggctcctgctccccagcagcagcagcagtatcggagcggcggcgctccctcaagcggttatggtaggcagcagccctatgttggggctaccaactactgaaagtcattatctttgtcgagtcagtcgtgatgttggttttgcttagatgcctgtcctgaatggcatcgctgcgtccatgtgaagtaaatgcaaaccatttctttttt

SEQ ID NO: 272325 - DNA, 485 bp, Zea mays
caatactccttcagtccatcccctcaaccccggcggccaatagccggcgcaccgaagcggcggcccggcggcaagcggtggccatggcggagctaaagcggctgtcagagagccgggacctgacgcggatcgagcgcatcggcgcgcactcccacatccgggggctagggctggactcctccatggaggcgcgcgacgcctcggagggcatggtcgggcagctgcccgcgcgccgcgccgcggggctcatactccagctcatccgccagggcaagatcgccggccgcgccgttctcctcgcgggccagcccggcaccggcaagaccgcgctcgccatgggcatcgccaagtcgctcggcgcggagacgcccttcgcctccgtcgccgcctcggagctcttctcgctcgacctctccaagacggaggcgctcacgcaggccttccgccgcgccatcggcgtgcgcatcaaggaggagacggaaatc

SEQ ID NO: 272326 - DNA, 455 bp, Zea mays
cgttccccgctctacgggcctaaacctcacctcgccggcggccaaaaatcgaagcaccgaaccagcggctgcggcagcggcggcggcgcggcaagggttgaccatggcggagctaaagcggttgtcggagagccgtgacctgacgcggattgagcgcatcggcgcgcactcccacatccgggggctagggttggactcgtccatggaggcgcgcgatacctcggagggcatggtcgggcagctccacgcgcgccgcgcctcggggctcatactccagctcatccgccagggcaagattgccggccgcgctgtgctccttgcgggccagcccggcaccggcaagaccgcgctcgccatgggtatcgccaagtcgcttggtgcggagacacccttcgcctgcgtcgctgcctcggagctcttctcgctcgacctatccaagacggaggcgctgacgc

SEQ ID NO: 272327 - DNA, 546 bp, Zea mays
tcgtgtggctttcataagagaattctttgaccagaatccattgagccatgttggcctagtgacaattaaagatggtattgcccatcgacttacagaaatcggagggagcccagagtcacagattaaggctttgatggggaagcttgagtgttctggtgattcatccctgcagaatgctctagacctcgtacatggttatttagatcaagtaccatcatatggtcacaaggaagttctgattttatactctgccctgaatacatttgatcctggtgatatcacggagacaatagcaaagtgtaagaagtcaaaaattagatgctctgttattggtcttgctgcagagatcttcatttgcaaacatctatgtgaagagactggtggatcttacacagttgcactggatgagtctcatttcaaagagttgttactggaacatgctcccccacctcctgcaataacagaatatgctgcagctaatttgattaagatgggcttttcacagaggggtgctgaggagcttatctctatttgcttttgtacaag

SEQ ID NO: 272328 - DNA, 729 bp, Zea mays
tctcatgcaccccctgaattagacttgggagtggctccactaatcagcgaaagaatctgattgctcaactgaatttgattcccaggccgcaccatgttcttcaaatataccagtactagctaacacaacagtgtcgacttgtatttctgccatgcctagcagtgaggaaacgtatcagttgtcttctgttccaccacctactgtacaatttcaaaatgattcctacaaagatcctcaagctccactcgctgattcctacaaagatcctcaagcgccaccccctctccctcctctccagtggaggcttggaaagcctcggctaggacttctgagtagaaaaggctatatgactgaacctgcaagggtaatagatcctgttttgcagatatcaagccaagagatggatattaggccaggtttgcttgatccaactgatagatctatagaaccagtaccctgtcaagaaatcgaagaagatagatgtgagagttctttgatagatcataatgatcaaaatgtagattttgatagattatcgaccagggttgcagtaactgatgttgcaaggactgaacacaggctatccttagagacttcagaggacattaagcaacaggggcatatttcttcatcggcaacaggagttgaggaacacctggatgctggtgggttcacatcaacaatggcagatgaggaacatctggatgattccgggatgacacatggaac

SEQ ID NO: 272329 - DNA, 762 bp, Zea mays
  unsure (1)..(762): unsure at all n locations
cccacccagaattacactgaatatgttggttgaaagagtacatttcgccttctgaagagaggatccgcaaaggcactagataaagttgttgagttagatggtaagtctgccatctatattttgtcccctatcagtgagatacaaatatgaaaaggcatgctgattttatggttgcagaaacaaaaaaagaggcactgatcgttaagacgacaatacatgatatcatgaaccaaatgattcgggaacttccaataaccaatccagtatacctcatgctaagcacatcatttggttcctcagctaaaggaaccgggcttaaagctcttgaatttgccctctncatctgtgacagtgttgatatgtatggcttcaccgtagacccaggttacaaggaatggacaaggtacttctcagaggtaagaaagggacacactccactacatggtagagcatattatcagatgatggaatgtcttggtctggtgaaaatccattcaccgatgcaaggagatcctggcaggacagtgaggtggctgcctaccaaggctaccatcgaggctgctagagttgcttccgagaagttgttgaagagacctggtgctggaagtgatgatcctctggggacttgcaccatgataaagaagcgcaagaaagggaaggcgccaaacagatctggtctacgagatgctgccatgaagcacctcgaggacatgaaaggtgccaccaggtatcccttggagcgaaatgcagggggtggttacc

SEQ ID NO: 272330 - DNA, 1423 bp, Zea mays
aagaaataaatcagttgagaaagctggaggtgacctttgggacaaacaccatgttgaaactgatcatggccaagataattgtctggaccaagaagttcctcaggaagccgaacgaacctctgataaatcaaataaatcaagtgggacagaggatgtgaaatctgatcttgctttggacaatgttgcagagtttgagatccaatgggaagaaatttctattggtgaacggattggccttggatcgtttggagaagtttatagaggagaatggcatggaacagaagttgctgtcaagaagtttttgcaacaggatatttcaagtgatgctctggaagagtttagagctgaggtgcgaataatgaagaggttgcgccatcctaatgttgttctcttcatgggtgccatcactcgtgtgcctaatctttctattgtcactgaatttcttccaagaggcagtttgtttcgtttgattcaccgacccaacaaccagttagatgaaaggaagcgcttaagaatggcacttgatgtggctcgtggtatgaattatctgcataattgttcaccagttatagttcatagagatctgaaatccccgaatctactggtggacaagaattgggttgtgaaggtttgcgattttggtttgtcaagaatgaagaacaataccttcctgtcatcaagatcaacagctggaacagcggagtggatggcaccagaagtacttcggaatgaacgatcggatgaaaaatgcgatgtttttagctacggagtcatattatgggaactttgtacactactacagccttgggaaggtatgaatgccatgcaagtggttggtgcagttgggtttcagaatcgtcgccttgaaatcccagataacatcgatcctgctgtagcagagataatagtgcaatgctggcatacggacccaaagttgcggccatcatttgcagatatcatggctgcactaaagccactgttgaagaacttgaccagcaatctagcccctaagagagtgcaacaaacagatgagtgagacaaggtggttgccacccgccccacctagaggtgcaacatttcggattggcaaagccatggtaagcttaaggccgcttgccattgatccacattcgaagatcagtgctggtatacccgtgaaagaagacggaggagggctgtgatctatgcaaagaattgtgcagaacagtaatgttttggcactgtggaacgattgaaccaggaactcgtatgggtggcagaccggggcttttgttcataccgtccctttttttttcttttgttgcctcaccgaatggtgggtattattatgtgtaaggtggcgattggttcacgaaacgtaatgtaaatgacaacggtaatgattcatgtttgattaccagcggtaacaagtttgaataggact

SEQ ID NO: 272331 - DNA, 1033 bp, Zea mays
tcgatgctcttcgtcctgcaccacaaccaaaaggagcagttccggccgcccgtcgtggataatggttcagcgatccaggaagtccctcgtgaaaaagtgaatttctcagaagaacttttgagcagcacatcatttgctcgccaattagcggatcagatgactttagcaaaggcgtatgtcatccttgcaaaagagcatgataatcttcagcttgcatgggagcttagttcgcagataaggaattgtcaaagattgctctctgaaggggcagttagtgggagagcaatcactaaagatgaagcccatcctataataagccggctagcactgttaatatacaaggctcaggactctcactatgatatcagcacaacaatagtgacattgaagaaccatgccctggcactagaggagcgtgctaaggcagcaattgttcagagtgctgagtttggccagttagcagcagaatccttcccgaagaatctgcactgtctaactgtgaaactgacagaggagtggcttcggaacccgaagcataggagtcgctcagaggagaaccggaattccacacgattggtggataataatctgtatcatttctgtatattctctgataatgtgctggccacttcagttgttgtctattctacagtctccaatgcaaatcaccctcaacagcttgtgtttcatgtggtcaccgacagaatccattttggcgcaatgtcaacattgttcctcataaatgacttcaaaggttgtactgttgaagtccgatgcatagatgagttctcgtgggtgaatgcttcttcatctcctcttgtcaggcaactatctgagggtgaaactcagggttactattactcaactggttccaagaatgcccgtgaatgctttggttccctatagagctgttgatgtctttacatattcttaaggtccttaccatgtcaatcacatggactggtgtgagtatagcttgttcctcaaccaacactatattattagttgtgattatacatataatattgttgcc

SEQ ID NO: 272332 - DNA, 515 bp, Zea mays
cccacgcgtccgcccacgcgttcgcccacgcgtccgcggacgcgtggggttcgggatagaggtgcatggcaatgtgattggagcagtggaaacttgtttagagtcgtttcatcggtatcacaagtatctaaatttttcgcatcctactatcagctccaagattgatccacatacttgtggatgggcttttggaatgaacatttttgacttgatagcttggaggaaggcaaacgccacatcattgtatcattattggcaagagcaaaattctgacctattgctctggagaacaggaactcttcctgcaggccttttgacattttatggcctgatggagcccctagaccgcagatggcatgtcttgggtctcgggtatgatgtagacatagatgatcgtctgattgagagtgctgctgttgtgcactataatggaaacatgaaaccgtggctgaagctggctattcgccgttacaagtatatatgggagcggtatgtgaatatctcacatccgtatg

SEQ ID NO: 272333 - DNA, 485 bp, Zea mays
gtggtcaccgacagaatccattttggcgcagtgtcaacttggctcctcataaatgacttcaaaggttgtactgttgaagtccgctgcatagatgagttctcgtggttgaatgcttcttcatctcctcttgccaggcagctatctgaggcggaaactcagggttactattactcagctggatccaagaatcctgaaagagaaataaaattccataatccaaagtttgtttctctactgaaccatttacggttctacattcctcagatacttcccaacttggagaaggtggtgtttcttgatgacgatgttgtggtgcaaaaggatttgactcagctgttctccatagagctgcatggcaatgtcattggagcagtggaaacttgtttagagtcgtttcatcggtatcacaagtatctaaatttttcgcatcctactatcagctccaagattgatccacatacttgtggatgggcttttggaatgaa

SEQ ID NO: 272334 - DNA, 1041 bp, Zea mays
caacaagatggtcagagccgggtgcaaggtgaaaatctggattgccgactggttcgcgcagtcaacaacaagatgggaggcgacctcaagaaaatccagacagtcgggcgctacatgatcgagatttggaaggcggccgggatgaacctcgacggggtggagttcctgtggtcctccgaggagatcaaccggcgcgcccacgagtactggccaatcgtgatggacattgcccggaaaaacaacgtcaaacggataatgagatgctgccaaattatgggcagaagtgaccaggacgacttgactgctgctcagattttctacccttgcatgcaatgtgctgatatatttttcttgaaggctgacatatgccagttggggatggaccaaaggaaggtcaatgtgctagctagggagtactgtgatgacatcaaaagaaagaacaaaccaattattctttcacatcatatgctccctggttttaaagaaggccaggagaaaatgtcaaagagtgacccatcctcggctatctttatggaagatgacgaagcccaagttaacgtgaagataaagcaagcattttgccctcccaaaattgttgaggggaatccttgtttggagtacattaaatacatcgttttcccttggtttggaaggtttgaggtggcccggaaggaaagcaatggcggtaacaagacatttacatgcatggatgaactaatttctgattacgagactggtgctttgcatcctgccgatgtcaaacctgcactggcaaaagcaataaatgaaattttgcagcctgttcgtgatcatttcaacaacaacaacgaagccaaagttcttcttaacactgtcaagaagtacagagtaaccaattgaggagtggaagctgtccatctttagggcatgtttacattagggtggatatcgccgtttgaaattcttgtatgctattctgttactagttgcataggtagctcaaaagtttcatgtttctagatatataaaaagaatactttacttgttgactacttgatgtgc

SEQ ID NO: 272335 - DNA, 514 bp, Zea mays
ggaaggtttgaggtggcccggaaggaaagcaatggcggtaacaagacatttacaagcatggatgaactaatttctgattatgagactggtgctttgcatcctgctgatgtcaaacctgcactggcaaaagcaataaatgaaattttgcagcctgttcgtgaccacttcaacaacaacaacgaagccaaagttctactaaacactgtcaagaagtacagagttaccagttgaggagcggaaggtgttcatctttagggtgaatgtcgctgattgaaattcttctatgcttattctgttactaatgccaccactcattttagatcaagcattgagccattggttatcagtgtacaatctctctatacaggcattttggtggcagtagccttgtctgtcattggctacaacgttctagataaaaaaacatttaaattttgtggaaaaaaaaaaaaaaaaaaaaaaaaaaaaaaaaaaaaaaagaaaaaaaaaggaaaaaaggaaaaaagataaaaga

SEQ ID NO: 272336 - DNA, 721 bp, Zea mays
  unsure (1)..(721): unsure at all n locations
cggacgcgtgggtccgaatccccgacgcaacccttgcgtggtggcgtcaccacccaaatcccaccatccggatctgccgagccgccgccgccatgtcccgctcggagcgccgtctcgcctcggccgtggtgcgccttcccggccgctccagggtctccgcctcgccatccccgcgccgccgctcccagtccccatccccgcgccgcgaccgccgccgccgcgaccgctccccgatcccttaccgcgatcgctccccaagtccatatcgagcccgtcgccgtgaccgctccccgagcccttaccgcgatcgccgcgaccgctccccgagcccttatcgcgatcgccgccgccagtggtcaccctaccacaacgaccgcggccgggaccgtgaccgggtcctgcccgtccgtagcggcgggggcgcctggtccgatgacgacgacgacgacaaggaactccagggcctcagctacttcgagtaccgccgcctcaagcgccagaagcttcgcaagagcaagaaaaggtgcatctggaacatcacgcccagcccgccccgtgttgagggcgacgaggagaactacggctacagcgatgtggaagaggataaggtatcttcgaagggctcgccggaggctagcgaggaggagagcaaggatgcgtctgagtcggatagcctctccgagtccagcggatcggaagcttctttgangagaagaaaaga

SEQ ID NO: 272337 - DNA, 688 bp, Zea mays
  unsure (1)..(688): unsure at all n locations
ctagaacgcgagcggccgccctgggnngaaggcgacgaggagaactacggctacagcgacgnggaagaggagaagggatcnccgaaggcctcgccggaggctagcgaggaggagagcaaggatgcgtcggagtcagaatccggtgagtctgatagcctctccgagtccagcggatcggaagcttctatgaggaagaagaaagggaggaataaaagtcgccgtagtagcaagcgcacccggcagcgccaccgccaccgctcatacagttcggagattgaggacgaaagcaagagcgacgatgattctgtgggctcttatgattcggaggagtctagggataggagcaaaaagaggtcgcgcaggcataatagatctaagaagaggagcaggagctccaggaggaagaagaggaggagccaggatacagcatcggagcaaagctctgaggaggaagaggaggaggatagtaagaaaaagaataagggcttgaagaggaagcggagcaagcgatctgattctgaagaatcggtcccttctgatgccactcctgatgatgtaaaagaaattgaagaaactaaagtgccagaaattgatccagaagcaatcaagttcaaggaaatccttgaggcccagaagaaggcttccttggagaacgatatgcctgttggtccaatgccactttcacgcg

SEQ ID NO: 272338 - DNA, 699 bp, Zea mays
  unsure (1)..(699): unsure at all n locations
cgacatctccgccgactacatcgaccacttcaagtcccagttcgcggcggccacgggcgggggccgctgctcggccttcgaggtcctcatcgccaaggcgtggcagagccgcacccgcgccgcggggttcgaggaccccgacacccccgtgcagctctgcttcgccatgaacgcgcgcccgctcctcggcgcccgcctcccgcggggcggcgccggcttctacggcaactgctactacatcatgcgcgtcgcgtccacggccgacaaggtgtcctcgtcgtccgtcaccgacgtggtgaaggtcatcagggaggggaagaagcggctgccgttggagttcgcgcggtgggcggcgggggaggagggcgccgacggcgtggacccctaccagatcacctccgactaccggacgctgctggtgtcggactggacgcgcctgggcttcgcggaggtggactacggctggggcccgcccgcccacgtggtgccgctgacgaacctggactacatcgccacgtgcatccttgtcaagccattggcccacaagccaggggcgaggctcatcacgcagtgcgtgacgccctaccgcgtctcgcgctttcacgacgccatggtggacatgaactagcgccccgccttgtcctgcgttcaccaaacgccttntgtcttcgccggccttccgttttttgtttttttttt

SEQ ID NO: 272339 - DNA, 296 bp, Zea mays
gtgccgctgacgaacttggactacatcgccacgtgcatcctcgtcaagccatgggccctcaagccaggggcgaggctcatcacgcagtgcgtgacgcccgaccgcgtctcgcgcttccacgacgccatggtggacatgaactagcgtcccgtccaccacggccttcgtctccgtcagccccccgtttgttcatcggtttcttgatttttttttctctcgtctccgttactgtggtaattagcagtcggtaattagtaatcacgttgcaaaaaaaaaaaaaaagggcgtgcctcgcg

SEQ ID NO: 272340 - DNA, 1088 bp, Zea mays
tgcccacgcgtacgccctcgcgtgctccccccctgcctcgcctctctcccctctcctcgcctccagctcctgctcggcccgctcgcgtccagctgcgcgcgcgcctgcggtggccgtgaaggacagcccgagggacgcgccgggtgcactgatctgggggccgcgtgtccccggtggtggggcgaggcggcgccggcttccaggaatgggcagcttgtagtggctgtttcttttgcatatgcgctttctattgttgttgtcatttcaaaggaggccatagtctcctggattttgtatgccttgttatctggaattggtgaccatagatgtcatttcgtagcatagtccgtgatgttagggatggcttcggcagcttgtcaaggagaagctttgaggtgaccctcgcaagcatttatggccttactgggcatcacaaagggaagacccagagctcatcacatgtgctcgacgactcaccttccataattcgtgaaagtcgatgggcgaatctacctcctgaactcatccgtgatatcatacggagactggaggctgatgagagcacctggccagcgcggaagcacgtcgtttgcttcgcagctgtttgtaggacatggagagaaatgtgtaaagagattgtgttgagcccagagttctgtggcaagctcaccttccctgtgtctctaaaacagcctggtcctcgagatggaaatacaatggtccagtgttttataaagaggaataagtcaaaatccacttaccatctctacctgtgccttagcaatgttgttacttcagaaagtgggaaattcctcttatcagctaaacgacaccgcaaaaccacatgcaccgagtacactatatcaatggattctggcaacatctcaagatccaaaagaacctacattggaaaaataacgtctaacttcctaggcacaagatttttaattgatgatacacaagccccctataatggggctgtagttcctcctgccggaaggaccaccacgaggttcaactccacaaaagtctctccaaagctgccttcagtcagttataacatcgcacatgtatcgtatgagctaaat

SEQ ID NO: 272341 - DNA, 684 bp, Zea mays
cacaggagcgctcgacacggggtcgccagcgccgggcgacccctctcgtcgccatcacgccccgaataattcactgcccacgcccgccatcgccaccactggcgtccgcagcccgccaataataacgctcccaaagcagaggcccaaacccgcgacgcgcagcgcagggccagtggcgacctccagctccagctccagctccacacgcgggcgccaccaaggagctgagccgagcccggcactgtcggcggccatgtccgcgccgcgtcgccgcatggccactgcctccccgtcgctccgcttcctcggcctgctcaagcaacccgacgacgccagctcccagtcccacggcgtccaggagctggagctcgacgagcgcgacgtcgtctggtcctccggcagcgcgacctcctcgtcctcgacctccgcggcctcctcgccgtccccgaccgcgtccccgaccgccagcctcgggaggccgatttccgcctcgtcccgccacttccccgccggcagcatggggctgtccgcgctcctcgccgacgccgacgaccaccacgcgcccaccgtgcccgtcccggccgccgcgcgcccgcagaagcagcacgccccgcgcccgtgccaccagtcggtccccgtcgacgtgccggcctggcccaaggcgatgacggcggcggacaggcg

SEQ ID NO: 272342 - DNA, 459 bp, Zea mays
tcgctctttctacatggtatcagattagggtttccttcctatccacccacagccaccacccacccccaacagcagccgctagaaccgccggacaccgccgtcgttgccccccgggaggctcaaccttccctcccgggggcagccacaccccagtcgccgctccctagcagccgccgcatcctcccctctctctccagtcgccgcatggccactgcctcctcgtcgctccgcttcctcggcctgctcaagcaacccgacgacgccagctcccagtcccacggcatctaggcgctggagctcgacgagcgcgacgtcgtctggtcctccagcgcgacctcctcgtccttcgcggcctcctcgccgttcccgaccgccagcctcgggaggccgatttccgcgtcgtcccgccacttccccgccggcagcatggggctggacgcgctcctcgccgacgaccac

SEQ ID NO: 272343 - DNA, 1173 bp, Zea mays
agatcgcgagcggccgcccttttttttttttttttttttttttttttttggatccaatccacattacataaaatagttaaatggttattcatatttgcatattgcagttgagatcagcctcgggtatgccgaaggaatatgggatgagaatagtaagaaagaatttacaagaatttcttgaagtattcatttgcttcggccaccagatgctcgtcatcccattcatcacggtaactctcaggacgagctgccttgttcattgaagttacagcatacatctgcttcctccattcttcgactggtggatggccacattgctcagcgagccaatcatcatactcaaactggtaatttgcaaaattatgtgtgtatctcttaggccatccatgtgcttctagtttcaaatagaaagccttcacatcttccatcatcctgtcttcggatggaagattaatccgtcctgatagaactctagcaacccacttactttggagttcaaacagtgggaaggggataactttccaaggcaatccgatgaaggacaaatgaggtgccacttcgggtggaaaaatatgcttgtatagtggatcgacacggttgtcgtccacggtgatagtgctgtcatctccaaggaatggaaagtcatacaggtagccagtgcagtgcatgataacatcagctttgattgagctgccatcctggaacaccacagtgccatcctcctgcgcatggtcaatcatggaatgaagccacagattatcatagccaggctgcttgttacaggtggaagccggtgctgatctatcagcaatatgtacctcttccgccatgcttgcgatgtctctcgaaatgtcaactgcacttgccgaggccccaattatgatcactacttgatcaaggaatggctccggcacacggtaattgtggctatgcatctgcttccctggccaagcatctaccccgggaatgacggcgaggcgtggctccgtgtagtgaccattgcagaccacgacggcatcatagaactcctcctcgccgctccccttatccccgagcttcctcgacgtccccgcccacctccctccgtcccccctcctcacactgagcacatccgtctcgaagcggatgagccggagcaggtcgaaccggcgcgcgaacgcctccaggtagcgg

SEQ ID NO: 272344 - DNA, 701 bp, Zea mays
tcctgtcttcggatggaagattaatccgtcctgatagaactctagcaacccacttactttggagttcaaacagtgggaaggggataacctggaaagaacagaggttggaatgttcaagatctttgagcttcacagggtaggttacaggtgcatcttaactggggcatcaatttgcagcaaaactgactttccaaggcaatccgatgaaggacaaatgaggtgccattcgggtgaaaaaatatgcttgtatagtggatcgacacggttgtcgtccacggtgatagtgctgtcatctccaaggaatggaaagtcatacaggtagctaggcaacatacaaatgcaagaagcacattatcagattccaaattaacgcaaaatggcatgcttttgtaggaaacgggatgcaagtgatactgcagatcactatacccagtgcagtgcatgataacatcagctttgattgagctgccatcctggaacaccacagtgccatcctcctgcgcatggtcaatctgcagcccgagcattagattcgccacaacactaactgtggcagctcctccagtagataaaagcttccatatcttgattcaccaggataaactcataaaaggtagtttaccatggaatgaagccacagattatcatagccaggctgcttgttacaggtggaagccggtgctgatctatcaacaatatgt

SEQ ID NO: 272345 - DNA, 525 bp, Zea mays
  unsure (1)..(525): unsure at all n locations
catcgcctgaccgacgcgcccgttttctcctgaaaacagaaggctccggcctccggcatccgccaaaaaggggaaaaaaggagagataacacacacacacacaaaccccaatcccctgcggcggcgatggacccgtcatcggcgggctccggcggcaactccctcccgtccgtcggccccgacgggcagaagcggcgcgtgtgctacttctacgacccggatgtgggcaactactactacgggcagggccatccgatgaagccgcaccgcatccggatgacgcactcgctgctggcgcgctacggcctcctcaaccagatgcaggtgtaccgccccaacccggcccgcgaccgcgacctctgccgcttccacgccgacgactacatcaacttcctgcgctccgtcacgccggaaacgcagcaggaccagatccgnctgctcaagcgcttcaacgtccgcgaggactgccccgtcttcgacggcctctacagcttctgccagacctatgcgggcgcctncgtcggc

SEQ ID NO: 272346 - DNA, 875 bp, Zea mays
gaagagtagagctaccaaaaaaggcctgttaagaaccttatccaaagaagctgggtaaaatctaacagaaaacctttgcttttttttgaaacttaagatcatcgaagccgttctttacatgcaaaggttctactgtgttccaaacgagtgaactcggaactaccccccagacaattgtgtttctgtacaagtcattcccagattcccttttgtgttccatttcttgcagagagaaagccattccaagattccctttcttctgtgtcccattccatgcaaagaacggcttcgatgatcttaagtttcaaaaaaaaaaaagcaaaggttttctgttagattttacccagcttctttggataaggttcttaacaggccttttttggtagctctactcttcagccttctcagacttctgtagtggaagagatctaccacgtcccagtgtgaagccccttgttccatctggcatcctcggtccagaaataggcttgtttaatgactcggaaccacaactgccttgtttgtttgcattttgctgcatctgaccttgacctttgtaccatccttttcgtcctctagcatttggcttctgatcttggtgctcagtctcagtgataaaaacaggtttcaaattatctctgtccttggtaatccccactgcatcagcaccggagatcttttccaaggttttaagctggtcttcttttgaatgttgattctgatcaatcattttggaaactgcatcttgattttctttagaaggttttttatactttcctggtcccattacgctttgtttagacagaagcctgactttcatcccagttctccagttgctctcatcacttagggcagtaacagccttctcagcagct

SEQ ID NO: 272347 - DNA, 332 bp, Zea mays
cgaaggtacagtgccccagccccgcgccccctagaccaaagcagaccagaatccgccctaccaatcgcctccccagatcggcggtccacccggaggcggcgatggcgtcgtcgcaggcgaacctcgacaagatgcagctccgccagagctaccgcaacgtctggcacaccgacatgacgaacgccatccaggccgacttcccctactgctgcctcgcgctgtggtgtggaccttgcgtgtcgtacatgcttcgcaaaagggctctctacaatgacatgtcaagatatgtctgttgcgctggctacatgccatgcagtggatagtgtggcgag

SEQ ID NO: 272348 - DNA, 776 bp, Zea mays
cacggatgcctcctcgagcgggagccatggcggcggcggcggcgagggcaagggcggcgctgctgccctcctccccctccccatcgccgctgttccgcctcccgcgccgcttccttgcactcaccgcgactcgctaccctctctactacgacctcatcgtgcatcgccccgcggaccccaatccccccaaatcctccgccgccggggccgaccggcagccgtcagccagcccccgaagagcagacgctcgaccgcgcaaagcgccggtacctccgcaagcgccgcagccgcctactccccgaccctgacgccaccaccaccactaagccctcctccttgtcgtcggagttcgtcgagctcaggccggaggtggtggacttcccgcgcctgcacgcgcgcgaggaggcgctctacttccacgacaccctcgcaatgccgggggggaaggacaagcactaccgcatgctctaccgcctcgagaagaagtacttcccccaccagtcgctcgacaacgcgttcgtctccgacgacgccgccccggcctccgacgccgacagggggctcgtattctttgacgacgagaagaaggaaaacgagggagaggagcgggcggtcagtgacaagggcgccaacaaaggggaggtgctggagaggaaggcggaggatttcttcaggtctctcaagaagggtcccggccaagtcgacaccaaagccaagagaccgggaacggagccgcagcagcaggtgaagcgcgaagtgcggagggaggaggagct

SEQ ID NO: 272349 - DNA, 329 bp, Zea mays
cggctcgagtaaaccgtgaatggccatcgaggtccaaaaatccatctggattctggagagaggagaccccaaaatcgcagcgcgcgaaaacgcaggagcaacccgcccactcgccaccaccgcccgcgcgcacggcggcgaccgatggccccgctcgtgccgatgtcgcagccatgggtggagaaataccggccgaggcaggtcaaggatgtggctcaccaggaggaggtgattcgggtgctcaacaacaccctccagaccgccgacctgccgcacatgctgttctacggcccgccggggaccggaaaagaccaccaccgcactagcca

SEQ ID NO: 272350 - DNA, 415 bp, Zea mays
tcgatcactgtctcccctccctaccttcgcaagtttgcgcctaaaccctagctcgcttcccaatggcgccgaagaagcgcaaggccgatcccgccgagtccgccgacgctgcggaggcagccgccggcaaccaccgccaggagccagcgccctcggagcccaagccccgcgccaccatctacttccccatcaccgacgacccgccggagcccgccgccgaggaggacgaggaggatggcgctggcgacgacgaggacgacgtggaggacatcggcaagctgctcgagccactgtcgcgggagcagctcgtcgcgctgctccgcacggcggcggagaccagccccgctacgatggcggtcgtgcgccgctccgtggaggcggaccccggcagcaggaagctctttgtccacggcct

SEQ ID NO: 272351 - DNA, 567 bp, Zea mays
gccgtctgcgttgcttgggtggggaaggagcaggcggccaggcgcagagccgcaaaagcagacgcgaaaaagcccaagcccgagccgaagcggggaggcgacaccgctgcacctgcactaccgctcgcacgggcagcgatttgccgcctcgcagggagccagctttggcgtcggcgtcggcgtcatcgtcggcggggagttcccggagagggattccggtgaggatgagcagcggcggcggtggagggggagccaggggaccgtcggggcccgtgccggcgtccgcgaggaagctcgtgcaggggctcaaggagatcgtgaaccgccccgacgcggagatctacgcagcgctgcgggagtgcaacatggacccggacgaggcggtcagccgcctcctctcccaagatacttttcaagaggtaaagagcaagcgtgataggaaaaaagaggttaaagaaactccagagccaagatctcgaggagcaagtaacttcagtcgatccagtagaagtggtgtggaccgtgctggacgaggcaattcagttcagtctggatcgagtggcactg

SEQ ID NO: 272352 - DNA, 473 bp, Zea mays
tttgttttcgttgcgtgggtaggggaagaagcaggcggccaggcgcagagtcgcaaaagcagacccgggggcagcccaggcccgagccgaagcggggaggcgacgccgctgcactaccactcacccggtcagcgatttgccgccttgcgggagccagttttggcgtcggcgtcggcggggagttcccggagaggggttctggcgaggatgagcggcagcggcagcggcagcggcggagggggagccagggggccgtcggggcccgtgccggcgtccgcgaggaagctcgtgcaggggctcaaggagatcgtgaaccgtcccgacccgggagatctacccggcgctgcgggagtgcggcatggaccccgacgaggcgggcagtcggctcctctgccaagatacttttcaagaggtaaagagccagcgtgataagaaaaaggaggttaaagaaaccctagatccaagatctcgag

SEQ ID NO: 272353 - DNA, 509 bp, Zea mays
cccacgcgtccgccaaaggtgagacgcttccccttctcctcgccgatggagtcgcttgcctcgcaagcgaggccggcggcggtgctctggctcgccggcttcttccaggccgcgcgcctccaccgcgttgtctccttctgcgccagctcgagggcactatccatcaggattgcacagtgcttcctgctgaacgggcttatcttccttgggagcttgcttacacttacatcggtggtcattccaactctactgtggatactacctgagcgatgcaatcaaacagcaggacatctttgtgaacacagggcagccatatctatctattcattcttgcgctccggccttggtgagattttttatgtattttgggtttatccactttatgtcttcagcttcatattaagtacgatttgggataatgacattgccaagcatgcatgggatgttgtgaaaagtaagagcctagttttgactcaatcactggatgctcaccacgtaactgaaacaaa

SEQ ID NO: 272354 - DNA, 522 bp, Zea mays
gcttgcctctcaatcgatgccctcttcagtgctctgtctcgccgacttcttagttgcctctcaacagttcggtggggagtctccttctgctccagctctaggtcactatccatcaagattgcacagtgcttcctgctgaatgggcttatcttccttggtagcttacttacactcacatcagtggtcattccaactctactgtggatactacctgatctattctatcaaacagcatgacatctttatgaacacatgtcatccatatctatctattcattcttgcgctccggccttgttgagattttttatgtattttggttttatccactttatgtcttcagcttcatattaaagataaaggcattggccaacatgcattggatggtgggaaaaggaagaacctaattttgactcaatcactggatgcctcaccacgtaactgaaacaaaaaaacaacctggaagatttgacaggggtgcacttggtattggggaacaaggctattcaattctttctttaaac

SEQ ID NO: 272355 - DNA, 384 bp, Zea mays
gcgagcggccgccctttttttttttttttaataaactcaactacatttttttgaattcaaaatagagacaaatgctccatgcatgattacacaacaaggactgtccaaagatagacctaacactgctatgcctgctgaattgacctttacgctcatcaacatctgagtaaggcctcacagtttaatgtcactacaccacaaggactgtccaaagatagacctaacactgttatgcctgctgaaactaacttcttcagatgtctcctctgtgtaatgaacccaaccaaactgagcaaaattgcagagtatcagggtccatatgagattgttcgttccagataggttggcaactgacaactaactggaggtttcatttgctcattg

SEQ ID NO: 272356 - DNA, 570 bp, Zea mays
ggccgcccttttttttttttttttgcaatgttcaacccatacatatattaacatgtaagcaatttacaaggcatccagaactactacaaagaagcatttaagcagcggtccaacaaactgcccaagcattcaagagtcatcacaaccgcgagcaaaccttccatattatcagctaatagtatcatcaaatgcatcagtgcttcaggagccacctcagtaacaatacatgagacatcaagtctacagattgtgcaatgcttaactctgaaccaactcagatgaacaggggcctcctctaactctcaaagcacttcctctttgctccaccagatatgatctgtcattttcctggggcattgtgctggaatgtaggaagccaactgttagatgagctagttatgtttacaataccctgattgtggtgaacagcatcaaattgtcctttatgtcttgaatcactataatttttccactgggaactaggaagagccacagatgttgtcagctgtgcttttccagcagccatgtcttgtctaaggttcacggtatgccgcacgtcaggattcagaa

SEQ ID NO: 272357 - DNA, 413 bp, Zea mays
tctcatttattgagtcgccatggccaacaaatgagataagaactcaaccgttgaagccttcgctcatcatttctgcaagcaaggatgaatctgttaggctatggaatgtccatacagggatctgtatcttgatatttgctggagctggaggtcatcgcaatgaagtattgagtgttgacttccatcctagtgatattgatcgtgttgccagttgtggcatggacaacactgtgagaatctggtcaatgaaagaattgtggctatatgttgacaaatcatattcatggactgaccttccatcaaagtttccaactaaatatgtccagtttccagtcttgattgcgtgcagtacactctagctatggtgattgtacaagatggcctggatgactcaacccattaaagtggttaat

SEQ ID NO: 272358 - DNA, 494 bp, Zea mays
aaaaaaattccagccgccacagccttcttcctcctcacgccgtctccttcttccctgttttccacggcagccagcagggaggatcggccaacagccatggcgtcctccctttcttccccagcgccaccctgcttcagccggctccccctccatgcgccctccctagccgagcttctctctcccctgctggttcccatgcgtgcaaggagcactaaggccagcgcccttgccctctgctccagccatggcgtgggccttctctgctccgggctcgcagtcgcccatggcgctctccccttctccgcggcgttcggtagcaggaaagagcagcgccccttccttctttcccatgaccggcgctccctgtccttctccccatggcgcccgtgccccagctctaggtgctcggcttctccatttcagaaggccggccttggtagccgctgttgccatgagtgccatggccgagcgccctgtttcctgctccatggctc

SEQ ID NO: 272359 - DNA, 2154 bp, Zea mays
  unsure (1)..(2154): unsure at all n locations
ccctcgtgntcgcccacgcgtccgcccacacactgcccaccggtctttctcacacaacacagccacacagggatataagctcagtccacgagatctcccgtagaccagtggcgagggaaggaacgaaacagagcccgatcctagcgacaggccagggaagatcgccatgatgatgatgggcgaaggcgtgagcgtgccgccgtggtcccaccacgtccccgtgagcggcgtcgacgccggcgtcggcggcgacgagatgacgccgtacctgctggcggcgctgcggcagtacctgccgtgcaacgacgccggcgccgccgaggcggacgacgaggaggcggcggccatggccgcgggcgtggacggctacggctgcgacgagttccgcatgtacgagttcaaggtccggcggtgcgcccgcgcgcgcagccacgactggaccgagtgccccttcgcgcacccgggggagaaggcgcggcggcgcgacccgcgcaggtaccactactccggcgccgcctgcccggacttccgcaagggcgggtgcaagcgcggcgacgcctgcgacctggcgcacggcgtcttcgagtgctggctccacccggcgcgctaccggacgcagccctgcaaggacggcaccgggtgccgccgccgcgtctgcttcttcgcgcacacgccggaccagctccgcgtgccgcagccgcagcagtccagcccgaggggcgcgtccgcggcatcgccgctggccgagccgtcgtacgacggctcgccgctccgccgccaggcgttcgagagctacggctacctcaccaagaccggcgtcatgtcgtcgtccccgaccagcacgctggtctcgcccccgaggtcgccgccgtcggagtccccgccaatgtcgccggacgccgccgccgcggcgctccgccgcggcgcgtggccgggtgccggcggctcgcccgtcaacgaggtcctcgcctcgctgcgccagctccgcctcggcggcggcggcggcggctcgccgaggtcggcgccttccggcgggtcgttcttgggaggcggctacccgttcgggtccccgaagtcaccggccggtctgtacagtctcccgtccacaccaccaacccggccgtgcccggtgatggtgaccaccgcctccggcgccaccatcatgaccgtggaacgcctcaacctcgggctcctcgtggatgaggagccggtcatggagcgggttgagtccgggagagccctccgcgagaaggtgttcgaacggctcagcaaagaaaccgccgtgcccaacgacaccgccgcctccgccaacgtagagggagcggctccggacgtcggctgggtctccgacctcatcaactgagggaaactcctgaaactaccagcatcagccgtgcctcctctgaacggtgcttatccatggtaagtgcgtgagggaagcttattagaggcgtcactgcacagcagcaggagaggaaagtagttcgtgggaaaaacaaaaaaaaaaaaatatttttctagatttgtactaagatgatccttgtacatattttcctccatgtgtgaatattcccggatggctgttggagggaggggaggcagggaaaggttgatttgttgtggggtttcagatgatggcatgccagtggggaggtagaagggatggccagtaaaacacaaaaggatcaaaggagacatggtatgcgaccagaccatgcatgaggtgtctagatgtacatagcgtctgtgtagtgtacctgtgtgttgtgtgtgtgtggaggtagagcgtggcaggggcgaccatgtcggcgatccaagactggaagtaaagatgactggatttttttctatggccgcactgcaccggcggcggctcccggtgacgtttccggcaagaaggcctggagcggttccagaacaacatcatcgtctcgactctcgagtacttgtcattccaccgttcattctgttatttattatctggtattactgctctgtaattttctcaatgtatttccttattgatctcgtctgctctagctaggggccgggagcatctatgtaccttgcactactatgtgctactgtttctgctgataaggaaataataattaagaccggccttgttaattaaaaaaaaaaaaaaaagggcaa

SEQ ID NO: 272360 - DNA, 778 bp, Zea mays
cccatgtgttcgcccacgcgtccgcccacgcgtccgggggggcgttcggcgacgagttccgcatgtacgagttcaaggtccggcgttgcgcccgcgcgcgcagccacgactggaccgagtgccccttcgcgcacccgggggagaaggcgcggcggcgcgacccgcgcaggtaccactactcgggcgccgcctgcccggacttccgcaagggcgggtgcaggcgcggcgacgcctgcgacttcgcgcacggcgtcttcgagtgctggctccacccggcgcgctaccgcacccagctcctgcaaggacggcacgggcttgccgccgccgcgtctgcttcttcgcgcacaccccggaccagctgcgggtgctcccggccacgccgcagcagtctagcgccagccccaggggcgccggcgcgctgcccgagtcctacgacggctccccgctgcgtcgccaggcgttcgagagctacctcaccaagagcatcgtgtcctcgtcgccgaccagcacgctcctgtcgccgcccaagacgcccccgtcggagtcgccgccgctgtcgccggacggggccaccgccgccttccgccgcgggtcctggccgggcgccgggtcccccgtcaacgacgtcctggcctcgctccgccagctccgcctcggcacggccagttcgtccccgtccggcgggtggggcggctacccggcgtccgcggctgcctacgggtcgcccacggcgggcgggctctacagcctggcctccaccccgagggccacgccgaca

SEQ ID NO: 272361 - DNA, 429 bp, Zea mays
  unsure (1)..(429): unsure at all n locations
gctggacgcccgnggtcccggacctcccttcctgggttgaccctcgcgtccggtgctggctccacccggcgcgctaccgcacccagccctgcaaggacggcacggcctgccgccgccgggtctgcttcttcgcgcacaccgcggaccagctgcgcgtgctcccgcccacgccgcagcagcagtccagccccaggggcgccgcctgctcttccccgctcgccgagtcctacgacggctccccgctccggcgccaggcgttcgagagctacctcaccaagagcatcatgtgctcgtcgtcgaccagcaccctcctgtcgccgcccaagtcgcccccgtcggagtacgctccattgttgcccgactttctgcgtgggtggtggccgggcgccgggttccccgtaaacgacgtcctcgcctcgcttcggcagc

SEQ ID NO: 272362 - DNA, 542 bp, Zea mays
ctcacgcgtccgcccacgcgtacgcggacgcgggggcggccaagcgcctcgaaggcaaagcttccactagccacaggccaacgaaatcgcaaagcgaagctacggccaccgaccgacgttccaagaagcgaaacgaaacgaaaatgatgatgatgatgggagagagagcgcacgcgcctccgtggcagcgctcgccggcggccagcggcgtcacggacgcggacgacgcgtctccgtacgccctcctagcggcgctgcagcattacctgccgtcgaacgaggtggcggcgtacgacgaagacgacgaggaggcggccctggcggcggcgaccgccgccgtcgacgcgtacgcctgcgacgagttccggatgtacgagttcaaggtgcggcggtgctcgcgcgggcggaaccacgactggaccgcctgcccctacgcgcaccccggggagtaggcccggcggcgcgaccccaggcggtaccactactccggcgccgcgtgcccggacttccgcaagggcgggtgcaagcgcggcgacgcgtgc

SEQ ID NO: 272363 - DNA, 449 bp, Zea mays
tcggaacaatcccttccactcccctcccctaaacccctcgccgcccgcggggctcgccggccggcgcccctccaggcccccactccctccgcgtgggcgcgatgccaacggcggtgccgacgcccaaggcggtggtccaccagcggttcggcgccaaggcgcggtacacggtcgaggaggtgcgggaggacgtgggcggctgcccgggcctcgcgccgcagaccaggaacgtctaccgctgcgcgctcgtcctcccgggcccctccgttgccacgcccggtaccttcctcaggaagaaggacgctgagcaggccgccgcgcagatcgcgctcgacaagcttggtattcatcctacagcaaatagtcccaccacaccccaagaagcttgggctgaactgattgctcgcatatctggttttttcatagatgagaactttctgtcatctacc

SEQ ID NO: 272364 - DNA, 850 bp, Zea mays
gcacgcatgatttggaagcgccccttgtttcaaagagaggtggacgggttattcacatttaatttgatggtcagaggcgaatcgaaagttaagcagtggtaattaagacccccgggtgaaaatagggatgtctcctacgttacccataatatgtggaagtatcgacgtaatttcatagagtcattcgatctgaatgctacatgaagagcataagccagatgacggcacgcggagacctaggatgtagcagatcataacatgagcgattcggcggatttggattccttttctatatatccactcatgtggtacttcatcatacgattcatataagatccatctgtctagagatcgtcatatacatctagaaagccgtatgctttggaagaagcttgtacagtttgggaaggggttttttgagaaaaaagaagaatctacttcaaccgatatgcccttaggcacggccatacataacatagaaatcacacgtggaaggggtgggcaattagctagagcagcaggtgctgtagcgaaactgattgcaaaagagggtaaattggccactttaagattaccatctggggaggtccgtttggtatcccaaaactgcttagcaacagtcggacaagtgggtaatgttggggtgaaccaaaaaagtttgggtagagccggatctaagtgttggctaggtaaacgccccgtagtaagaggggtagttatgaaccctgtggaccacccccatgggggtggtgaagggaaagccccccttggtagaaaaaaacccccaaccccctggggttatcctgcgcttggaagaagaactaggaaaaggaaaaatatagtgatagtt

SEQ ID NO: 272365 - DNA, 1058 bp, Zea mays
tattcataccacatcacttgaacaataagaactcgaattcttatcgatactggaactcagagcataggggggaaagtcgatttatggatggaatcaaatacgcagtatttacagaaaagagtcttcgtttattgggaaagaatcaatatacttttaatgtcgaatcgggattcactaagacagaaataaagcattgggtcgaactcttctttggtgttaaggtagtagctgtgaatagccatcgactacccggaaagggtagaagaatgggacctattctgggacatacaatgcattacagacgtatgatcattacccttcaaccgggttattctattccacttctagatagagaaacgaactaaaggagaatacttaataatatggcgaaacatttatacaaaacacctatcccgagcacacgcaagggaaccgtagacaggcaagtgaaatccaatccacgaaataaattgatccatggacggcaccgttgtggtaaaggtcgtaatgccagaggaatcattacacgcaaggcatagagggggaggtcataagcgcctataccgtaaaatcgattttcgacggaatcaaaaagacatatctggtagaatcataaccataggatacgaccctaatcgaaatgcatacattcgtctcatacactatggggatggtgagaagagatatattttacatcccagacgggctataattggagatactattgttgctggtacagaagttcctatatcaatgggaaatgccctacctttgaccgatatgcccttaggcacggccatacataacatagaaatcacacgtggaaggggtgggcaattagctagagcagcacgtgctgtatcgaaactgattgcaaaagagggtaaattggccactttaagattaccatctggggaggtccgtttggtatcccaatactgcttagcaacagtcggacaagtgggtactgttggtgtgaaccaatatagtttgggtagagccggatctaagtgttggctaggtaaacgcctcgtagtaagaggggtagttatgaaccc

SEQ ID NO: 272366 - DNA, 1702 bp, Zea mays
gtcgagcacgcgtccacgacgaatcatggcaggctggccgtccgtgattgttttggaacgggcagcgtgtttggttggtgcctgtgctgtgccgccgttcgtctctgggtagcgtagcgacggcgccacggcggcttccggctcgtgcgcgcgcgcgcgtgtccgggcgagaagagctgccaagggatggaggcgctgaggaagcaggcgagcaagttcaaggagcaggtcgccaagcagcagcaggctgttataaagcaattcagtactactggctatgagcggtcagattccattgtaattgatgaggttgaactacagagacatcaacagcttgagaaattgtatacttctactcgttctgtaagggatttccagaaggacatagttagagcagctgaaggtttggtgtctattggaaacaaacatattgaagtgggaacaaaattttctgaggactgctatagatatggaagcgaaaataatgcaagcgacgaagcccttagaaaagcagcatcactatacggaggtgctttgagaaatattgagaaagagtatgaagatttcaacagaattttatcttctcagactatagacccattgagagcaatggctatgggtggacccctggaagatgctcgtggtcttgcacagcgctatagcaggatgagacatgaagctgagatcctctctactgaaattgctagaagaaaggcacgggtaagagaagctccaattgctgagcacactacaaagcttcagcaatcagaagctagaatgatagagcacaaagcaagcatggccgtgttagggaaggaagcagcagctgcacttgcagctgtcgagtctcaacagcaacgagtgacccttcagaggctggttggcacggcggaagcagaaaagttattccatctgagattagctgctatacttgatgacgttgaggcagagatgtcctctgagaagcaaaggtgagaatctgcaccacctatcatatcttcacataagcgtgctgagaaagctcagtacttccttgctgaggtaatgcataatttcaatggaaccacggagaaggaactgagcttaattgttggcgattatgttgttgttcgtcagattgctcccaacggctgggcggaaggagaatgccgagggaaggctggctggtttccggctgcctatgttgagaggcgcgagaatatccccccgaataaagttttccctcaagtataagatcataagaggggtcatctgtttccactgataagcagtttggtttggcattgaggagctgcaaggctgtatctaacttctgattggtttgatgctccgtatggcgtatcttgtgcatcctatgttcttgtggtggtctagacttggaataagatatgtcggcacgtgctctgcgcctgtgcctgcgcgcacattgatgaagatgtcgctttgcatgtgtccgcagtgtgctactgcttgcggcagcgtaggtcatgttgaatgagctttcctttactgacagatttcgagtgtaaattggttcttgcacttttttttcgttagggtgtatcagtagttctgtacaatatgtttttaatgagaccattcggccatcagagctttgatctgtctcctaactgcaggattttttttcagaacgcttatttcccatgttagctgtcaaaagttgattttttttttctttccc

SEQ ID NO: 272367 - DNA, 467 bp, Zea mays
gcctcgtggcggtaatggtaacggtaaccatggccagaagagacacacgcggcgatacgccgacaagtagaccaatctacccaacactttagggttcagcatgctgtgtttgcattgtcgcgcatctttgagcaatgagcaagattgggttgctcctccctcccggaggcactgctgaaccatacatggaggaaggagactcgggtcatgggcaccctttaccgtgagaagcgttgtagcctacaccaccaacatttctctttcttttacttcttcccaggtgtactatgaacttcggtgcaggtgcagcggaccttttatattatctgcactttgctggggttcagggggttaggcctttgttttattggtcgttgtttattgtaacttgtgaattcgtttgagttcgtctgtttgtttttttggctggcgacctacattcgaacttgttagccgcagtttaactc

SEQ ID NO: 272368 - DNA, 489 bp, Zea mays
gtggaaggcggctggtgcctccacgacatcatccggtctaacgactggaagatcaatggcatcgtgaacggcatcgaccaccaggagtggaaccccaaggtggacgtgcacctgcggtcggacggctacaccaactactccctcgagacactcgacgctggaaagcggcagtgcaaggcggccctgcagcgggagctgggcctggaagtgcgcgacgacgtgccgctgctcggcttcatcgggcgtctggatggacagaagggcgtggacatcatcggggacgcgatgccgtggatcgcggggcaggacgtgcagctggtgatgctgggcaccgggcgcgccgacctggaacgaatgctgcagcacttggagcgggagcatcccaacaaggtgcgcgggtgggtcgggttctcggtgcctatggcgcatcgcatcacggcgggcgcccacgtgctggtgatgccttcccgcttcgagccctgcgggctg

SEQ ID NO: 272369 - DNA, 651 bp, Zea mays
tttggcagtgacacagtggcattttactgcgcctgcgcctgtgcgcctgcgcctgtgcgcccaccagtcacaaggcccatatcctcctccgctccttcctctccgtctctcccctccagcattgcggtggagagggaagcaagaggtatcggagatagagagagaaagggcgaaaaacagaagggaacagcaacggagcagctgatcaggggctgacgcgcgcgacaatgctgctcaagagggtggcggcggacgacggcttccgcgccggcgccggcgccggcgtagggaggccacggctcttcgccatgccaaggctgctggtcgggctcgaggcgcccaggtgcggcgcaccagactgcgcctcgccgatgacggcgcgcagcccgacgtcgccgctcgatctcaggcccttcgcctcgctgctccgctcgccgcgctcacccagaaccaggagctgggattcgcaccgccttggcctcggcggcctcgtcgacgacacgctcgccgaacccgtcgcatgcgccaggagccgcctgctcggcctcgggccccaagcgcggcagccgttcaagctgccgcaacgcctcgccaagcccctggccacccagccgagggactgctcccacgcatcctcggagctcgggaatg

SEQ ID NO: 272370 - DNA, 611 bp, Zea mays
cgcccgtggcggacgcgtccgccacgcgtccctactctcttcgtctgcgcccccacaaaaccctagacgccaccctcccccgccgcgcgccgccgcccgcggacatggatctccttcgctctcatctccacaaggtccggatccccgagccaaccaaccgcatccacaaggacgagtgctgcgtctccttcgacactccgaggtcagagggaggcctgtacgtggacatggtctcgttcctggggttcgggagggagtacgtggagtggaacttcgagaagacggggaaccccgtgtacctccacatcgttcagcgccggaagccggagcccgacgaggcggatcgcccgcttaagaagcccaccctcctcgctataggtgtggaaggaggttttggtgatcaagaaccagaatatgatgaaacttttgaaatagtcatcttacctgattttatttgtcttccatttccgtcagttgatttgccagagaaggttaggcttgcggttgataaagttttacttgctgaaagtgctgatagaaaagaacaactggctgcttgggttgctgacaaaaagaacattagtgcatatgctatggacctgcagcagcta

SEQ ID NO: 272371 - DNA, 591 bp, Zea mays
ttcgtctgggacgacacgccggcgtggctgctcacgtgttcttgccgccctgcgctctcgccgcccggggcaactggcgagcgagtgtggctgccgcttcctctccgagtcgggcgccattttaataattcaattcgacccccaagcccacgcttccgaattcaccgactcctcctccacgccgcgtcgagatcgctcaggccttcgcttccagcaactccaccactcagcccacccgccggagcaatggggagcacggggcgcgagccggaggtgacccgcgccgacttccccgacggcttcgtcttcggcgtcgccacctccgcgtaccagattgagggagcgagaagggagggaggcaaaggagacagcatatgggatgtatttacagatgacaaagaacatgtcttagacagaagcaatggagaaattgcagttgatcactaccatcgatacaaggaagacattgagctcatggcaagtctaggttttagcgcatacagattttctatatcttgggcacgtatatttcctgatggcttggggagacatgtcaatgatcaaggagtcgccttctataatgacctcatc

SEQ ID NO: 272372 - DNA, 234 bp, Zea mays
agagaccgtggtcgaccacgcgtccgcttctgcttgtcaatcggggtttcagcttagtttggagggtgtggagttgattcagctcggtttggatggactaagattgaaggagcgagaagggagggaggcaaaggagacagcatatgggatgtatttacagatgacaaagaacatgtcttagacagaagcaatggagaaattgcagttgatcactaccatcgatacaaggaagag

SEQ ID NO: 272373 - DNA, 513 bp, Zea mays
ttgttttagatcgcgacggccgcccttttttttttttttttgctgttcgttgccaattgccataggcatcatgtgaacattcagtattacaaccagccaggaaatgtatatgtatatctatcctgcacttcattcttctcgtactgctgtacacatggattttctagctaactggctgtcatggagttttacacgcagtcgctgagccaacaaattagccaactgatccctcgagtttcaggttcatgagtgcgtccacctcctgtgcgaattcatagggaaggtgctcgaaaacagatctgcagaatccaccaatcatggcggcaacagccttttcatgatctacccctctttgctggaaataaaatagctgatcctctccgattttggaagtgcttgcctcgtgctcaacacggccactagtgcaacccacctgaatggtgggataggtgttcgcagccgcattatccccgatcagcaatgagtcacacttgtgaagaattataagcattc

SEQ ID NO: 272374 - DNA, 418 bp, Zea mays
tttcgagcggccgcccttttttttttttttttcctttgaagacgggtgggacaacttgttatcattgacgacataccaaggactgacctatacagttctgtaacgccaacacgttgatttccgttcttgtataggtgactaggggagccatgtgagctcgcttacagttacagcagtagcaaaaactgggcaacagaagacaaacaggctcaactgctacatcttcatagttcggtgccaattgccatagacatcatcaacattcagtattacaaccagccaggaaatgtatagttatcctgtaatttattcttctcgtactgctgtacacatggattttctagctaactggctgtcatggagtattacacgaaatcggtgagccaacaaattagccaactgatccctcgagtttcag

SEQ ID NO: 272375 - DNA, 2092 bp, Zea mays
cgagaaaattaggagaccaacagcacgaagggggaaaaaaggagagcagaaatccccaatccctcctcacttcgacccttgctcggaatctccccgcagcgtccggctgaatccattcgattcactcatggtaggcttcgtcttcttctgctgattcgctggatcgtctccaccgacgcggctgcgcccacacctgccgtcacagccatggagccgcgcatcggcaacaggttccgcgtcggccgcaagctggggagcggctcctttggggagatctacctcggcaccaacgtgcagaccaacgaggaggtcgcaattaaactggaaaatgttaagacgaagcatcctcaattgctttatgagtcaaaattatacagaatacttcaaggaggaactgggattccaaatgttaagtggtttggcgttgagggtgattacaatgttttggttatggacttactgggaccgagtcttgaagatctttttagcttttgcaacaggaagttgtccctcaaaactgttttgatgcttgctgatcaaatgatcaatcgagttgagttttttcattccaagtcattcttgcatagagatatcaagcctgacaattttctcatgggtctcgggaaaagagcaaaccaggtttatgttatcgattttggacttgcaaagaagtacagagatacatcaacacaccagcacattccatacagagagaacaagaacttgactggaacagcaagatatgcaagtgtaaatacccaccttggaattgaacaaagccggagggatgacatggaatctcttggatatgtactgatgtacttcttgcgaggaagccttccatggcagggcctgaaagctgggaacaaaaaacaaaagtatgaaaagatcagcgaaaggaaaattgctacttcaactgaggctctctgccgtggatatcctaccgaatttgcttcttacttccattactgtcgctcactgcgtttcgaagatgcaccggactatcagtacctgaagagattgttcagagacctttttattcgggaaggttttcaggttgattatgtttttgactggaccattctaaagtaccaacaggcacagatgaccactgctccacctcgtgcaattgctccagcagtaggacaaagctctgggatggctcctgtggcaaacaacaatagacattcaggcactgaagagggaaggagaagcgggtggtctgacatggacccaatgcgacgccaggctccaccaccagttataaatgcaggcagcctagccaagcagaagtcgcctgttcggcctgagacatcaacatcgaaagatgctgtgttctccagttcgacttttttgggacgttcaagcggatcgtcaaggcggcctgctgtctctagtagccgagagctaagcactgaagcggagcaaacacgtagccgcacaactgacgcgagcccaggggcattccagaggtctggagctccacggtggagcccgcagatgcctgattcctcggacggcaggcgttcgtcttccagcaggcgccactcatctaaccccaagaactacgagtctaccattaggggcatgcagggcctaaactttgatggcgatgacagggtgcactattagcatctcatctgtctgggagggtgcatcgcctcccctccccatagatggatgtaccaaggacggccagataataagaggtttgggtgagtgagcccgagcagtccgggtgacgtctcgtaggaactgtgtatgctgcttagcctctgttgttgtacaggcttgtcatttgtttggtctgcgcttaccggtagggcgcgccttgtccggtgaacgatgatggtgtattatgagagggatttcttaaggggttcacgtttggtgtgcttgggttgctttgatagaaacatttgggagaggtttatcgcgcctgctctgctctctcatgtaactccagattgctgagctggcacctgctctgctctctcatgtaatgtaactccagattcctgagctgctatgtttttttttaaaaaaaaaaataataaaaaaaaaactaaaaacaaaaaaaaaaacatattac

SEQ ID NO: 272376 - DNA, 684 bp, Zea mays
  unsure (1)..(684): unsure at all n locations
tcttatcaatcgagttgagtttgttcattccaagtcattattgcatagagatatcaagcctgataattttctcatgggtctcgggaaaagagaaaaccaggtttatgttatcgattttggacttgcaaagaagtacagagatacatcaacacaccagcacattccatacagaacaaagccggagggatgacatggaataaaaaacaaaagtattcgggaaggttggtttaatacactgtcagccttccatggtagggcctgaaagctgggaacaaaaaacaaaagtatgaaaagatcagcgaaaggaaagttgctacttcaactgaggctctctgccgtggatatcctaccgaatttgcttcttacttccattactgtcgctcactacgctttgaagatccaccagactatcaatacctgaagagattgttcagagacctttttattcgggaaggttttcagtttgattatgtttttgactggacaattctaaagtaccaacatgcacagatgaccacggctccgccacgtgcaattgctccagcagtaggacaaagctctgggatggctcctgtggcaaacaacaatagacattcaggcactgaagagggaaggagaagcgggtggtcaggntgtggacccaacgcgacgccaggctccaccaccagttatgctgctttagcc

SEQ ID NO: 272377 - DNA, 433 bp, Zea mays
cagctcgagcggctcgagcttcggagtcctatatttgtaaataactgtactattgcaaagagcgaacgggagcgacctccaggaaaatcgcagagaatgagggggatcctcttcgggccccggcggcagccgccgccgctcccgctcttccccgccgccaagcgctcctcggcacccgcgaaccttcttttcgctcgcctctatcgcttcctcccggccagccccatcctccggctccttctcctcctcgcactcctctccctcatcccgccggccttcttccacctccgtctccgccgcttccaccaaatgcgcgagaggaagtgcgggtggatcgcgaggccacccatggtgtgcgcgcacggcggtgactccaccaacgccttccccaattcgatggacgcatttcggatggctctcgacgcgcgggtcg

SEQ ID NO: 272378 - DNA, 337 bp, Zea mays
tcgctccagctggccaccccatcctcgtcttctccaattccaaagtaagaaagccacacgcgaggccgaccgaggaagtccaatctcatggcgctctcctgcatgaggtgccccgcgggcgccggcgccgcctccgcccgacgcgccgcagcgcagccgttggccgcggaggctgcggtctccttcgccagatgccgcggcttcgggaggtccgccaccgctgcgacttccgcctggttttggcgcaaccatgccgttgcctcacagggagtgaaagctcccatggatgctgatgtcaagaatgctgtcatacctcctacctcaccaaaggtggaaa

SEQ ID NO: 272379 - DNA, 533 bp, Zea mays
cggacgcgtggtggcaccaccgcctcccctcctctccttattaccaccacctagctagcagcggcagcgccagcgccggcctgttgtgctgctcgctcagacagctctgctagctgcatcctcctaattctccaggtctctctctcctctcccaactcccaagtcccatccggatccgagacgctggaggcggagcgcccccccgggacggcggcggcgacgatggggcgcggcaagatcgagatcaagcggatcgagaacgccaccaaccgccaggtgacctactccaagcgccggacggggatcatgaagaaggcgcgcgagctcaccgggctctgcgacgcccagggcgccatcattatgttctactccaccggccagtaccacgagttatgcagccccggaaccgacatgaagaccatctttgaccggtaccagcaggccatggggaccaggctatggatcgagcagtatgagaatatgcagcgcacgctgagccatctcaaggacatcaatcgtggtctgcgcacaga

SEQ ID NO: 272380 - DNA, 519 bp, Zea mays
ggtagaacgccgacgcggttctggtggtggaggcatgccgttctccaggccagccgcagtgtcatcaggtgtggcggacgtcagttgctccaggaggtccagctgtgcacgggccgaagaagctgcaacactgggttcctgtgtagcgccttcctgccgcgcggtcgccctgcagcaaccgagtgccctctgcgcgggggcgacggaggccttgagggggaccctgccgttcttcacccccgccgccgcggcgtccaaggcatggagcctcgtggcggaggaaggcgggaagctgcatgccatggagttgatggatcgacgcgctgatggcgcgagcgcaggttgccacgaaggtaggtaaggatacagagcaacgaccgaagaacgccgaagagagtagggagagtatttagttcctcgtgtgctatatcaaatcaattccccaatttctagcgtcaccggtggcgccgcctgtctccgccacagaaaattcccgtgaccggcgagcggagagttggc

SEQ ID NO: 272381 - DNA, 2332 bp, Zea mays
cggacggtgggcaaaatcatcagctcccgaaatccaaattgaaacagttgcaggcgattctgagctcgggttttgttccggggacggattcctgtgccggcggacgggatgtcaggccctctcgaccgatttgctaggccatgctttgaagggtttgtacataacgatgaaaggaaagagagcagatctgatgcagacaactcagaaggagataagaagactaagattgggtctttcaagaaaaaagcaattaatgcggggaacaaattcaggcattccttgagaaggagaagcaaaaaaaagaccgaaaggggggattccatcaaggacataagggacgttaaagagcttcaagatgttgagacattccgacaatgcttaattgatgaggatttgctgccaccacagcacgatgattatcacatgatgttaaggttcctaaaagcacggaaatttgaagttgagaaagctaagagtatgtggtcagacatgatcaattggaggaaggaattcggagtcgacaaaatagaggaatttgactacaccgagttagatgaagtgacagagtattacccacaattttatcatggagtagataaagagggaagacctgtctacatagaattagtaggaaaagttgatgcaaacaagctaatacaagtgacaaccctagatcggtatgtaaaataccatgtcaaagaatttgagaagtgcttccagatgaaatttccagcttgcaccattgctgctaaaaagcacatagattcgtccactactattttggatgtgcaaggcgtgggtttcaagaacttctcgaaatctgccagagaattaatcacacgattacagaagatcgacagtgataactacccagagacactgtgccggatgtatataattaatgctggccaaggcttcaagatgttatggagcacaataaaatcattcctcgatccaaaaactgcttccaagatccatgttcttgggaataagtatcaacataagttgctcgaaataattgacgagtgtgaactgccagaatttcttggtggcaaatgcaattgtattgaaggttgccaaagatctgacaaaggtccttggaaggatcccaacataataaagagagtcctcaatgacgaggcaaactacggcagacaaattgtgaccatatccagcattgatggaaaaataatacgttatgctaggccagatcacccaactagaaaagggagtgatgcatctgccgagtctggatctgaagtggaagatgtaacatctcctactgcatcaaggaacctgattacacatcctattttgacccctgttcacgaagagtcaaaattgtcgccacatggttccacatttgttgctcatgcttctattgaagaaaacattcctgttgtagacaaggttgtggatgatggatggggtactcccagaggtagtctccaagcttcttcaggttcgttgccctcgagaaacacgcacggcacattcgaaggactgagagttcaagctgtcgcatggctgacgttcttgatcacggcccttttcgccacgctctgttccgtcccgagcaagatggccagaaggatctccagccagtctagcaagcacgacgactaccgcggcgagtatcctcaagaggaggaggagcacaaggaggagttccggcctccgtctcccgccccgtcctacacggagaaggacgtgctctcgtcgatgctgagacggctcggtgagctggagggcagggtgcaggtgctcgagacgaagccgtccgagatgccgtttgagaaggaggagctgctcaacgcagccgtccgccgcgtggacgcgctggaagccgagctgatctccacgaagaaggccctttacgatgctctgatgcgacaggatgagctgctcgcgtacattgacaggcaggagctgatcaagttccgtaaaaagaagttctgcttctaagatctgaccatggagcagctggtcatgtccggagccgttcgtgtatattgttggatcgcggctagtacggtgaatgatgtaatgtgtccatctgtacaagtgtgtaacggaacggtgtaagtatagtaggaaaacaatgtgttagctgtgcggtagcacttgtgtgctagcctaaattgtaatcttgcaagtcggtgcatagctgattgcgcaccaatacgtagttatgaatggaatcgcactcgtgttcgtataaaataaaataaattagcagcgccaaatgtttaaaaagaactatacagcgaggcttcttcaacaaagaaaaagtagctgaacgaagacaacgcaaagaagacatgtgggcgcc

SEQ ID NO: 272382 - DNA, 232 bp, Zea mays
  unsure (1)..(232): unsure at all n locations
tcgcttcgccaaactcctgctcggcgaggacatgtccggcagcggcaagggcgtttgcaccgcgctcgccatctccaacgccatcaccaacctctccgccaccgtgttcggcgagctgtggaggctggagccgctcgcgacggcgaggaaggcgatgtggacgcgggagatggagtggttgctctncgtntncgncttcatcgtngtgctcacccccttcattcaggagctc

SEQ ID NO: 272383 - DNA, 831 bp, Zea mays
agctggtacgcctgctggtgccgccgcgccgtgaattggccgggccgacccacgcgttcgagctgttggcaaaactgcacaggaagttgttaatgaggtcaggagacaatttatcgagaggcctggtattatggactacaaagagaagcccgattatggacgctgtgtcgcaattgtggcctctgcatccttaagagaaatgataaaacctggggctctagcaattatatcacccatggccgttggcgttgtcttccggattttgggccactacactggtcagcctcttcttggagctaaagttgtagcctccatgctgatgtttgcgacggtcgctgggattctcatggcactcttcttgaacactgctggcggcgcctgggataatgcaaagaagtacattgagactggcgctcttggtggcaagggcagcgagtcccacaaggctgcggttactggcgacacggttggagacccattcaaagacactgctggaccgtcgctgcatgttcttatcaagatgctcgccacaatcacgctggtcatggctccgatattcttgtgattaaccaaccactcatcaagcttgctattaaccctgcggagatgtacctatgcgaccaggtagatgaggtgtgtgtgtgtgtgtgttacctgcatgtgatgatgtaacggtccaatcggtttgtgtcacgacatgctgtacccagagaaagaagcggcgatctattacccatgtctcacggtagatattatactgatgatgcaaatgccgtgttttgttactgaattagtggcctgaaaagaaatgacataaaaaaaggaaaaatg

SEQ ID NO: 272384 - DNA, 741 bp, Zea mays
gtctcggatatttttgttggtggtttattaggctcgatgcttatattcctgtttagtgcatgggcttgttcagcagttggcaaaactgcacaggaagttgttaatgaggtcaggagacactttatcgagaggcctggtattatggactacaaagagaagcccgattatggacgctgtgtcgcaattgtggcctctgcatccttaagagaaatgataaaacctggggctctagcaattatatcacccatggccgctgacgttgtctaccggattgtgggccactccactggtcagcctcttcttggagctaaagttgtagcctccatgcttatgtttgcgacggttgctggtattcttatggcactcttcttgaacactgctggcggcgcctgggataatgcacagaagtacattgagactggtgcccttggtggcaaaggcagtgagtcccataaggctgcggttacaggcgacacggttggagacccattcaaagacactgcaggaccatcgctgcacgttcttatcaagatgctcgccacgatcacactggtcatggctcccatattcttgtgattaaccaaccagatttatcaagcttgccattaaccctgcggagatgtatctatgcgacttgtagatgaggtgtttacctgcatgtgatgtaatgatccaatcggttttagtgtgactacatgttgtacccaaagaaagaaagaaagaaagcagcgatctgtaccc

SEQ ID NO: 272385 - DNA, 413 bp, Zea mays
cgtcattccacacgcttgggcgagcgagccttgttccggaagcgcgcggacgacatgctgatgctgcacccgaggctggtgtcgtcgagcgccgtggacgacgaggaccactgcgagagctgcgcctgctactgcgccatggtgccctgcgtctcgctgctgctcttcatcgtgctggctgccgcggccagcatcccgagggcctgcgccatcgccggcgtcatgctgctcctgctggggctcgtcggctggctcgtgcccacggggaatggagccggtccggcggcgcagcagcagcagggccaggctgctgacgatcctggggcgcggcggctggtggtgcaccaccggtgcacgtgcaggctaacggacgccgctatcgccgcgctgccggcggcgttaagacactacga

SEQ ID NO: 272386 - DNA, 245 bp, Zea mays
ttcgtttgcaaaaccggagctgcccccgtgccaaggcgagagcaactgcaagctgctcgtctcgtccaataatagccgcaggagcgcaagcgcgaccgaattcggtgcgttgctcttgtcgccatcgcatccgcctccgcctccgcctccgcctccatccccacctccccctccaatccccgcagaaaccaccggcgccgtcgaccgcaaccagcagtggttccgtcgccggcgcgggattgggc

SEQ ID NO: 272387 - DNA, 796 bp, Zea mays
ctctcctgcttcgcggctgtctctttcatcggccacccacggcggcggagcatagcagtaagcaagcagcggagacgccggagagcggtgaagaagcatggagatggagcagctctgctcgctgctccgcgacctcgacgcgctcaagcagcatcccgacgacctcacttccaccatcgatcggatgcgggagcggctagtggcgatgatgaatccggcagccggtgccgcttctcgatccaagattaaggacatgagtgcagaagtggtggacaacaatccctacagcagacttatggcgttgcaacggatgggcgtagtggagaattatgagcgcatcagggactactccgttgccatcgttggcataggtggcgttggtagtgttgctgcggagatgctcactagatgtggaattggacgactgttgttgtatgactacgacacggtcgagttggctaacatgaataggttgttctttcgcccagaacaggttggaatgaccaaaacagatgctgctgtacagacactttctggaataaatcctgatgttgtgttggagagctactcattgaatattactacagtcaaaggtttcgaaacatttttggcaagtttaaaagcacaaagttctcatgagcgtacactggagttgatcttgtcttgagttgtgtcgataactatgaagctcgtatggttgtaaatcaggcatgcaatgagcttggtcaaacgtggatggagtctggtgtctcagaagatgctgtgtctggtcatatacaactgctggttcctggtg

SEQ ID NO: 272388 - DNA, 1753 bp, Zea mays
cgagaggcggcgctccgggcgcgctcctacggctgcatccgcctcttcctcgccctctcgctgctgctgctcgccgtcgaggtcgcggcctacctccggggctggcacctcgaggtggacgtgggcgccgggatcctcgccgtcgacggcctcttcgccgccgcctacgcggcctggatgcgcgcccgcctcgactacctcgcgccgccgctgcagttcctaaccaacgcctgcgtcctcctcttcctggtccagagcgtcgaccgcctcgtgctctgcctcggctgcttctggatcaagctcaagggcgtcaggcccgtgccgccgctgcccgccgacaaggaggacgtcgaggccggtcccgacggcgtccccatggtgctcgtgcagatgcccatgtgcaatgagagagaggtgtaccagcaatccatcggtgcggtttgcagcctggactggccaaggtcaaatttcctggtccaggtgttggatgactctgatgatgctaccacttcggcacttatcaaggaggaggtggagaaatggcagcgagagggtgtgcgcatagtataccggcaccgggtgatccgggatggctacaaggctggaaacctgaaatcagccatgaactgcagttacgtgaaagactatgagttcgttgtcatcttcgatgctgatttccaaccacaggcggacttcctgaagcgcaccgtgccccatttcaagggaaaggatgacgtcgggttggttcaggcgagatggtcgttcgtaaacaaggatgagaacttgctgaccaggcttcagaacataaatctttgcttccacttcgaggtggagcagcaggtgaacggggcgtttctcaacttcttcgggttcaatggcaccgcgggagtctggagaatcaaggcgcttgaggagtctggaggatggatggagaggacgacggtggaggacatggacatagctgttcgagcgcacctcaaagggtggaagtttctctttctaaacgatgtcgaggtactggccagcgccccagccccactgctgcttaagcataatatatgccttgcgttgagacgttgataacttacttaacccgtgtaaaacttctcttttcagtgtcagtgtgaattgccagaatcgtatgaagcgtacagaaagcagcagcaccggtggcactcaggtcccatgcaattgtttaggctctgctttgtggatataatcaaatctaagatcggtttctggaagaagttcaacctcatattcctcttcttcctgctccggaagctgatactacccttctactccttcaccctcttctgcgtcatcctcccccatgacgatgttcgtccccgaagccgagctccccgcgtgggtggtgtgctacatcccggcgacgatgtccatcctcaacatcctcccgtccccgaaatcgttcccgttcatcgtcccgtacctgctgttcgagaacaccatgtcggtgaccaagttcaacgccatggtctccggcctgttccagctggggagcgcctacgagtgggtcgtcaccaagaagtcggggcgctcctccgagggcgacctcgtggccctcgtggagaagcactccaagcagcagagggtaggctcggcgcccaacctcgacgcgctgaccaaggagtcgaagggcgccgaggaggagaagaataagaagaagaggaagaagaagcacaacaggatccacaggaaggagctcgcgctgtccttccacatgctgacc

SEQ ID NO: 272389 - DNA, 337 bp, Zea mays
cagacgcgtggggcgcttgaggagtctggaggatggatggagaggacgacggtggaggacatggacaacgctgttcgagcgcacctcaaagggtggaagtttctctttctaaacgatgtcgagtgtcagtgtgaattgccagaatcgtatgaagcgtacagaaagcagcagcaccggtggcactcaggtcccatgcaattgtttaggctctgctttgtggacataatcaaatctaagatcggtttctggaagaagttcaacctcttattcctcttcttcctgctccggaagctgatactacccttctactccttcaccctcttctgcgtcatcctcc

SEQ ID NO: 272390 - DNA, 395 bp, Zea mays
tcggttctagatcgcgagcggccgcccttttttttttttttttatgacaatatatatatatagcacaatagttcatgtacattaattagtacaggcagcctaaccatgacacacactgtcccgaggaacagcccgttctaccaactactgaggattcagtacctctctagtcgctcagcttatcactaacagtacatctgacgggacctggtagcagattatatattatagatcacacggacgcgcgatgcatacaaagatacgtacgtacacaaatacgtagtagtagggtagggaggatagcataacaggttgcctggcccatcagcatggatcggatcgcactatcgcaggcacaggcagtcgcacagtcccatggagcacgtgtcttgggt

SEQ ID NO: 272391 - DNA, 784 bp, Zea mays
aaagccactcggatccatctcccactctcccctcctcgtcatcggctcctccgcctccacctccgcccgccccctgatccggatcgacgacgccgaccccagatccctttcctctccgccgtctccccgcccgcccgcccgccgatcccacatccctcccaggccttcaagcagtgaaggagccttatgagctggttggctggggctttactccaattctggtgctactaagatgggccagggcctgctcagcaacaagtctgggacaagactaagcatagatgaaatagcaggcgcttaccatttcttgctcttgctctcccccgtggtttccttctgggactgcatcttccgcaagataagatactcattcagacctgagtgggtgtagcagcatcctgcactcacccacccatcttagcaacagttcctttccttttcttcctcgttattaaaataaaaaaaagttagacaaaccaatgaggccaaagaatgaagtttgaacattttgttttctttcttccctaattatacctagtagtgagtagaggagtcaggtctaccagaggtaatagtgaatagcagcaggcacggctgtcatggacagggctaccatgagcagcaatcaggcaggcaaagtgttgaagaaaggaaaaaagaagcaggccaaggacgagctggaccgccagaagcaggcggagaagaagcggcgccgacttgagaaaggcctggcaaactcggctgccataatctcgggggctggacaaggagaagcagcagaaga

SEQ ID NO: 272392 - DNA, 410 bp, Zea mays
tcgattttctgcagcttccttctcgggatgtttcaaagcccttgattattccaatctgcgatgttataaagtctcagtcaacaggacaattggcagcttatggaaaattggaaactggagccatccaaattggttctaaggtgttagttctaccttctgggcaagaggcgactgtgaaagccattgagcgggactctaattcatgcaccgtagcgagagctggtgataatgtggcaatttgtttacagggtattgatggaaaacaactaatacctggcggggttctttgtcaccctggtttccctgtgcctgtagctaaccacttggagctgaaggttctagtcctggacatcactactcctattcttgttggctctcaagtggagctttacatacatcatgtgaaggag

SEQ ID NO: 272393 - DNA, 318 bp, Zea mays
tctttctatatacctctgtatgtgagtgaggccaatgagagccctcgtaggcgggaggttcccttcggcgtgcttgctgctgctgttgcagctcgcaggagcgtcgcatgtcgtctacaactacaaggacctcgaagccctggctgctgcggcgacggaccaggtgcccgccctcatcgtcaaccccctgctcatggacgggggtccacttccagccccccaagaactggatcaatgatcccaacgcgcccatgtactacaaggggtgggaccatttcttttaccaatacaatcccaagggcgcccgttggggcaaca

SEQ ID NO: 272394 - DNA, 543 bp, Zea mays
ctcagcagctgcgcgcggcaggccagcagtggtagtggacagcggcagcggctgtgctcggcggcccctgtgttgatgtgcgctgctcagctgctgtgcccagcggccgacacctctgcggctctcctttgctcgacgtcgagttcgtccctgatctggctcaacgatttactggtttttttgccgatgcttcatagttggcgcgggggtgagttcttttatgattactaatgccatttcttattgatttgccctacaaattgacagatttttgtcctttgtactattgaaacatgttgtggattccaattaaaattgtgcatctcgttgtttgtttgttgttttacatactcaatactactgattaaattaggcatcaagatcgcatcaatgacattgattaggtttgttactccaaaccaccagtttcactatccgtgctcacagttgaatctgctatatattatacaattataacaatgcaaaatactctttaggttgttttttttaaaccccttcaagccctagttggatactctagta

SEQ ID NO: 272395 - DNA, 717 bp, Zea mays
tctgttgaatgggggcttaggtcatggactgaggaatatgagcttggacaggggtagttctggcaggtcgtttgggcatgcaaaccatcaacaaagttttgtttctaatcctatagagttggctgccaatggttggggtggcacatggagttctggaggtacatcatcttcccgtcctgtggtgtcatcatttggggcgtttagagggtggagttcatccgagtcgtcccctgcattgcctcattctgattggagagccaatggggcagcaccttatgactacacctcagtagactggagcctggacaccacgttattgaacccagcagcaaagagcgagcggctgtcggacacatggtcaaccatgttcatgggtggcagatcaacaaggacacctgggaacctcagtggcgcaggcatagctgggttgcatgacagtaaccatccaatggatcctgctccatcacctcgtccatatgagtggcctactttctgcaggggaggatcttcctagttccccctaccatgtaggtaagaggacattgaataaaaaaagtaaaagctgccatttgtttcttttcttgttttggtctcaggtgcagttggttgaaaaagttttactttgtgtatcgaactgagcttgtgtacaatccactgttggcttaaataagtcctctttctgtgaaaaaaaaaaaaaaataaataagggcggcaaca

SEQ ID NO: 272396 - DNA, 263 bp, Zea mays
actttctgcaggggaggatcttcctagttccccctaccctgtaggcaagaggccattgaataaaaaaagtaaaagctgccatttgtttcttttcctgttttggtctcaggtgcagttggttgaaaaagttttactttgtctatcgaaccgagcttgtgtacccttgactgttggccgagataagtcatctttctgtgaaatcgttgtgcatgaaaaatgaagggagagaactgaatctatcttggctgaaatgcaggtaattg

SEQ ID NO: 272397 - DNA, 562 bp, Zea mays
  unsure (1)..(562): unsure at all n locations
cgcctccgtcgccctgcgccagatcagattcgtggatatggctgataatgagaaagaagccggggagggaaccaccccccgaggggcggactgggaagttgtgactctcacagcatctgcctatgaagcggcgccaggacctgtcggaacagaagtaaagcctgttaatgaaaatcaagagcatagttcatccaatgcactgctcatgtctgaccactttgtgtttccgccgagtgagcacgagaacctgccaatacaaaccagtttcgatgagatacagcctgagaaggatgtgcagaaacctagtaccactgtggaggattatagtattaagaatgttgttgggtctgagagagttcagtttgatgatgaagggaaagacctctcagatgatgatgtggagatgagagatgacacacctgggtacggttcatcccacgctgaagatgatgcacatgggtttgttgttctcgatgatggtgttgagtccggtgaagattttgatgaaaaatcaggccacccttcagatcctgcagacagcangagctgtgatactggcgcc

SEQ ID NO: 272398 - DNA, 504 bp, Zea mays
cgctttaccaaaacagctcctcgcccaatcattctctctgcctcgtcctcgcgccgcctctcatcttccgggagtcagcggcggcggaatatggcggggaaatccaagggtgggaagaacaaagggaaggcgcaagtcgtgggtcactccgcctcagctgagccagaggtgctggcgactgatggagccgaattggttaatccagataacggggaagtaagcgaacccggggaagtaagcgacccccctgccacggaggatggtgtggcagatgtagagaaaggagacggggatgctccggaggttgtgcagtctgcaaaaaaagccagctgaaggagagcttcatctgtaccctgttcctgtcaggacacaatctggtgaaaagctcgagctgcagctaagcccaggagattctgttattgatgttaaacaattcctcttggatgctcctgaaacatgcttctacacatgctatgatttgatattgcatactgaagatgggtc

SEQ ID NO: 272399 - DNA, 553 bp, Zea mays
actcgagccgaatcggctcgaggatgccgtaacacaaggctgaatttttgttcggtctagccgacccgacgatggcgtccagcgacgggaaaccactgccaaccccggcctctgtgggcggcggcggcggcagcagcaccgcgccgcccgggcagccgaccacggtagcgtccaaggtgctggacatgggcgcggcggcgatgcagtcgttgcgccccgtgaagcaggcgaacagcacatgtgcacgttcgcgctgtacgcgcacgacccgaagcggcaggtggagacgcaccactacgtctcccgcctcaaccaggacttcctccagtgcgccgtctacgactccgacaaagccgacgcgcgtctcatcggcgtggagtacatcgtgtcgagggagatcttcgactcgctgccggcggaggagcagcggctgtggcactcgcacgcgcacgagatcaagtcaggcctgtggacgagcccgcacgtggcggggctgctggagaaggcggagctggaccacatggcccgcacgttcggcaagttctggtgcacc

SEQ ID NO: 272400 - DNA, 855 bp, Zea mays
cacaattatgagtgtaatggggattaatctcaaaacactgcgtccggaaccttgtgttgaagggtattctacacctgggggttattctgcaagagctgtgcaccctatagcacttgctaaagtcatgcagatagcaaggatgatgaaagaagagtttgctgatggacagtctctctctgccattggtggtgtggagactggcaatgatgctgctgagtttattcttcttggtgctgatacagtacaggtatgtaccggtgtgatgattcatggttatccccttgtgaagaagctttgcgcagagttacaggatttcatgagagagcacaacttttcatcaattgaagagtttcgaggggcctcgcttccgtatttcacgacgcacacagatctggttcaccggcaacaagaggcggtcaggcagaggaaggccatcaagaagggccttcaatcagacaaggaatggacgggtgatgggttcgtcaaggagaccgaaagcatggtatccaactgatgcatctctgccaccccccaccgggccattccctccaccatgctccaacttcatctttttaataaacgcgcaccagaaatgccacacaccaagcatctagtcctcatctgtacatggttctgaaccttgggccttcagtctatagaacaggccatgaatccacacaaagtcgtgacaacgggtgacattgagcgatatatttgtcatgtgaacattaatttgtagcactgagctgagggcttgaccttgtaaaatcttggagacttaaatcccgtacaggttttctcaggaggtttatacgtgagtgatgtgtgaggacatgctggcctcagcttcaagtc

SEQ ID NO: 272401 - DNA, 413 bp, Zea mays
gaaacggcatcagtagcaaacggaggcgaccaccagcggcggggccagccgcggtccccaacgtcagaggatctcgttccagctgcggcagggcggccaacaccggcacctcatgggcgccgacgacgaagccgccgccgccatggaggcgcaagagagggaggcggagatcgagaaggccatgcgcgcccgcgtcgcagacttcaagaagcaggccgactccttgactcttgaaggcgttaggagagcactggaaaaggacctggatttgaagatatattcacttgatgcacataaaaagtttataaagcaatgtgtagacaaagtttttgctgaatctgctgatgaaaatgcaaatgatgatgcattagaggattctgatgctaaagatgatcatttatcaaaagaaggga

SEQ ID NO: 272402 - DNA, 400 bp, Zea mays
ccgagactgaaaacggcatcagtagcagacgcaggcgaccacgaggagtgacggcatcagctgcggccgcgacgcccaacaacggcacctcatgggcgccgacgacgacgacgctgccgcctgccgctgtggcggcgcgtgagagggaggcggagatcgagcaggccatgcgcgcccgcgtctcagacttcaagaagcaggccgactccttgacccttgaaggcgttagaagagcactgacaaaggacctgggtttggagacatattcacttgatgcacataaaaacttcataaatcaatgtgtagacaaggtttttgctgaatcccatgatgaaaatgcaaatgataatgcttcagaggatcctgaaagccaaagatatttatccaaagaagagaaagg

SEQ ID NO: 272403 - DNA, 330 bp, Zea mays
tctgtacccagaaagtaaagcttttgctcaaatgtttcagaagacttattcagggaaaatattggcatgtcacatgcagctgctgaatgcaattcgtggtggagactacttgccagatagggttatcaatcttgttctacagtatctgactaacagtgttacaaagaacagtatgtatcagatgatgcagcctcagattgatatacttctttttgagataatttttcctcttatgtgcttcaatgacaatgaccaaaagttatgggatgaagatcctcacgaatatgttcgcaagggctatgatattatcgaagatttgtacagtccccg

SEQ ID NO: 272404 - DNA, 1041 bp, Zea mays
cttaccatttatttgttgaagatcctgtagagagacctgataatgccgctagagcagttagtatgaaaggccttgacctcattgctattgcattcaatgatgcttgtcacaagtttaagtctctggaacatatcgaccggaatgaattattggcactgttgtgtacccctgttgttcgcttgaaacttggtgtgagagtcagagagaactcttacccaaaatctccaaggaataatgtgcatagcaggattagaggacagatgtggcgtgatcgaggccaagcacccagcgcgagagggtttactggaaccagatcagtccatgaaaatccactagcgaacactacagcacatgaaacagcagtgcaataccacaaccatgtgcagccgacaacagttcggcaaacagccatccgcaatcaagtaacaaatactgcagtgcatcagaccgcgccttaccagaaccatactgcgcgacaggtgtatcctacttggtcccagacagctgaaccctaccagaatcataatcagcaggtttacgctactgggtttcaaacagggccataccaaagccataatcaagtccatgcttatagagcagggttgccacctggaggaatatatgagatccacaatcaacaggtgtataatgcagggttccaaaccgacggtccgcaccagaatcagcagcggcgaaagggatacacatcaaaccatcagactaacaggctttctgcgacggcagcgaggtacgagcctgttcgtggacagtttaacaacggatcgacatgggactcaaggtcccaagcaccgggcagtgcagctctgcgaaggtagccgtcagcatctcaggaggatagtagtaacaggcaaatcggctggattttgactgctgggcagctcttccttgtgtaaaaaattctagcacttctttacgggtggacaactcttccttatgtaaaaattgctgttagcagtcggttcgtagtatgtgccaattaattttttttaaggtgtgattgggtttaacataacaactgtt

SEQ ID NO: 272405 - DNA, 693 bp, Zea mays
tcaccgccaaaagccctgggtagggtgactgggtgtctgggtctctacgcctccctcgtcatgctgcgccgcctccgtctgcgctcgccggtgtgcgctgtcgccggcgcggccgctgcaatggcgtcgctcaccaacgtcgcctacgccgacggcctcttccgccgccagtccccgccgtcgaatccaggcgacgaggacaatttgggagcctccgcgttcggccgcgacccggagaccctggagcgcatggcccgagcgctgcgggagatcaacaactcaccgctcgccaagcaggtgtttggactgatgcggaagcaggaggagacgcgcctcactgagctggaggccgggaagggccaatacgccatctacgagaagctcagggacatcgaaaggatgcagaaaaaagctgaagattacagaaatagtttgcaacaagaagcacatgcaaaagctcaagcattacgctctgaggacgaattagctagaaaaagaatgcagacaggagcatgctgcacagaggcgacaggatgctgaacttgtgaagatgcaagaggcatctgccctcagaagagaagaagctaggcgtgcaacagaacagaagattttggaagaaatgatacggactgagaaggaaaaggctgaaatagatcaggaagtaaacagagctaaagctttagcagaagcaga

SEQ ID NO: 272406 - DNA, 492 bp, Zea mays
ccggaccggtccggcttgccttgccctacccacgctctcttcccccgcacacaccgcgaaggcaggggcgggggctaatgaggcggcggacagggcaaagccccccaaccgcggatcaatccgcagcatcgatggcgcccaaggcggagaaaaagccggcggcgaagaagcccgcggaggaggagcccgcgaccgagaaggcggagaaggctccggcagggaagaagccgaaggcggagaaacgcctccccgcgggcaagtccggcgccggcgagggcaagaagggcaagaagaaagccaagaagagcgtggagacctacaagatctacatcttcaaggtgctcaagcaggtgcaccccgacatcggcatctcggccaaggccacgtccatcatgaattccttcatcaacgacatcttccagaagctcgccgcggaggccgccaagctcgcccgctacaacaagaagcccatcattacctcccccgagatcc

SEQ ID NO: 272407 - DNA, 463 bp, Zea mays
cccacgcgtccggtcagtcacagctcacagcaaacaccgcgaaccgcccccgctcccaaacccgaccgagcaaagcgcaaagccccccaaccgcggatcaatccgcagcatcgatggcgcccaaggcggagaaaaagccggcggcgaagaagcccgcggaggaggagcccgcgaccgagaaggcggagaaggctccggcagggaagaagccgaaggcggagaaacgcctccccgcgggcaagtccggcgccggcgagggcaagaagggcaagaagaaagccaagaagagcgtggagacctacaagatctacatcttcaaggtgctcaagcaggtgcaccccgacatcggcatctcgtccaaggccatgtccatcatgaattccttcatcaacgacatcttcgagaagctcgccgcggaggccgccaagctcgcccgctacaacaagaagcccaccatcacctc

SEQ ID NO: 272408 - DNA, 412 bp, Zea mays
tcttctagatcgcgagcggccgcccttttgtgttttttttgacaaaggaacaggccaaccttttggctttattttttttaccatttcacatcatccccctcttccatcccagtatgttcatccaccgccctcaccttccaaagcaccgccgcaaaaattaccataactaggcttaaataaagacatgctaggaaaaaggaatactacttaatgacagccaccaccaccactcctcgtcactttacctcgagagcattaaagtcgaaggaaagaattgggaaaagaaaaagggttaaaacaatttggaaaaaaaggagcagggctgcagtaaaatctccgactcttcgatccagctgcgacaatacccgcttgactcggcctgcggactgccgtctacccccattgcgatggt

SEQ ID NO: 272409 - DNA, 1455 bp, Zea mays
cctcttcatttttttgtttttttttggttttttttagggggggatgcaggaaggagtactatatatgctatagatgaataagatgtaggacacccagacctcactgttttacactcgcaataccagaagtagctactggatgaagataaaaggttaaaagccaggtttgagaaacaaaatgaaggaagatcaaggaaggtggtagcttcagatgcctagcgtgttcgatggaatagggttgcggcacctgttctgccaagctagactgactgaatgattaccgagttggccacgccggcttcctcgatggtcttggccgtgtcttcaagcggctttggggggaacccggcctgcagcgtgtaatcactggctcctggccttgtcgcgtcgataaatgcccgcacgtcactaatcctgtggcttgtgttgaaacgggcaaccaagcgactgccgtctgcgaacctgatttggagggaggttgatggcaaagaatcgtccactgtgattgtccgagaagcagttgcactactggaagcagcagcagcagcagcagcattggaagtattattatcagaaggttccatgaggtttcttcgttccccttcaaaaggagcagcacgcttgactggctcagtaaattcttcttccgtccggacaagattcacattcactatagatttctcatcagccggcacaagctcagttgggcagtcagaatccttgatgctctttaaaaagggtgcatttgctggatcatcaaaacttctaagtggaccatcgtttactgtgaagccattcctccagaagtggatgttatgggtaatctcttctggtggctgtgatgcattacgctctacagtttcacctgtcagaagtctaccagtcccagtaaagttcctcgaactagatcgcggacgagcctcaaacggaccttgcttagcccccttctttttagcttgcttgaagatctcatctgtgttgtttttacgtcttgatcgatctctcgtctcgtactcgggcggtggtgtccattcatcatcgtcttcggagttctcgtcggaacccgcggttccccttgccactatcgagatcggcgagcgtcctcacattcccccgcgccttggcactgctaccgctcccaccccgcgcgtcgtgggttctcttcagcctcttgaaaggcctcctcctctcctcttcctccgcggcctcagccgcgagcgcagcgtcctcatcatcgctgccgtcgccatcgacgtagtcctcatcatcctcgtcgtcgtcgccgccaccgccaccgccgaccacgcaatcctcatcctcggtatcctccccgcctccggctggtgcagctggtggtgggggcactggatcggccgcgacggcgtcggcttcaccgtccacggagtcgtagtaggagcgaacggcggattcgagggcccagttgtggctctcgag

SEQ ID NO: 272410 - DNA, 360 bp, Zea mays
tgctagttctagatcgcgagcggccgcccggtgtcttgcttttgtaggactggttgcaacaagtagtactatttatgctatagatgaataagatgtaggacacccagacctcactgttttacactcgcaataccagaagtagctactggatgaagataaaagggtaaaagccaggtttgagaaacaaaatgaaggaagatcaaggaagggggtagcttcaaatgcctagcgtgttcgatggaatagggttgcggcacctgttctgccaagctagactgactgaatgattaccgagtttggccaccccggcttcctcgatggttttggccgggttttaaagcggttttggggggaacccgg

SEQ ID NO: 272411 - DNA, 424 bp, Zea mays
cggacgcgtgggccgaggccgtggcctacgccgaggcgcatcacggcatcggcaagaaggacgccatcaacatcatcctgttcgtgctcggcttcaacgccttcggcggcttttccgtgttcctgcccttcctggtggccaaggtcggcggcgccccggcgctgcgcgagcggctgcgggacgaggtgcggcgcgccatggtgggcaaaggcggcgacggcgagttcgggttcgccaccgtccgcgagggcatgccgctggtgcggtcgacggtgtacgagatgctgcggatgcagccgcccgtgccgctgcagttcgggcgcgcgcgcagggacttcgtgctgcgctcccacggcggcgccgcgtaccaggtgtccgcgggcgaggtgctgtgcgggtaccagccgctggcgatgcgggaccc

SEQ ID NO: 272412 - DNA, 655 bp, Zea mays
cccacgcgtccggtggcccccctcaacctctgcatcgacggcctcgagagaagagtcgccggctcgccgccctgctccggcaccagcaaaaccgccaggtgatccccgacaaccagctagagcagctagccgctgcagcagaagggaccttcttatcgccgtggttatcccatcatggctgagacaaatgatgccagcccttcgtcgaaactccatacaagattgagactctgggagtttcctgactgttatgtatttgaaccaattgatggccttgctgacttgtacctatcagttagccggaccagcggaacaatgaatctagttcaagacttgccatcacgtggatccactacaaaacataaagttcaaacagtatatggtgtgataggagttctcaaacttgcagttggatcatattttgtggtgatcacggatcgtgattgtgtgggatcctactttggacacgcaatttttaaagtgacaggactaaaagttcttccctgcaatagtgcacataacaccacctttgctgagcagaaaaaaatggaaacagaattcttagaactcctgtgaatgcttcaaagaggactattggccttcacttttcctacgatatcaacctaacactttctgcacagaggctacatgatct

SEQ ID NO: 272413 - DNA, 348 bp, Zea mays
agttaggtagtatgtcctagttcgccaattaatgatgctctcttttttggtttttgatggggaattgttttttctttgttgtccgtccgtccatgcaaccaagaaatctcatggagaatctgtacaaaagagtggctagctactacacgagagtccgttctgagagaagcaacacgaggtcagtcagtggatgagtttagagtgagacattcacacgctgagagggttgataatttgtgatattttcctctttttttttcttcttcctgattttgtatattgtaatatcctgctggattttccaatgaatgagtgaatgtaccatataaaaaaaaataaataaatatt

SEQ ID NO: 272414 - DNA, 257 bp, Zea mays
gctatgaatgcccttagtgggacttacacaatgagggggtgcgagcaaccattaatcattagatttgctgatcctaagaggcctacacctggagaatcaaggggtcgccctgcatttggaggtcctggtttcagtcctcgatcggatgcagcacttgttatcaggccaacagccaatcttgttgaatctaggggtcagcttatgcttcctgaatcttggcgtccatcaagtccaaggcctatggctcctaaccaata

SEQ ID NO: 272415 - DNA, 823 bp, Zea mays
  unsure (1)..(823): unsure at all n locations
tctcgatcttggaagagcagaagtattagctgctgttacccctacaagtcggttcgtatttgatgcaaatttcgaaccgacaatacaaagtggacatgtaaacattcaaggtagtataccagtcacttatgtagacaacagctcgatagaggaaagtccagaagaggcagatgggaaacaaggtatcataagaatccctgtttgggcaagagacagaggatcatcgaatgagatcagtgaagcaagaatggtgagagacaagacagaggagggctgggaatttcaattagctgaaaaacttaaaggtttaagttataacatgctagaaccaggtgaagtgaggatagatgcagatataaaggatgggggtatgatgctgataactgcattgagtccttatgcaaactggcttcaaggctatgctgatgttctcctgcaggttaaaggcactgttgatcagcctgttgttgatggatcagcaacgtttaaccgggctattgtgaactctccttttcttcggacaccattgacaaattttgcgggtacaattcaagtgatggccaacagactatgcatcaggtcaatggaaagcagggttgggaggaaagggagattgtcgatgaaaggaagcctacctcttaaaaatagcgagccatctgccaatgacaagattgatttgaaatgtgaagttctggacatacgagcaaaaaatattttgagtggccaagtagacagccagctacaagttacaggctcaattttgcgaccagatctttctggaatgatccggttgagtcatggtgaagcatatntgcctcatgat

SEQ ID NO: 272416 - DNA, 1012 bp, Zea mays
gtgcatttattgaaagacacaggtttggaaaccatggggttggtccagcttgcttagcgatgccagtcctaataaaactgcaaaaaggcagttggaagtcacatcaattgaggaaggagaagttgtggatgacactgttgatgctaaaaggactaccaagactccccctcatagtgttgatagaagctttgaagggattagatcgataaataaatatttaaccgagaaagcccttgctgaattagtattgccttgcatcgacagaagttctgctgatatccgtggtatactttctgttgatttgaccaaacagatgggggctatgagtgaacatatcaaagcaatagcattgaatggtgctaaacaagctgggtcagtcccttcaggtaatgaagtgccatcgaacaaatcaagtggccgtagaggaattcgaggtggaagcccaaacattggtagaagagctccggttggtaatgacccaagtcctccttcggcttctgctctgcgggcagcgttgtggttacgcctccagttcatcattaggttgcttccagtaatcatggcagataggagcatgagacaaacacttgcttctgcaatcctgggcctgcttgcaacgcgcatgatttatgaagatgcagatctgccccttccacctaccaatgcaactgctttaaggcgggaggtggattccctgctggagcctcccctggacgtcctgcttgatcggcactggtgaaagtctttctgagaggcttctatgtgctctccatgcacttcttggcagctacaaaccaagttggctgaagtcaaggtcagcctctaggtcgacaattagaatccaacgagatttttccccatttggataccgaagcagccgagggtctacaggttagtccatatgcttgaattcataaatgcatgcactagcttgtgtctctctgcacaaactttggttttccctcatctttgctataaactggctggccctattttgtttttttttttgggt

SEQ ID NO: 272417 - DNA, 485 bp, Zea mays
tcgggggtttcctcagtccatcattcacggggctagtcaagttaagcctagggtgccagcccctcctgtgaagcacaacgcagtacctgttaccgcagtgacaccgagaaaatcatcatctgggtcaccatcatcctggtcacgtgttcagctaccaatcccattgaatcctctgccaataaagaaacatgagtgcaatcggttgcctatccacagttgctctgaagaagacttcttgaaagatgtcatgcagtttctacttcagaggggccacatccgacttgtacctcagggaggactggcagaatttcctgacgcagtgttaaattcaaagcgtcttgatttatataacttatacaaagaggtggtataccgaggtggcttttatgtaggcaatggcataaattggaaaggtcaaatcttttcaaagatgcacaaccatacagttacaaacaaaatgacgggttttgggaaacacctaaaaa

SEQ ID NO: 272418 - DNA, 1334 bp, Zea mays
  unsure (1)..(1334): unsure at all n locations
gcgtgtttagagctaggtgggccgtagaaaaggcttcagttcagatctcatttcatatagcacaggaccaatctggtctgcagtgttcaactggaatataagatttcgctgcataggtcaaaggtttgtacgagtgaaaaagactagcagatactgtcatggctcaggatgaagctgtggctacccaaaagactgggaatacaacatctccttctagaggattacccaactccttctccatatcctgattggtcaaccatgcacgcatattatggccctggtgtcttgccaccaacatattttactcctgcaatagctccaggtcatccaccgccatatatgtggggtcctcagcctataatgccaccccctttcgggacaccatatgctgcagtatacccacatggtggagcttacccacacccccttgctttcaagatgtcaactccaatgagcgtggagccagccaaatctgcgaatagcaaggagaaaaattccaataagaaacttaaggaaatagatcggactgcagtgtctgctggcagtggtaacagtaaaagaacagtgtcatccattgaagattacagtgcagaaggctcaagcgatgtaaacgatcagaatgtgaacgaaacgtccaggaagcggagctcagatggtggacctggcgcagaaaccaccacaggtggaaacacggaatgtgttttagctcctaaccatacgctggggaatgctaccattttgccacaacactgcttttcagctccagtaattaagcccagtgctacaaatgtcgcgaactcgagggcgataggcacggcattatctccaccacctggtgtgatggttccagttcataatgcagtaccatctgacttatcagttaaggatgagagggaattgaagcgcgaaaagaggaagcagtcaaatagggagtccgctagacgatcaaggctgagaaaacaggctgagacagaggagttggctacacaagtggagtctcttgcagcagagaacacgtcccttagatctgaaatcggccggctaacagagagctcagagaagctcagactagagaactcagctcttatggtgaagctgaaggacaccgcagaaccgtctcccagcaaagcagccgcatccccatcctctccccgtgcctcggcggagaacttcctttccatgatcgacagcgccaacgcgccgagcgtcagcaggcacacggagcacggcggtcccaggctccggcagctcctggactccagtccggcgacagacgtcgccgccgtaagctgatgatgaagccngtccngcatatacgccacagcacatgcatg

SEQ ID NO: 272419 - DNA, 1341 bp, Zea mays
tgtcacgcgtgcgcccacgcgtccgctgaattgtatatttctatgttattttactatactattgaaaaaatgtgtaaattgtatgttgtgataatctgaacttttacatgacagactagcagatactgtcatggctcaggatgacgctgtggctccccaaaagactggaaatacaacatcttcttctaaggattacccaactccttctgcatatcctgattggtcaaccatgcaggcatattatggccctggtgtcttgccaccaacatattttactcctgcaatagctgcaggtcatccacctgcatatatgtggggtcctcagcctataatgccaccccctttcgggacaccatatgctgcagtatacccacatggtggagcttacccacacccccttgtgcccatggtaatgatgcctatggacattttttgtttaattaagcacactatatatgtccaaacttggctgatcaagtgaccaagccattcaatgtaggaaatggaaagtaaaacttgattatagttggacaacatttctactcttttggtctgtagttcaccattgatgcacagcatgtagaatgttgtccataacctgtaattttgtagcctcatcagaacaaaggatctgcactgtgcatctagctctattttatattagctgcccgaggcttgccctaccagcagaagatgctgcgcacttaatcatccattgccgctactccattcggatctgggacaagatatatgcctggcttgcggctgttttggagcctcgtggggtatgtgaaaattttatatcggtgacagagtggtggaatgaggttgtacactcaaaactcaaaagggtgtcctagaaaggcattttgttcgatcccaattctgtaacctgggaaatctcgaaggagcgaaatgcaagaatttcaatcggagacactctttggcaatctatcttgtgacaaagataaaggaggaggccacgacttggggcagcgcaggtgcaagacaccttacggagatcctacagagcacttagctttttgctgtaaattcttgttagtctttccttcctctcgtatttatgcatgtttaacaatgtatacagttgttggcttaagcctcttcccctataaagttcttatgttcatctttgtcttaatcactaagaataaataattcgtttttgaagttttccattctaatcaatgttatcaatttgatgttctcatgctgctttcaagatgtcaactccaatgagcgtggagccagccaaatctgcgaatagcaaggagaaaaattccaataagaaacttatggaaattgatcggactgcagtgt

SEQ ID NO: 272420 - DNA, 522 bp, Zea mays
tcttaaacatctaaaccctagcgtccgaaccttccccgtcgctctgtcctcctgtccggacatggcgaagacgaagcccatggcggcggcgggcgagaagaagaagagcaaaggaaagaagaaaggcaagaatggcccggccaaggtggccatgaaggctcgtggcgcggcggcggaggagcggaacaacccgttcgaggccatctggtcgcgccgcaagttcgacgtgctcggcaagaagcgcaagggcgaggagcggcgcgtatcgcgctcacgttccgaggccatccgcaagagggagaacacgctgctcagggagttcgttgagagcgccatggcgtccgtgttccacgaccggcgtatcggcgagagggacgacacactgcccgagttcgacatggccatccttcgccagcaacgcgagcgctgggccaagttgaaacgagaaagcaggtacaatctatcagatgatgatgaagacgaaatcaatattcataatgtgctgctatcggaaaatgatga

SEQ ID NO: 272421 - DNA, 372 bp, Zea mays
gccatggcgtaggcccagggagatctagctagagtttcccgcatcggcctccgccacccaccgccgccgccccgccccgccccgccaaaggaacggaggatggaagccccgggctcgccctacgcctcctcgccggaatccgcccccaagcgtgcccctcgctccccaccgcagcagcagcctccctccgaggaaggagatgacaaggagaaaccaatacatttgaggtttctggtgtctaatgcgtcagcaggatgtatcattggcaagggtggatcaactattaatgactttcactcccaatctggggcttcgattcagttatcacgtaaccatgagtttttttcctggtactaatgacagaatcatcat

SEQ ID NO: 272422 - DNA, 792 bp, Zea mays
gcaggatccgatccgtaattcccggtttttacccacgcgtttttccacgcgtccgctcaaccccacccccccacaagaacaacaagccacatcccatcccaactccacggtgaggtttgagcgatccgagcaaaaaaaatcaaccgaggcgcagcaacgcaggttcgttctctgaactctctggttcttttagcagcagggacgcgcagcacaagaaaggtccggttcaagaggctcttcttttgggtttattagaatcctcaaaggaagcgtgttcttgggttaggattttttttttctcacctcatcacacctctcctaggaggagcagagatccagagaaccttttttctcttctggattctcaccgcttcttttttttttctctgcacaaacacaccctcgtttctctacttttattgaggaacagggctgatttccaaactttttcctacccctgttttcataaacaagctccttttatttcttcccgttttaagttctgcccagcctcttcttctagctccatccaagctttctccatctagtagttccaatggccgcagccatagacatgtacaagtactgcaataccagcgcacaccttatcgcctcctcgtccccctcggatcaggagctcgcgaaagcactcgagccttttataacgagggcttcctccccctaccatcgctactcgttggccccagattcttacatgcctacaccctcctcctacaccacctcggcctcttcccacccccacctcctcgcctttctcgcagcttccgccac

SEQ ID NO: 272423 - DNA, 767 bp, Zea mays
ttctttgcgtccacacgcctcacccccaccacaagaacaccaaagccacatcccatccatctccacggtgaggcttgagcgatccgagcaaaaaaaatcatccgcgacgcagcgacgcaggtttgttctctgatctctctggttcttcttttagcagcagggacgcacaacacaagaaaaggtccggttcaagaggctcttctgttgggtttttttagaatcctcaagagaagcgtgttcttgggttaggatttttttctcacctcataacacctctcctaggaggaacagagatccagagaaccttttttctcttctggatccttgccgccttttggcgttcgaaagggggttgttttgcaataccctctctctgttttttttttctttcttggcacaaacccacctcgtttctctacttttattgaggaacagagctggttttccaaaaaaaaaaattctgctttgattttccataaagaaaacctctcagcctctttcttctagctccatccaagctgtagtcctaatggccgcagccatcgacatgtacaagtactacaataccagcgcacaccagatcccctcctcatccccctcggatcaggagctcgcgaaagcactcgagccttttataacgagtgcttcctcctcttcatcctcctccccctaccatggctactcgtcctctccatccatgtcccaagattcttacatgcctacagcttcttacaccagctacgtcacctcgcctcttcacactcccg

SEQ ID NO: 272424 - DNA, 771 bp, Zea mays
gccctaccgaatctttcgccgccccatcagcccagcagttcttcgctgttcgttgccgttggttccatcggttgatcgaccggcctggagcagagagacagagagagatgggcaagtcctgggcgctcatcagccacctccacaccgtcgccgggccgagcatcaccctgctgtaccctctgtacgcgtcggtgtgcgcgatggagagcccgtccaaggcggacgacgagcagtggctgtcctactggatcatacactccttcgtcaccctcctggagatgctcgccgagccgctcctccactgggtacccgtgtggtacccggccaaggtgctgttcgcggcgtggctggcgctgccgcagttcaagggcgcctccttcgtctacgagaagctcgtcagggaacagctccggaactaccgcgccagatacccgcgcaagggcgccgccgccgccgccgtcggcggcgacgacgacgaccataaggtgcacatagccaaggctgaggctgagcacgaccatgtgcagtgaaagcgtgtggagacgacgcaggagctgaccggagatcatcacaggaacttctgtagatctggtgttccaaggtgttcattcgatgtatcatcctacgtatctctgtaactcttgtggactgccggtgtcgcgtaatgtatctgaactcttcgtgagtgcgatggaacccccctccccttgcagcacgagatgcttctgtaagaacgataacatgtagacaagccaagcgcctcagctcctt

SEQ ID NO: 272425 - DNA, 548 bp, Zea mays
gacgaatctttcgccgccccatcagcccagcagttcttcgctgttcgttgccgttggttccatcggttgatcgaccggcctggagcagagagacagagagagatgggcaagtcctgggcgctcatcagccacctccacaccgtcgccgggccgagcatcaccctgctgtaccctctgtaagttccttcatcaccctaataatagcagggaccagttttaccagctgtgcagcagtgaccgaccacggtccacggcgtacgtgagctgagagcatgtcgtgctgggacatgcgtgccgttggtggtgctgcaggtacgcgtcggtgtgcgcgatggagagcccgtccaaggcggacgacgagcagtggctgtcctactggatcatacactccttcgtcaccctcctggagatgctcgccgagccgctcctccactgggtacccgtgtggtacccggccaaagtgctgttcgcggcgtggctggcgctgccgcagttcaagggcgcctccttcgtctacgagaagctcgtcagggaacagctccggaact

SEQ ID NO: 272426 - DNA, 597 bp, Zea mays
ttgtctcacgcgtccggttctttttgctaaatgttctttagcaatttgattagtcaaagaggttgcttgtttttttgtgggaacgagattcgggactcaggagctcacttgctcccactatgacattgtatatgtaccagacacttgcatatactaattggggttcttttaaatgcacttggctgaattatactgccatatgtcattggacctgtgatccctcatccatccctaaagttgtatagaattcatcgcttggatcaataagtgttgtctaacaggcagaaatggctgcttaggatcttaccactgtttagttaaaatttagatagataaagagcactgaagattgttagttaattaggaccgaccctttgaatcattagaccaaggaatatgaatgcgcggattcatacgttctacaccttttttgtgccctccttttaggacaggagtaattgtccatcgtaacgggggtagaaagtgcagaacgctcattgttctctttttcgttgtctaaaacgttgagtttctgatcctgatagactacaagtgctcaagggcctttttggaccatttcctgactgatttaatgtt

SEQ ID NO: 272427 - DNA, 726 bp, Zea mays
tcccatctcctcgggccaaggaatcgttcggatccggcgacctacctgcgggacgtctcgggtcttgttctgtatcacaagcaaagcaaaggatcggaggctactccattcggcagcaagctgactctgaagtctgaacgttggagtagaacaaggtgcttgttcaaaattgttagttgcatggagatgggaatgactcctgaagtaatgtatggacaaaatgttttcgttcctgctactgcaaatccctaccaatatggctatacagaagttggatcaccaatggaatggtatagtcacccgaactcttcaggatatgctagccaagatattttctattcggctgaaggcatgcaatgcgtatactatgcagccccagacaatggatctatgcatcctacctacattccttatccttcagatccttctttcgtacccgatggctcatttatgcctcaggagtatgttgctgaccctgctaactccacatgccaaataggcccgtcatcctattacattccagctgttcttccttatgcacaagatagtgtcccgggaagcgcaaccacacctctttactcctccaatgttgcatttcttcctggcataccaggttatgctgcaacatctgcaaatgcagcatttcctttaattgctcccgtcaccacaaaaagtgacatcgttgtgcatccacctgtacagtctactattgtaccctttgaagca

SEQ ID NO: 272428 - DNA, 719 bp, Zea mays
caacagtgtgctgcttgtgccgcagatgcgtgggccttcaacctcctcttccggcactccactgcgtccgctcccggcctctcgcctctcggcctctcctatcgctcgacctcgcgacgcgtcaagtaggggggcggcggccttcgcggagatgaccaccttcctgatcaccggaggcgatttcccgcgacactcctcccccctccccgtgctctgctagacagatagatccgggctcttccttgatttgatcggcgaggacatcatgtggagttttgcatcaaatgccagtagctggaagcttaaagaaaaaagcacaaccctcaaaatgcagcatatccaatgcagattattctgatgatgaagtttcttcatgtacaagcagagaggaaggccttgattgtccaatatgctgcgaatccttcaacctcgtggagaatgttccctatgtcttgtggcgtggccacacaatgtgcaaaaactgcatccttggtcttcactgggcagttgtcaagttcccgtcccttcctatccagctgcctttgttcatctcatgcccctggtgcaacctgctgtctttccgcctggtttacaagggcaacctcaggttcccacgcaggaactactttctgctctggatggtcgagagcatgaacggtgggagagcaaaattccattccactaaccatgacgagcatcattccacgtggcattcaagt

SEQ ID NO: 272429 - DNA, 472 bp, Zea mays
  unsure (1)..(472): unsure at all n locations
aaaaatcatgtcctccatctccatcctgcacagatcctgcctccgcctaggtctgctgccgttctcaccactgcgggcgcgcgccaccactctacgccttccccttcctcttcctcagccgcggcggcatctccacctgccccgccggagcgccatgagctctgccgcgtccaggctgtcgcacatcgcggctgccaccggcgccggggccggacgcggccggggagtcgaatgagtcgccgccggccgcatccgccgcgacccaggaagacgatggtctttcatctggggatatgggctaccgccggccgccaaaagaaattctggacattgtttgatgcaccaccacttcctgtcttggcaattctctccaaacaatgattaaattctgtttctgtagcgtcgagcactgccaccactatcagacattgcaaagcctgaggagaagctngctggtctaaggattgatgga

SEQ ID NO: 272430 - DNA, 301 bp, Zea mays
tgccccttatatactgaaacgccggaaatccctgacctcagtatttgaaattattgatcgtgtacccaagattgatccagatgatgccagcggcctgaaaccacctaacgtgtatgggagcattgaattcaggagtgttgaattttgctacgctacacgcctgagatgatggttctgagtaattttagcctcagagtgagtggaggacagactgttgctgtagtaggtgtatcaggatccgcgaagagcccaataatttctttgatcgagaggttctacgatccaactgctgggcaagttt

SEQ ID NO: 272431 - DNA, 431 bp, Zea mays
cagagagattattttaaaaagaaccaaagactcctgtccccatccgcttaattatcaggctaacaacaacaacaacatcatccgctggctggcgctgcgctgccgcttatagctgctccctgaaccccaggaggaagcacactagcttaacccccatcgatccgtgcagagcgccagcgagaacaacagcaaaattaagatgcaaaagcttgagaactactacagcaactagaacatcaactaaacctactgtaacaacgcagcaaacggacaagcagcaagagatctagtgaagaaagaacctgctggctagccaatgtgctgcgttctcacaggcctaatttctaacaagagaagctccgagtgagtgagtgagttcttggagcaaaaaccagtgacgtacacaaagcagcgagagatggtagagaaac

SEQ ID NO: 272432 - DNA, 328 bp, Zea mays
tcgctcacacacacatcgttgtccaaacaagagcggcgcggctcacggcggcctagctcgccggcctaacgaggccagatattccttaacctagctagctaacagctgactagatagatcgatccatcagctggcagccatgaatatgatcagggcagtacggcgccggttcaccgtcggccacctggctacggccaaggaccccgccacgctgcgccacgcggccgccgagctcctcgccaccgccatcttcgtcttcgccgccgagggcgccacgctctctctcgggaggatgcaccaccatgacaagggcggcggcggcctggcg

SEQ ID NO: 272433 - DNA, 365 bp, Zea mays
tcctttccagcgccccacccccagccagctagggggggtctctcagcagcgcgcccgagcgtgtgctccctgctaagctctgcgcctcggtaggcaaggaaaatcaaacagatcgtaaatggccggtagcagcgcggagcagctcctctccaggatcgccgccggcgatggccacggcgagaactcgtcctacttcgacgggtggaaggcctacgacacgaaccctttcgacctgcgccacaaccgcgacagcgtcatccagatgggactcgccgagaaccaactgtcgctggacctgatcgagcaatggagcgtggaccacccggaggcgtccatctgcacggcgcatggcgcgccgcagttcc

SEQ ID NO: 272434 - DNA, 488 bp, Zea mays
cccacgcgtccggaaagaaagcccttttcctttttaacaaaattctttctatttctaccgggtcaaggtattcatcattctagtacaactattgcagtagaatgacaacagactcgtgtatagggaactagattagcttagctacctatctaatttattgtagaaattccgggatccgcgattggacatggaaaatagaaaaactttttcttggttaaaggaacagatgattcgatcgatttctgtatcgatcatgatatacgtaataactcgcacatctatttcaaacgcatatcccatttttgcgcagcagggttatgaaaacccgcgggaagcaactggacgaattgtatgtgccaattgccatttagctaataagcctgtggatattgaagttccccaagcagtgctttctgatactggatttgaagcaggtcttcgaatttcttatgatatgcagctgaaacaaggtcttggttatggtgaaa

SEQ ID NO: 272435 - DNA, 450 bp, Zea mays
  unsure (1)..(450): unsure at all n locations
gccgacgaagagagagacagagagcaaaacccaaaccctaacaatcatttgcagcccccggcgtctcgagaacctccaaggaaccatccacaggcgaggcctcgctccgtgcccggatctcccatttccgcccggccggcgcggcgggatcctgatactggtgctgtctgctggggtttcgtgtaggagaaggcgcgagcgcgggtgtttggatcgggggaggcaacgctggcggctcgcggcggcagcaggtgatggcggatccgcctagcggtgggggatctagggcttgtgtctgcagggagagacaggtcgaggaggcagaggcgggtctggggctcgggagaagagaacaggggaggaaggagggaggatgctgagcgtggttcgggtacacctgccggcggagancccgatcgtgggctgcgagatcacgccgtacgtgctact

SEQ ID NO: 272436 - DNA, 355 bp, Zea mays
tttaggatagagaaaacagagtgcgattccgacgaagagagagacagagagcaaaacccaaaccctaacaatcagggagcggtttgcagcccccggcgtctccagaacctccaaggaaccatccacaggagaaggcgcgagcgcgggtgtttggatcgggggaggcaacgctggcggctcgcggcggcagcaggtgatggcggatccgcctagcggtgggggatctagggcttgtgtctgcagggagagacaggttcgaggaggcagaggcgggtctggggctcgggagaagagaacaggggaggaaggagggaggtttcttttttttctattttcttcatcctttcttttttta

SEQ ID NO: 272437 - DNA, 295 bp, Zea mays
cacaaacccaaaccctaacaatcattgccagacccccgcaccccggcgcctccagaacgttccagaaccttcatggaaccacccacaggagcaggcgcgagcgcgggtgtgtggatcgcgggaggcaacgctggcggctcgcagcggcagcaggtgatggcggattcgcctagcggtggaggatctagggcttgtgtctgctgggtgagacaggtcgaggaggcagcgtcggggctggtgctcgcgagaaaccaacaggggacgacggagggaggatgctgagcgtggtccgggt

SEQ ID NO: 272438 - DNA, 1744 bp, Zea mays
tctcacgcgtccgcccacgcgtccgctcatcctctctcctctctcccccgccccgttcgtctccggcgagctagggtttgcccccccgcctcgccaccccacggctcccgccatccttggatctccagccatgtacggcggagacgaggtttcggcaatcgtcatagatgtgggctcttacagctgcaaggcgggctacgcaggcgacgacacccccaaggccgtcttcccatcggttgttggttcaattgaacaaactgaagacacagatgaccccaagccagagaaggaagctgactctgcatcagattctaagaacggtgccaagcccatggatgtggacaaagccaagacaaaacgcagactttatgtaggccaagagttagagttcaggagggatcacatggaggtgatttcatctatgaaagatggaacggtaactgactgggatattgttgataatatatggaatcatgctttcagacggaggttgttgatcaatcctgaagagcatcctatgctcattgctgaaccatctacaaacactgcacagcaaagagagaaagcagcggaacttatgtttgagaactacaaagtgccagcgctgtttctagccaaaaatgcagtgctcacatcttttgcgtctggacgagctacatctttggtggttgacagtggtggggggtctactgtggtttctgctgtacacgatggttttgttttacagaagtctgcgtcgacttctccagttggcggcgaatttttaactgactgtatgatgaaaagcttggagagcctgggcatcgtcattaggcccagatattgatttaagaagacggcaatcagtcctggagaatataagattgtagatcttgagcttccgtgcacaactgagagttacaggtggtactgcatgagagctattgctagtgacgtcatggagtctgtttgcagagctccagacactgcttttgatgaagcggcatatgcaaatgttcctacagcttcatatgagcttcctgatggacaaacttttgaagctggtgctgctagattcaagggtcctgatattctatggaatgccatctctatcccagactatttcctgggattgatggatttgcagattcaataccagtccgtggccttcaacgaatggtcattgatagcgtaaataagtgcgacgttgacatacgaaaagagctattcagtaacatcttgctctctggtgggtcatcatcaattctgcagttaaaggagcgcctggagaaagaagtattggaggagtctcctcaagctgctccctccaatccaaacactgaaacgtctgtctactgactttcctcttgcgataggcttgagacgagcagctggaggagtctcctccagctgctcgtgtcaaggttatggcaagcggaaactcagtagagagacgtttcagtgtttggattggagggagcattctagcatctcttgggtcgttccagcagatgtggttctccaaagcagagtatgaagagcatggggtttcctatattcagagaaagtgcccttgaagcaggggaaggaatatgtacaaccaatattatgctttacgagccttattgttgccaaagggttccttgtgtacaacagcctggtgccttgccatgttggccaatgaatactcgagactcttttcaagtgacgtttgttgtcttcatggctagttaaatttaggtgatgtagggtgaacgtaagaact

SEQ ID NO: 272439 - DNA, 453 bp, Zea mays
  unsure (1)..(453): unsure at all n locations
ggacgcgtggcggacgcgtgggcggacgcgtgggttgaagttggtgctgatagattcaaggttcctgaaattctatttaataccatctctatcacagactattcctgggattgatggatttgcagattcaataccagtccgtggccttcaacgaatggtcattgatagcgtaaataagtgcgacgttgacatacgaaaagagctattcagtaacatcttgctctctggtgggtcatcatcaattctgcagctaaaggagcgcctggagacagaagtattggaggagtctgctcaagctgctcgtgtcaaggctatggcaagcgtaaactcagtagagagacgtttcagtgtttggattggagggagcattctagcatctcttgggtcgttccagcagatgtggttctccanagcagagtatgaagagcatggngattcctatattcagagaaa

SEQ ID NO: 272440 - DNA, 455 bp, Zea mays
agagatatgattggtgttggtgcgctttcaacaaaagaaactgagataaagtgtataaaaggtacaaaaactctttggtcggatcgtgtctctggaaaggttactgtcttggctggcaatgcaaatttctgggctgttggttgcgaagatggtttcctgcaggtttacacaagatgtggagtgcgagcaatgccagcagtgatgatgggatctgcagctgtttttattgattgtgacgactcctggaaattgcttcttggcacaaggagaggtctaatgtacatatggaacctttatgacagggcctgcattttgcaggactccttagactgcgttgggtgcatcgccagatgagtcatttgcaatagatgctgtttcagtaaaggttatatctgccacattcttaagatgtggatcaccccttgttgtccttgccagccgtcatgctttttttt

SEQ ID NO: 272441 - DNA, 682 bp, Zea mays
tctttacagaggcaaaacttgtacacaattcatgattcgctttccatgccccatcggtggatgctttagcagttagtgcttcatcatctgtttcttcaccgcttcctccaggcactcagcgcttgttgccgttcatagaatcattctttgtcctatgtgagaagcttcaaacaaatcaaccagttgcacaatcagattacactgttattgcccctgaagtaaaagaatctgctggaagttcatcttcaccttcactgaagactggtggaacttgcaatgttacttttataaggattgctgaaaagcatcgacggctgctcaacgttttcattagacaaaacccaagcatactggagaagtcactttctatgatgttgaaagtgccaaggctgatagattttgacaacaaacgtgcttactttcggtcacgtatcagacagcagcatgatcagcaccttccagctcctctacacattagtgttcgcagggcttatgttttggatgactcatataatcagttgagattacgtcgtacccaggatctcaaaggtcgtttgactgtgcaatttcaaggggaagagggcatagatgcaggaggactaactagggagtggtatcaactgctctctagagttatttttgacaaaggaactcttcttttcactacaggtggaaacaatgc

SEQ ID NO: 272442 - DNA, 476 bp, Zea mays
agcactagaacctgctgattcctcgtcgccagcttctctttcccccgccacaaccccccgccggcgcggctcccggtgtcccttccactcttcaccctctccttcccttcggcgccaagtccatccgcccctccgaatctccgattgccgccgtccaggtgccggccgacagttgagaatgggactgaggcgcctgatgagatgctgctgctgcattgcaaagcacgcggacgacggcgacaagatcgatttcggaggtggcaatgttcacgttgtcacaagcaaagaggactgggaccaaagaattgcggaggcaaacaaggatgggaaaaccgtggttgcaaacttcagcgcttcctggtgtgggccgtgccgtgtcatcgcacctgtctacgccgaaatgtcgcagacgtacccccagctcatgttcctgacgatcgatgttgatgacttgatggagttcagctcgtcgtggg

SEQ ID NO: 272443 - DNA, 673 bp, Zea mays
ccctctcgtccgcccacgcgtccgcggacgcgtgggctctcctctgctaggcacttgtcacaggaaggccccctcgtgttcgcgtcctcttgccttcacacccgggacgggagttccttgctagggggagagcttcccttgctcgtgtcctcactcacgcactcacagactcactcattcaccgacggtcccagtggactgaggtgagacttcggtcggagccggccggacggaacatactggatggccgccgcgccgccgcccaaggccgacgagctccagccgttcccgcccaaggagcagctgcccggcgtcgccttctgcatcaccagccccccgccatggccggaggccatcttgctagggttccagcatttcgtcgtcatgctgggcaccaccgtcatcatacccagcgcgctcgttcctcagatgggaggcggaaatgaagagaaggctcgggtggttcagaccatactgttcgttgctggcataaacaccctgttccagacgttattcgggacgcgccttccggtcgtgatgggcggctcgtacgtcttcgtcgggccgatcatctcgatcgtcttggctggacggtacagcagtgaagcagaccctcacgaggtaccttctgctgaactgctctgtttccttcaatagcgatagaacatactgg

SEQ ID NO: 272444 - DNA, 403 bp, Zea mays
cggacgcgtgggcagatgggaggcggaaatgaagagaaggctcgggtggttcagaccatactgttcgttgctggcataaacaccctgttccagacgttattcgggacgcgccgtccggtcgtgatgggcggctcgtacgtcttcgtcgggccgaccatctcgatcgtcttggctggacggtacagcaatgaagcagaccctcacgagaaattcctgcggacgatgagggggacgcaaggcgctctcctcgttgcgtcgacgattcagatcatacttgggttcagtggcctctggcgcaacgttgtcaaattactgagtccgctggcagctgttcctctggtatcactggtcgggttcgggctctacgagcttggctttccaggggtagcgaaatgcgtggaag

SEQ ID NO: 272445 - DNA, 642 bp, Zea mays
tttgtcgcgtgggctttcatcgtcctcctgcgtcgccagagcggagcaacgaggggcgcgcgcgatggcaggcggcggtctccagggagcgaagaagcgcaagcgcgagcacgcggaagggaaggcaaagcctcggaagcaagtcaagggaggcggggacggagcgaagcggaagagccactcggccgccggcggctacacggcccatggcggcgccggcgaagttgtcgcgaggaagaagaccccggttacccccaaggagaagcgcctcgcggccaaggaaatgtcggaggccaggaagatgaagaggaggcagcattacagccttgagaaggaactaacgaaattgtgggaaaagatgagatgtcacgatgtgagcaaagaggagaggtccaaggcagtaagtcaggctatccataaaatggatgggaaatatttggacattgccacatcacatgttactgcacgtgttcttcaaacatgtgtaaagtggtgctcggagtcagagagggatgctatctttgatgttctacagccacatttgctttactctttcttgcaagaaatatgccgtttttcttgttaagaagcttatagaactcgcctctaaaaaacagtttgccagtttcatatcttcccttc

SEQ ID NO: 272446 - DNA, 524 bp, Zea mays
cccacgcgttttatccgccttccatgttctcgtcgctgcctccgtctgacggctcgaagctccctccagttccgatctaaacccgccgaaaccctaatccccatggctgccgccatgggcaaccccatcctgaccctccccgcaccggagggcaacggcaccgggggcggcgacgccgaccagcagctgcagcaggcgccgcctaagccgcctcctcccggcgcgaagacggaccccccggcgacggtggccacccacacgcgcaccatcggcatcatccaccctccgcccgacatccgcgtcatcatcgagaagacggctaccttcgtcgccaagaacgggcccgagttcgagcgccgcatcatctccctcaaccagggcaacgccaaattcaacttcctgcagccctcggatccctaccacgcctactaccagcaccgcgtttccgagatagccgctgcgccgcccggcgcggacggccccttgggcgccgatactggcgcggcttccgacgaatcgccagc

SEQ ID NO: 272447 - DNA, 434 bp, Zea mays
tatacggtcacctttctatcttcctttgcctttcccctacctctccctgactttactactggtgacgactgggctagtgctatcggccttcgccaggtcttcgccggcgaccagcacctaccaggtgaccctattccttttcttcactcggtgtataatccccctttgctgcaatcaagcttctcaaacataataagcaaatagtctcttcacgtgattgccaaaattagtcaagacgggtgctctttgctgcgtggccgctaggccacatgggacgaagtctgaccctgcaagcagagatcgttctatggatcctactgagcctcgttggcgcataaactcgagcttctctcccccaacgtcaaggaggtgggattgccgctattcatcagatggattgccccacagagttcatgatgctcctcatgatcacc

SEQ ID NO: 272448 - DNA, 282 bp, Zea mays
tctctcatggccatggagaacactgggccatgcggtgacttcgggaagatcgtggccgatcttgagtctgagaacttggtggctaacgtctctgccgtgaatcaagcctcggcgttgattgctggaggtaaaatccctgaaccccagcttctgtgccgcctgatcgctggtcttgcttccaatctggagaagcctgaccatgactctgccatcaagaggtgtgtttcctttactctaaaggcaatcagggtggccgtcatcaagaaccgcatgaacatggat

SEQ ID NO: 272449 - DNA, 444 bp, Zea mays
aggactagtagtatgctcgccgccgcctggaggctgtcgcagcgagccgtcacgtctcctctcctaggcatcgggcgaccccaaatccgaaaccctttctccaccatggcgtctctctcgccggcagccgcctcgccgaagaggctgagggtctactcgtctgccgccgctgacggcgacggcgcggggagcggcaagcgcgtggggacccacaacggaagcttccactgcgacgaggcgctcggctgcttcctcatccgcctcacctcccagttcgccggcgccgacgtcgtccgcacccgcgattcccagatccttgatacattggatgctgttcttgatgttgggggtgtatatgatcccagccggcatcgctatgatcatcaccagaagggcttcagtgaggtttttggacatggattcaacacaaaacttagcagtgct

SEQ ID NO: 272450 - DNA, 309 bp, Zea mays
  unsure (1)..(309): unsure at all n locations
tttgttaagcagttggagtgttatatatatgcatgggctgtaatagactaggtgctgggantncttcacatatgcacacaaagggcaggaccgcaggagcacacacctcagtgcgccagcgttctgcacctcgctagctcgtcgtcttgcctgcgctgtcgtcgctgatccttgagatctgcagactccatggaggctgcagcagcgacgacggcggcggcgcttcttcctcccgctcggaaggtgttcatcctgcccctgcttctcctcctggctgcatcgtcgctggttccacgagcttcgtctgat

SEQ ID NO: 272451 - DNA, 784 bp, Zea mays
aaggatgaaagaagagggctttattgaaagacttatgcacattttctacagcaagagattctgcagagactgcagaaggaatgttattcgcgaattcaaggagctcaaggaactaaaacgcatgcgaagggaacctcgctgcactagttggttttgtgttgcagataccacatttaagtgtgaggtgttcgaggatgctattcttgttgattggcatcaatctttattggagcaagatggaatataccatcatttcgagtgggctattggaacagatgaaggaaaatctgatattctaaactttgaaaatgtgggcatgaatggacaagtccacaggaaaggcctcgatcttgatcactttgaagactattttgttacactgagagcatgtaggctggatggccgccgtacagaattctgtgtgaaggcccatgccttgaagggccaatcttgtgttcaccggaggctaatcgtgggggatggatttgtgacaattacaaaaggtgaaagtattagaagtttctttgagcatgctgaagaagctgaggaagaggatgaagatgatgtagtggacagagacagcaatgaccctgatggtgatatcgctcatccacaaaagcatgctaagagccctgaacttgcaagagaatttcttctggatgctgctgcagtgatcttcaaagaacaggtcgagaaggctttcagagaaggtacagcgcggcaaaatgcacatagtgtttttgtgtcccttgctctaaaactgttagaagaacgagttcatgtt

SEQ ID NO: 272452 - DNA, 486 bp, Zea mays
tcttcctacgatctgtacctattacccctggggctggacatacaaaaacgttgggtcggacaccaatatcccttacacttaacaggaaacttgtaactcctaaccataataattctttatcagcaaccaatcgcctcgcaacatcttatcaaacataccaaccctttgtattccaaactcctgctcctactcccaaacgtctgtcagtagcactacattctcctacttcatttcattgtccccgcacaaacttcaactatgtttctactgaaaacttggacaattctcaaagcacaccaggaacgttgatcaccaccacacttcctggtgtgaatgatcaacaatcaggaaatttggaacgtatgacacttgactcactggttgtacaatacttgaaacatcaacaccagacagtaataaagttcaacggcactggtgatgttatctatgccatcctgaggcgtaatcttgatgacgtgacatcat

SEQ ID NO: 272453 - DNA, 294 bp, Zea mays
gaaaacttggacaattctcaaagcacaccaggagcattgaccaccacagcacttcctggtgtcaatgaccaacaatcaggaaatttggagcgtatgacacttgactcactggttgtacaatacctgacacatcaacaccgccaatgtcctgccccagttacaactttgccaccactttctcttttgcaccctcatgtttgccctgagcctagtcgcagccttagtgcaccggctgacatagctgctcgagtgggaagccgtgagatatgtaggcaatttagtgggatccagata

SEQ ID NO: 272454 - DNA, 867 bp, Zea mays
agcgtacatgcgctgcggtcgtctgttgccatctcgcgttcggtggtgactccgggctccgggcgccctgcgccctggatttcgaaccgagaaagaaagctgctgcccaccgtttcccaagtcccatcgccgcccaagaaccggagccacgccgcagatccgccaaaatcacacctcctagcccgtcctccgtcccaatctcttctcgggccagggaggcggcgggacttggtgcctgcatccgagccctagacatggatcaacctgaggaaaaccctgaattcccaagctgtgatgcctactttgaagctatccagtccaagaagaagttgccactgactttgcaagaatcactaactgctgcctttgctcagattccagtctcatccttccctgaggttccagctggtcgagtaattgaaattcctggtgatacttctgttattgatgctgtaaggactctctctgaacagaacataagggcagcaccagtactgaatccagaacctggggctcctactgattggcaggggaggtaccttggtgtcatcgattactcggcaatcatcctttgggtactagaaaatgctgagcttgctgctgttgcactctcggctgcatcggcaactgctgctggagttggcatgggtgctgttggtgctgttggggtggcagctttgggaacaactggcccagctgctgtagctggcttaactgcagctgcaattggggcttctgttgctggtggattaactgctgaaaagggtgtggcgaaggatgggctaactgctgcagatcatttaagggaggatttctacaaaggtttaacttagcaggaacctttcagatcaacaacaattcgatcga

SEQ ID NO: 272455 - DNA, 692 bp, Zea mays
attgtaacctatgccgaggccaaaatcaactccacgcacaccacgaccgcgcccagcaccaccaccgacgccaccttttctttgccacctttcttcccacctttcctggagtcccgttttgctctgaatcttacatccttcatagccagatccatgagttcattgggtacatcctggccagcagcaatcaaactttgaaccagttcaccggcaaagcgtgcctccttctgagtaatcagagtgtatgcagtgccatctttgtcaccagcacgaccagttcttccaattcggtgaatatgcatatccatctcttttgcgatatcaaagttgacaactgttttaatcgatttgatgtcaagacctcgtgcggcaacatcagttgcaaccagaacatggtacgtcccagatttgaacttctgcagggtctccatacgagaagcttgatccttgtcaccatgaagtgctgcaatcctgaatcatctctgattcaactctctctctatctcatccactctagccttcttagaagcgactacaagaacatctccatcatcaatcattccaggtaatttctccaaacgccaaggcattttctcagcatcagaagggattacattaacaacttgtttaatgtcttcattagcaccaccaacttgaccaactgtaactctaataggatcagtcaatatttc

SEQ ID NO: 272456 - DNA, 859 bp, Zea mays
gctgcgggcaagagatgaggtgtggagcaggagaggacctgatgccatagctgcggactccctcttccttcgccgccccctatgtctgcggttggtgggtgctcaccaatggatccagaagttttggtagttccaaatgatgctgaaaggatggacgcgattactgagggggaagaggattgtgcaacgagaaacatttttacttcaaggtgggcggatgctgctgaagaggaggaagtggtgattgtgcctaagaagaagaaaagtgtgccacctgctcatttgcctgaacagaaatccacaaagaaaatcatgggctcagagctgggagaagcgatgggcagtaaaacatcaagaagaagttcctcaagttcgtctaactcgatgggtagtgaaaactggaatatcgaggtagacgagggtgatggcattgattcttctgttggttgttcgctggatactcattccaggagcaatatgcgtaggtctggatcacctgaggttgtgcgaacaccacgtaggtgctttaacatgcttcagggctgtaggagtattgatgactttgagaggatcaacacaatcaatgagggtacatatggagtcgtatttagggtgagagacaagaaaactggcgagatagttgctttgaagaaggtcaaggtagataaggaaaatggacgggaagggtttccattgacttctctcagagaaatcaatatccttctatcctttgaccatccttcaattgtggatgtcaaggaagaagttgttggtggtcatgacgatgatacttttatggtgatggaatacatggagcatgaccctacgggtgtcatggaggcgatgaagcaaccatata

SEQ ID NO: 272457 - DNA, 306 bp, Zea mays
cggacgcgtgggcggacgcgtgggtggaactttcactctgcaggacagcccatgtcagtcaggaaatactcgcactaccaacaccaacagactaccttaacaaggtactaccgcatgaacatgtgaaggtaccaataggtcctgctggtttgtttcgtttgccaatagattcatttcccagagatgagatggccacaagggctggctgtggttcacggttcagtttgacctcggtgagtccaccctacgtgtcgccaagctaccatgctgatcatattatgccagctctatccttgtctcaatatg

SEQ ID NO: 272458 - DNA, 867 bp, Zea mays
gccgccgtgccgaacgctcgccgcgccgctcccacacactacaccctcgccgccgctgagactcggcaaactgcctcccgttccatgggctgcgtaggatccaccccggccaccaaagatgccgggggaagtagcgatgtcaatcatggcactaagagagtgaggaaacccaaagcttggaagcatccccaaccgataaccatggcccagctcaggcagatgcgtgaggagttttgggacaccgctcctcactacggtggtcagaaagaaatctgggatgcccttcgagttgcatcagagtctgaggtatcccatgcacaggctgttgtggaaagtgcaggcataattgtttctaatgccgatctgactctctgctacgatgaaaggggtgctaagtatgaattgcccaagtatgttttgagtgaaccaaccaacctgatccgagacagctgaacggcagccggccgtaggaagacccaccgatgtaaaaactgtaaatgactgcagatgccgccaaattggtcccttgcttgtggtaactggagtgcctcgagtaaccttcagatttgctttggcaactttcggcaatagggttttccagttctagtgttcagataaaaaaaaacttttgcgtaccctcgtctattgttcttggttctactgtaaacatgagtctgcttagaattctttggagcgagaatgctgctgagattgttctcgtccactatcatgatacaagctggagcatacgttttagaaacttgtcacatctcgtgcaactaattatattattatgtggtctggtctgacatttgaaatgaaatgcatgataaggagcaaatcgcaatctaatttttacattatcgc

SEQ ID NO: 272459 - DNA, 271 bp, Zea mays
caggattctcagtcaatgttgcttcagctaatgccagccagagctaggaactgagactgacacaggagcaggaggggtaaacctagactgacacagggacgacgtggtgggtagtagagccgaatcgacgagcaggggcagggaagcggtggatctagaggaagggatcatcgggggagcacagaggaacattctttttaacattccaggtgctaagtatgaactgcccaagtatgttttgagtgaaccaaccaacctgatccgagacagc

SEQ ID NO: 272460 - DNA, 502 bp, Zea mays
cggacgcgtgggcggacgcgtgggcttaagcagcagggcgccgccgccgccaggcgaccagcctacagccagcacgggcgtgcggccctcggtcggcatgggcgcgcggcggccatgacggctcgaacgcggtagccacggccccgacgtctcccgtcccggcgcgtcaccccgtggtgcggcggcccccggcctcaacggctcggaggcgcgactccctgcgacgcgcggcctcttggccccggcggctcgggcgtgggtgcccacggcgcgcggccccccggccccggcggcacgggcgcgactgcctgcgacgcgcggcccccccggccccggcggctcgggcgagggcccccgacgcgcactggtgaggcgcggcagcctgccgcgcttgggcacggtggccggccaggcgggccacagccagcgcgggcgcgcagccccgcggccttagagcccgccccggttttacacgggcacgacggcgtttgcccccgggccc

SEQ ID NO: 272461 - DNA, 607 bp, Zea mays
tcgctggtctgaaagccctcactccaaatgtcgcgcactgtcagctgacgccaccgcctgcgccagccctcgccaagccggtgaaaacctcgtgccctccgccgcctccgcccgcctcttccacggtaccgcggtctcatctcctcccgggacgggcatgcagagcacggctgccatcggtctcgttcggccatgcgccgcgcggccactccccacctaccctagcccacggcgcggcgccggcgcgtgcagcggcgccgcacagccgatcctcgcgccccgcggcctctgcctctccgcccgcgccagcctactgccggactcgccgctggaggaggagtaccggagatgcagggccggccggcacgtggccgcggccgggaaggtggcggcggctgatggggccgcagaggaagcggggggagggctcgtcaagacgctgcagctggggtcgctcgtcgggctctgggacctcttcaacatctactttaacaattacaacaagccggttctgaaggtttctggcataccctataaacatcaccccagtgcagtttgccgttgggagtgccattgctttgtttatggggatcaccggtttccttaa

SEQ ID NO: 272462 - DNA, 476 bp, Zea mays
catgcacgccgacaaggctctccaaaccagttacaaggactacgaaccctcaggtgaaactccggtgaggtctgagccgaacgtgccaagcaaaggctcgattgaatcgctgcgagccatgcccgtggagaccatgatgaatgagttccgtgagaaccatccgtatgaacatgaatcgagcaaagaatctaagttatctcagatacctcgcttgccgctcgcgacaatcaactgagacattcacttccctatgtgcagtgtacttttattagtagggcgtcaatttgccggttttggtgtcccttgtgcacttgtgctaggttaaccatggggtgtgagctgccttggctctctccagtgcatttcccttttttcccgcattcaattatctgtaatgttctgttgtgccttgtacgatactgatattgtacagcatcagatatgtgccaaagctagcttgaattgcatgactcatt

SEQ ID NO: 272463 - DNA, 456 bp, Zea mays
cagacaaggcggaggaaaactcgaactgtgatggtggggaatgtgccacttggcagtgatcaccccataaggattcaaaccatgacgacttcagataccaaggatgttgcgaaaacagtagaggaggtgatgaggattgcagataaaggagctgatcttgttagaataacagtccagggtaggaaggaagctgatgcctgctttgagatcaagaacaactctggttcagaagaattacaaccttccactagtggacctgatattcattttgctccttcagtagctttaaaggtggcagaatgtttggacaaattaattgaaacacacaatttcttgttgatagtgtaccttaattagaaaagctggaatttaccggctacgacttccataaagcgcttgggcttgtttaacaattggtttttaccttaatcgaatatttcacagaaatttgaattt

SEQ ID NO: 272464 - DNA, 568 bp, Zea mays
  unsure (1)..(568): unsure at all n locations
gctttgttgnctacatcaccgcaaccttgtcaagctgattggtatatgctttgagcggagcacaaggtgctcggtttttgagctcgttccaaacggaagtgttgaatctcatctacatggctcagataaaatatatggcccgactgattttgacactagaatgaaaatagccctcggcgcagcaaggggactagcctatctgcatgaggacgccaaccctcatgtcattcaccgggatttcaaggctagcaatgttctactggaaaacgatttcacccccaaggttgctgattctgggctggcaaaggaagcatcaaatgggatggatcatatttctactcangtcatggtgacttttgggtacgttgccccagagtatgcgatgacagggcatctgcttgtcaagagcgacgtctacagctacggagtggtgctcctggagctgctgtcaggccgaaaacccgtggacatgacccagccgccggggtccgagaacctggtcacctgggcgcgcccgctcctcaccacgcgggaaggactgcagcggctggtggacccgtcgctcccg

SEQ ID NO: 272465 - DNA, 408 bp, Zea mays
tttactcgtgggcggacgcgtgggaaaggatcagtggtggattcagtcgtgggtgtatttcttacccagaatgtttcagatcatctttctagttctgctttcatggcggttgctgccaaatttcctgttaagatagagggccctggaaaacctgtggctgagatgtctcatactcctgaacagaaggatagttgttctggactgtttggtgattctatcaaattgcagggcgatatatacattgaagagataagtgacatttgatcggtgatttcttccgaagataatggagaaagtaataataacgaattgattggaaactctgctgggaatggaagtaactgtgcaactggaggatgccatgtctcttatagtaaggcacctactggatcccatggaaatgggcta

SEQ ID NO: 272466 - DNA, 689 bp, Zea mays
  unsure (1)..(689): unsure at all n locations
aaaactgatagtgacagtgttcctccagcgctcgaggaaaaccaggctgttgcatttgcaaccaaagctgcagagtccctaggtgattctgccatgaatgcagagcattatgagggtcctgaggaggctgatgctactgaaaaaacaatgaaagtggttgaggacattgtgaagtccctggatgaatcctccttcaaggagggagaatcaaaggagacgcaaaagaagcagccgcaggattatgatatcatgagcctaataaagcttagaagcacgtacaagaaatgtcttattgcccgacatgaggggaagaggcctcctctcgaggaggtggatgggaacgcctgcattgaccactgaacagaacaagctgtgtcagtcacaaaattttcgtgaggatggcagctgccacgacgggattgaatagaggaatgctctggttgtgaagtgataactaaggctaccttcaaggcttaatgatcaagggttaatgaaactgtggtttcagccaaccaacctgcaattcctgtggtttttgtccatgttgattaactagtacgaatgccaagttccttgaaagttatacaaatccgttaatgttcagatggcattcagcatgctccatgtgctgcatgccaacatatcattcggcaaattggcaatgcaaactagaattgcttannnaaaaa

SEQ ID NO: 272467 - DNA, 378 bp, Zea mays
tcgatttccacgaaaatctcgctgctctcgcgaaaaaggacgccacccgcccgtgcttgctctccagtttgcaccctggaggcaggtgcaggtgcaggggcgctcctcaccagcgggcagtcaaccgcccgcgtcggccatggcggaggccgggaggcggacccttgcgctggtgaacctggcggccatcatggagcgcgccaactaggtgctgtttcctgatgagttcagagaggtgtttatcttttgtatttctttactattcttatttttattgttttgggtttttttcattattatctacatttattttagtctttgttttgtcttttcttatacagtatgatttttgtcatcattttttattatttataaata

SEQ ID NO: 272468 - DNA, 511 bp, Zea mays
ttcaattaggcaagcgattattcgcatcgttgcttaggtgctctaacaagccgcaattggttagagattggatcaagttccaggctttttaaaaagtgccttccagcttacttaattgactcgcatgggctttctcgctataaacgaactaaacgaagcgcctaaagagagagatccgcgggacaccagtcaataaagtaaaaagagagtattctcttatgtagtcttattccttcccacccccttgtgggtgctgctcaagcagctcaggaggcgccaaccccacaaccacaggtagaaggagttccaggtgcggcgtccagatcagggactagtggcccgtcctgttcggatgtaaaggaaagatgaaaaacttttctcaaacagtggggaaagggccccatacgtcaaagccagataaagaatctccaacaagattcgaaattggatcgttcaagtccaaaggatagagaagaaatcctcatggtcaccagaagattttcatcgagac

SEQ ID NO: 272469 - DNA, 507 bp, Zea mays
tttaactgctgcggcagcgagattcaccgggggaagtatttgcagcgaccgcgccggtccccgccacaaaatcagctacccaccaccgtccgtcagcggcggcggggagagcatggcggccatcgtggcggcgcgggcgtcggccccaggcagggcggccgtcagcaccatcgccgcgttccacagccacgcgtccccttcccgcgcgctcccgctcgcctcctcctccatcggcggcgccaggcggtaccaccacgcccccgcgtgctgcttcgccaccaagcccaccgcgccggccgctgccgagctcgtcgaccaggacttcgccacggccacgcaggaggccgccaagccacgccggaaacgccggtctcggaaggcgaagaagtccgccaccgccgccaaggaggaggatgggacggacgacaagccggtggcggcggcagaggacgaggcgaaaaggaagaaggaggcggccggcgccgaggacagcgcccgggcattggt

SEQ ID NO: 272470 - DNA, 682 bp, Zea mays
cgtccgagaaccactggtgccgctaacttttggtcctgcctcgttcatagaccgcttttgcagcagtgatgaagattacctcaggaaattcaccaaaaccagacctcggcctatttaaacctcagctgggagagctggcagcctgcctgaggcctgagctgcctccatatttgcattcttcaccctcgcttcacgtcaccaccattgccatccaagaacaaattaagcgggacactggaaacaaagagagacatgggccttcgcggcggagctcttgccctgcttctgctcctgttcgtccacggaggccagcgagcagcagaggccggcggggacgcgttcgtgagggtccagggcacccgcttcgtgcaggacggcaagccgttcttcgccaacgggttcaacgcctactggctcatgacattcggcgccgaccccgcgcggaggggcaaggtcacctcggcgctcagccaggccgtcggcgccggcctctccgtggccaggacgtgggcgttcagcgacggcggcggcggcggcggcagcgcgctgcagtactctcccggccgctacaacgagaacaccttccaggggctggatttcgtgctgtctgaggcaaggaagcatgggattaagatgattctgagcctcgtgaacaattacgacagcttttgagggaggaagc

SEQ ID NO: 272471 - DNA, 871 bp, Zea mays
gttgggttttatattggcttccaaataggatgggtgggctacaatgtttctgacgggtatttcccacatggagtaaatggaatgcttgctggatcagcaactgtcttctttgcatacataggctttgatacagtcgctagtacagctgaagaggtaaagaatccacagagagatttgccattgggaattggagttgcattggctatttgttgtgcgttgtatatggctgtttctgttgttattgttgggctggtgccatatttcgccatggatccagatactcctatttcatctgcctttgcaaggcatggaatgcaatgggctatgtacgttgtgacaagtggtgctgttcttgcactctgctccaccttgatgggctcacttcttccacagcctagaatacttatggccatggcacgagatggtctgttgccatccttcttctctgatgttaacaagcaaactcaagtacctgttaagagcacaattgtgactggcatctgtgcagctgctctggcttttgcaatggatgtttcacagttagcaggaatggtcagtgtaggcacactccttgcattcaccatagttgctgtctcgatcttgatactcagatatgtccctccagatgaggtccctttgccgccttctatgcaagaatcattccgtttgaaccaggaatgtgatgaggaaagggactggggtcttcttggagttgggaactgtaacttatctcagtcaaaggatgtgattgtggtagtagaatcagtgaaggatcctctcgttgataaaaggctgcataaaggcaagatggatgagacgaaacgcccaaagatagcctttttaagcataaggctgtgtgtgtagggggtct

SEQ ID NO: 272472 - DNA, 406 bp, Zea mays
ccctaatctctcgctctcttcctttctcacccccgtgaccctgtctcgccccttctcgcctcgccgccgcagccgatgggctccggggaggagccgtcgcagatgcggagggcgctggtggactcgctcgcgggtgccatctccggcggcatctcccgcaccgtcacctcccccctcgacgtcatcaaaatccgcttccaggttcagttagaacccacaacctcgtggggtattcttcgaagggatatatatggaccttccaaatacactgggcttctgcaagcaaccaaagatattctcagagaggaaggtttaccgggattctggagaggaaatgtaccggctttgttgatgtatatgccatatacagctttacaattcactgtactacacaaactaaaaacat

SEQ ID NO: 272473 - DNA, 441 bp, Zea mays
attggagttgcacaagccgctcagcaaccttcttcttcatcttctccagtcctccctcccgccccgtccatcgacacagcagcttgcttgtcaccaagctagccaagcaggaggagtaagagtacacccagagagagagagagagagagagagagagagtgcaccaccctgattccacccaccgctgtcccttgcttatttacaggcgttcgtgatcaccaacagctactcgtcagctagagagagtgcaacgggccgggcagagctagagagagagagagagagaaagcggccttctttttctgtgttcaccaagcaacaaccccagtccaagctctccgtgttggccgatcgtttccggcgaacagagcaagcaactcacaggtgagtcatcatcagccgatccccgacggttcgtgcatgtcatgcaaaaaaaaacta

SEQ ID NO: 272474 - DNA, 342 bp, Zea mays
atctgttccaaaggcttttcaggcaagaccttcttgttgctagcctcttccgtaacttcttgcttgctgagagaatcatgcgatctgcaaactgttctccagtttcttatccgttgttacccccaacacatcaacaccatatgtgggatgcatgggacatggctgctgagatttgcctttccaagcttcctcagttaattgctgatccaaatgctgagtttcagccaagtccgttttttacggaacaactgacggcttttgaagtgtggcttgatcatggctcccaggacaataaactctccgaacaggtacccatatgtctttaagatctgcttagccaat

SEQ ID NO: 272475 - DNA, 393 bp, Zea mays
catttgaaatatatatatatatatacatgtcagtctctccccctgcagccttcaccttccagttcagcttcattccacttccacttggatcgatcgatcgcatatggcggtactgtggtggtggtcatcgtcctgcttgtcctcccgcgccgtcgctgctgcgctgctttgcctgctggtggctcacggcagcgatggaaccaggcacaacagcaacaatggcggtggtagtggtagttccagcagcagcaagagccacaagcaaggcggagggggacgagcccatgccgcgccgacgacaccgtctccgtctccgtatccgtctccggcggctggcaacaacagcagcagcgacgacgggtggctgaacgcccttgcgacatggtacggtgc

SEQ ID NO: 272476 - DNA, 515 bp, Zea mays
cccacgcgtccgcccacgcgtccggcgcactcgccgcgcctgcgccctgcgggcagtctcttcttgccctttctcctgtgcgcagccgcggcggacccaatctcgcattctcgcgttccgagatactgttgttctttcagggagatagatagattccgactgctcgccattggggctgccttggccgcgtgccgtccgtcgcttcgtcgagctgcgtgcggggcgctcctcgtcctcctcacgatggggggctggaaccggtcgcggtacgggacgggccaccgtgaccgctccgccggcgcttcgcgtactcctctgcctccgccggcgcctgattacggagacaagcaccagcaagtcccattatgggagcagggaattctgccgccacgttggcgacatcacttgggagcagttctgtgaaaacaagcagtatgttggacaattccataaactcgagccttgggatgattcagcggcatttgattgtttccagaacgcaaaggcaaggttct

SEQ ID NO: 272477 - DNA, 1039 bp, Zea mays
ccgccattcttctctatatgatgtagcctcaaaatcttctgcctctgtaactacaagaaacagatttggtcccgtcgattgtgctggcatccatatatcttcttgcggacatgctgtgcatcaggaatgtcatgaccgatatttgttctccttgaaacaaagatatgtccggagacttggttttgaaggtggtcatatagttgatcctgatttgggagaattgctttgtccagtatgtcgcagatttgcaaattccattctcccagcatcacctgatttctcgggtaaaacatcaatgatgctgagaccatttgttcaaaccttgacacctcaagttgttacaaccacatcagatgtgaatagaaattgcttacagttcgctcgcgcactatctctttttgaaagtgctggaaaaatcgttggagaaaccaagtttttaaaagctatatctgggaagcttaatgaaactacaaatccagccctcgatccttgtcttcgaagattggctatgctttactatcctcgcagtcacagcagtttttcaccatctaagaggctcaacccatccttatttctctgggatacactaagatactctctggtatctacagaaattgcttctcgtggtaggacgtcaagccactctgctgaatcgaacgcctgcttggagtctttgcgtggcgaacttaattcatcaagtgggttcatattgtctctcctgttccatgctgcccactctgcacggaatttgaatcgtctcgaggttcttctgaggtttgaaggtatccaactattagcaggctctatttgctcttgtatttcgggttataaagacattctgaatgccactaagcgaaaaggctctttgccatcgatggttgatccagccagtgagggggccctctttcctgatgtacaattttggaaacaatgtgctgatccagttcttgctcaagatccgttttcttctttgatgtcagcacttttctgtctgcccgttcagtttctgtcatctgctgaattcttcatcccttttgtc

SEQ ID NO: 272478 - DNA, 916 bp, Zea mays
cccacgcgtccgcccacgcgtccgcaatactatctgaagactggcacatgcaagtttggagcaacttgcaagtttcatcatccccgagaaaaggctgcaatggcaactcgagttcagctgaatgaactgggctacccactccgcctgaatgaaaaggaatgtgcttattatttaagaacagggcagtgcaagtttggaagcacatgtaagtttcaccatccacaaccatccactatgatggttgctgtacgtggctctgtttattcacctggacagtctgcaacttctcctggccatcatgcttaccagggggctgtaacaagctggcccttgtcgagatctgcttctttcattgcaagtccaaggtggccaggtcattcaagttatgcacaagttattgttcctcctgggcttgttcaggtcccagggtggagtccttatgctgcgcagattggttcttcatcctcggaggaccaacaacggacacctggagctgcccaatactatactggctcacgccagagtggtacacctggcgtaggcgatcgaggaatgttttcatcctaccaagcaggttctgttcccgttggactttatgcagtacagacggagaatgtatttccagagagacctgaccaacctgaatgtcagttctatatgaagaccggagactgtaagtttggttctgtatgcaagttccatcatcccagggagcgaataattcctactcccaattgtgcactaagtccattaggcctacctttgcgcccgggagagccaatatgcagtttctataatcgctatggcatgtgcaagtttggtccaaattgcaaatttcatcatccgatgggaaaccctatgtatggccatgcttcatcaccgacaagtgaggcccaaacatctcggcgtatgctgg

SEQ ID NO: 272479 - DNA, 447 bp, Zea mays
ggaccacctggaggttaacagggcatacggcgatcccggcaggcatgcaattttgtacaatgcccctgtatctggggcaatactaagcgtatcgggatcctaggaagagcgggtccgccatccttcacaagtccaacacgagcgatgacgagcttgatgagctgagctccccacttaccttcatctccaacacctcatcagacccgcttgcgaagctgaagcggatcggcaactcgaccacagcgaggtacaggcttctccatgaggtgtggaagctggatgaccagtaggacttgatcctatcaccaccatggttctcccctctgtatataggtttgtttttttgcatatgattccggctcatgtataagatttcagtctatttgttatgttatgttacaagaagatgaggggcaagcgttgaatcttaataaatccgctgtgtct

SEQ ID NO: 272480 - DNA, 368 bp, Zea mays
  unsure (1)..(368): unsure at all n locations
cggacgcgtgggcgacacgctgcgagagggggaaagaacttagaagggcaggcaggagaagcgacacaggaaactgacgtcgccttcggcggcctgctacttaaataaatcccctcgcctcgcctccggctgcctcttccctttttccttccgcgcaaatcactcaggtgccagttgcgcggcggagatcgcgacgaattccggacggcagggaggtggtcgttgcaactgctaagacgtgttagagccctaactgttctatccctttttttttgnnttttttccctgctttggtaaaataactagagcctagaccctatcccagggccccccttaaaaattgcttttatgggtaaccgtgcccttgg

SEQ ID NO: 272481 - DNA, 737 bp, Zea mays
cccacgcttccgcccacgcgtccgggccaaggctcgaaccttctctccttctctggcttgtcttctccttccttcctcttcctcctcccctccacgcgatcgaaaccgaagcacgaattaatcatcccggttcagccctctccaggcgctccaccccgcgtcgcggacccccgacccgccccccgcctcgtcctgttcgcgtccccctttccccgcgtgtgcgttggccggctggttccggatgagggggttgctgtcggtggaggccgctggcgcggcgtcgtcgtcggcctcggcctcggtgctcaacggcgccgtggactggtggcgcgacgtcaacgagtcgccgctgtggcaggaccgcatcttccacgcgctcgccgtgctctacggcatcgtctccgccgtcgcgctggtccaattgatcagaatcgagtgcagggtgccagagtatggatggacaacgcagaaggtgttccattttctaaacttccttgtgaacggcgtgcggtctgtcgtgtttgtgctgcggcgaaatgtgcaacttgtagagcctgagataatacaacatgtgcttctggatatgcccgggcttgcattcttcacgacatatgcacttctagtgctcttctgggctgagatttattatcaggcacgtgcaatgtccactgatgggcttagaccaactttctattggatcaatagcgtggtttatgcaattcagataatcctatggt

SEQ ID NO: 272482 - DNA, 503 bp, Zea mays
cccacgcgtccgcttcccctctacgcgatcgaaaccgaagctcgaatcaatcctccacccgtttccagcccctcgtcccggagccccgatccgcctcccgtctcctcctgggcaggtcccccttttccgcgtgtgcgttggccggccggttcccgatgagggggttgctggcggtggaggccgcgggcgcggcgtcggtcccggcctcggtactccacggcgccgtggactggtggcgcgacgtcaacgagtcgccgctgtggcaggaccgcatatttcacgcgctcgccgtgctctacggcatcgtctcggccgtcgcgctggtccaattaatcagaatcgagtgtagggtgccagagtatggatggacaacgcagaaggtgttccattttctaaacttccttgtgaacggcgtgcggtctgtcgtgtttgtgctgcggcgaaatgtgcaacttgtagagcctgagataatacaacatgtgcttctggatatgcccgggctt

SEQ ID NO: 272483 - DNA, 493 bp, Zea mays
cggacgcgtggcaaagctattggagatgagcttggcgatatatatgattatgttgcaccatgctttcctcctaggtatgaaattttccagctcatggtaaacctgtatactgagagattcattcagatgcttcgacttctcagtgatagagcaaacgatattcaaaatataaatatcctgaaggtgactggttgggtcgtgcaatatcaagaaaacttgattggtcttggtgtggatgaatcacttgcccaagtttgttctgaaagtggtgcatcggatcccctcatgaacatgtttgttgagcgtatgcaggcaacaaccaagaaatggtacagcaacattttggaggctgacaaaacacaaccaccaaagagtacagaggatggaaaactatatacacctgcagcagtggatctattcagaatattgaccgagcaagttcagatagttagagacaacagcacagacgttatgctatatcgaattgcacttg

SEQ ID NO: 272484 - DNA, 1127 bp, Zea mays
gtttgatcttctatcattgaatgatagctcatcttatgaatcgaagccaaccaatttacataattcatttatccatgcaaaaagaattgtagtttttggcagtttgttgagaaaggagatggagcctgacacatcaggggggataatgagaatgaaaagttatttagacagatcaccggccttggggagatttaggatcccagttgaagctgagaggctgagagataatgatcttgttcttgagcaatatctcttagctaattcacctggaatagctggattccggcttgattctttcagtgttataagacctcgtgtgacccattcaccttcttcatcagagttggacatgagggagttttcattgacacgaatggaagatagatttataaacccagcaattctgtatatacaggtcacagttgttaaggagtccggcaagttggttgtagaggaataccgtttaccagaagtaaaagcaaacacgccactatattttgatttcccagatctacaacaggatgcgcgctgtgttatctttagattgcttggtgacgtcactgcctttgtcgacgacatttctgagcttgagaacttaaacttgcggaatcttcctttggcgtcgggattgtctttgtcaaataagatcaagttgtactactatgctgatacatatgagatgggaaagatcggcagtctctcagctgtataatgtatgcgaggtcgtcgtacatgccaacctgggatggtaaccgtccctagaagattgttgtaacctactgtttctacgtgttgttgtggaagtaagagctgctgctacagatacatgatgccttttttttactgtttctgtattcttgcttctttttgcttttgattagatgacccgagtttgagggatgtagggattttgcctgtagaatttctgggaattcatctctttttttaatgtagaatagccggaaattcaattcgatcgcagttcacgaaactgccagctacgtttgttgatacctgtattgggacctggattattgtatagagccaagaacttgcattgatattttttgtttgtttgtttgtttcataccatattttaagccctggctgcaccagatgttcgttcg

SEQ ID NO: 272485 - DNA, 1430 bp, Zea mays
  unsure (1)..(1430): unsure at all n locations
ggcatccagcaaatccagcgggtccgtactcatctgcttcacctccgggctccggctacggcggcactcttctctggcaaccggtcggaagatgttggatcttccgcttcaaatcgacgcataaaggatgcagattagttttgttcgcgtcaaatttattttgctcggtgtagttctgtccattaattaattatttgtactggatttaaggtgctgctattttgaaggttttttctcccggaaattttcacatcccgaaacgactggaaattgaagaccacagaaacctctaggcgacgaatcgagcaggtagaggagtaatcaggcatccatggctgagcatcttgcgtccatctttggcacggagaaggaccgcgtgaactgccccttctacttcaagatcggcgcatgccgccacggcgaccggtgctcccgcctgcacaacaagccttccatctccccgacgctgctgctctgcaacatgtaccagcggccggacatgatcaccccgggcgtggacgcgcagggcaaccccatcgacccggagcggatccaggaggacttcgaggacttctacgaggacatcttcgtggagctgagcaagcacggcgagatcgagagcctccacgtctgcgacaacctcgcggaccacatgatcgggaacgtgtacgtggagttccgcgaggaggagcaggcggcccgcgccctgcaggcgctgcagggccgctactactcgggccgccccatcatcgccgagttctcgccggtgacggacttccgggaggccacctgccggcagttcgaggagcacagctgcaaccgcggcggatactgcaactttatgcacgtcaagcaggtcggccgggacctgcggcggaagctgtttggccacctgcatcgctccctccggagccacagccggggcagccgcagcccgagcccataccgccgccgcggtagctcgtccaggtccagggaccgcgacgattactactactacaactaccgtagtggcagtggcagccgcaggagcagcgagaggcaccgcagccacgacagcgacgggagccgccgtcgacgcgggcggtcgaggagccggagccggagcccggtgagggaaggcagcgaggagcggagggcaaagattgagcagtggaaccgcgagcgggaggcagctcaggtgtaagcaagttccccttccctagttgccatgttggttgctgcagtgttattggccttgctagttgccatgttgctgttgctgaagcctgttatcatgtattgtggtgtggttcaggcagggtaaggccataaattgagcctgaaattggcctgtgatctcttttgctgtccgcgggttaccaccaaacttgttttaaaagtgctatgggggagcnnntnnggngggggaaaaaaaaaaaaaaggacga

SEQ ID NO: 272486 - DNA, 466 bp, Zea mays
cccacgcgtccggtatccgtactcatctgcttcacctccgggctccggctacggcggcactcttctctggcaaccggaccacagaaacctctaggcgacgaatcgagcaggtagaggagtaatcaggcatccatggctgagcatcttgcgtccatctttggcacggagaaggaccgcgtgaactgccccttctacttcaagatcggcgcatgccgccacggcgaccggtgctcccgcctgcacaacaagccttccatctccccgacgctgctgctctgcaacatgtaccagcggccggacatgatcaccccggggcgtggacgcgcacggcaaccccatcgacccggagcggatccaggaggacttccaggacttctacgaggacatcttcgtggagctgagcaagcacggcgagatcgagagcctccacgtctgcgacaacctcgcggaccacatgatcgggaac

SEQ ID NO: 272487 - DNA, 477 bp, Zea mays
cgcgtgcgcccacgcgtccggcaaatccagcgggtccgtactcatctgcttcacctccgggctccggctacggcggcactcttctctggcaaccggtcggaagatgttggatcttccgcttcaaatcgacgcataaaggatgcagattagttgtgttcgcgtcaaatttattttgctcggtgtagttctgtccattaattaattatttgtactggatttaaggtgctgctattttgaaggttttttctcccggaaattttcacatcccgaaacgactggaaattgaagtagccatttgatgctgttacctgggttcataagttgttagacttgttgttatttgtttgttaatcctatagctattgcatattgtgtgcctgatcaggaccacagaaacctctaggcgacgaatcgagcaggtagaggagtaatcaggcatccatggctgagcatcttgcgtccatctttggcacggag

SEQ ID NO: 272488 - DNA, 492 bp, Zea mays
ttggtctgcgtgggtccgtactcatctgcttgggctccttgttccggctacgggggcactcttctctggcaaccggtaaacctcctctccctttcttttctgtggtgcggcgcgttcaagatgtccggatgtacgtgcgcatcgggttttgggatcggattgcgcctcctgcgacatagggagtataccgtgctcttttgtttctccatggattgatactttctctgtcgattcttatcaggtcggaagatgttggatcttccgcttcaaatcgacgcataaaggacgcagattagttttattcgcgtcaaatttattttgctcggtgtaggtctgttcattaattaataattctgtactggatttaaggtgcttttattttgaaggtttcttctcccggaaattttcacatcccgaaacgactggaaattgaagtagccctttgatgctggtacctgggttcataaggtggtagacttgttatttggttgt

SEQ ID NO: 272489 - DNA, 352 bp, Zea mays
tcgaggagccggagccggagcccggtgagggaaggcagcgaggagcggagggcaaagattgagcagtggaaccgcgagcgggaggcagctcaggtgtaagcagagcaggttcccccctcccctgtgatgagtggttgctgcattgttattggccttggtagttgccatgttgctgttgctgaagcctgttatcatgtattgatgtgtggctcaggcagggtaaggccataaattgaacctgaaattggactgtgatctcttttgctgtggacgggttaccattaaggccctgtttggaaaccacggtttttaatactataatacactttagtcaatgacaataccacagttt

SEQ ID NO: 272490 - DNA, 515 bp, Zea mays
agcccaatccatcggaaacccccaaccgtagcctccgactcgagccgatcgaccccgatccgatctaatgttccccaccgtcgacgacccctccgccgccggcgccatggtgtcggcctccttccctgacgccgacgcctacggcaacggcgactccgacgacctcgacttccccgtggacccaaaccctaaccccgtgttctcctctcccgccgcccccgcgttcgccggcgcggccggggagcggcgcccactgttccagcgcctgtggacggacgaggacgagatcgtgatcctgcgcgccttcgccgagttcacggcgcagcggggcaccgccttcgcgttgcaccaatacgacaccacccccttctacgaggacatgcgccgtcgcctaacaccgagtttacaagaaccagcttgtggagaagatccgccggcttaagcgcaagtaccgcaactgcgtcgagcgccttcgggtagccgcgccggttttaacttccgcttcccgacgagca

SEQ ID NO: 272491 - DNA, 341 bp, Zea mays
gatctaatgtcccaccgcgcgagcctgcgcgcgggccatggtctcgtcctccttccctgacgccgacgcctacggcaacggcgactccgacggcctcgacttccccgtcgaccccaaccccaaccccgtcttctcctccccggccgctgccgcggcccccgggtccgctggcgcggccggggagcggcgccagctgttccagcgcctgtggacggacgaggacgagatcgtgatcctgcgcgccttcgcggagttcacggcgcagcgtggcacctccttcgcgtcgcaccagtacgacaccacccccttctacgaggacatgcgccgtcgcctcaacaccg

SEQ ID NO: 272492 - DNA, 768 bp, Zea mays
ggcttgcagtctcaggaacttttttgctgggaagccaattccttactgatctaagggacaacatttttgcttgcctgatataaggcaaagtgtgaaagggaaacgcgaaaagaaacgtgtcctggtcccaagtcacctgccatactgaacacgattgatcgcagaaagaaacacgttctggtctagactgacagttttggagctggagccggccatgcgctcgatcagagttccgctgcagccacgacctctctcccgaacgcgcacgagaagaccaggtggaacatatgcaagcaggttctagagcaataaccccatgaatccacatcgggggtctgcatctacacgggcgtgtactccgcaccgctcccctccggccccgaccgccgtgtgctcgttgtagccggggtcgacctcaaccacgacgacgatgcggtctccttgccctaggctcgacctcctcgctgacctcgccctgctccacctcaactcgcgatgaggattgtcggcacgttcacaccgcgccgttgcagaacgttggagcctctcagaactctagaagctgcctaccaccacgcaccctaagataggggcatatctgtgttagtcgcctgcacacatactgaaatatgggcatatccaccatgtattctactcttagttatgctagataaggcttttactctatcatttactgatctggtctgtttttagctccattagcttgttcccaagcttatgttagagaaggcgttatggcttttctcc

SEQ ID NO: 272493 - DNA, 334 bp, Zea mays
gtggagcaagacgaggaggcgacagactccggacaagtggtgtggcagaggatggagaggacacatgcgagggagccctgtaggcacgtggtttccatcatcatcgcgatgaggattgtcggcacgttcacaccgtgccgttgcagaacgttggagcctctcagaactctggaagctgcctaccaccgcgcaccctaagataggggcatatccgtgttagccgcctgcacacatactgaaatatgggcatatccaccatgtattcttctctcagttatgttggatgaggcttttattttgtcatttactgatctggtttgttttagctccatta

SEQ ID NO: 272494 - DNA, 518 bp, Zea mays
gttcgatttgagagccaccgattaacccatccatccacctcgccgccgccggagagtatggttgagcggcggtacaccgaggaggaggaggccctcgagatcaagtccctccgccgcatcatcgccgcttacgccaactatcaagacgctgcagaaagggatgtcgagagatatgagcggtcattcaaaatgcttcctacagcgcacaagaaacttctcttccacctcggtctgaagtaccaaagtctgagatggtgtatatccatgaatgcatcttttatcatgaaaatgcttgaggcgtttgaacctccttttgacatgagtcagtatgtagatgctgatgttcatgctcatccatcaatcttgcatgaccatagtcatatggattgcactcattccagcgagaggggtgattgctctataattgctatctccagaagcaatttatcattggatgagcagcatgatagtcccaaagatataccaagagacatgaaccttcaagagaaactgatata

SEQ ID NO: 272495 - DNA, 557 bp, Zea mays
tctagatcgcgagggccgcccttttttttttttgttttaaaaaatcctgggcaatgtatcaattattgaatcatcaacacataatagactcgacgtatagttcagacatacagtaatacaccaacatgttatattgttacacatattaagcatcatatttcaaatgtttccaacttatgagaagacaacagaccagctgatgactacaggaactcgataacatcatcgaatatgaattaccaattcaatgctcctttttagctcctcttggggtccctattcttccgtgatcgctttgctccccgggggtcatgtcgctcatcctcatctagcccactgttttctgactggcaatgcctcctccgcctgctggattgcttcttgtcatgtgcagaatcactgtcaccattgtcacagtcagatgcatccctccagtgatggctccgctggtgacgttgatgcctcctttcttcacctccagatacatccttctcatccaacgtgtcgtcactcctgcggtggctcctcctcttcctgtccttcctgctcttcctgtc

SEQ ID NO: 272496 - DNA, 688 bp, Zea mays
  unsure (1)..(688): unsure at all n locations
cttctccagcgtggcacagagctagggtttctcccacccgtcgccgccgccggctgcacccgccgtcgtccacggccggtccctccagctcccgccgcgcgcgctcccgccgctggacgctccagctcttgcacgcattctcggccgccgtcgcgcctgcacgccgctcctctgcggccgctccagcttgcccgcgcgtgctcccctcgactgctctagcttctgcacgccgtcggtcaccaatcgtcgcctactacgactcggccttcaagcggcagcttcatccgcgacgtccgcgtcgccgtcttgcgccacgacctcacccgagcgctctgcctactcccgaagccctcctccgcggcgcccgccccagcagttcctcctccgcagcgcccgccccatcagttcctcctccgcggtgcccgtcgacccgccgagcaccagcagcagcgtcgccggtggttgagctccaccgcctttgccgcgctccatctcttccggaagtgccctgctccaccgnccacctgtacggcagcctgacccagctattcggctgcctgcctcggagatctcgctgcctcgccgacctgaaatttgtgtgtgctcttccggcagcattggactgttttactcatctataggatctgattttgggtgggcgcagttgcggagatgcagaggctggggg

SEQ ID NO: 272497 - DNA, 511 bp, Zea mays
gtaaggctggatgtatgtaccgtggcaacgtgccatcttctgtgacatccactcctcagacattcagtgctgaggttggtactgggtctgacatctgcaaagctcagaaagatcttaatgcccttgatataacagttgtagagttatatttacaaattgtagacatcaagaatttaccatctgctgttcaaaaagaaaatgtgtatgtacggttcaccaagaatcaatcagatatgttcatcagtgacggcggcaggttggatatctcaacagttacagggaagaacaccggagtttgtttacagtgtgaacctaccggagaactcattcttgcagtaatggttgatcaattatcaaagaaaccagaaccgatagggaagggttctttcccactgcacgatttgacagggcctgattctaagctctccttcgagaagtggtttgaactgaaagctcatggtgggcatgccgtttcacctcctgttagtctttgtgttgcatatttttgtac

SEQ ID NO: 272498 - DNA, 538 bp, Zea mays
ctacaccagctgcggctagggccaagccgcgccgctcccgtcccccgtggcccccggcagcgccgtgcgcctcacgctggcgaaggtgaaggaaggggtggaggtcgcgcagctcgtggagaaggtggccgcggccacccaggccgccggggacgccaaggtgagcttcggggagaacttttccccggcgcgggccaaggggtaccagttcgggatggtggcggtgttcgacagcgtggaggagctggacgccgtggaaggggacggcaaggtggaggaggccaaggccttggtcaggccgctgctggacgaggtgatggtcctggacttcgtcgtcggagatgctccaacgcccgcgagcctctgattacaggctgcagggtctcactttcgggattctgagtgtgttgttgatgtcggaataatggatagatgggctccctggtcctggtcctgcagcttttcaacttgtgatttgtgaaattgggaatgacagtgcaatgaataagaattgcttccctcgatatagatctgttcg

SEQ ID NO: 272499 - DNA, 321 bp, Zea mays
ccctcctaagccaaaccccgaatcctccgtcgcccagcagccgccggtgacggcgacgctgggcaatggggactgaggtagcagccgtagtggacctccgggcgctgacacagtcggatctcgtggccctagctgccgcatcgccctacgccgtcgactcccgccggggccggcgccggcgccgcgatagcgagttcctctctcccccgaagatcgaccgcgccgttttcaacgagagcgcaggttcccgcaaacaaaccttctcccgtcgccgcgtcgccaccaacatattccacaaactaacgcccaccaccaccgggg

SEQ ID NO: 272500 - DNA, 410 bp, Zea mays
gttttccccctgctcaccacctgctggctgctgctacagtgctactgccattacgccaccacacgagcttgcgcggcgactcggcggcgggggacgaagcgggacgccatggactcccgccagggccagcagcccaactacaagatttatattaggatgatgaaaacagttctgcttgacgtgaagtccactgataccatagatcagattaagtctaagattggtgctttagaggggattgacaatagccagcaagagctcttttttgctggaagtcatctggagaaggacaacagacttgctgattacaacatcatgacaaactcttgtgtcgacccttatgtaactgatgggatgcagatctctgtcaatatcccctctgtttggaagaccatcaaggtcaatgtgat

SEQ ID NO: 272501 - DNA, 575 bp, Zea mays
tgatgatgtaaaaggagaagggttataccttttaaatcagctgacctgtcatctgacctgtaatgctgcaaatgatgctatgggtgataagatcgatgagcagtgtcctgtgatggaaggaaatttgtccgacaccaataaatttgttgattcaaatcctgttgtttcggaaaatgccatggagccaaatgagtgttacatcacaatggccatctctaggcatccatttctgagacgttggatattatcaaggtacaagaaattatgtgattcctgtaaacctgccgtggtttctgaggggtcatcttgtttgaaagttttgggctctttgtcagaaccttccgatgataaaagtcacacgggcaatgagtcatcagtgctggagaaacttgataacaatgtcagagaaaatatgcgaccagatgaactaatttcttcatctgagcagggagcacttgcaaaaactgagagtgtcgataattatggaaataagttttcacagaataagaatgtggacatgggttcgttctgataatcagaaatctgatgagctcacggacgcaaaattggatgac

SEQ ID NO: 272502 - DNA, 736 bp, Zea mays
  unsure (1)..(736): unsure at all n locations
gtcgaagactaatacttgatggcctaaagagtctgttgaaggggtctccgaacatgaatgcgctggttggtttaggtgctttgtcatcctttgcagtcagctcaattgcagccttcattccgaagctggggtggaagacattttttgaggaaccagttatgttgatagcttttgttcttctagggaagaatctggagcagagggcaaaacttaaagctaccagtgatatgactggactgcttagtattcttccatctaaagcacgcctaatggtggataatgatgctgagaaatcatcattgattgaagtcccatgtgatactctagctgttggggactatgttgttgtgctacctggggatcacatcccagcagacggtattgtgaaagctggaaggagtacagttgatgaatcaagtttgacaggtgaacctatgcctgtaacaaagataacaggggcagaagtatcagcaggaagtattaacttgaatggtaaactcactgttgaagttagaagacctggtggtgagactgtcatgtctgacatacttcacttagttgaagaagcccagacaagggcggcccctgttcaacgattggctgacaaggttgcagggaactttacatatggagtcatggcactntctgctgctacttacatgttctggagtattttgggttctcacttgtaccctgtactattcaatatggaggtgcaatgtctttggcattacaa

SEQ ID NO: 272503 - DNA, 604 bp, Zea mays
cccacgcgtccgctagaagggaaacgagatgaccctgatttccgcaggacacttgcgtggaaagcattccggcatgttgcttcctatgattctgctatctcggagtggttgtggaagcaatctaataaagattcatttcctcccagctttactgtgcccctcacaatgaagtctacacttcgctatggtgagaatcctcatcaaaaggctgccttttatggtgacaggagtctttctctagtaaatgctggcggtattgcaacagcaattcagcaccatggaaaggaaatgtcctacaacaactatctggacgcggacgctgcgtggaactgcgtctcggagtttgagagcccgacttgcggtcggggttaagcacacaaatccgtgtggcgtagcgtctcggcacgacatcctggaagcgtacaggttggctgtgagggcagaccccgtgagcgcgttcggaggcatagtcgccttcaacacgacggtcgacgaggatctcgcgagggagatccgggagttcaggaggccgacggacggcgagacgaggatgttctacgagatcgtggtggcgcctgggtacacggcggagggcctggaggtg

SEQ ID NO: 272504 - DNA, 534 bp, Zea mays
cgccactcctgcgcttttgcgctttttctccccccgcaccccagaaccagcacgccggtcctcctgatggccgccgccggcgagggcgaggctgagcgtgtgtcagcgctgctgcgggaaataacgggggagggcgggttcgctttcgttgcctccgcggagaaggcgggggcggcggacctgcgcgcggcggaggcggcgcgggagatggcgtgggagcagctccactcgggcccctggagcgaggtcggcaccccctggagggacgcctacgcgctcgcctgcctcaacgtcgcgcggctccgcacccacgcggccagcggcggtgatagcgaccgctccgcggcgctccgggcactcgacatggggctcatcatgggaggcaacctactgcgcgccgacctcgaggcggcactggcgcgcatctccgcggaagcgtgtggcggaagcgaaggtggcgagggggtcgtggataaggaggaccagaggtggagggaagcgcttgacaggaaccgagacatcgctgatgcactg

SEQ ID NO: 272505 - DNA, 426 bp, Zea mays
aatgacgcgtgccggacgcgtggggcgccttccccgaccggaactagccattaccgacggaggcccgtcagcagcgtcggggcaaagagttcaccgcgcgcgatcaagcgattgatgcccccgtcacggcggcaaggggttcgggtcgattcgcggcggactacgtctcgctcggcgtcagggagcccgtctacgaggtgatagaagtgagatcaaatgggaggatgtccaccaagagactacgcaggcggcagctactgaaatctagtgggctccgcctacgagatactagaagtgttgacccatcactatggttaatgaattcaatgccttccctgctggtacgtgagcaggctattttactcaatcttggttcgttgcgagcaattgctatgtatgcgcgtgttcctatattcaactataaca

SEQ ID NO: 272506 - DNA, 506 bp, Zea mays
gttctagatcgcgagcggccgtcctttgtttgtttttttgtggcttgctctcggcgaaggcccagggcccttcaactgcaaccagagagatggcgcaggacattgctgtcagttcaccccttggggccagaagccgctgatgtccacaagatcaccaatgctgtgctaacagactgcgccctgttgattctttagtacatgtgtaaattataattctaaacatgggaagttttgatccaaatattcaatcgtggcagttgtattgggagtcggtggaagggacatatcgaagataaaattctgtattggatttgcaggacatgcattgcaatggtgtagtatgactggcaatccttatcatgtaatcccccctagccagggataatgttgtttaatgtcagaaaatgatagatatttcccagttattgtcgttatttatcacactaatccttttattatttgttctgttaataataggtattattgatataattttgctatttttt

SEQ ID NO: 272507 - DNA, 1078 bp, Zea mays
ctcgccctcaacgttgcctactctgccaccgagttcgccatcggcctcttcaccggacgcgtaggcttagtttcagatgctttccatctcacctttggatgcggcttgttaactttctcattgtttgctatggctgcatcccgaaccaagcctgataacctctacacctatgggccagtctcctcattccctcccgcctttcaggctctatttctgttcgtctgtgcactaattcacactcacttattgttgtctgctttctttcaggtacaagcgattggaggttctggctgcctttacaaatgctctgtttctattgttcctgtctttctccttggctgttgaagcattacatgcatttatgcaagatgaatcggagcacaagcattatctgattgtttctgctgtcaccaatcttttggttaatttacttggtgtttggttcttccggaactacgctcgtgttaacatagtttacaggaatgcagaggatatgaattaccactcggtctgtttgcatgtgttggcagattcaatacggagtgcaggcttgatactagcttcttggtttctttcattggggattgagaatgctgaggttctgtgcctgggaatcgtctcagtggcagtgtttatgcttgttttgccgttatttaaagctactggtaatatcctactgcaaatcgcacctagcaatgtgccaccttcagcctttacaaagtgctcgagacagattgctgcttgtgaagatgtctccgaagtatggcaaggtcgattctgggagcttgttcctggtcaggcagttggatctctctccattagggtgaagagcggcgctgacgaccgggcagtccttgaatacacgcatggtttatatcaggatttgggcatacaggatctgacggtccaaactgatgagtttgtagggcctgttagttagacggtaggggttctatcccagcttcacgaaagtgttgttttcagtttttttttcctaccaagtagtttctttcgcaaccgtgtctatctaaacactgtttttttattaagttcatctcacaacaaaaagttttttcac

SEQ ID NO: 272508 - DNA, 451 bp, Zea mays
cccaactctcttcctcctctccctccccacaccaattcccattcccaattcgccctcctcaaatccggcgcccgcattcccgaccaccccgcagatctgggatccgccaccgccggatccctcgctgcccgcggcgccccgggacgcgcgtgatcctacccacaaccgtcaagttggcgccccagtgaaggtcgcagcgcctctccggcggcggcgcgggctccgtcgccgcgcagccgcccggagcctccggcgcacaggcagcgatgggtgactcaggcgacgccgtcatggcgcgctggctgcagtccgcggggctgcagcacctagcgacctcctccgccgctggtgctggcggtgccgactaccgcggtgggatgcctgggcttgggggctctggcgcggggagcatgctgtcgagcctgctcatgcagggctatgggccagaatc

SEQ ID NO: 272509 - DNA, 265 bp, Zea mays
caagtaattagcccagcgacagtcccaccaaactcaatgcttcacccgttcttgcttgcacatttgtaagtttctctagccaagcgtcaaacaatgatacaacacctcacttacaaaacatgacctttaacgctaccactatatgagcgagaacgaggaggcaggagaaatatatagtgagaggaatcaataccaccatactgtgacgttctctcctcctctgatgagaaagagatgatgagggagggcgatgcatgtgttacgc

SEQ ID NO: 272510 - DNA, 437 bp, Zea mays
acccagcagtttgagcgtagatacttgctttttgccagactgaatctcatggtactaagctccattgctcccacaatctgtgaaatcgatggttcctgttgatggggacatgcagacgttccattgcacataaccccagagctaagctttaagcaggacgacagctcggaactgaggctagctgagaacaatcttgaatacctgaaggcagcactttgtggatcagattggcctagctgtccagtatggaaatgtaaacttcaccattttgaatagttttggagaaacaattttgtaataatttacccttgtttagtgtacattattgattttcgtttatatgacgttgtattgctttatttaacatttaagtcaactagttaatctacagtctgacttgctgtgattcgatgaatttatggattttccttgctgct

SEQ ID NO: 272511 - DNA, 429 bp, Zea mays
acattatatagcccttaatatatttttaccaggttctaagattaatgagagctcccctcaagaagcagtagcaggccacagcaggtgagtgaagccagaggtgaagcttgcattttcaggacatttgatattcagtttgggtcaaacttgatttttttggcattgttacaagatatgagcaagggtttcagcataatggttggcctatctttgaactgcaggcacctccatgttcaaagatgtttattgctttattttgatgttacatgactggcttgaatgtcatcattttggagtgtctgacctatatgcttctcttgctttgtgcagcccgaatagtagcattgatattctggcatcagtccggcttaaatgaacagtatgtatgtacgagggcagtgaggtaccttgtgacgaccccggagatat

SEQ ID NO: 272512 - DNA, 1287 bp, Zea mays
attcccagtaccctcacgccggcatccgtcgaagctgctcgacctcgactcaagccttccttgctccttgccgccgtcgagtcgtcgcaggaacgatgacccggcggaacggctgtacgatctacgtgggcaacctccccggcgacatccgcgagagggaagtggatgatctcttctacaagtatggacgtatagtggaaattgacttgaaaattccaccaaggcctcctggttttgcttttgttgagtttgaggacgcacgtgatgctgaagatgcaatatatggccgtgatggatacaactttgatggccataggttgcgggtggaattagcccatggtggacgaggcacatcttcttttgatcgatctagcagctatagcagtgctggacaacgcggtgcctcaaaacgttctgattaccgtgttatggttactggattaccttcttcagcatcatggcaagatctcaaggaccatatgcggcgagctggtgatgtctgtttcactgatgtgtatcgtgaggctggagcaactattggaatagctgattatactaactatgaagatatgaaacacgcgataaggaagctagatgattctgagttccgtaatgctttttcaaggacatatgtccgggtgagggagtatgatgctaggcgcagccgttctcgctccagaggcagaaaccgctctaagtcaagaagcagaagccacagccattcgtactcaagaagcagaagccgcagttatagcaagagcaggagcccaagatctagatctgcttcagagtcaaaatcacctgttaaggcaagatcaccatccagatcccctcctgtttctccccggcgtgacaagtctgcaagcaggagtcctgccaggagcatgagtctgccccgatcttgttctccggcaaaatcagagtgaatcggattctgcacttgaaacgttcagaaaggcagagctcgagctaaaagattgctgtacggattatgagcactgtgctagtagcattgctgtcccttccatatttttacaaatactctgttctttgaggagatcactgtatgctactactctgtacctgacatgatgcaaacgttgttggtttttgaacttagcagaacgatgactttgatcagctccatccattccttccattttttttttctgaatatttcaaaagattgtagtatgcagctattgttattctctgatgcactcctgtgtcctgtcattgtggaaaaaaaatgcccttctaccattcaaaaaaaaaaaaaattattaa

SEQ ID NO: 272513 - DNA, 375 bp, Zea mays
gccacacttttgctaaaccctagtaaatatacgatacgaagcgcaaacgcttgcctcatcctcgaattcgccatggcgatgcccaccacctcgtccgcttccccatgccaggcaccgtcgcccgccgggctgcccatttcccctggcgcccgcgctaccatcctctccttcagccgccgcctccgccgcccccatggcgccatcatttctgcgcccactggttgcctgtttcttggtcttcccaagtcgtgctgttctatcacagcctttggtgatgtggcagcggtttctgatgattatgtagaaagctcgccctcaagcagtggatatctgaatagtactatggatgcttcatctcatgaagataatcaatca

SEQ ID NO: 272514 - DNA, 1579 bp, Zea mays
cccgggggggcaccggccctgaatcccggggttgccccacgcgcgatcatggcttcgaacacagtctggatcacctgggccacttggctaccgccctgggggtggctgcgccgcttctcagtgggggccacgttctcagaatgacggctatggatacccacctagaggtatgcctccccctcagaactacaccacaccctacggcggctgccccccgcagcaggcaccaccaagaggtggcatgggctgggaccagaggcagggccctccaccccatccttcgtaccagggtggtgcttctgattactacaagcagggatctcagccatatgatagccagccacccagctaccctcctgggccagggaattacaacagttatgggcaatcccagggccctaactatggccaacctcagtatccgcaacatgcacctcaacagaactacagccatggctatggtgatcctagatacaatgccccccctccgaaccagcagtactatggtcagccaccgatggccccgcagcaaggctatcctcaacagccagatccctatgctaggcctccatacagtggacctggtcaatggacccccaggggtgctcccgccgcagatggctcctaccaggcgccaccttcatcttatgggccaccgtctcagcaacctcctgcttatgggcaaacatatggtgcagcaacgggacctgatgggtatggtcaacagggttacccacagcagggtggccaggtaccagcttcatatggtcagagtgcaccagcagctccaggatatcctcagcaaggcacgcagcaaggtggctatgcacagtacccgcagacccaaccagcatatggtgatcaagcagctcaagccaatgcgaactatgggtaccagggagctccagcagatcccaactacggaagtgcgtacccacagcagccagggtatggtcctcctggtcaggcaactggtcaggctggttatgcatcctctgcgccagcggccagccagcctgtgtatggccaggctggatatacccagccacctacaaatcctccaagttatgatcagtctgcagcaccagcggcgactcagagcggttatgctgcgccccctgcaaatccacaacagcctgctgcagcaaaaggggtctcgccacagcctgctgctgctgctgctgctggatatggtgctagcgggcagtggacggcatgagcctcgtcttccgaacttcgatgacagcaaggtcaggttggatatccgcttttggcgcgtgtttgaatgtttgcatcttttggatgtctgtggacgcatcatgtagggcttgaccccgttatcgaaagagattgtaaccccttgagttgtgatactggacatcttctgtagtatctacgagtagttgcttaatgtgacttttaaacattctattcagtttggatgttccttgtcttgctacttcccagcttgccaagccagtaatctttggattcatgtttggttgctctttggtctttgccgtcgttcctgtaaataaatatccgcgtttggccttctctttgtgggggggaattattt

SEQ ID NO: 272515 - DNA, 816 bp, Zea mays
gtttttatgtttatgcgatgcacctataaattaaagggtgagtcacactttgctgggatccctatctcctgccgcaatctctaatgatggttaaccaagatgcacagaaattcgaggagattttgttaatggaattcttttcttgaacattgttccttgaacgacatagttatcattgctggacagtgtttaagaagtatgaaatatgagctactatgcaggcgtattttcttaatgccgttcttatttaactgcaatttgtacagtctggttgccccttgatggtttcctataacctgttgctttatgttagtttgtagtgtctgttatttacttccccttttggtttctaacatgaattcttgtacagacattttcaaagcatacaaatcagtctggcggatatggtccacaaggttaccgacctcagggtcatggtgccgcttctcagttggggccacgctctcagaatcatggctatggatacccacctagaggtatgcctccacctcaaaactacaacgcaccctacggtggctacccaccgcaggggaccgtcaagaggtggcatgggctgggaccagaggccgggcccaccaccccatccttcgtaccagggtggtggttctgactactacaagcagggatctcagccatatgatagccagccacccagctaccctcctgggccagggaattacaacagttatgggcaatcccagggccctaactatggccaaccctaatactccgcaacatgcgcctcagcagaactacaagcatgggtaatggtgatcctagatacaatgctccccc

SEQ ID NO: 272516 - DNA, 709 bp, Zea mays
tttttggaacttgcaaatgagctcgggtgcaaagatccaaatcaccaaggacgccgatgcggactcaaatgccctgactcgtccggttgaactagttggaacccttggaagcgttgataaagcagagctgcttattaagagtgtcatagctgaggctgaggctggcggttcccctgccttaatagctagaggatttggaagtggacagcctgggtcagagcaatttgagatgacagttcctgataacaaggttggtctcattatcggaaaaggtggtgaggcaattaaaggcatgcaaaccaaatctggtgctcgtattcagttaataccccaacatcctccagagggcgttacattgactgaaagaattgtacgtgttactgggaataagaagcagattgaacctgcgaaggatttgatcaagcaagctatgaatcagacattttcaaggcatacaaatcagtctggcggatatggtccacaaggttaccgacctcagggtcatggtgccgcttctcagttggggccacgctctcagaatcatggctatggatacccacctagaggtatgcctccacctcaaaactacaacgcaccctacggcggctacccgccgcagcagggaccgccaagaggtggcatgggctgggaacagaggccgggcccaacaacccatccttcgtaacaaggtggtggtttcgactactac

SEQ ID NO: 272517 - DNA, 891 bp, Zea mays
  unsure (1)..(891): unsure at all n locations
ccacgcgcgttcattgggccaaaaggagnacangagnacacagggcagatttgaagcgtngagccgtaattcaccgcaaangatatgtctggagatctgggtactgcctagattcttgatcccattagcttgattattcttcgtaggacatacactatgagtaggactttcctcatctatcaccattaacaatgtccatgactataggtttgcaagtgctgacttaccataccagcggattatcgagttgctagataagagatattattctgtttcctacataagcagtctgaactgacacatcaagttccctcgcttccaggttccgcccattatttttggtgaaggcgccgatctggaggcggccgggcatcctaatgcagatacagctagctttcttcatggggggtcatcgctcttcatcgtttacttgcaccgaagagggacattgaccattatcccttacccttgcatggtgtatgtagttggtaactggtaaggctgcctattgccgaaaggaaacataaactgtttggcattggaagactgcaacaagtgtatcattgccatgacaaggcttctacatcaccatgttagacattttcaaagcatacaaatcagtctggcggatatggtccacaaggttaccgacctcagggtcaaggtgccgcttctcagtgggggccacgttctcagaatcatggctatggatacccacctagaggtatgccttcaccttaaaactacaacacaccctacggcagctacccgccgcagcagggaccaccaagaggtggcatgggctgggaccagaggcagggccctccaccccatccttcgttaccaggtggtgcttctgattactacaagcagggatctcaaccatatgat

SEQ ID NO: 272518 - DNA, 357 bp, Zea mays
gggctaccgccgccgccgccctacgttagataccgaggccttcgccggcgacgaacacccgccagggatggcgaccacagcactgctccgggctctccggcggccctcatccgaagccgcgctgcgattggctacaaaggcaaatgtgcaaacaactaatggatatagacatctgaataacaggaacctaagcgttttcaatgagttttctaagcaactaaagggtgaggccaagagcaatcctgaattccagaaatccatgaaggagttcagcgagaaacttgatgtggtgaaggaagatctcaaagtaagaactaagaaaacgactgagacaatatacaagcgtgttgtttatgt

SEQ ID NO: 272519 - DNA, 1071 bp, Zea mays
cccacgcgtccgccagcgtctcgcctcgccgtcagcagcagcagcagctgcacctccattccacggcttccgtcgtgcgcttcgtctgcacccacaaaggcgacggcgacggcagggggaggagatgaagctgaagcagctggagggcctcttgggtggcctgacccagttctccgaccccaagctggagctggagcagtatgcgacgggccctcacatcgcgtcgcggatgctctacatggcagagaatagtttcaatgacataactggcaaagtggtagctgacttcggctgtggctgtggcactctggctgtggcgagtgctttactggatgctgaacatgttcttggtattgatattgacccacagtcacttgaacttgctcaagaaaatgctgctgatctggagctggacatcgatttagtttggtctgacataaagaacttaaatctgaaaggcgtccatgttgatactgttgtcatgaatcctccctttggtacacgaaggaatggagcagacatggagttcctctctatggccttgcaggttgcttctcaagctgtctattctctacacaagacttccactagagaacatatcaagaaggcagccttgcgtggcttcaatgccatcagtgcggaggttctatgcgagctgcgttacaatctaccgcggacgtacaagttgcacaagaaaaaagagattgacattgcagtcgatctgtggcgctttgttcctaacgcccaacgccgcagctagcgcgctcgctatgggccgaggggcacaggtgatggagtggaactgaacatgaatggaaaatgatcaaatggatgtgtctcaaaaggctggacttgatcgaagagatcccaggcgtcacgcttggtgtgcttatcgtcttcttggtgcccgtaaggatagctcagaatttggcgaactgtgtagagttttgtcattttgtgggcacagatgatgctcccagtagtgtgcacaatgaatgctttgtatgtattgtgctctattgcctgtgctaacgctacagaataaaatatttacaattaatttggtgatcc

SEQ ID NO: 272520 - DNA, 405 bp, Zea mays
  unsure (1)..(405): unsure at all n locations
taactctgagccccatcggagactcggagtcgggggcgccagcgtctcgcctcgccgtcagcagcagcagcagctgcacctccattccacggcttccgtcgtgcgcttcgtctgcacccacaaaggcgacggcgacggcagggggaggagatgaagctgaagcagctggagggcctcttgggtggcctgacccagttctccgaccccaaggtactgctgactgcgccaccgccaccggccccacctcttgggtggcctttctttcttcctttctcgtaccctgctcgatttcgcctcgcccaaccccgacaagagggagggggaaaagcggaggagtatctgacttttgccaccaatggcgtgtttttttacaacgagatgncgctgttgggtgtagctggagct

SEQ ID NO: 272521 - DNA, 381 bp, Zea mays
catcggcgccgccgggatgaagcgctccgccgacgcgatgactgagccggcgaagcctgtgttcctcaccaaggcggagcgggagcgcctcgcgctcgagcgccgccaggccgccgtcttcgaccagcgccgcaccgtgctcgaacctctccagtccctgccccgggcccctcctccgccgcctcccagcggcgctcccccgtccggctccaaccccgctcctcgcgactcatccaactctcatcgcgattcctccgaccgggaccgggaccgggacagagacagagacagagacagagacagtgactgagaccgggaacgccgccgagacgacgattcccgccgcgaccgagatcgggatcgagatagggaccgcgaccg

SEQ ID NO: 272522 - DNA, 398 bp, Zea mays
taaacatgaaccttcactgccatggtctgcaataataatatcaacagctgtagctataattgttttgcttgttggacatattatttatgcaactctgaactcccttgaaaaggctgaacatgattatagagtaatgagagaacttaaaggacaagctgaagctgcagatatagcaaaatctcagtttctagcaactgtttcccatgagattcggactccaatgaatggtgttttaggtatgctgcagatgctaatggacactgaacttgatacaactcagcaggattttgtagtcacccgctcaagaaagtggaaaggttttaataaacttaataaatgaagtccttgatctggctaagatagagtcaggaaggattgagctggaagcagtgcctttt

SEQ ID NO: 272523 - DNA, 1739 bp, Zea mays
ttttatgcttccgggggaagtggtaccctcttctgccgaggcagctggtgagaatgatgctgatgctgatgacgagggtgaggaaagtgctcagaggtctactgaggacagtgaaaatgcttcagaggcgggtgaagatgcatcgggtagtgaatctggtgatggtgaggaatgctctcgtgaagatcatgatgaggaagaagaggatatggatcacgatgatcaggatgcaaaagctgaaagtgagggtgaggcagaaggaacaactgaaacacatgatgtggaagggggaatatcactaccactttcagaacgctttctgtactcagttaaaccacttgccaagcatgtacctacagctttacatgatcgagagaagttctcacgtatattttatggaaacgattcattttatgtcttgttcaggctacatcagatcttatatgagagactactttcagcaaaaactaactcttttaccgctgaaaagaaatggaggaattccaaggatacaaaccctcctgatctatatgcaaagtttatgagtgcgctttacaacttgctcgatggttcttctgacaacacaaaatttgaggacgactgccgagctattattgggactcaatcatatgtcctctttactttagataaactgatttataaagttgtgaagcagcttcaagctatagcaacagatgaaatggacaataagcttctgcaactatatttatatgaaaaatcaagatctcctgggaggttttttgacctagtttatcatgaaaatgcccgtgttctactccatgatgagagcatataccgatttgaatgttgctcaagtccgacaaggttgtctattcagctgatggaatatggtcacgaaaagccagaagtgactgcagtatcaattgaaccaaatttttcttcgtatctttttggcgagtacttgtgtagtacgtcagacaagaaattatctgaaggcgtctaccttgcaaggaataagcggaaatattcagataatgatgaaccttcagattttttgaaggcaatggatggtatcaaagttgtgaatggtctcgaatgcaagatatcctgcaagacctcgaaagtttcatatgtccttgatactgaagatttcttgttccggcttcggaagagaaggaaaattttgcggggcgggaatgtgcccgaccgtttgcagatttcatcaatatctgctgcaaaagtgcagcgcttcaataggttcctatccaaaccataggatcatttggcatacaaatgtatcgaaacctgttgctggggtcccagctgcttggcttgaacaatgattccatcgacgtcgcggagtcccctttcggaataacagatgggaagacatagggtaaatacagcaaagcgaagcgagcatgtaggccacagcagtcagctctgttgtgcggaaagatgtgtatatatgtattagcaacatgtttgttctgatgacctttttaatgcttttcgatggtaggtctgttccatcaagtatttaactaatcatcatttgttgcagttggtataggtcttctgttctttttttttttgccgtcgtttttcattgaggatgttgccaaaattaaaacctgtgtcaaacagttatgtagtcttgtcttggttaatcttacagacgccgtaatttctcagcctcttgagtgaggtgcttgtacaccctttcattaagcttttaaggcgtggttgccaccaat

SEQ ID NO: 272524 - DNA, 594 bp, Zea mays
gttttcaaaaatatatgctgcaaaagtgcagcgcttcaataggttcctatccaaagcataggatcatttggcatacaaaatgtctcatcattgtatctaaacctggagatattgctgggaccccagttgctttgcttcttcagtgataatatgcaggagttggaagatggtgacgtcatcgacaattcgtcgcagaatgccctttttgaataacagatggggagatctatagggtaaatacagcaaaacgaagcgagcatgtaggccacagcagtcagctctgttgtgcggaaagatgtgtatatatgtattagcaacatgtttgttctgatgacctttttaatgcttttcgatggtaggtctgttccatcaagtatttaactaatcatcatttgttgcagttggtataggtcttctgttctttttttttttgccgtcgtttttcattgaggatgttgccaaaattaaaacctgtgtcaaacagttatgtagtcttgtcttggttaatcttacagacgccgtaatttctcagcctcttgagtgaggtgcttgtacaccctttcattaagcttttcaggcgtggttgacagcaat

SEQ ID NO: 272525 - DNA, 1509 bp, Zea mays
tgtttgaagaagtataatccaaagcttgtttatccagtccaatcgcggggtaatgttgcaaatctgagggatattgccatggatagcttggagaaatttggagtgggtatcgttgatcctgacaagatatatgagttctacaatgatcagcacagctacctttctagtgtgggtgtggatggcgtgaaggttgatgttcagaacgtgttggaaactcttggacgcggatttggtggtcgtgttgcagtaactcgaaagtaccagcaggctcttgaggaatcaattgcccagaacttcaaaacaaacaacctaatctgttgcatgagtcacaattcagacagcatctttagtgccttgaagagtgcagttgctagagcctcagaagatttcatgcctcgggaaccaacactgcaaactctgcacattgcgtctgtggcattcaatagcctattgttgggagaaatcttcatacctgactgggatatgttccatagcaagcatgaatcagcggaattccacggagcagctagagccctgagtggaggtggtgtttatgtcagtgacaaacctggggtgcatgattttagtgttctaaaaaagcttgttctaccagatggttcgattctaagagcaaggtatgctggtcgtcctacacgcgattgtctgttcactgacccagtcatggatggcaaaagtctgatgaagatatggaacttgaacaatttcactggtgtcattggagtgttcaattgtcagggagctggacagtggggttggccagttaaacaaactgcttatgttcctaccaacataaacataactggtcagctctcaccgtccgacgtagaatctctcgaggagatagctggtgatgactggaatggggagactgcagtatatgctttcggttcatgttctctttcaaggcttcagaaacaccaaagtttggaggtgtcactgtctactatgacatgtgagatctacagcatttcaccaataaagattttcagcgaagtcgtccagtttgcgcctcttggactgatcgacatgttcaactccggtggtgcacttgacaatatttcaagcgttgcagattcttcagctacgacagttcatataagatgccgaggaccagggcggtttggggcgtattcagacaccaggccagagctttgcagagttgatgaacacgaagtggagttcactcttgcaaaggatggcctcctgaccttttaccttcccccttcttcctcccaggacaacctgagacacgttgagattgtctacaaagcatcatgaacgacatttacccttatgattcttacgctccagcatgcaatttctggcgtgctcttcagtaacccccacacatgcccattgacatgatgtaacaaagaacccattttgttggatttgactgtgtatgctgtgctgcaaatacctgttttatacgattgttctgcccctggactgctataatttgattgagatggtatagtttttttagat

SEQ ID NO: 272526 - DNA, 489 bp, Zea mays
cccacgcgtccgagaaaagggaaaaagtctccaccccgatcccgtccgtccggctagatctcgcctctgctccgcctccccccatctccccacagatctcgtcgcgatgggcctcgccgccgccgccgccgcccgcgcggccctcctcctcctcgccgtatccggggtcctcctcagtcctgcggcggcggagatcaagcaggagtccttcaaggacgactcccgcggctccatcctcttcgagaagttcggcttcggcctccacggcatggtgtctatctccgtcaccggcgccaagtactcctccaagctcgctaagcccgaccccgcgcagctcggcttcttcctcctctctgacgagtcgctcttcgaggccatctacgatcagccggcgcccacggatctgaaccccaacccggaatccttccccacgtgcgtcctcgccagcccctacgtcaggcctctcttcaccttcgcagaggtcgacga

SEQ ID NO: 272527 - DNA, 847 bp, Zea mays
caattttctctacaggaaacacggcatcctcgctgacgccggagaagccgaagctacaagttcgcccgtcggagccgcagcacaggcgcttgcaaacgcgatggggagcgcggacctggtgctcaagatggcttgcgagggctgcggcaacacgtcggatctctacggcacggggtgcaagcacaccactctctgcagtgactgcgggaagtccatggcacgctcccgtgcccgctgcctcgtctgctccgcgcccatcaccaggctcatccgggaatataatgtacgagctaattctgttatggataagacatactctattggacgatttgtcactggtttacctcctttctcgaaaaagaagaatgccgagaacaagtggtctctccataaggagggtctgcaaggccgtcagatagccgagaatatgcgggaaaaatacaacatgaaaccatggattttggaagacgaaacaggccaatatcagtatcaaggtcaaatggaaggatcacagtcagctacagctacatattatttgttaatgaggcacggcaaggaatttaatgcatatcctgctggctcttggtttaatttcagtaaaattgcacagtacaaacaattgacactggaggaggctgaagaaaagatgaataagaggaagaccagtgcaacctggttatgaacgctggatgatgaaagcagcggcaaatggaccagctgcctgtggttcagacatgaagaagcttgaggccacaaatggtggggaaatcgaaagtgctcgctctaagaaaggaaaaaataatgaagagggtaataattctgataagggtgaggaggatgaagaaga

SEQ ID NO: 272528 - DNA, 539 bp, Zea mays
tcgtccacgcgtccgcttcctcgcagactcgcagggccggcgctccatcttccgctccctcccttactcgtgctcggcacgcaggcgacggcggctacgttcgggctcgggctctcagcaaccgcgtcagcggctgcccctcccgcttctcgccagtcgccccgtgccctcgcctccggtcctcagcacaccagccgtgaccctgcgtcataacagcggtacaagggtgaacaaagaacatcgagaggaagacaatatgccgaagaaggggactaaatctaagaaggagaaggtggacgatgtgcccaatgaacaagaaaataagcttccagactacctggagctccagcgcacacgtgtcgtctgcaatgctgatgcccccattcatactcaaggtttccaatactcgggtgcatttgctgctatgggaattgatattagcgtgtcagtggataaattttgcaagaatttcaaaattgaaataaatcgtctcactgaagatatatggagttcgatatgatggtattgatgcatcatag

SEQ ID NO: 272529 - DNA, 1354 bp, Zea mays
gtatgctacaaagttaccttggtgcagagtgttttcagaaagctttggcttcatatataaagaaatatgcctactcgaatgctaagactgaagaactatgggctgttcttgaggaggaatctggggagcctgttaaggatttgatgactacatggactaagcaacaaggatatcctgttatttatgcaaaaatcaatggacatgatttggaacttgaacaggcacagtttctatctgatggatcgtctggtcctggaatgtggattgttcctgtaacagcatgctgtggctcatatgatgcacagaaaaagttcttattgaaagataaaatggataagataaatattaaagagttttctgactctcaaagtgctgatggggagaagaatcaaatcatttggatcaaattgaatattgatcaaactggattttatagagtgaagtatgatgatgaacttgcagctggacttgtaaatgcaatcaaagcaaagaagctctcattaatggataagattggtatcgtggaagattcatatgcgctatctgttgcttgcaagcaaacactgacgtcattgttgcgcctgctgaatgcttataatgatgagtctgattacactgtactttcacatgtaacctctgtatgtttaagcatttctaaaataacagttgacgctactcctgacctgaacaaagatatcaaacagcttttgatcaaccttcttctcccagctgtcataaagttaggctgggaccccaaggatggtgagagtcatcttgatgtaatgcttagatcactgctcttgactgcgctggtcagacttggacataatgaaactataaatgaaggagttcggcgtttccacatcttctttgaagacggcaaaacttcccttcttccaccagatactagaaaggctgcatatcttgccgtgatgcgaactgttagcacctcaagcagatccggttttgatgctctccttaaaatctacagagaagcatctgaaccacaggagtaatcacgtgtcttaggctccctgtcttcatcaccggatcaggatattgttttggaggcattgaactttatgtttactgatgaggtgcggaatcaagattcattttacatccttggtggcattagcttagaaggacgagaaattgcatggacctggttgaaggaaaactgggatcacgtgttgaagacatggaaatcgagttcactcatatcagacttcattgagtccattgtcccacggtttacctccgaggagaaagctgtcgaggttaccgagttctttgctggccaagttaagccatcattcgagagagcactgaagcagagcctggagagggtgcg

SEQ ID NO: 272530 - DNA, 362 bp, Zea mays
acccttcttttcgcctaagggagtagcggacccagccgccaccaccacttgttcaatctctctcctctcccgtctcgcctcccggagcgcaagaaaagctcggattcctggtggtttctaccatcctccgtcctcgatctgagcgttgcctgcttccctgcccccccgctcagatgtccgccttccgtgtcctgtaaaatctttcgccgcgcagcaatcttcccccacttgtcggctgtcctgctgctgctgctgccaatggcgaccaagggagggaacgcaaggggcgttccggtgggggcgctgctggaggccgcgctcctacttagctccttggttcccacctccgcgtcctggtaccc

SEQ ID NO: 272531 - DNA, 862 bp, Zea mays
ttgttttctcatcgcgccaacgcaaacaccacagcgcagcagcaagcgagctaactggagtacaaagcaagccaattcgctctgtgcctgtgccgctgcctaccgtcgcgcgagacgggcgagctcctctcccggccgccgacgccgcgggggattccttttccccggaatgctctgccgctccgtccgggcggaagaggagcactaggcggcggctcggatggggcgcccggggtacatcacggtgccgatactctcggtgctcgccgcgatcggctatgtctactacaccacggtgttcctggcgatccccgcgtggctggggctctccacggcgaccgggctcgccaacgccgcggccttcaccgcgcgtgccagcgtccttcgtgcccgatgtcgaggacgccgggagccccatccacgagatcaagcgcaagggtggtgatttgagatactgccagaaatgttcgcattataaacctcctcgagcgcaccattgtcgtgcctgcaaaagatgtgttctaagaatggaccaccactgtatatggattaataactgtgttgggcatgagaactacaagatattcctaggtgttgttctgtatgctgtaattgcaagctcctattctatggctctcatcatagggggcgctgcgcatttacctaaagatgaacaactcaagcagtgattcttctagaacatctattgctgtttgtggggttcttctgtgccctgtagcattggcactaatgggcctatggggttggcatgttctcctcatctgacatgatacgactaccatcgagtatcatgaacgagttagggctacatggttggctgaaaaggctggaaccgtttata

SEQ ID NO: 272532 - DNA, 599 bp, Zea mays
gcaagccaattcgctctgtgcctgtgccgctgcctaccgtcgcgcgagacgggcgagctcctctcccggccgccgacgccgcgggggattccttttccccggaatgctctgccgctccgtccgggcggaagaggagcactaggcggcggctcggatggggcgcccggggtacatcacggtgccgatactctcggtgctcgccgcgatcggctatgtctactacaccacggtgttcctggcgatccccgcgtggctggggctctccacggcgaccgggctcgccaacgccgcggtcttcaccgcgctcgccgccgcctgcgtcgctacctacgccgtcgccgtatcgcgcgacccgggccgcgtgccagcgtccttcgtgcccgatgtcgaggacgccgggagccccatccacgagatcaagcgcaagggtggtgatttgagatactgccagaaatgttcgcattataaaccttctcgagcgcaccattgtcgtgcctgcaaaagatgtgttctaagaatggaccaccactgtatatggattaataactgcgttgggcatgagaactacaagatattcctaggttttgtcttgatgctga

SEQ ID NO: 272533 - DNA, 1756 bp, Zea mays
tcatgactgcgtcatgcatgccaattaattagccaccactccatcgaaaggacccgatcaaactttagtctactcgtcctcctcttctcgcagcagccagcagaccaatcgggacaagcaaactcccccgattagtttaagcagcccgggcccggcgacgaccagctccgttccgcgcggggatttaaacgcgcgagcgagaaggcacgcagcaggcggcagcggcaagcaacgaacgcgatcgcgcgccgacgacgacgcgcggtgccggcgcctggtggtgccgtgttgcggactccgctgcatcgcctcggtcggtcgtcgtcatatcatgggtgtccggctgccggtggcgtggtccgccgtcctcgtcctcctcgtgcgggcggccgtggcgcgggagtacgcggccatcttcaacttcggggactccctggtggacgccggcaacctggtggtggacggcatcccggactacctggccacggcgcgcctgccctacggcatgacccacttcggctaccccaccggccgctgctccgacggccgcctcgtcgttgacttcatcgcgcaggagctgggcgtgccgctgctgccgccgtccaaggcgaagaacgcgacgttccaccgcggcgccaacttcgcgatcacgggcgccacgtcgctggacacgcccttcttcgtggagcgcgggctggggaagacggtctggaactcggggtccctgcacacgcagatccagtggttccaggacatgaagcccaagctgtgcgggcaggagcaggagtgccgggacctgttccggcggtcgctgttcatcgtgggcgagttcggcgggaacgactacaactcgccgctgttcgcgttccggccgctggcggaggcgcacgacatggtgccgcacgtggtggagtccatcgggcggggcgtggagcggctcatcgcggagggcgccgcggagctggtggtgcccggggtgctccccgttggctgctttcccgtctacctctccatcttccgcaggcagccggccggcggctacggcgcccgcagcggctgcgtcaaggagctcaacacgctgtcgtgggtgcacaacgccgcgctgcgccgcatggtcgaggagctccgcgccaggcaccccggcgtgcgcatcgtgtacgccgactactacacgccggccatccagttcgtcctccacgcccagaaatacgggatgctgaagcagacgccgcgggcgtgctgcggcgcgccgggcgtgggcgagtacaacttcaacctgacgtccaagtgcggcgagccgggggcgtacgcgtgcccggacccctccaaccactggagctgggacggcatccacctcacggaggccgcctacggccacatcgccaggggctggctctacgggcccttcgccgacccgcccatcctcgacgccaagcacctcggctaacgtcgtccatccaccgtcttctccagcgccggccccgcccgcacggccagtacagactactcctccggctctgggcgccgtcgtatgtgcgtccttattaccgacctgcaaaattggattggttgcttgtagtagaagtgtagagagagcgagacagagatagatgacaaacacgaaacgaaccggaaggaggacgataaggcgcgcgtgccggccggtcttctactcctctctgttcatagctgtcccatatctatcgtagtcaagaaaactgagcagggaaagaaaccgggcgatatttctgttgcc

SEQ ID NO: 272534 - DNA, 1287 bp, Zea mays
gaatacttctccgtcagccgcgccgccgcccgcctgcccatctgtcaggcgccgcgatggaggctctccacgaggagatgcccttcgacctcgacttccacccgtcgtctccgctcgtcgtcacctccatcatcaccggagagctctgcctgttccgctacggcccggagtcgcagcctgagaggttacttttgttaaaagcccacaaggagtcatgcagagctgttcgttttgtggactcaggaaaagtgattttgtcagggtcagctgattgctcagttcttgcctcagatgtagaatcgggcaaggccattgcccgcttggaggatgcacatgagaatgccataaaccgccttgtctgtcttactgaatctacaattgccacaggtgatgatgaaggctgcattaaggtatgggatacccgggagcgatcttgctgcaacagttttgaagtccacgatgattacatttcagatatgacctatgtggctgagacaaatcagatactggccacaagtggggatggaactttgtctgtgaacaacctgcggaggaataaagtaaggtcacgatctgaattttcagaagatgagttgctatccttggtgttaatgaagcatggtaaaaaggttgtgtgtggaactccaagtggagcgctcttattatattcatggggatactttaatgattgcagtgaccgctttctcggacacacgcagtctgtggatacaatgctgaagctggatgaagacactttggtttctggatcatcagatggtgtgatcagattagtgggcatcctacctaataggataaaacagccacttgctgaacattcagaataccccattgaggcccttgctttgtcaaacgacaagaaatatttaggcagcatctcacatgataaaatgctgaagctctgggacttggaagaactcttgagtggcccacaggtagccaatggtgatgaacctgctgaagctggtagtgatgacagcgatgacgatagcgatgatgatgtgatggatgtagacatggcggcaacctcttctaaaggttcaaggagtaaaaaggcaggtaaaggacagagttcgagtcggccggcatcggatttctttgcagatctatagtcgtcaagtttcctaagttagaagctgtgtactctcctctctggttttttttgggttactgtacgcgagtgcgtgtgcgagtgggcaactttgaccgccggtgcaaggcatgccaaatgctgtcttatttataagtaaatcccccctggcatttatc

SEQ ID NO: 272535 - DNA, 2118 bp, Zea mays
ttctcttttttttttccttttagaccgcaacctcaaaaccctagcttgtccctcctgctcccagatctcttccactcggccactccctagcacatcaaaccctagctccgcccagcccccaaccatgtcggcgatgatgcaaccgcagatcatcctgctcaaggagggcacggacacgtcgcaggggcgcgctcaggtggtgagcaatatcaacgcgtgcacggcggtgggcgacaccgtgcggaccacgctggggcctcgggggatggacaagctcatccacgacgacaagggcggagtcaccatctccaacgacggcgccaccatcatgcgcctcctcgacatcgtgcaccccgccgccaagatccttgtcgacatcgccaagtcgcaggactccgaggtcggcgatgggacaactactgtggtgcttctagctgcagaattcttaaaggaagcaaaaccttatatcgaggacggggtgcacccccacagtctaattcgcagttatagaactgcaggcaatatggcaatccaaagggttaaagagctggcagttagcatagaaggaaaaagccttgaagagaagaaatcactgctagccaagtgcgctgctacaacactctcttcaaaacttataggtggtgaaaaagaattctttgcttctatggttgtggatgctgtccttgccattggcaatgatgacaggcttaatcttattgggattaaaaaggttcctggaggtaccatgagagactcttttttggtgaatggtgttgcgttcaagaagacgttttcatatgcaggatttgagcaacaaccaaagaagttccttaatccaaagattcttttgttaaacattgaactagaattgaaatctgagaaggaaaatgcagagatcagattgtctgaccctctgcaataccaatcaattgttgatgctgagtggaacattatttatgacaaactggataaatgtgtgaaaagtggagcaaagatagttctgtctcggctagctattggtgatcttggaacacagtattttgcagatcgagacattttctgtgctggccgtgtcactgaagaagatttgcaacgtgttgctgcagcaactggtggaactgttcaaacttctgtaaataatgtcatcaatgatgtactcggttcctgtgaggtattcgaggaaaagcaagtaggcaatgaaagattcaacatatttagtggctgcccttctggccagacagcgactattgttctccgtggtggtgcagaccagttcattgaggaagctgaacgaagtctccatgatgccatcatgattgtgaggagagcacttaagaactcgacagttgtgccgggtggtggtgctattgatatggaaataagcaagtatctcaggcagcatgcacgaacaattgctgggaagtctcagttctttgtaaattcatttgctaaagcccttgaggttattccacgccaactttgcgataatgctggatttgatgccactgacgttctcaataagctgaggcagaaacatgcatctggtgaaggtgctaattatggtgtagacataaacactggcggaattgctgattcctttgcaaactttgtttgggaacctgctgttgtaaagatcaatgctataaatgctgcaaccgaagcttcctgccttattcttagcgtcgacgagacagtgaaaaacccaaagtcggagagcgcacaaggtgaggctgctgccggtgcgatggctggtcgcggtcgaggtgcaatgcgaggacgtggtggcaggggcatgcgcaggcgataaactgggtcaagtagatcatggtgagatttttttgcatgtttgcgagtgcttttgtgccttactgcacatgtatggacgctgcacttactattgtgcgcttttggttgtgaagcagtcgtagactttttttttgtttcagaagagatgcaccaggcgtttatcagtgtaccgtccgctggatgtgttatagtagacctgagctttggattctaatttgtttgacatttatcttggtttattggcttgtcttttgaacaatgagaaaatcagtgttgtagattaataaaattaaaccaaaaagaagcgatact

SEQ ID NO: 272536 - DNA, 992 bp, Zea mays
gcgagaacagagcccaagaggcctcaaaagaaccactgcacttcctccgcatagctcgtcgccctctctctcctatcagtcctcccagctccagctaccacagcagccctctcgcttaaaggaggagggagaagggggcggggcgagcaatgtcggagcagcagcagccattgccgcagcctcggagcagcatgcgggaggctctggagaaggaggacaaggagaaggcggcggctgctgcggcggccaaggagaaggcggccgtccccaagaacggcaacggcaacggcggcaagaatggcggcggcgccggcagcggcaacggcggagcgcccccgcagtccggggaggagacggctcgcgagatccaggtggtcagggaggcctaccgccgcgagacggccgcgccggcctacgtcatacccgaggagccgccggccgtggtcgagctcgtcggctggtacatctacggcttctgctcctacttcatcacccacctgctgctgccggtcctcttcccggccatcatcacgcaggtcgccttccccaactccgacttcacgcccgaccccaagtacaccctcaagggcgtcacctgctccgtccacgagatgtccatgtaccagaggcttaccaagcactccattgtgatcgatggatcccggatgtcaccattgggctggagtggactgtcgtgggcaatcggcatcctcatcgtggcgccgctcctcacccagaccgctcaccatctcgaccgtggccagtaccagtcgctgatcctcattgccgccacgtccttcgggtccttcttctgcctgctaacaggcttcttcaagacggtctgggtgttcctgttctacatcctcttcatcgctggctcgatcatcgtcgctgaggcggtgcacacccgcaaccttgggctgatgatccgtggcctggctgcgcatgactcgggcaagcaccttgtccttcgtcgccgcgctgctgccagc

SEQ ID NO: 272537 - DNA, 408 bp, Zea mays
tttcccaacccttcctgcttaaaatgccactggatcataaaaggagtgatgttgtaaaccaaatcgggggcgtgcctgttgactgggcattgggtgctttcattgtgcagacgacgatgaacagaacagacattgtccattctaaggtggagaaaacctcgtctgaagacgatctacgatatggagaaaggcaggtacatcataacaagggtcagccaatgagtcgcgcacatcagcgttgggagtgggtggactttctgcagcggagcactattgaccatgtatgtagattttcctaaattgatttcttacttagtggccaactacctccagcatgttgccttgcggagtcaacttgttgagtttgagcagcaacccctgtatatgatagaaggatgcgggttgccg

SEQ ID NO: 272538 - DNA, 1257 bp, Zea mays
tttcctttgcgtccgcccacgcgtccgccggagacagaccaccgggccgtgcgggcgctcgcggctccgctcccagatcccgccgcgcgggcaagcttcgaggagtgaccatgcaggagcccacggagaccaggccagctggtgcggaggatctcgcgaacggcgcgcgagacggggagggacctccgccgcaggttgaggaggaggaagtggaggagccgccacgatcggcgacggcgaacaatgaggaggcgaaggaggtactagggtcggaggggtctcgcccgttcaccatgcgggagctcctcggcgagctcaaagaggatggcgagacggctgctggcggcagcagcgcgagatctgcgttcggcgatgggaacagggtcggatccgatgatgccgagggctcgttctacagccaagatagcacacaacagttttcatcccaccatgatgtagcgatggacttgataaatagtgtaactggagttgatgaggaagggcattctcgccaaaggattctttcttttgctgctaaaagatacgtaaatgcaattgaaagtaatccttgacgaccctgatgcatattataattgggctctagtcctccaggagagtgcagacaatgtggatcccaattctagctcctctaaagatgcattgcttgaggaggcttgcaaaaagtatgctgaagctacccggctttgtccaactctttatgatgcatattataactgggctattgcgattgctgatcgggctaaaatgcgaggtcggacaaaagaagctgaagaactctggaaacaggcaatactgaattatgagaaggcagtccagcttaattggaatagcccacaggctctcaataactggggtcttgggctacaggagctgagtgcaattgttcctgcacgggataaacagaccatcataaaaaccgctatcagtaagttccgtgctgcaattcagctgcaatttgatttccatcgggcaatatacaaccttggaactgttttgtatggtttagctgaggataccgtgagatctgggaagccagatgtctctcctaatgagctttatagtcagtctgctatctatgttgctgctgctcatgctctaaagccaaattactcggtctatcggagtgctttgcgattagtccgctcaatgttacctctgccatatctcaaagttgggtatttgacggctcctccagctaacaattccattgcaccacacaaagattgggagagatca

SEQ ID NO: 272539 - DNA, 185 bp, Zea mays
gtgtgctggtcttttagcacatttttctgttctttagatgttctcttgtctaattcttgattatgacagggttcctctgttcttattgcatcttataccatgcagttacctctgccatatctcaaagttgggtatttgacggctcctccagctaacaattccattgcaccaccaaagtttgggag

SEQ ID NO: 272540 - DNA, 1251 bp, Zea mays
ctctcccttccggttccttcatctccgcctccacggctccacctccaccgctgctccacacgggcacacctttgcctcgcccaaccgctgccttgctcgcgttcgccattccccagacctcgagagctaccgtctggtccgatcggacggatcccttcgcgcgccccagagatttcaggtaaggtgctgtaacagaagatgcaagggggaagaggtgggaggcagggcttattcggtttcggggacccttctggtggttccggtggctttggacagccagggagccttatgcccggtttctttggtggcgcaaatccctttgacgaccctttcttcacaaacccctttggtagcatgatgcaaactagtttctcagcccctttcagcggcatgatgcaacctagcttcatgaaccccttcggcagcatggtgcaacctagcttgcttggaccaagtatgtttgcaccccatggcaatctcaatggaggcatgtttggaagccagacacatctcagtcaaggcatcagcaatggcagtggtttcattcagcaagcctctgaatcgagcaggcctaaagggccaattatcaaggagttgtcttcagatgacgaggatgatctagatgatgatgaagaaggcgagaagaagaatggtaactttaggaagcatcaaagggaaagcaaagagccatatgtggaggacccagatgatgaagaagataataaaagacctaagcatggacaatttgggagggagttcagcagagctaacacatcacgtccacagcctcagacatttatgtttcagagttcaacgtgtacatatggtggtccaaatggagcctgttatacatcttcaacaactaggaggactggtgcagatggatttacgctggaagaaaataaagaggctgacacaactactggtaaagccactcacaggatttcacgtggcattggcattaagggtcactcgttaacaagaaatcttaattctgatgggcgtgtgaacacccttcaaactttacacaacttgaatgaagatgagcttgctgggtttgaggcatcatggcaaagaaatgccaggcagaatatgcctggctgggatactagaatgaacatgcttggcaacggaaatcttcacacgggcttccgagatgcgaatcaaaggccagcacttcctgccccaggacgatcccgtaaagcgaattcctcatggaacttccagaatggctcttccacgggtcgtgca

SEQ ID NO: 272541 - DNA, 535 bp, Zea mays
tcgttaggagttgtcttcagatgatgaggataaagcattggatgataaagatgatggcaagaagaatggcaactttaggaagcatccaagggaaagcagagaaccgtgtgtggaggacccagatgaagaagaagaagaagataataaaagacctaaacatagacaatttgggagggagctcagcagatctggtacataccgtacatcacgtctacagcctcagacatttatgtttcagagttcaactgttacatacggtggtccaaatggagcctgttatacatcttcaacgactaggaagactggtgcaaacggagtaagtatatatcatcatctcatgaatgtttttcttcatctgccgcagtttatcccttccccagaccccacacgtggaagctttggcactgggtctcccccttttttttttgcatatttgtagggtgaagggcaggcctggtgaagtggtgagagttgtctcattgagtactcatgtgggagccttccgcactggattacactggaagaaagcaaggag

SEQ ID NO: 272542 - DNA, 321 bp, Zea mays
ctagttttccttccccacctccccgccctacccatcgccgaatcggagtcccgctcgcgtccacccttgccagagctcgagagctaccttctggtccggttggacagatcccttcgggcgctgcgtccccccgagattattcaggcaaggtgctgtaacataagatgcaagggggatgacgtgggaggcagggtttgttcggttttcgggacccttttgttggtttcggcggctttggacagccagggaacataatgtccagtttctttggtggcgcaaatccctttgatgaccctttcttcacaaacccctatggtggca

SEQ ID NO: 272543 - DNA, 574 bp, Zea mays
gaatgagcgttcaccgtcacagtcacacaagcacgaccacgcacacgcggtaaacacgcgcgcgctcaaacagttcgaaatggcgctcgccgccgccatcgtcgtcgtcttcctgcttcctggccttctcctcacggcgatggcggccacgccgtaccctcacggccgcggcggcgacgctctcgtgggcgcgtccaagaagtacgagggcagctccaacctggtggacctccgctaccacatgggccccgtcctctccgccgcgccgctccgcctctacgtgctctggtacggccgctgggaccccgcgcaccaggtccccgtccgcgacttcctcctctccctctccgacacgtccctgccgcgcccctccgtcgccgactggtgggccaccgccgcgctctacgccgaccagaccctcgccaacgtcacctgccgcgtcgacctggccggggaagccgccgacgagtcggcctcgctgggccgctcgctctcccggctcgacatccagcgcgtgctcgcctctgcggtcgccgcgggccggctccctgccgacacccgcggcggggcctac

SEQ ID NO: 272544 - DNA, 353 bp, Zea mays
cttccaccctgcagcccctgccgtccgtggcgctggcgaccagggacagaatggcgcgcagcatccccgggcggtgagcatgatgggcctcctggaagtggcgaaccggccccttgatgactacatgaagcagaacggcctgacgagcctggcgggggagcaaggaggtggcagctccagcacggccacggtcccgccggctccagtggagagtggggaccggccgtccgatgagggccgtgtcatgtaagttgattgaaaggcatacgccatggtcatctacgaggccggcgagaaccagttggacacgcctgttgagtctggcattttctttgtggctttacgaactggga

SEQ ID NO: 272545 - DNA, 1160 bp, Zea mays
gggcgagatctcctctctacaggcagccagagttctaaacttgaagctgggcagcaaaagattgcagcaaattcgtgagatataagattcgccacaccgacacctagatgtcacacgccacccgcagtggtatataataatagtgaaaaaaagagaagctgctgctgggatggctgcatttatgcaggcacaccgctgccggcagccacgactggttgggtagtagtaaaaccaggtaggtgtggctggctcgtgcagcggcggcaggcggcagtgagagcgatgagcgcggcggcggcggcggcgagctcggtcaccaagttcatcaagtgcgtcacggtcggcgatggggccgtcgggaagacctgcatgctcatctgctacacctgcaacaagttccccacggattacatccccaccgtatttgacaacttcagcgccaatgtctccgtgggtgggagcatcgtcaacttgggcctctgggacacggcaggccaggaggattacagcaggttgaggcctctcagctacaggggtgccgatgtgttcatcctctccttctccctggtcagcacggcgagctatgagaacgtcctcaagaagtggatgccagagcttcgccgattttcgcctactgttcctgtagttcttgttggaaccaaactagatctccgtgaagacagatcttaccttgcagaccattcatgctgcttccatcatctctactgaacagggagaagagctcaggaagcagataggcgctgtggcgtacatagaatgcagctcaaagacacagaggaacgtaaaggctgtgttcgacactgcaattaaagtagtgctgcaaccaccgaggagaagagaagttaccaggaagaaaatgaaggcaaggtcgaatcagtctctgagaagatacctctgtggaagcggatgtttcacatcgtaaagcacaggctcttctgcgactgttgtactggactggctagatggttgcagctctatgaatgagtagtcccttccgcagccactgggaacttctggttctctgctaccttccgatagagtgctcttctgcgttcaccagctgtgcaaaatgaagtgaggtcctagtttctaaattccctacgaggtgtaccttctttagtatgaatggtaggctattt

SEQ ID NO: 272546 - DNA, 404 bp, Zea mays
  unsure (1)..(404): unsure at all n locations
cttctcgtagaagataagcaaagcaaggctaccgatgtcgttgtctctgttcctccgcttcctgctctcttggcttgctgcttgccctcggagcagtgccttccgccgccgccgccgccgcctgttgtgagaaggagaggccggggctgggaggagatgagcgtgaccaagttcatcaagtgcgtcacggtgggggacggcgcggtgggcaagacctgcatgctcatctgctacaccagcaacaagttccccacggattacatccccacggtgttcgacaacttcagcgccaacgtctccgtggacggcagcatcgtcaacctgggcctctgggacactgcaggacaagaggactacagcagattgcggccactgagctacangggcgcggacgtgttcgtgct

SEQ ID NO: 272547 - DNA, 308 bp, Zea mays
ccattattccttttcacgcttcacacgcaccgcccgcaggccgtcatcccacgcattcgcatccttccccgctctcgctctctcagccgcagagccactcgtgtcggtgacggcggcgaaggcaatgtcatccctccgcccgtccctcctgctcgtggtgtcgctgctcgcggcggctctgcttgcagcggcgccgtcctccgcgtctcgcgacctccgcccgctcccggcgagcttcgtcgtgcgcggccgcgtctggtgccgacaactgccgcgcgggcttcgagacccccgcatccacctacatt

SEQ ID NO: 272548 - DNA, 507 bp, Zea mays
ccaatcccaatcccgagctccaagcaaacccacctcccgggctgtcccccactcgccgatccagatctcctccactccaaccggacgcctccgccgccgctggcatcggtcgagccacacgcgcacgccgctgaggaacccggagcgggcgccggcaatggagcagctgcggacgatcgggcgggagctggcgatggggtcgcagggcgggtgggggcagtccaaggagttcctcgacctcgtcaagtccatcggcgaggcgcgctccaaggcggaggaggaccgcatcatcgcgcgcgagcttgagcacctcaagcgccgtctcgccgaccccgacgtgccacgccgcaagatgaaggagctcctcctccggctcgtatacgccgagatgctcggacacgacgcctgcttcggacacatgcacgccgttaagatgacccacgacgagtcgctcccgctcaagcggaccggttacctcgctgtggcgctctgtctggacgaacgcca

SEQ ID NO: 272549 - DNA, 296 bp, Zea mays
cggacggtgggctccggtatggttccactggtccaggggacaaaatctgctgccagtttctgcaattgcttgtgttttttcgctgtgttttcagtggagggacatcttctccagcgattcagcgcgggatcctgctggactggcctgatccctccgtgctggtgtcggcgagcatgcaaggaaggatgcgatgcgcgcggcggatcgcgccgggggaatcgtcccggaatgcggctggccgcgaggtggagccattcacgctgtgcggcgagatgtcccatctcaccagggccacg

SEQ ID NO: 272550 - DNA, 560 bp, Zea mays
agttggtacgcctgccggtaccccggtccggtatattcccgggtacgatcccacgtcgtccgcgcttgccgtcctcgctcgcggcaaagctgcagcgtgtctcggctccggcgcgccaccgctcgggacgcccgacggatccgctcccgcgtgcgctcgatatcccttgcttcaacggtccaagtcaacccccccaccaaatcgccgtccgtccggccgctgccgcaccctagcaggatcgcagcgtgcacagctcttcttcaatctgcaggattgcagccacgcacaagtcgtagctgtttccttggaactttgagctttggaagatgccaaggagaacaggaaatgctgcttcgaccaaatcagttgaattggtcaaacaagaccaaatggagtttgatcatcctgatgaggtagatgaagaggaagaagttgagtatgaagaaattgaggggaggttgagtataagagggagagggtagaaggaggaggaggaggaggaggaggaggaggatgatgaaattgaaggtgtgcgtgaagttgatgctaatcatgacagt

SEQ ID NO: 272551 - DNA, 582 bp, Zea mays
cccctttccactcagcgggcgcgcctggggtctccggctctccgctcgccacgcccacgcccacgcccactacccacgccgccgacggttccgcccctgcgtactctaggtatcccttgtccaacggtccacccccaccgcaaccgccgtccgtccgtccgcccgccgccgcaccctgctagggtttcggccaggccggattcgccgccgcctgtagattctcctatccgaccgcggcgcctcgagccgcaccggcaacctcggacctgaatacctgatacactgcacttcttcagtccgcaggaccacagcacgcacaattgttcttcaatctgcaggactgcagccgcgcacaagccgtagctgtttccttggaactttgagctttggaagatgccaaggagaacaggaaatgctgctccaaccaaatcagttgaattggtcaaacaagaccaattggagtttgatgatcctgacgaggtagatgaagaggaagaagttgagtatgaagaaattgaggaggaggttgagtatgataaggtagaggtggtgttggagttattagttttttttatttttttt

SEQ ID NO: 272552 - DNA, 577 bp, Zea mays
tccctggtgtcgactccactgcgatccgggcgcttgggctgccccgcgcggcagctgtacatggtgctggacaccggcagcgacgtcacctgggtgcagtgccagccctgcgccgactgctaccagcagtccgacccggtgttcgacccgtccctctccgcctcctacgccgccgtctcctgcgactcccagcgctgccgggacctggacaccgcggcgtgccgcaacgccacgggcgcctgcctctacgaggtggcctacggcgacggctcctacaccgtgggcgacttcgccaccgagacgctcacgctgggggactccaccccggtcggcaacgtcgccatcgggtgcggccacgacaacgagggcctcttcgtcggcgccgcggggctgctggcgctgggcggcgggccgctctccttcccgtcccagatctccgcgtccaccttctcctactgcctcgtggaccgcgactccccggccgcgtccacgctccagttcggcgaccgcgccgccgaggcgggcaccgtgacggcgcctctcgtgcgcagtccgcgcacgagcaccttttactacg

SEQ ID NO: 272553 - DNA, 387 bp, Zea mays
ttgcctattggttgtagtgagcttggcttccttttctgaccaattagtttgatggtaacaaaaaggcagaacatgtcttggatatttttgcgaggcagataatcacggaaaaagctaaaagcacacgtgaactgtttgatgatgtttgttgagttgaccctagttagaaaaaaaacgtgagcgaatatcattgaaaggaaattgtgtccgcaatgtatccttgttgaaatggaattgtgttcccaattgtaagtagtattaggtctatcataagtcaaacttttctagctttaatcgaattaacagaaaactgtagaaaatatgtacagcatcaaataagattcattgtatcacgcacctgcatgaaacatattttacccatgtatt

SEQ ID NO: 272554 - DNA, 386 bp, Zea mays
ctcaaagcgatgcgcagctccgtaaccacttcgtcctcacttctcagtccaccttcccgccgcaaccacttcaccacctcctcccagtcccagcaatggagctagtagcgtggctcgtcttcgtgtcctcagtctccctcgctgggctcctgccagtggtctcggcgtcgacgacgacaccgcagcagcaatgtggcggcaataatgtcggacctgccggagtgagagcaggctactggtcgccgtcctcgaaccgctactccgcggtcggcagcatcgacgcgtccctgtacacgcacctttactacagcgcggtgaccatcgacgagacgagcttcgcggtcgttccgcctccgccgacggccgaagacgcctcgttgttcgcc

SEQ ID NO: 272555 - DNA, 477 bp, Zea mays
cgtccacgccgccggccgtcgcgtcccccgcctccgagcaaacaaaatccaagaagaagaagcacaagtccaaggatctccccgccactgacccgccgtcgctcgccgaggctgaggagaagactgatggctacctaatcaagccccagtccctggtgccgtccctggacacctcgacctggccgctcctcctcaagaactacgaccgcctcaacgtccggactggacactacaccccgctcccctccggccactcgccgctgaagcgccccctcgccgagcatctccgctacggcgtcatcaacctcgacaagccgtcgaacccgtcctcccacgaggtggtcgcctggatcaagcgtatccttcgcgccgagaagaccggccacagcggcacgctcgaccccaaggtcaccggcaacctcatcgtctgcgtcgaccgcgccacgcgcctggtcaagtcgcagcaaggcgccggca

SEQ ID NO: 272556 - DNA, 261 bp, Zea mays
aaaaaactagaaaaaatcccaaaaatcaccacttgattggagatggcggcgcaagggcaggcggcggctggatccgcgtccgagtctggcggctcaccggctgcctcagctgctgcagcggcggcggctgcgttcccggcgacttctctctacgtgggtgacctgcacgagagcgttcaggacgcacagctcttcgacgtcttcagccaggtcggcggcgtcgtctccgtgcgcgtctgcagagacatcaactcccgcaag

SEQ ID NO: 272557 - DNA, 1028 bp, Zea mays
tcggcctcacgcatcaaacatgccttgttgcagcttccgcggaccgcctccatgccgtggctgcgatggccttttcctccacgtttacggcaactgcaagcaaccactgatccagcccgttctatgtcccggcgaatggtgacgaaccaggacgcggaggcggcagcgccaggggcaggggcggcggtagatccgatgcggctagcatcgcggtggcggcgatcccggccagagtggaactgcgcgtcggcggagctggaggctgagccgtccgagctcaacaccgtcaacagctcgggactcttctccgtcgtctctaccgacaagttatcggtaaaatacctcggcagccatcaccacggccacgacgtcggtgtcgtgcaggccgaccgtcccgcgccgacgcgccgagccgtgtactacttcgagatgggcgtcaggaatgctggatacaaggggcagacatccattgggttcacgagcgagagcttcaagatgaggcgacaaccgggctgggagacaaacagttgtggataccatggtgacgacggccatctttatcggggtcaagggaaaggtgaatcatttgggccaaaattcacatctggtgacataattggtgctggcatcaactacttgtcacaagaatttttcttcacgaaaaatggtactctggttggagccattccaaaagaaattaaaggcccactatatcctaccattgcagttcatagttacggtgaagagtaagcttttacttttttagttgtttaggcgacatagaattgctatatggtgtaagttgtgattcaccccaggtcttccaaccttagttgcagaaacatctggcagacttggataataatacctgctccaaaatgcaatttactcatttgtttttttgcgtgttatatgatggttttcctttctagcacgacatagaaagtcacaagttgtgcacctcaatagtaacacaagttaatcactccctgtttaattcttagacataactttagttgtaggttctc

SEQ ID NO: 272558 - DNA, 547 bp, Zea mays
ctccaactcatcaccggctccatccttgtcctacactgacctcgtccccatcccgcaaccgcaagcaaccaccgatccagcccgttcggcctttcggcgaatggtgacgaaccaggacgcggaggcggcatcggcggcagccccggggccaggggcgacggtggacccgatgcgcctagcgtcgcggtggcggtcccagacggagtgggaccgcgcggtgccggagctggaggctgagccggagccgtccgagctcaacaccgtcaacagttcgggactcttctccgtcgtctctacggacaagttgtccgtgaaatacctcggcagccatcaccacggccacgacgtcggtgtcgtgcaggccgaccgccccgctcccacgcgccgggccgtgtactacttcgagatggccgtcaggaacgcgggatacaaggggcagacatccatagggttcacgagcgagagcttcaagatgaggcgacaaccgggttgggagtcaaacagctgtggataccatggtgacgactgccacctttaccggagtcta

SEQ ID NO: 272559 - DNA, 358 bp, Zea mays
ctcgcgtcgcgtccgtttgctgcgcgcctgcgccctccgccgccgccgccgccgccgtaatgatgcagtcgcacctgccctccccggcgaggctggggctcacagcctcgtcgccgtcgctcccgcccaatccggtccccttgaatcccacatcctcgccttcacacggtagcctgccctcgagcgcagccgccggcaccagcgctgccccaaccctaaccacctcgccgtcgctgctaccgctcctgccgccgcttccgcgcgcgcaatcgctgctccagcttatatcgtcgctcgcttccaacctcttggaactctcggcgaaccgcgccgcgtggatcttagcataccgaggatc

SEQ ID NO: 272560 - DNA, 637 bp, Zea mays
gtttcactattaagaacgttaaatcagaaatttgatcctgatgatcagtataacattgtccgtatgcttgattatttgtcatttcaaaatcatttgtgcatagcttttgagatgcttggtcaaaacctgtatgaactgctcaaaaggaatcacttaagaggtctgaaattgaaatatgttcaagccttctcaaaacagatattggatgccatggttgtgatgagagaagctggaataattcattgtgatctgaagccagaaaatatcctgttagctcccagcgtcgcaacagctgcagcagtgaaagttattgattttggatcagcgtgcctggagggtaaaacagtttactcgtacattcccatatactaccgcgatcgacatgtggtcgttcggctgcatagttgctgaactgtttctaggcttgccattgtttcctggagcgtcagaatatgatgtgcttcagcgaatggtgaaaattctcgggggccaaccaccagatgaactgctaagggaagctaaaaacactgcaaggttttttaaacatgttggaagtatatatgctggcaatgcggcgcctattggtctttttagtgcatacagaattttaagtgaagaagaggttgaagcgagagat

SEQ ID NO: 272561 - DNA, 473 bp, Zea mays
ggagctagcagcaagatcttagcacaagcgaccacaccccacaggctgatggaatcactccaagactaatcaaacgaacgcttagctaatagcgcgcgatctttttttcccctccccctcttgagcgtgcgagaagagatggcgctgaacggcggcaagacgttggtgcaggacgaggagaagcagcagcttctcctagagaagcacaccgagaagcacttcaccgccggcgaggtggtccgggacatcatcatcggcgtctccgacggcctcaccgtgcccttcgcgctcgccgccggcctgtccggcgccaacgcctcctccgcgctcgtgctcaccgcggggctcgccgaggtcgccgccggcgccatctccatggggctcggagggtacctggcggcgaagagcgaggctgatcactacaacagggagctgcagcgcgagcaggacgagatcgacacggtccccgacgt

SEQ ID NO: 272562 - DNA, 305 bp, Zea mays
gcagcagcaggatcatagcacaaacacgaaggttaatcaagcgagcgcttagctaataagcgtgcggtcttctttttcctcgagagtgagtgagagagagacagagagtattgacgcgcgagaagagatggctctgaacggcggcaagacgttcgtgcatgacgaggagaagcagcagctgctcctggaggagcacaccgagaagcacttcaccgccggcgaggtggtccgggacatcatcatcggcgtctccgacggcctcaccgtacccttcgcgctcgccgccggcctgtccggcgcaaacg

SEQ ID NO: 272563 - DNA, 294 bp, Zea mays
gcaagctataattccaaggcaccgccgccgcatcgatctcgggaatcgaaactcgaaaggcgcacgcggtccacgcccccggctcgcccagctcgagaagccacctgcactcctcccttctagaagcttccatttccttaggccatggatctccgactacgacttcccggcggctggcgggtacgaccccatgggaatgatggggatggggatgggacgctacggcctcggtggccccatggggatgggtgggctaggcctcggaggtcccatggggatggggggctacggcct

SEQ ID NO: 272564 - DNA, 1304 bp, Zea mays
gtatccgtatcgccagagtcctcacggatggcctcgccagcgatggtcccgctgcggcagctcttcgtcgacggcgagtggcgcccgcccgcgcagggccgccgcctccccgtcgtcaaccccaccaccgaggctcacatcggcgagatccctgcgggcacagcggaggacgtggacgccgcggtggcggccgcgcgggcggcgctcaagacgaaccgtggccgcgactgggcgcgcgccccgggggccgttcgggccaagtacctccgcgccatcgccgccaaggtaattgagaggaaacaagagctagctaagctagaggcacttgattgtgggaagccttatgatgaagctgcatgggacatggatgatgttgctgggtgctttgagtacttcgcagatcaggcagaagctttggacaaaagacaaaattccccagtttctcttccgatggaaacttttaaatgccatctccgaagagagcctattggggtagttgggctgataactccttggaactatcctctcctgatggctacatggaaggtagctcctgctctggctgctggttgtgcagctgtgctaaagccatctgaattggcttctgtgacttgcttagagcttgctgatatctgtaaagaagtcggtcttccttccggtgtcttaaacattgtgacaggattaggtcctgatgctggtgctcctttgtcagcacacccagatgttgacaaggtcgcttttactgggagttttgaaactggcaagaaaattatggcatcggcagctcctatggtcaagcctgttacactggaacttggtggaaaaagtcctatagtagtatttgatgatgttgacattgacaaagctgtcgagtggactctgtttgggtgcttttggaccaatggtcagatttgcagcgcaacatctcgtcttcttatccatacaaaaattgctaaaaaatttaatgagaggatggttgcatgggccaaaaatattaaggtttcggatccacttgaagagggttgcaggcttgggccagttgttagtgaaggacagtatgagaagattaagaagttcatatcgaatgccaaaagccaaggtgctactattctgactggaggtgttagacctgcgcatcttgagaaggggttctttattgaaccaactattattactgatatcaccacatcaatggaaatctggagggaggaagtcgttggtccagtcctgtgcgtaaacgactttagcactgaagatgaagccatctaccttgccaacgattcacactatggtttggctggtgc

SEQ ID NO: 272565 - DNA, 370 bp, Zea mays
tagatcgcgagcggccgcccttttggggtttcttttttaaaaagggagggacgccttataaagccttataaactgagacggagtgagtatccaccattcctagtaaacgagtacagagttaggataggaaaagagcatgcccatacaagaaatgtgacaacattatcacaccgcacgtttatatgaccttcagaacattaccaaggacaagtgcccactgcgtccaatgtgttcctccctggcaaaagacggcatatggatctttcaagggcccatcacatgacagttcgcttgtgcttccatctatgaatgtcccgtcggcgaaaatgacctctgaagcatagccaggcgtttccccagcagttggttc

SEQ ID NO: 272566 - DNA, 669 bp, Zea mays
  unsure (1)..(669): unsure at all n locations
aagccggcacgagccctcccttcccttcctccaacctgttccgatccgccccgagccggctggccatggcgatcagggctggccgctcggccctccacctccacgctctcgctttcctcatcctcgccgcctccccctgcctccaagtccaagctctagtggaccatcgcaaacagatatctgactggagtaggcaacccaactttgaactgcagaatgtgtcctcgagtcaaagggatggctctcatctcctgggcagatcaaaggaaataacacacaggaaactaagggggagaattggtgtaaggaacaaaatggaagtagtgcagcaggatgatgaagcgttagttaaacttgagaacgcaggtattgaacgctcaaaagctgttgattctgctgtgctgggaaaatatagcatctggagacgtgaaaatgaaaatgagaaggcagattcaagggttcgtctgatgcgagatcaaatgatcatggccagaatatattctgttcttgccaaatctaggggcaaacttgatctttatcaggagctgctagcaagactcatggaaagccagcgctcccttggggaagctactgctgatgccgaacttncgaagagtgcttcagatagaatcaaagcaatgggccaagttttatcaaaagcaagggatc

SEQ ID NO: 272567 - DNA, 458 bp, Zea mays
ttgttttcccacgcgtccgcccacgcgtccgcccacgcgtccgcccacgcgtccggtactggccgtcaccactcgccactcggggccaggacccttctggtgctcgccagcaagccggcacgatccctcccttccgggaaaaaggctcccaacctgttccgagccagccggccatggcgattagggctggccgctcgccccttctccacctcctcgccctcgccttcctcatcctcgccttcctcatcctcgccgcctctccctgcctccaagctcgagtggaccatcacaaacagatatctcactggactgggcaacccaactttgacctgcagaatgtctcatcgggtcgaaaggatggccctcatctcctgggtagatcaaaggaaataacacacatgaaattaaggagagttgctgtaaggaagaaaatggaagtagtgcagcaggatgatgaa

SEQ ID NO: 272568 - DNA, 455 bp, Zea mays
aaaaaacgagaggagagcggagagacagacaggagccaaatctacgtctcctgccaattcgcctttctccaaccagcttccccgcgccgcccgcccgtcgccgctcctccccgccctctctgcccgcatcagatcgtcttccccacgccgtgtgaccgaggtcccgtgatccctcccacttctgcgccggcgaggacccgggaggcgggatgagcggctgagcacgacgatggcacgcagagccacgccgcaggaggccgccgtcgctgccgcggaggccgccatacgatccgtaggcctggggttcgacgtcgtcagcgacgtccgcctcaagttctgtaagcagcggggcgcgcccgacccctggctcatcgaacttgaccatggggaggtccaggatatcgtgctgcccggcggggtcaccgtcgctggcgtcaccgcttcgggtaagtgtg

SEQ ID NO: 272569 - DNA, 447 bp, Zea mays
tgtcgtccgcccacgcgtccgcccacgcgtccgccttcggcccttgcttcctcttcctttcactcctccgcctgtccccttctctctctgctctgttccttgatccagatgccgcagcggtgagggcacccagcccgatcgtccgtctccgtcgatcccccgaagccctaggagagacccttgtccgcgtcgaattcgatcgcgggctgatttgatcccgagaattcgcgagggggccaccggcggcggtggggaatcggatgttgtaggaaaggtcccggatttctgcgcgggcaggcgggcgggcggccatgcatctgaaactgtggaagccgctgtcccactgcgccgcgctgctcctggacaagatgaaccgtccgccgtggacgccgtcggcgggagcgggcgcggtgtcccgcggcgggcgacggctgcaggagagcaagc

SEQ ID NO: 272570 - DNA, 416 bp, Zea mays
gtgacagagaagattcagtcacattattccaggattctgaatttgatgcttcagagttcacttcatccatactgaaagtttatgaaaatgcagaatcatgtggatgtcttactgaggatcttgcttgccaatacatatcactttacttgaaactagaaagactggaggaagctaagactctcgcagaaaagctttgtgatggtcctctttcaaatgctgcaaatttgtggagcctgagatttactatggagataaattcaattgcaactgctcctggcagttcttccttgagcaaggagaacctgagctctctgcttgatctatttagcactgtactctccaagttgtctgtaactgaggctgagagactgtggcatatggccatgaggttgttttcccatgataaggtctgtttc

SEQ ID NO: 272571 - DNA, 497 bp, Zea mays
gggcccgacggtcatatattccttcatgcaggctgcggggctaacaaatgatcacctagtcagttgcttccggttcgagcattgcagtgccgttccaactctttgcgcatgcgacatcgacagggcaaacacgaaggtggatctgaaaaaagatgaggtgacagcgaagatctatcgcgaggaggtaatcgcaaacccagagatgctgaggacgatcgatgctcttaccgtttcgtagcaccatgtgcatgtgggaatggaagagcaacatggtcgctgaacttgtgtcatctcttatgtggacagtgtgctaggctatcctttgcattgaggtcaggaatcaaaaaaatgcttattatgtaaaaaaattcgttctgttgctaatgcttactctgttgtacattgaatggttgggggaagctaaggatggtggccttttcttactgatccagaaactgtcgaattacttgctgtcaataattcagcagttttctcct

SEQ ID NO: 272572 - DNA, 617 bp, Zea mays
cccacgcgtccgcccacgcgtccgagcccgtccttggcagtgccatggttgcaaaattctgctcgcggtctcgcatggcacgagctgcagaaaaccgattaaaaaaaccaaaaaacacacccgtaaagtaattaaaccaaacacgcgctgccaccgaccgatcaggcgaccccgctctccgaggaaatccaccaccgcggccggggcctcccagatctcgctggaggcagcggcagcggcggcggtggggggcgatggcgctcaacatgaagaccctgacgcaggcgctggcgaaggcgtcggctgtcatcgagaagacggtgtccacgacggtgcaggaggtgacgggcccgcgcccgctgcaggactacgagctgctggaccaggccgggtccggcgggccgggactcgcgtggcggatctacacggcgcgaccgcgggacggcgccccctcggcgccctaccccgtcgtctccgtctgggtgctcgacaagcgcgccctcgccgaggcacgggcgcgggcggggctgtcgaaggcggccgaggacgccttcctcgacctcgtccgcgccgacgcggcgcggctcgtgcgcatgcgccacccgggcgtgctccac

SEQ ID NO: 272573 - DNA, 354 bp, Zea mays
gcagcagcgacgattcagtgaggcacccctctcctggcctcttctcgccttctccgtttccgcgaacccagctgcctcgtagccccaccacaccgccgagcacgcggtctcccgcgccgccttccacccaagcgaagctacccctgctcgacccagaattatcttctaccagcgctagtccgctccgcctctctactggctgccgtggagtggggatccgtccggacttccttctttcgctgttgatgtcatcatgctgagcattttgtggtagagacgatcatctctttgggttccagcatataactcatgcccataaaatttgcactagaaaatatgtcgacacaagccttt

SEQ ID NO: 272574 - DNA, 755 bp, Zea mays
cttccccagacggcaggagacagcagcaggccggacgccggactcctcctccctcccccgtacgcatccactgagatccttcctgtgcgaaggaaatctccagttcttcggccccggccaggttttcaagtgttgcttgccccgccggagttttcctctaacccgcaagtccaattggctaagaagttgatgggatcggggggacactggaaggctgtgtgagatcgcgaaggggaccgtgaattccttgcacggctgcggcgattcggctgcgctgctgtatgcactgtttcgtgaacctgggactcaactcgaactcgacccactacgtcgcctgcctcctcatcttcctgctgcatttctccccccagttgttaaatccatccaattctaattcaactagttattgtgaaggagttcaacagagctgcacagatggcgagcaacagctcatgtggtgaaaatgctaggagaaagccacacacaccatccgctattgttattggtggtgggtttgcaggtcttgctgctgctgatgcgctcagcaatgcgtccttccaggttattcttctggaatctcgtgatagaattggtggcagagttcacactgactactcttttgggtttccagtcgatttgggagcatcttggtgagttccattcttttgaactttcaccatgtgcccaaaagttcatcttgaaggaatgcattgagtgttttattcatcatttctattgagaaggcttcatggcgt

SEQ ID NO: 272575 - DNA, 1717 bp, Zea mays
agcccacgcgtccgcacagccacactgcccttctctccccttcctctctcctctgcgtcgcttccacctctcaatctcaccccacgcctgccccgagctccaaccctaaaggaacacacccctgcttgcggcggcggggagcggtcttgggcgtccgccgttgctgtggcccagccgtgacagatccgggccccgcgccgttaggtcggtgtttcttcggcgacggtgcagccgctggatgttagtctggcggatcggggcccgttgttcgcgtgattcgagctaggcggtgttgagttgtgacatttgtatcacatgaatgaactcagagcatctcattgttaaaactgtgagcatatcaattcccctcctttaagcaatatgggagctaattgctgcattgctgcaaaggagaggacacaaccatgcattactccattagaagtatcagcgtacaggaatgtgagacattcaccatcatggagctttcggtgggacaatcgcacacatatagaagacataatggaaatccctactctgttctccaaccatagtagtggaagcattcggcctgatacaaagagtggttccattgccccaactgaagggttttctaatggaaatagccttggaactagcccttccaatgtgtctcacggaacaaagtggcacaaatctgacaaaaaaatggaagcatctaaggttacaaaggctgatccttgaggcaaagctttccaggaaatcgctggacatgtcaagtgttgcttcagatttgaagacattagggtctgttccttcaacaccacccttagtatccagagcagatccatcatccttcagggggcattctcaacctacagattcagattcgatgaagaaagcatggcggtcaccagggtatcaattatacagacaggtttcggacagtaaaattccatctctcagatctctcaatgagataaggtctcctgaaggaaggcctccctcttccatgttatcaacctgcagcaatgacttgtcagcagcaggatcctatggtgagtcatccgatggttggtcaatgcgcacattttctgaaatggtctcaacatcccaaagagagaggtggtcacttgacagtgagctcgtgggatccatttctagtaaaatgacaagatcaagtgcttggagttctactacatgcccccctgaccaagacgggtgcaagctgtgtttaaagctgctaaaggagagatcgacatggaacgctcaggagctggctgttgttgctgttttgttgtgtggacatgcataccatgctgactgtctggacagcataactacagaagctgacaaatatgatcctccatgccctgtgtgcacgcatggtgagaaatgtacagtgaagctatttgggaagctggaatcaaagatcaagagcaagataccaaaaaatgtggcagttgatattaatctagatgggaatagtagtaataagcaccagaagaaaggtagaagagagcccaggttaggtacaagttcaagcatgaaggtcccatttagtcgcccgtttttgaggaggcatttctccattgggtctcgaccgcctcggtcggtctcagaaactgattccacgagaaagaagggattctgggcaatacactggagggagtagaatagcctccagttgccattaggtgtgctggtttccattagtgtgttttggaagggtcttcga

SEQ ID NO: 272576 - DNA, 733 bp, Zea mays
tcttccacgcgtccggacgaccttattattgttattgtatccctgtacagctaggcagtgttgggttgtaaaatttgtatcgcgtgaatgaactcagagcatctcaatgttaaaactgtaaaaggggcagacctggtgccagaggctcccacatgagtgggttctagggaagggataatccgaagcaagccttccccctgcaaatgcagagatgcggctttgaacccgtgacctggtgactcagtgagacacctctcaccactgcaacgggcctgtccttcctcagcgttaaaactgagcatattaattcccctgcttaagcaatatgggagctaattgctgcgttgctgcaaaggagaggacacagccgtgcatcactcctatagaagtatcgacatacaagaatgtgaggcgctcgccatcatggagctttcggtgggacaatcgcacacatatagaagacataatggaaatccctactctgttttccaaccatagtagtggaagcattcggcctgatacaaagagtggttccattgccccgaccgaacggttttctaatggaaatagccttggaactagcccttccaatgtgtctcatggaacaaagtggcacaaatctgacaaaaaaatggaagcatctaaggttacaatggctgatcctcgagctgaccaccccactgcaagtaactcttcccttgaggcaaagcttttcaggaaatcactggacatg

SEQ ID NO: 272577 - DNA, 1227 bp, Zea mays
cccactctttcgctcttccgtcgtgtcttctcgcgctttccactcccaacgagatccatcacccccgacctctgtaagcttcccttgacgtcgtcgtcgtcatccatggagagcaaggacggcacccacgatcccgccacgacggccgcgccaccggccggcgcgccgcagcccgcgatgccttccgcggagacggcgcggtggggcacgcggcagatgggcccgccggcggcccccggggcgcacccggagaaccaggaggcggcgcggtggacggccgcgcgcggggaccaggagctgccgccgtacgtcatcatcggtgagcccgtggcggcgccgccgccgccacagcataggggcaagggggacagccccatggagcacatcctcgacttcttcaacacctggagccgcaaggccgaggagctggcctccaacatctggttcaatctgaaggccgcgccatccatgtcggacgccgcgatggggaagctaagcctcggcgcgaaggcgctgtcggagggcggcttcgagaagctgtacaagcagacgttctcgtccagccccgacgagcacttgaagaagacgttcgcatgctacctctccacggccacggggcccgtcgccggcacgctgtacctgaccaacctgaacgtcgccttctgcagcgaccgcccgctctccttcgccgcgccgtctggccagaccgcctggagctactacaaggttatgatcccccttggcaagatcgcgacggtggagccggtgacgatgaaggagagcccgccggagaagtacgtccacgtcgtcaccgtcgactcccacgacttctggttcatgggcttcgtcagctacgacaaggccgtgcacaacctcgtcgaggccgtctcccagcacggcgtcgccactgccggcggcaagtgacgaggcgacgccgctccggagactgggcgttcggcacccgtcgtcgtgtatatatatatagctgatggctctgcctgtgcattactcgtgttctgctactactatacgatggtgtcccggcgtgtgtttgaatgttctcagtgtagtcgtgtgtgtgtggcacagatgcgccactgctattctatgcacagtgcacttgtgagtattatgctagctttcacggactcggcgagaaacgagaggtgaggtcttccaaaaaaaaaaataatattataaaattttatttaataaagattatatatg

SEQ ID NO: 272578 - DNA, 458 bp, Zea mays
ccggcccgacccacgcgtccgcccacgcgtccgcccactcgtccgctgtctcgtgggtgctcgcctgccccatccggcgggccgcgagccagcgagccgcctctccttcctcggcgtgttcctggcttgcctttgccgcgtagcagtggcatgagggcggggcggccgaagatcggcgaccaagcgaccagcgacgtggtagtgcggctacggacgccggagggccgcgacgagtggctctactgccactccgcggtcctcgccgccggcagcacctacttcgccgaccgcctctccgacgcctggccgacgtgccagatcctcggctcgcgctactgcgtcgaggtctactgccaggagctggacctgagctcctatgtcacagcgctccggctcctatacgccatcgagccctgctcccatttcggcgtccgcggcgcgctgggcgtgctccaggc

SEQ ID NO: 272579 - DNA, 472 bp, Zea mays
  unsure (1)..(472): unsure at all n locations
cttcctcggcgtgttcctggcttgcctttgccgcggtaagtgaggttggaaataagcttagaacccgctacgaattccttctcatcttccttcgattccgtgttcttttgcttttttctctctcttgacaaaattatgccccgtccgattgccgagcgacgctgttggtgatagtcgtttcattccccaatctacctctagtagcagtggcatgagggcggggcggccgaagatcggcgaccaagcgaccagcgacgtggtagtgcggctacggacgccggagggccgcgacgagtggctctactgccactccgcggtcctcgccgccggcagcacctacttcgccgaccgncttttcgacgcctggccgacgtgccaaatcctcggatcgcgctactgcgtcgaggtctactgccaggagctggacctgagctcctatgtcacagcgctccggcttctatacgccatcgag

SEQ ID NO: 272580 - DNA, 363 bp, Zea mays
gtttgacagcttctttaagcagctttattcaattcctcttgcatctagcaatgagtatatttgcaaggactttttcctgtacatggaatgccatcgatttggtttatttgcaacatctactgcacaaagtaacgaatcaactgccactgagggtgcaatacatggggtgccattgattgagaaaataactttccatcttgtgaggctagaagatggtgtgatcctggatgaaaaggctttctgcaatgattttatcaatctggcacatagtattggtgcttacatgtatgaggacctgctttgcattgtttctttgcgataccaaacaatacatattctacagatacgagattcaggcaacct

SEQ ID NO: 272581 - DNA, 640 bp, Zea mays
ctgttatcgtatcttaaaaaggaatgtgaggaaagaggtgcaacaatcatctatgccacgcatatggtgggtggtcttgatgattggccaacacacattgtttacattgctcatgggaaactgcaattagcactgcctttggaaaaggtgaaagaaatgagtcagttatctctcatgaggactgtggagagctggttgaggaaagaaagagacgaggacaggaggaggagaaaggagcgaaaggagaaaggcctcccagaattcgacaaggttgtcgagggtagtcgggttataggtgatccagcaaagaacgcagacagagttataaacaacgggtgggcagctggacggcttacctcgacgattgcaggagaggaaaatttcgtcttcagctctaacagcgtacttaggcaatgatctagttttgttttcctttatctatacattgaaaacggtaaataatagtcttgcggatccaatagagatatcgttggggcttgggcatttatagcgaagttctgtcaggaaaggagaattcactctatatagtttggatttgaggatttacactgtaattttattcgcagctgagtgttcgagaaaaagaaattgcactgtaacaacatatatatactgtacc

SEQ ID NO: 272582 - DNA, 1172 bp, Zea mays
cgcttcgcaaacaacagagctgccagcctgccactgaggagtgaggaaccctaagcggcgcactgtgcaggcgaaggcggcgcgctaccggcgacggccgacgggggatacggcgacatcgtccccctcgacccctcctccatccccgacgcggcggcgccagactgcaggtgttgaatgctgatttgttgtggcctgttgcgtcttcaccagttcatacattaaacttgaagaaccacgtggttgaagaaaagcccactgaaaatgagtaatacatcatcttcgtcaagtggtgagcgtgctatgcagtgacagagggctgtggagatcataagttcataacatcctatggtagcctttcacttgatcataagttcataacatccttatattcatgcagggatgtgatatatgctgatattccaaagctcattccatttattgatctgttgggctgttccctccctaaaccccagcgtcgccttcgacgagtcaccgctccgtcggctgcttgctgcagtccacgccacgcgctacgccgtcacggtcgctcctcccgtgacgcagccgtcgctaggcgccgcctatttctcggacaaagtcgctcgccaccatggcggcagcgtccgccgccgaagctaacagcgagagcaatgacgaattcctcgtacgcgacgacgcgccggggctactcgccgctctcaaggagatgaaggacggactggacctcgtcaggggcaaggtcgaggccatcacgcggaaggtcaaggcgaaccagttgccggcggccaacgggatcgggtacctagaagcgaagaaccacctgctccttggctattgccaggacatcgtctactacctgctccgcaaggccaaggggctctcggtggatggccaccccgtcgtacggagccttgtcgagattaggctgtttctggagaagattcgtccgattgacaagaaggcagagtaccaaatccagaagctcaccgatgccgctgacaatgccactgttcgagagaaaccaggaaatgcacaggcgaaggggaaggacgggcattcggatgaggaagacctcctgaagtataggccaaacccagatatgatggacacaaagcctggtcctgatgggcaggatactgatggtgtttaccggcctccgaaatttatgc

SEQ ID NO: 272583 - DNA, 583 bp, Zea mays
ctacgccatgccaccgtcgagcccaggatgcggaagtcaacgtaaccaagcgaacccatccatggcctccgctgctgccgtcgtctccctcaacgtcggcggcgatatcttccagatcaccaccgccacactttcccgcgccggcgcctcctccccgcttgcctccctcggtccctcctccccgtctgctccgcacttcctcgacggcgacccgcgcctctttgcccaactcctatccttcctccgccatggccgcctccttgctccgtcctatccctcagccacgctcctcgctgaggcgcgccacttcgcgctcgatggcgccctcctcgcttctctctccccggcctccgcctttgccccgctctcgctgcgcccttccgcgctcctcccgctcaccggccgcgtcgcgccctccgccgtagcgctgtgcccctcgccgcctcacccggtctccctcgtcgccgcacacggtggggtcgtcacctgcttcgacgccgcgctcgcctcccgcaccagcgtcctcacgccgctgcccgccgttgactcgcttcgcgggggtcccccgtcctcgccctcgccg

SEQ ID NO: 272584 - DNA, 663 bp, Zea mays
ggcagaatacccccctgcctcttattcggcccccgcccgcccctgcagtgccatccgctgctcttctccgttcgcccgcccgcccgcccctcccctctctctgtctcgccgcccggggagaaggagggctccgccgctcccggggaagagcgcgccattgccgccgccgcgctgactggggaagatggttgtccaggagttcacagttgatctcaacaagccccttgttttccaggttggccatcttgaggaacggtaccaggaatgggttcaccaaccgatcgtcagcaaggagggtccacgctttttcggaaatgatgtcctggagttcttgactcgcacgaagtggtgggctgtgccaactatatggctgcctgttgtctgctgcctgctcgtgaaatctattctgatgggtcatactgttcaggacgtagctatgatggctctgtttgggatatttatttggacgctgatcgaatacactttgcaccgcttcctgttccacatcgagaccaagacctactggtggaacaccgcacattaccttcttcacgggtgccaccataagcaccccatggactcgctcaggcttgtgtttcctcctactgcaacagcaattttgtgtttcccgatctggaacctgagtcgcgtcttcgcaactcc

SEQ ID NO: 272585 - DNA, 1228 bp, Zea mays
gtccccattcggtcccccccctctgctctctcgaagcctccaggctccagaacccccaccccctctcctctcgcgccgcgaggggttgatccgtccggcgatctgggccctccggccggcgcccgcgcctgggaggcttttccttacccgccgcacgggcggagatgctctcgctccaacagcagcacggcggcgctgtcgccgccggcggcgatgcgcgccaccacgcaccgcagccgtcggtgctcggtggaggcgcggactggctagtgttcgggggccgcgccgacctggaggagcccgcgaggaatgccccgtcgcccgccttgttccttcttccgcccgcggggctcgatgacagggcggcccagcccgagcccaatcccaagcccgcacagctcgcaggagctgttgatgaagagcgacatttggcacttgcacatcaaaactacaggtcagggaagtaccgagaggctctagagcatggtaatgtcgtttacgagaagaatccacgtcgaactgataacctcctcctccttggagctatatactatcagattcgtaattatgacatgtgcattgcaaaaaacgaggaggctcttgccatagatccacattttgctgaatgctacggcaatatggcaaatgcttggaaggagaaaggtgatattgatcttgcaattcgttactatcttactgctattcagctgcgaccaaacttctgtgatgcatggtcaaatctcgctagcgcatatacaaggaaggggagactgaatgaggcagctcaatgttgtagacaggcacttgctataaatcctcgattggttgatgcacatagtaatcttggaaatctgatgaaagctcaaggctttattcaagaggcatacagttgctacatcgaggcgttacgtattgatcctcattttgcaattgcatggtcaaaccttgctggtctgtttatggaggcaggagacctcgacaaggctttaatgtattataaggaagctgttaagcttaagccatctttcgctgatgcatatcttaatcaagggaatgtttataaggctttgggaatgcctcaagatgccattatgtgttatcaacgtgcactgcaggcacgtcctgactatgctatggcttatgggaatcttgctactatttactatgagcaaggccagcttgatatggcaattcgttgttacaatcaagctatagtctacgacccaca

SEQ ID NO: 272586 - DNA, 681 bp, Zea mays
gttagacaattttatcaacagaattaaaatgtgggttggttaaagaagttataaataatttcataagctttccagattgttaaagagtgcattcatatgatttatgaaactccagttatgtttgttttactgtggctgttgctgttggcctgacagaaatgagcgggtctgttcactggtgggtttcttctagtaaatggccgaattggctctcccagctatggagacttttgtagagggataaaagttcttacttccagcagaatttcataatttttggttcagtagtttgggagatatcgaattttaaagttaactatgctgctgtctaaaacagattcagtcagttatcttgtcagatgttttagaacttgtagatggcagaatttaattatctattgaataccgaagttgtagtgtattttgtgtagatactcctagagtatttgtttgatatcaccgctgttttaattttaaagatacaaaattaacaaacagcgctgctgctgtttggcatgtggttcacggtgggagtctttccaccgggtcttggtttcaagcgtaggagcgtctttgttgattgttggcaaatgtttgtgaaatatttgtactaagttttatgccccccagcaggtggctacgctccagatcatgtctagtacatttcttctcttcgatgaa

SEQ ID NO: 272587 - DNA, 1241 bp, Zea mays
ccgcctttcccgtgtcgtgtcccccgcagcaatcaccgcgagggtttcttccaatcccgttcgttccgttccagttccagcatggcggagcagccgcaggaaggcggcgcgagccccaagcacgagtccctgatggagaagctcgccgacaagctccacgtcggcggcggcaagggcgactcctcgtcctcggactccgacagagacgagccgccccacccctcggcgccgcccaccgacgaggtcaagcagccctcattctccgactccgccgccacggcggccgccgaggccaaggccaaggtgttccgccttttcggccgcgagcagcccatccacaaggccctcggtggcggcaagcctgctgatgtgttcttgtggaggaacaagaacatctctgctggagtacttggtggtgccacagcaatctggatcttatttgaattgcttggctaccatctccttacttttgtttgccatggtctcatattcgccctgggtgttctctttctctggtccaatgcttcatcgtttatccacaaggctccaccaaagatcccagaggtgatcattcctgaagatttagttgtcaacattgcgctatccactcgttacgagatcaacagagcctttgccaatctccgccagattgctcttggccgggacctaaagaagttcctaatggttattgctgggctttggttgctttctgttcttggaagctgctgcaacttcttgaccttagtttacattgtctttgtggtgctgcacacagtacctgtcctgtatgagaagtacgaggatcagattgactcgtatggcgagaaggggtgggttgaaattaagaagcagtatgccgtgttcgatgagaaggttctgagcaaagtacccaggggtcctgcgaaagacaagaagcactagatgcaagtgattcgaggtccctgttagtagggaatgctagcaaaaccggttcgagtttctccggaggggcagcacttgtgggtgtgagcaccagtttgccacctgtgcattacgttgcgtatggctgcttagttgtttggtcttgatgggagtaagccgaattgctagctttgcgcttcatcagtgatgcagacgcagcatacggtttttcggtagtgctgtttgattttgatctgtgttgtaagatgtcatgccaagactgtacctgagacactgtttttgataccgatgcagtttggaatttgatggtttttgtgctc

SEQ ID NO: 272588 - DNA, 601 bp, Zea mays
agctcaagtggtaccttgtcctcctgtgctacttcttcgctcccgtggttgcgttctgcaactcctacggaatgggcctcaccaacctgaaccttgccccgacctacggcaagatcgccctcttcgcgttggcctcgctcgtcggcagtgatggcggtggagtcatcgccggccttgcagcctgtggcatcgtaatgtccgttgcctgttccacagccgatctaatgcaggacttgaagagcgggtacctgaccctctcgtcgccgcggtcgatgttcactgcccagctgatcggcatcgcgctcgggtgcgtcatagctccgctcacgctgtggctcttctggacagccttcgacatcggcgaccctgacggggagtacaaggccccctttgccatcatgttccgggagatggccatcctcgggatggagggcttctccgcgctgccactgcactgccttgacatctgctatgccgccttcttcctcgccttggccaccagtctcctcaaggacgtggcgcccgcaaacgtgtccaggttcatccccataccgatcgctatggctgcgccgttctacgttggcgcctactttggcgtgga

SEQ ID NO: 272589 - DNA, 321 bp, Zea mays
  unsure (1)..(321): unsure at all n locations
gccaagcttaaggatgttctcgtgtagaccattgttttccacttgtatgctactgagtttgaggcagagcgccttgaggaaaattttcggagtagcttgcataggaagcagcagctgcttcctttttatgtgattttccattgcaaatcctagcagcatggtcttctttttctttcccttgcgttttgttatgcgcccttaacagctcggtgtaggtttagaaggcacaacaaaactgtaccagaatatttgtacctttggaattctgaatacatagattgaccacctcgggtgcttgcttnttctaaaagaggataaaaa

SEQ ID NO: 272590 - DNA, 408 bp, Zea mays
ggacctcttgagttggatgcttggcagatggaacaaacaaaactatttcaagcacttctctttaatagtttgtttggaaaactgttcattggatcaaaagcatcaaaaaccccaagggagttcattctcaagaaagatgatgtgttcctttggaacaaagaaaatatgtatttgcttttacctgtggattctactctggattctcataaaagtgtttgcatcaactggagtgtaattgatgtagtggctacagctgttggattcatgagaagcatttattcagatggcaaatgtaacctaactgataaacttaattatgaaaaaaatggtgaagatcttattcatttggccaacaagtcatgcaagggtaatgatcttaaaaatatggtggttctagcaattcacact

SEQ ID NO: 272591 - DNA, 536 bp, Zea mays
cgtaacaacctcggcttctacggcgtagcgtaggaggcggcggttccaggcgaccatccaataatcgccaccctcacgcgagaaatccccggcaacttttggggaactacacgtgtatggagttttattagtattccaggggcatcacaatggcatactttcctgatgaagtagtagggtatatccttggttatgtaacgtcgcatcaggaccgcaacgcggtgtccttggtctgccgggcatggtacgacattgagcgtcatggccgccattcggtgcttgtaagaaactgttatgcggtgtgcccagagcgtgtacatatgcggtttcccaacatgcgcgcactgagcttgaagggcaaaccgcactttgctgaattcaaccttgtcccggcgggttggggtgccactgcaaatccatgggtggatgcgtgcgcccgtgcatgcccaggtcttgaggagctccggctgaagtttatggttgtgactgatgaatgcctcaagttgctttctctatcctttaccaactttaaatca

SEQ ID NO: 272592 - DNA, 413 bp, Zea mays
  unsure (1)..(413): unsure at all n locations
ggcaacgctgcctcgacatcaagtcggggcagatccactactacaacacgaggacgaagaagcggacgtgcaaggaccccaggggccacgggcagccggactaccgcgccgaagaaggccaggaggacgaggaggaggactccgcgaattgcgcgccgccggcggggctggacctggagctgaacctcacgttcgagccgcgccgcgtgctcgccgcccacgggaagacgacgaagagggccaaccagcagcccgcggaggaggaggaggaggcctaggacgacgacgacagcgacagcagcagcagggagatggtggctggcgtgtgcgtgcggtgccacatgctggtgatgatgtgccgngccagcccggcgtgccccaactgcaagttcctgtacccacccagccgggcc

SEQ ID NO: 272593 - DNA, 390 bp, Zea mays
accggtcccatttttctatttcggcccctctactgttccaataataataaaaagattctcgattcgatttactcgccaattttcagtgagcggcggcgatcggcttcggatcggcgcagcgcggcggagcggagatggttgccgtggcggtggatggcctgatccgcggtgcggacgccgtgccggcggcggagagggaagcggtgagggcggcagctgcggaggcggcggccaagggcggtgagggggaatcggggaaggaggaggtgagggagtatgagagcgacatgaggaagctggaggacctgctttctaagctgaacccttcggcggaggagttctggccgaattccggccgccccttgaccggcgggcttcccggcttttggg

SEQ ID NO: 272594 - DNA, 1340 bp, Zea mays
ttcacgcgtccgcccacgcgtccgcccacgcgtccgcccacgcgtccgcccacgcgtccgaccacgcgtccgcccacgcgtccgcccacgctgccacctcctactccgctgcaaccccaaatctctccttcctcgcatacgcgcgcagcgaggagctgagaccaacgaagaagaagaagaacaaccgagcaagcacaagcttagctagcgtggaggtgtccaaggcgacgacggccgccgcgccaggctagccaaccagctgctcatcgctcctagctgcggagccgatggctggcgctgacgtcgacgtcgggacggagctccgtctcggcctgccgggaggaggcgccgatgcggccaaggctgccaagaggggcttcgaggacaccatcgacctcaagctgaagctgcccaccgccggcatggaggaagctgccgctgccgccgccgccaagccggagccggccgccgagaaggccaagaggcccgccgaggcgccggccgctgatgccgagaagccacccgcacccaaggcacaagctgtgggttggccaccagtccggtcataccgcaggaacgtcatgaccgtccagtctgtgaagagcaagaaggaagaggaacctgagaagcagcaacagcccgctgctgccaacgccttcgtgaaggtcagcatggacggcgcgccctacctgcgcaaggtggacctgaagacgtacagcagctacaaggacctctccgctgcactcaagaagatgttcggcaccttcaccgcatctgggaacagcatgaacgaggggaaactggttgatccggtcagcggtgctgatggtggtcactacttacgaagacaaggatggtgactggatgctggtcggcgacgtcccgtgggagatgtttgtcgagtcatgcaagcgtctgaggatcatgaagagttctgaagccataggtcttgcaccaagaacgaaggacaagtgcaagaacaagagctgaagaagatgcagtgttaaagatgttgcccattgtatcaaaagaatggtccccttgcagtgcgctgccgttttttttcctactagaaatataacgcgttttaattactagttggagggagacctgtcttgttcaactcgttcatggaccagaagcaataatctatccgtgtgtagctggattggtgttatgtcatgtcccctaccgtgtgtcccagaatctacttggtgattttatcccagtgttgttaatcaagcttgtgtgattgttaagtaaagggcatcaatgagactattattattatggtaccttgtaagttaacctgtttgttaattgtcattataatatttggc

SEQ ID NO: 272595 - DNA, 454 bp, Zea mays
atacgggaagactccacgcaagcgttattttctaccacgaggataccccaaagctcaaacacctcagtgacgcgcgcagtaaggagcagagaccaaagaagaagaagaagaaaccgagcgagcacaagcttagctagcgaggaagtgtccaaggcgacgacggccaccgcgccaggctagccaaccagctgctcatcgctcctagctgcggagccgatggctggcgctgacgtcgacgtcgggacggagctcccgctcggcctgccgggaggaggcgcccatgcggccaaggctgccaagaggggcttcgaggacaccatcgacctcaagctaaagctgcccaccgccggcatggaggaagctgccgctgccgccgccgctgatgccgagaagccacccgcacccaaggcacaagctgtgggttggccacagtccggtcataccgcagaacgtc

SEQ ID NO: 272596 - DNA, 277 bp, Zea mays
cgctgtgcgggtgcggctcgccgttcgccatccgagccaacgacgaacccgatgccgccccaccgtgccggaggggccgcaggcggcggcgacacgagcgcgttcttcgcggcgacgctagtactttgggctgtgtctgtggggttcgagatcggcgtgcgggggagacgcgagctggcgcccgtggccgccggcttcgcctttttccaggccgccaacaccgtagtccgcggttcggtctcccgcgatccgttcttcgttaacacctgtgtattgt

SEQ ID NO: 272597 - DNA, 1015 bp, Zea mays
ctggaagcaaagtcaagggccacctattgttggtgtaagccagagtgatccaaacagccaaaatatggtgtctggtcaagtaaacgctcctagtgttcctgctccagttccacatctacgcccaacttctatcatgccaatcccgtctccattgaccatgttcgacattgctcctttccagacatctacagacatacagatgcaaacgtgctggccacatatgcctgtacctcctctacactcagttccattatcagttgcacttaagcagcatccagtagagggtacagccacacaacagtttgttcataacgtgccaatagacaagtctggtacaaataaccgatttcaggagtcctctgcttctgctgggccatcagacggcaacaaaaccttcccaaatgcagccgtttctcagtacagggatgagttaggtcttgtcgaacagccagcctcaaccagctcaagctcccaaactgttcagccttcgtttggccaggcgggcttgatcagcaatgaagtcccaaccagtgccaaagccatggttagggtgaccccatccaaagtcaaccctggaattgcagcaggggcggctggcagcacgaacgccccccaggtcaccagcataccttccaagacccatcagtcctcgtcatcatcatcagacccgcaataccagcatctggttaacaatcaggatcgccgtgcccgtgcgactcagaaggctggtactggtaacgagtggcagcgacgatcagggtaccagggtaggaatcaaggttctggttccgacaggagttcaggcactggtaggatgaagcagatctacgttgcgaagccctctgcaacaagtggccatgcctcgtcaggctagagagtggtggtgctgacttcactgagcctgctccacgctggtacacagctcagagcatccttggcatcagacacatgtgaaacatattttcgctccatgtctgtctattctggttaaaaaatataaaaaaaaaaaagaaaa

SEQ ID NO: 272598 - DNA, 316 bp, Zea mays
tttgcaggtggccctaatttttcccactgttgagagtgttctgaaagatgatctcagcaccattagaaatgattcccctttgcttctcaccaagactttcatgcatcgaagttcctccacaccatgctcgtctcctagtggcaaggatctccaacagcaaaaagataggggctgtccaattgaactgttagtatgcccgagccgctgttctcgaacaaggcagctcgtgaaggatgttgctaggtgcaatcaagaaaggtgtggatccagtacctatcaaaagtgggcttggtggtgcttactatttcaggaacac

SEQ ID NO: 272599 - DNA, 475 bp, Zea mays
ggtttctctccttctagcaccactgccgagggccgaggcaaaaccctagctcacctccatggatagccacggccacgtctctggcggcaagcgcaagggcaagcgcgcccgcaagccggagccgccggtactcgcctctcccgacaacagccacgaccacaagcaccacgacaccgcaccatcctcctcgcccctctccaccgccgccgtcgcggcgtcagactccccggaccccgagccggcgtcatcctccccagctccccgccgccggggccgcaagtcccgccgcatccgcaacgggacccactccgaggtcgatgccgccccctcaccctcgcctccgccgcgtcggggcgggcctaagggggcgccgaacggtgcggtggacgttgcggagcccgctcggcgggagctggcggttaagatgggggaggttcccgcggcggggagcccctgcgttgggaccaggtggtga

SEQ ID NO: 272600 - DNA, 346 bp, Zea mays
ggcaatctgacagcaacagtgttaaatgcctacacgatgagctgaaggaaaatgcttcttgttggtactggatgatctctgggtcactcgtgagaatcaggaggagcgcgctattctacttaatgtgctcgatgctgggcagagtggaagtcgggttctggtgacagctcagaggaaagatgtagctgcagcgatgggcgctgaggagcagatcccgattccggatatggaagagaagcagtacttttcgatgttcatgcactacgccctataaggcaagccttttggtgactgaaggtttatagaatattggagaaaaattctaaaaaagctctgatgatctccc

SEQ ID NO: 272601 - DNA, 524 bp, Zea mays
ttcgttttctaccagttgcttcgtctcgctttcatcctctccgcgtcactggggtttcgtcggtgtcaaggactccgcttccgcccgaagacttcgccttccgcccgaagacttcgccttctcttggcttgctcaccagctgcgtctctttggttagatacgtttttctcctttgtctttcgtcgtccctttcgattcgatcgatacctggatccagatccattcggtgatcatatccagcttcctctacttgagatcctcttgctttttggagatcctgttgcttcggtgcgtggagattgagatctaagcgacaagtattttcttttggttaactggttcgcaagaagtgcagatggacatctggttccaaattcgtgcttatatcatatctagctgccagcttggtcgtgaacacgtttatttccacagttgtgctcccattcttgcctcgtcgattgttttgttttggtgcacaactgatctcgtttgtgtcaaatagtatgtatgaagttcaaattttg

SEQ ID NO: 272602 - DNA, 584 bp, Zea mays
tcgaacgactttcccatgacaaattcaactgatatcgaagaaggatggggggcgagctagcaaaatacaagagacctttacttatccatgcagaacgtatacctgaggctgaggatcatgatttgcaagacgatgaattagatcctcggtcctatatgacgtatctgaagtctagaccaccatcatgggaggaagcggctatcagagatctgcaacgtgcaatgaaggatacggagttgggcggtcggtccgaaggagctcatattcacattgttcatctatcagatgcgaaaactagcttggaacttatgaaggatgctagacgcagtggtgcaagtctgtctatagaaacatgccctcattacctggcattttcgtccgaagaagttccagatggagatactcgctttaaatgttctcctcccatacgtgatgacacagacagagaaaatctttggaaagctctgcttgatggacacatagacatgctaagttcagaccactcaccatccactcctgacctcaaactaatggatgaaggggacttcttaagggcatggggaggcatatcatcattgcagttt

SEQ ID NO: 272603 - DNA, 614 bp, Zea mays
gtcgacgacctgcctactacttacttactgtacctgtgcagctgtgcccctgtgccaaccatcaatcaatctgacgcaattccgatcggtttttgcagctgtgaacggcaagggcttcatcgcgcgggacctgacgttcgagaacacggcggggccggcgaagcaccaggccggggcgctgcggtgcgactcggacctctccgtcttctaccgctgcgccttcgaggggtaccaggacacgctgtacgcgcactcgctgcgccagttctaccgcgactgccgcgtcgcgggcaccgtcgacttcgtcttcggcaacgccgccgccgtgttccaggactgcgcgctcctcgcgcgccgcccgctgcccggccagaagaactccgtcaccgcgcagggccggctcgacgccaacatgaccacgggcttcgccttccagttctgcaacgtctccgcccaccccgacctcctcctgcagcagcagcaggcccagtccagcaacagcaacgggaccgcgcccccggccacgcagacgtacctcggccggccctggaagccctactcccgggtggtgttcatgcagtcgtacatcggcacgtggtgcgccccgagggctg

SEQ ID NO: 272604 - DNA, 605 bp, Zea mays
aacgtaggctggcgctgcagatcaaaaggctctcgcctcggcttggcagtcggcactccctctccaccgcgctgcaggggcgacgcaaggccgagcgctcctcgatccagatccaaggtaggagatggctctcacgagaattggcctcgccggcctcgcggtcatgggacagaaccttgccctcaacatcgcggagaaagggttccccatctcggtctacaacaggacaacctccaaggttgatgagaccgtgcagcgtgccaaggtcgaaggaaacctcccagtgtttggtttccacgaccccgcgtccttcgtgagctccatccagaagccccgtgtcgtcatcatgctcgtcaaggctggggcgccggtggaccagaccattgccacgctcgcggcgcaccttgatcagggggactgtatcgtcgatggtggcaacgagtggtacgagaacacggagaggagggagaaggcgatggaagagcgcgggctcctatatcttggcatgggcgtctccggaggagaggacggtgcccgcaatggctcgtccttgatgcccgggggctccttcgaggcatacaagtacattgaagatattcttctca

SEQ ID NO: 272605 - DNA, 527 bp, Zea mays
acgaaattgggacgtaaaatactaaggggcagctcgctaaacctgtatagctttcctagtataaattgtagaattatttgatggcaactggggtcctcctggctgcaacagttgcagaaaaaggataccccagcgtctgagaatggcaaggggaatgcaatgaagactgacaaagaaccagctgtcagaggtcttggacagcattttgaacaattaaggaaacttaaaaagaaagaatgcaacaatgaaggttccagttctgagaaggaagaatgtagcagtaactattcgtcaatgaatggtacacaagtatcagataagatagctgctgatgaagcaaataacggggctgatattagcaagttaatgtcagaggatgctttccttagcttaaagagtttgggagctggccttcatgaaaagtcccctcgaagagctcacaaagatggcccataatttctatgatgagactgcactcccaaagctggtggctgatttcgcgtcgcttgagctttctcccgtggatg

SEQ ID NO: 272606 - DNA, 536 bp, Zea mays
ctagttctagatcgcgagcggccgccctttttttttttttttggtaggattgtacataaaaattccagggaccgaaattccatgttagtcaaacaagagtcacgagatgttaccattgacaaaagacaggtaaaatgtaagaattgcaattacacagctcatggcagatgcagttgtcataattccatgggcaagcctcaatgacgtcaccactcgctgtgacaggatcaagaatgacaagctaaaccattcaattcgggttgctttgcaattcacaaagtttctgtcagttcaggagaagattatatttccatcttcagaccttcaaaagatgtttgaaggtcaagttccctgtatagtgccaagaaatttggaaggggacttggaactagcatcatcaaaatttgcacgggtcttcaggctgcatagttgatatgaacatgccttgaccatcaagcatttgactttctcccttcaaaaaattctgagacatggttctccaaatcatcagggttgtacctcgagcgactacgagc

SEQ ID NO: 272607 - DNA, 592 bp, Zea mays
tttttggcttcttactacacaaccggttcagggacaccccattccacagcaccgctcccctccggcctcccttcccgcaccgcggacgacaagtcaaataccgcgcgtgcgtaccacttggacccatccggcaccacgccacgagtccacagtccgcgcgccccccacgggccgtcgtcgccccggcttctcctctccttcccggcttcccccaacccctcgcgaaagctcgccgctgctgcgtccgcgccccgtggcggcacggcgcggcacctcgtggggaaaccgacggaggccttcgccgagcctttgggggccggcgctttttcctggtgccgtccttctgtactgcctgcgggtgggttgttccgatcataaccgacaaggcgcggcgtgctctcttccctcgcgttgtagactctcgcgggatctgtctcggcggcggcggcgggggtgggggtgggtttactgggctcgctttatcctcccggatcacgggggcggtttgttcagaacatgttagaagccagggaagatcggtgaaatgcttgcattgatataataagtccaggctgaagttattgagctgaca

SEQ ID NO: 272608 - DNA, 1212 bp, Zea mays
tcgcggacgcgtggggtccaacagcggcacagcccacgggccacgcccagttgatatccctgatggcctgatgtcgcaactcgcaaccctagctcccagcctcccactcccacgcgcttcaagtcttcccaggcggccggcggcgtactcccagagtcccagacggccaatcttcccagcatcgggtggcgtcctcactccaggcggcaggcggctgcaccgccgcagtcacgaactcacgcgcaccgcgggcccgcggaagcgcgcacacgcgcacacgcgcacggtgcaccagcagccgtgagccggccagtccggcagtcccagcctcccaggcggccagtcctcccagtcccagtcccagctgcctaggtctgccgcctgtcttgaccccacccactggccacttcccctcctgtccgttcccaaatcccgtcccctccacccgcactccattggcgccgctcccctcccctcgccgccgccggagatctgatccgatccgatccgatccgtttgtgcttgtgctgcagcaggagtgagaagtaaaaaaatatggctgccctgccactggccaccgccgaagtatgcgacgctaaccctcacctgatcatgaacggcgagctccgcgcgctccagccaatcttccagatctacggacggcgccaggtcttcgccggccccatcgtcacgctcaaggtctacgaggacaacgtcctggtccgcgagttcctcgaggagaaaggccacggtagggtcctcgtggtcgacggcggcggcagcatgcgctgcgccatccttggcggcaaccccgtccagcaggcgcagaacaacgggtgggctggtatcctggtcaacggctgcatcagggacgtggatgagatcaacggctgcgacatcggtgtccgggctctcagctcgcaccctatgaaggccaacaagaaggggatgggcgagaagcacgtccccgtcaacatcgctggaaccaggatttgcgacggcgagtggctctacgccgaccccgatggcattcttgtctccaggacggaactcaccgtgtagacagacacctggttgtatgtgtgtgtgtataaggaatcgagcgctcttgctgttaagcccgagcttgcaataatggattcttgctggatcacacatttatacttagaataatcgaatgcttgcttccttggttacaagatgttcttggac

SEQ ID NO: 272609 - DNA, 661 bp, Zea mays
gcccctgctcgtcatcgtgctcttcttccccaagtccagcgcccccatccgcatcaacacggggctcacgctcttcacgctcacgctcgtgctcgtgcccgcaatggacctcatctacgtcaaggggagggccgggctgtacggagcgttcgatgtgactgtcgccgccacggctctgtgcggggtcgccgacgcgctcgtgcagggaggcgtcatcggcttcgcgggggagctgcccgaacggtacatgcaggccgtcgtcgccggaaccgccgcctcaggagtgcttgtctcggcactgagagtcttcaccaaggcactgtacccacaggacgcgaacgggctaaggcaaagcgcgatcctctacttcgtggccggcatagtcctcatggtcatctgcatcgtgtgctacaacgtggcggacaggctcccggtcgtgatatactacaagaacatgaagaagagggcgcagaaagcggaggtcggcggcggcatgacgggccccgcgtggaggtcgacgctgtggagcatcgtcgggaccgtgaagtggtacgggatcggagtggcgctcatctacgccgtcacgctctccatcttcccagggtacatcacggaggacgtacactccgagacgctcggggactagtacggcatcatcctc

SEQ ID NO: 272610 - DNA, 506 bp, Zea mays
gtccaaatcagtttgtctgctccgcccgttgcccgtggcccgtcggtctctcttgcagtctcgccgctccccttcctcccccgcaggaatccgaatcagtaagtccggcgacctaggtctctcggcttgtccgcagcccgccggtcagtaatggcgcaggatgatccggttgtttctgctcagtggctgcacgagcacctagggatgcctgatgttaaggttttggatgcttcctggtacatgccggtagagaacagggatccatggaaagaatatcaggtggcacacatccccggtgcgctattcttcgacttagatggcatagttgatcggacaactgatttaccacacatgctgccatcagaagaggcttttgcagcagcaatttctgagctggatataaaaaaccaggataaagttattgtctatgatggaaagggattcttcagtgcgcctcgtgtttggtggatgtttagagtgtttgggcacaagaaagtctgggtact

SEQ ID NO: 272611 - DNA, 666 bp, Zea mays
gtccaaatcagtttgtctgctccgcccgttgcccgtggcccgtcggtctctcttgcagtctcgccgctccccttcctcccccgcaggaatccgaatcagtaagtccggcgacctaggtctctcggcttgtccgcagcccgccggtcagtaatggcgcaggatgatccggttgtttctgctcagtggctgcacgagcacctagggatgcctgatgttaaggtaaaaaaaaaaaacatctagtttgcgtgttcatattcacttcagagacacttcagtaatgcttccttcatcgaagaagaaagttcagagatatacttcttctatcccctgcgttactggtatgtggagaatataacagtttggttgtctatcaatttgatattccctttcatgtgttgtgttcttattactcccagaaataattagagggttagggacatatgtgctttgtgacagttatcagcttgttttagggtttggatgcttcctggtacatgccggcagagaacagggatccatggaaagaatatcaggttttcagcatcaactataacgtgtctcatcttcctttttgagataatttttggagctaaggtgttctaatatccgcaggtggcacacatccccggtgcgctattcttcgacttagatggcatagttgatcgg

SEQ ID NO: 272612 - DNA, 427 bp, Zea mays
aggacgcgtgggtgcagtctcgccgctccccttcctcccccgcaggaatccgaatcagtaagtccggcgacctaggtctctcggcttgtccgcagcccgccggtcagtaatggcgcaggatgatccggttgtttctgctcagtggctgcacgagcacctagggatgcctgatgttaaggtaaaaaaaaaacatctagtttgcgtgttcatattcacttcagagacacttcagtaatgcttccttcatcgaagaagaaagttcagagatatacttcttctatcccctgcgttactggttttggatgcttcctggtacatgccggtagagaacagggatccatggaaagaatatcaggtggcacacatccccggtgcgctattcttcgacttagatggcatagttgatcggacaactgatttaccgcac

SEQ ID NO: 272613 - DNA, 496 bp, Zea mays
gacgccgcgacctccgggggcttggctttgggaaatggaccagccgctcactgcccccagtcagtggccgcgcgccgcaccaagtgagctagctactctctaggcggagtgaagcgaagctagcttagctgcctcgagcttgagctgagcttgctcactcttctcccctcttcttctagtaccggcacacacaccgcagctgcgaaaaaggaagctctctctctctggtggtgccggtgcgccgtgcttgcttgcttgcttgcggctgcatccatggacgcctacgaagccaccaaggtggtgttctcgcggatccaggcgctggacccggaccacgccgccaagatcatgggcttcctgctcatccaggaccacggcgagaaggagatgatacgcctcgccttcggccccgaggcgctgctgcacaccgtcatggccaaggcgcgcaaggacctgggcctgctcccgtcgccaggcccggggacgcccacattcg

SEQ ID NO: 272614 - DNA, 976 bp, Zea mays
cactgcagtgcttacgagagtccattttagtagaaatgagaataaatcatcagaattgagggagatcaatgcattggtggtagatcagagaccggtccgtgccaagggtgctaagtatcatttgcagagactgggagttcagactgaattgacaactgacctacatcagtatatttctaaaaataattgtggatcacagattgcaaagcttgtgctcattgacaaagaaacctggctgaaagaatcccactccatgcctcttttggttactaaattgaggaacaaagatcagccagactctacaaagttatttcttttggagaaccctaaaagttctgtcaagagcaattcacatatattcagggaatataacttgaatgtaattatgaagccacttcgtgcaagcatgcttcaggtttcgctacaaagagcattgggtgggatagataaactgcattgcaggaatggagtagttggcaattcaacactgggcagccttcttcacaagaagcgaatcttagtggttgacgacaatattgtaaatctcaaggttgctgcaggcgctctgaagaaatatggcgcagaagtaacttgtgctgatagcgggaagaaagcaatcacgcaactgaaacctcctcacagttttgatgcttgtttcatggacatacagatgcctgaaatggatggatttgaagccacaaaaaggattagagtgatggaaagagatctaaatgagcaaatagaacgtggagaagccccaccggaatgcgcagggctccggcagtggcgaactccaatattagccatgacagcagatgttatccaggcgacgcacgaacagtgcttaaaatctgaaatggacggttatgtatccaagccattcgagggcgagcaattgtacagagaagtagctcgctttttccaaaatcaagaccaagttcagtaggtaggcttatatggagaagtgtaaagtagt

SEQ ID NO: 272615 - DNA, 386 bp, Zea mays
ggctgggagaaaaattctcgtgtgctgtcaaaatggagaagatataagtatttgtgtggccttggcaatattggccttgttattcgatgataacggatgctttgactatggaaattattttgtcaaaagagatgttacaaagttggagatgaggaggaggctggtattcatctgtaaatttgctgtaaacgcacggccatctagaggaaacttgaaacaggtgtatggtttcctcagcagtcaaaaggaactgctgtcatgtttgacatagcttggtcttctgtgatgtagatgaggtatcagttctgatctgctgcttgagtgataggtgtggagtacgagctggggcttctgagtttgtctttcacacagtctgttgatcagat

SEQ ID NO: 272616 - DNA, 488 bp, Zea mays
gggacgatgaccgccgatttggcttcttctgtcgttctgctctagagtttctcctccaaagtggatcttctcctaacataatacattgccatgattggtcaagtgctcctgttgcctggctacacaaggaaaactacgcgaagtctagcttggcaaacgcacgggtggtattcaccatccacaatcttgaatttggagcgcatcatattggcaaagcaatgagatattgtgataaagccacaactgtctctaatacatattcaaaggaagtgtcaggtcatggtgccatcgttcctcatcttgggaaattctatggcattctcaatggaattgatccggatatatgggatccgtacaatgacaactttatcccggtccactacacttgtgagaatgtggttgaaggcaagagggctgctaagagggcactgcagcagaagtttgggttacagcaaatcgatgtccccgtcgtaggaatcgtcactcgc

SEQ ID NO: 272617 - DNA, 672 bp, Zea mays
gtttttgatcgcgagcggccgcccttttttgggttgtttgtttgtaactgtcgctggatccaaacaaatggaccttacttgctgatcatatcatagtctgataggttgaacaaatggaaacatataggtgctttacgacgaacgactacaacaagtagagcggagtagagtatttacagatagcaagggattatggtgaatgcaatgcaggtgacattcatcatcatcatcattcacatatgggcatcttcgtcatcggagcttgctaccccagcgtggtggtggtgggtggtcaccagccgcatcaccaggagcggctgccaaggcggtggacctgtcgaggatgaacttgccttccttgtacctctggctcttgtcgaaggcgacgaggtatttccagccgagtatggctccgcaggcgacgcagaagatgtcgcacacggtgtgcaggcccgtcgtcatcatccggtcctcctccttcgtaccaacattcacattcacgatcctgttgaagaggtaggccttgccgttcttgcagcggaacgtccttgcgatgatgtcggtgtcgtaggcgaggtgggtgtcgcagcgcttgcagcggtagatgacggcgcccgtcgccgggaggctcaccagcagcagccgacccatggacccgaatgaatatctccg

SEQ ID NO: 272618 - DNA, 360 bp, Zea mays
caaatggccaaatcccgaaagcccctggccccagcccgcctctcaaacccctaatccctagccacaccacgccctcttccctccttccccgttggattcggcggcgggcggccatcagcaaccagcatcgtacggaggagaagcgctgtttacacccgtctggcagggatgccgctggggcagcgttcgggggacaagagcgactcccgctactgcggggtggaggttctcgacttccccgtcggggagggcctccctgccgtcctcaatcactccctcgcctccgccttcgacttcatcctcgcccctctggctgatcccaactaccgcccggcgcccggcgccgatctgccagtgtca

SEQ ID NO: 272619 - DNA, 445 bp, Zea mays
ctggcacgcattcctgctctcctctcctcttctccctcgtcggtgcggcgtggcgcggctcggcgttcggtgagaaaccactcggggatgaggatctgctgctagagtgagaggagctacggtcagtatcctctgccttcgtcggcggcggaagtggaggggaggaagcgatggaggcgagcgccgggctggtggccggctcccacaaccgcaacgagctcgtcgtcatccgccgcgacggcgatcccgggccgaagccgccgcgggagcagaacgggcaggtgtgccagatttgccgcgacgacgtcggccttgcccccggcggggaccccttcgtggcgtgcaacgagtgcgcctttccccgtctgccgggacttgctacgaataccagccgccgggagggcaacccagaactgcccccagtgcaagactcgattcaagcgcc

SEQ ID NO: 272620 - DNA, 408 bp, Zea mays
acactcgcttcaatattgacaccaccaacgcacgcacgacccttcttcctcctcccggcggcggctaggctaccgctattgatttctccttgcatcgcctttattgcgctcacctgctctgccaagtgccaacgtcgtacacttccagcagtggagggagccggagcacgagctgcccgctggacgagccgtcgccgccacagaaatctacatataattgcagccccaaccacctcgttcctcttccccttccccctccccagccaaatccgctttcctagctctaatcgccgccgatctcgccggaggaactgctagctcgctgctcccttcacttctcaggtgccaggattaaaagttgccttaagaagaagatccctttgcgccgctgcatgttgagcgagccta

SEQ ID NO: 272621 - DNA, 782 bp, Zea mays
ggaaaaaccggaccgacgcgacgcgtacacgccaccttatctctaaccggagatcaaagaagtagccgttaacgatggcttccgacgagctcgcaaaggccgtcgagcccaggaagaagggcaacgtcaagtatgcctccatatgtgccatcctggcctccatggcctctgtcatccttggctatgacattggggtgatgagtggagcggccatgtacatcaagaaggacctgaatatcacggacgtgcagctggagatcctgatcgggatcctcagtctctactcgctgttcggatccttcgctggcgcgcggacgtccgacaggatcgggcgccgcttgaccgtcgtgttcgccgctgtcatcttcttcgtgggctcgttgctcatgggtttcgccgtcaactacggcatgctcatggtgggccgcttcgtggccggagttggcgtgggctacgggggcatgatcgcgcccgtgtacaccgccgagatctcgccggcggcgtcccgcggcttcctcacgtccttccctgaagtcttcatcaacctcggcatcctgctcggctacctgtcgaactacgcatttgcgggcctcccgctccacctcggctggcgtgttatgctcggcatcggcgcggcgccgtccgccctgctcgcgctcctggtcttctgcatgcccgagtcgcctcggaggcttgtcatgaagggccgcctggcggactccagggcggttgctagagaagacctcctctctctcagaggaaggtcataaagcggttggctt

SEQ ID NO: 272622 - DNA, 535 bp, Zea mays
gtgatgaacagtgaagagagtgcgcatgctcaagcaccaagttcagactacatcttgagagggaattatccagcacctgtcggtttcatgcctccaaactaccaacatctcagtaattctgcatttatcaacatgccgccgaccacagccagccaccagatccctctagcaagtgttcaagctagcggcttcgttgctcctccgttgcgtggtggtgctgtgatgcaatctgaccatcactcccagcagaagccctacagaaacatcatgcctgccatgcatcgcccaacctacatgatgaaagaagtgatcgtgatcaacgactctcctgagcgcagaagtgagccacaaggtagcatgctgttcccccctgctccgcctccaccacttccggtagtaccaaacaacatgccaccccgcccgttctactgctttccaccgcagagcccagttttgccaagggagaggggggctgttgggtccatgctcgtgtacgcaaacgttggctcaatggtcggcgtcaattcgtcgagtc

SEQ ID NO: 272623 - DNA, 441 bp, Zea mays
cttcggcctttcctctcagtcctctctggccactccgcctggccgtccacacccccctctccgtgaaaattgctgagatggccatcgacaaggtggacgccaaggagagggagaagatcgaggccgttcgcaagctgctgtgcaagcaggcgccgctctccgcgaagcaggcgcagtactgcaacgacgcgtgcttggagcggttcctgcggtcgcggggggacagcgtcaagaaggcggcgaacacctgaggaccgtcctctcatggagggagagcgtcggagctgatcacatcatggccgacgagttctccgccgagctcgccgacgggtggccttcgtctccggacacgacgacgacggccgcccagtcgtggtgtttcgaatcaagcaggactaccccgagttccagtctcagagatcgttcgtgcggctgctggtg

SEQ ID NO: 272624 - DNA, 504 bp, Zea mays
tattcatccgtcctgcgattttcgggggcggcgtgtctccgttcttcatcctgcgttagagaacaagacgaggtcgaggacccagacgcagacgcacacgcagcgcgccttctccaccgcgaagtcatcgttccgcgctgccgccgccgccctagcaaggtgttggattctgtgttgcggcttcggagtgtcattgctacccttctcctgacaacatggtttctttcgagatgaatgacctcaagaagattgggctaggcctaacaggctttggaatattcttctccttcctgggaatcattttcttctttgacaagggtcttattgcaatgggcaatatcctctttctatctggtttgggtttgacaattggtctgaaatcaactatgcagttcttcaccaagccaaagaattacaagggtactatctcatttggtgctggttcttctctggttctcattgtcaaacccaaacctgacagcaaaagaatattgcacattttgt

SEQ ID NO: 272625 - DNA, 497 bp, Zea mays
cctagcccctctgtcgctctcagacgacgggttcgccgccgtcttcgccctaatccaggtgctgactgctgaggctttctttggtctcttcgccggcgacgacacccgccaggtactcccacccgttcttttcccttcccttcatcctgttcgaagctgagcaccgaaaccctaacctaaagctatttagctatttgacaaccctcctaacttagaagttttttatgactgtgcaaaaatcacccatattcctttactggatctgcccctgctagtatccacggtgtcattgcaagacgagatggtttccttcgagatgaatgacctcaagaagattgggcttggcctgaccggctttggaatattcttctcatttctgggaattgttttcttctttgacaaggggctcatcgcaatgggcattattcttctcctgtcaggtttgggtttgacaattggctgaatcactatgcgttctcaccaaccaaggatacagg

SEQ ID NO: 272626 - DNA, 604 bp, Zea mays
gatcgacgggcagacggtagttctgtttggcttgctcaacgggacctcgattggccttctgaaccttagtttagggttcaactccatcggattctaccagatgacgaagttggccataatacccttcacggtgctgttggagactatattcctgaagaaaagattcagtgagacgatcaagttttctctgctggtcttgctgctcggagttggcatcgcctcagttacggacctcaagttaaactgcctcgggtccgttctttccggcctcgccatcgccaccacttgtgtcggccaaattctcacgaatacgatacagaggaagctgaaggtctcgtcaacgcagctcctgtaccagtcagcgccttaccaagcagccattctgttcgccactggccccttcgtggaccatctcctcaccggccgcagcgtcttcgcccatagatacactttcccggttgtgggctgctccgtcccgccgtctctgcaacggttttgacagtttcagaaagaaaaaaaaaagatcactcccaggtgtagctcagttttggtggggtgacatgactacgtgcccaaccatgcaagggtgcgtgagctatgttgc

SEQ ID NO: 272627 - DNA, 417 bp, Zea mays
tattcaaccatcgccatgctgttttaagaaatcatgtagagagggctttgggtgtcataaagaagagatttccaagcctcaaagttgctacccttcacaaaatggaaaatcaagcaaaaatacctattgctgctgcagtcctccataacttaattcggtcacataatggtgatgagagatggctagaaaatgatcaaggaaatatcaacccgcaaagttttgtcagcctacccaatagtgaccatggaaatgatgaagggaatatggaagggaataacttaagagatatgatagcttatcatatgtgggcagattatgagcaacgtaaaaatcaatgaatcattcctgtaatggatattgggtaatcaataaatgtcatttttgtaatggatattttgtaattgatattttgtgaac

SEQ ID NO: 272628 - DNA, 386 bp, Zea mays
ggaaaaaaaacgttgggggagactagttgttggataattagcttgtgagatgtgagataaatgtgcgtacgttgtcaacgaatagtttcagaagagtcagattggcttccacagttcacctcgctgcaacccaaaatctggtctccactgccggcatttgggggaatttctcggttgggtgaaggctgagttatttcctcgagtggtcaagttgttttacttccacagttcaccagtttcagcttttgtaattcatcggttcatattcttcaggcggcagccagtccgtgctgcgaacgacttcccagatacatgtaacataaatcttataaaaaatttattttgttacagaaaattacttttaaaaaaaataaaaaaaagggcgg

SEQ ID NO: 272629 - DNA, 342 bp, Zea mays
ggtggcacccggtgacagctctgaccgcaacctggacgagttcgtgcagtttgtgcgcgccggcgccacggagaagtgagaggcgctggctgtgaagtgtgaagggaggtgatgttgcagggtcccagatgtgacgacgcgatgcgaaggagaaacgtttcgaaactggaagcaaaaaacggtcgaaagttggtgcctctacttggtttggtttatgctttgggtccaccagccataataatatactttgcttgaggattctaccataacaattattcagccttttattttctaccctatgaaaaaaaaaaaaaaaaaagggcggcgctcgcgatctagaac

SEQ ID NO: 272630 - DNA, 817 bp, Zea mays
aatcgccgcatataatgtagcctggccatggatactttccctcctcgcctccccctcttcgtcagccccgcatctggcccggattagccgcctccggctccctcccggatcgccccaccaacagccagcctcgccagctgatctaagccaggcgcaactgtgaaacaatggcgacatccaagaaggatccccccaatcctagcagaggcaggacgtcacccaacctcatgtcgtccagcagtgagtcctctgggcacggatatggtgctaggcgggctcggtctgtaccgagttccgcgcaccgcaaatttggctcatcgtcgccgtctgtgtctgcctctggctccacagacgtgcatcattcatcattgttcaacgctggtaggtccatctcatcacggaccatgggctcttccatccagggcaccaaggcccagccattcccatctgcagcctcaaaacctacactggcaaaggagaaatccgacaaggtcagcaccaccttgcagcggcctccagtgcttgctgtgccggcagctaaggcatcgccatccaccttgccgaggagtaagccatctccaaggcctagttctgacagttgcaaagcggcagcatcactgaaacctagcagtcagagggtcatgttgccaggtgctgctcaaggagacaaagttcagccactgtctaccgcacagtcacctggtgcagctgcaaggaagagattggatactgttaatggtgctactaccaactcaaaggctaaaagtgtttctaagaaggcaatgggggcatcttcagccaggaaggagaaacataa

SEQ ID NO: 272631 - DNA, 471 bp, Zea mays
gacagatcaagtcacacaacagggcctgccgaaaactgaaacgaggtaaagggtcaaaaaaggcatatgtgcatgaatacaacatgtagtgcgaacatataggccatgtgcttaccccactctctcgtcacggcctcacaccgcagaggcttggacggacgggatggacatggcgcggtacgagtcatgctaccggcactggatcgccgggcaggaggcaggcctcgccgagctcgaggcggcgtcggccaatgccgccgcgggccgggcaacggacgccgagctgcggaccgtggtggagcggtgcatgctcggctaccaggactacgccacccgcaggcgcgcgctgtcgcgggaggacggcgtcgccttcttcgccccgccctggtgcaccgtcttcgagaactccatgctctggctcgggggctgtcatccttcgttcacggtacgtcttctcttcaacccttttcc

SEQ ID NO: 272632 - DNA, 470 bp, Zea mays
tgcttagttccgcgaggtgtacggcgacctcttcgggctcatggagaacgagctcgccagggtctgcaaggccgacttcggccactacaacgacgccgccgccttctccttcctctgccaggcgctgctggggcgcgaccccgccgagtccgcgctccagggcgacgggcccaagctgatcaccaagtgggtgctgttccagctcagcccgctgctcagcctcggcctgcccaagcacgtggaggactccctgctccactcgttccgcctcccgccggcgctggtcaagaaggactacgaccggctggccgacttcttccgcgacgcggccaggagggtggtcgacgagggagagcgcctcggggtcgcgcgggaggaggcggtgcacaacatcctcttcgccatgtgcttcaactccttcggcggcatgaagatcctgttcccgtcgttcgtcaagtggctgggccgcg

SEQ ID NO: 272633 - DNA, 545 bp, Zea mays
tatcgtgtaggagccaggagcacactcccaaggcggcggccatcccaccgcctgtcgggtcggcttcactcaaacggcttctgcagcatcctataaaacctcctcaccaacctccgatggcggaaattcttgccctcccacaccgaccccctcccccacggcccgccttcccccgggagcacgagaccctcgttccctgcgccaccgactgagccaaggccgcgccttgccgtttccgacctaggtcgcgagatctcggaggagcggagccccgccgtgccgccacctgctacaggggggcacgcagggaccgcacggcgcgatggtggacacgggcggggggaggctctaccagcgccgtggcgcggtcgctttcgtcgcggccaacaaggcgctgctcgccgctgcgtgggtcgtcgggttcgcgctcgtgttcctatggcagagcgcctccatgtccttcggcaacgccggcggcggagggtacctcaggcttctgtcggtgccgtcttcgccgacgcgccccgcgccgcggatttccccac

SEQ ID NO: 272634 - DNA, 521 bp, Zea mays
cccacgcgttcgcccacgcgtccgcgcgcagctagctgtcaccggagcaagaaggaagaaaaaccagcggcaccgatcgatcgacgacacgcgcgcgatcgaggtgaggagcgaaagaaaaggtggccttttcgaagccgccggacggagtgtagcgctagctagctccccaggccggagaggaggatggtgggacgaggagcggcgacggccctcgtgtgggcggcggtggtggcggtcgcgacggtggtgtcgcgggcgcagcagctgcagggtggggttctacgacacgctgtgcccggcggcggagatcatcgtgcaggaggaggtgagcaaggcggcgtccggcaaccccggcgtcgccgcgggcctcctgcgcctccacttccacgactgcttcgtcagggtcagtgcgccaagcggctaattattaagcaagctagctagccgccctcctcgagtgatccaatgcaaagtggttggtggtggcggtggtggtgtcacgtactgtggggacgggc

SEQ ID NO: 272635 - DNA, 739 bp, Zea mays
ttcattcgaccgcactattctcgcagctagctgggaccggagcaagaaggaagaaaaaccagcggcaccgatcgatcgacgacacgcgcgcgatcgaggtgaggagcgaaagaaaaggtggccttttcgaagccgccggacggagtgtagcgctagctagctccccaggccggagaggaggatggtgggacgaggagcggcgacggccctcgtgtgggcggcggtggtggcggtcgcgacggtggtgtcgcgggcgcagcagctgcaggtggggttctacgacacgctgtgcccggcggcggagatcatcgtgcaggaggaggtgagcaaggcggcgtccggcaaccccggcgtcgccgcgggcctcctgcgcctccacttccacgactgcttcgtcagggggtgcgacgcgtcggtgctgctggactcgtcggcgggcaaccaggcggagaaggacgcggcgcccaacgccagcctgcgcgggttcgaggtcatcgacagcgccaagacgcggctggagcaggcctgcttcggcgtcgtctcctgcgccgacgtcctcgccttcgccgcccgcgacgccctcgcgctggtcgggggcgacgcgtaccaggtgccggccgggcggagggacggcaacgtctcctcggcgcaggaggcgggcgcgaacctgccgccgtcgacggcgagcgcgagccagctgacgcaggcgttcggcgccaaggggctgagccaggccgag

SEQ ID NO: 272636 - DNA, 451 bp, Zea mays
cacactccaccacacaccgcgcagctagctgtcaccggatcgagcaagaaggaagaaaaatcagcggcaccgagaatcgatcgacgacactcgcgcgaggtgggaagcgaaataaaaggtggccttttcgaagccgccggacggagtgtagtgtagcgctagctccgcaggccggagaggaggacgatggtggggcgacgcacaggaggaggaggaggagcggcgacggccctcgtgtgggcggtggtggcggtcgcggcggcggtgtcgcgggcgcagcagcagcagcagctgctgcaggtggggttctacgacacgctgtgccccgcggcggagatcatcgtgcaggaggaggtgagcaaggcggcgtccggcaaccccggcgtcgccgcgggcctcctgcgcctccacttccacgactgcttcgtcagggggtgcgacgcgtcggtgc

SEQ ID NO: 272637 - DNA, 723 bp, Zea mays
ttttctagatcgcgagcggccgcccttttggttttttttttagtgtgggcgggcactgaataagacacgatttcttcatctgtttctgcttgttaaaaccagtcccagcttacaccaaggtcttcctttcacttgaaggcgtgataccaagatccctaccgttcaaacctcaaagaatgtgcacggaacatggtgtaaaactaaaagcaaacaaaccaacattttttggcttacttatctcatctcaacctggatctccatctcctcgtctcccgaggctttacaagctgtacaggcgcagccgggatccggagccaccactcccgcaatctcctcaccagcttctcactgctcttcttcctcaccggcatctgtcttgtgtattcttctagaaggattagtagaacgatggtcctcaagggcacgaacgtgaatatcgcagccacagcaaccagtgcagctgcaactctgttggtgctctgaggaaacgctgcaagcatgagggaccggagcttcaggagaaaaatgtttcctgcttgcacgtgcgcttccagctgcgagatggcctgttgcagagctaagagctgttccacggttcttcttcgaggaggagttctcatctcaaacgctcctaccgagcgcccatgcctatagtgtttgttccatagcatgaagatagtagagccaagcaagaagccaggaaacatgagccagatccaacct

SEQ ID NO: 272638 - DNA, 574 bp, Zea mays
  unsure (1)..(574): unsure at all n locations
tcagtaaacaagctgaaccagatggctaagggtattgtggggatcatgggggttgctctctgncttcttatcctgggaatagcaacagcaaatttctttgtcttcctcacttcacagattctcctggcagttttcgtgtttgggaatacgttgaagacgctcttcgaggcaattgtcttcttgttcgtgatgcatccctttgatgtcggtgaccgctgcgaaattgaaggtgttcagttggttgttgaggaaatgaacctcatgacaacggtgtttctccgatctgataacatgaagatatattatccgaacagtgtactcgcaacaaaaccaattatgaatttctacagaagtcctgatatgggagaagcaattgacttctccattcatgttgcaactcctgccgagaaactggccctgatgaaggaacggatactgcgctacattgacaacaagaaggaacattggtacccgggcgcgatggttgtactccgggacgtcgatgataccaacaaactgaaagtgtcaatatggctgcgacacacactcaacttccaggacatggcacgcgttt

SEQ ID NO: 272639 - DNA, 759 bp, Zea mays
gtctcgctctcgtctcgcatcagccaacaacgcttcccggcaaaatccttccacaggcgggggagtcgcctcacctcacttcaccccgttcatccccagcgaagaagcaaaatacttagcacaccagcgatggcggctacttaccaaactggccttgtggccgagccacagttgctgaacactgaaattatcactcggagggccaccaactgtgttgctgacactaacagaaaagacaaatgcgtcggctacttggatgtgtttgtacaccaggcacgcgacatccacaatgtttgtatctatcacaagcaggatgtgtatgcaaagctgagcctcacgagcagccctgatgtttcgtgctcaaccaaggtgatccgcagtgctgggcgcaacccagtatttgaggaaagcctacgccttgatgtgcaaactgtggatgcttctctcaagtgcgagatatggatgttaagcagagtgaggaactacctggaggatcagctccttggctttgcccttgttcctctggtagacattttaattggtaatggaaagctggtccaggagttctccttgacatctactgacctgttccacacaccagctggatttgtgcacttgtccttgtcatatgctggttgttccccagatgttgtcctcatctcatcacccaataattccccatcaacagtgtatgattctggaattgatcattgtggttccttctcagcttgagaagattgtgttcccagacctaaatgt

SEQ ID NO: 272640 - DNA, 774 bp, Zea mays
  unsure (1)..(774): unsure at all n locations
gactactatagggaagctcgctcgcctcaggtaccgatccccaattcccacccacgcttcctcgatttcaatatgagagggaaattaatagagagagagagatagtttaatttgtggcgcgcagcacacatataattctgtantttcatctactactggcctcacataaaaaaccctagctagctctagtagctagctcatactcttgcaattcatatccatgctgcactcgccagagaccaccagtcaagctagcttatttccgccgttgaccacgttgattaattatccgtcataataatggccttgtccatctagtttcctctctctttttttattattatgcctttgcttctctcttggttcggttgtgtatattgctgtctctgtcttcgtcatcactgtgtgcctacaatcctgctcacgataatgcagatgggaagttctgccttgcccgaagtcttctcttcgaaggtaaaaaaaaactaactcgacaactgttttgtagctcgaattaataagtgctgcaggtagaatacccaagattacctgcggctcaccttcggcggggatggttgcaatgcaacaacgaatacaaaagcgcaagcttcggagtaacagcatgtgcacatgaggggtgaacaagccaaaaccatgagaggccaacaagacagctatagaaattgactgcagtatcctaatatatttgctagctcaattgtatgtgcgttcgagtgtacgattgtaattttgacgaagaagctgtaactcacg

SEQ ID NO: 272641 - DNA, 597 bp, Zea mays
aataagcagccaagggtatctctttgggagatggaaccgttgacaacttgggcggtgtatccatctccttttgctcttggattaaagcgcccatggcctgcaggcctgccttctttatacggtggaaggggtgatggcttgacctcttctcttatgtggcttcgagacagggcaaacccgggtttccagtcactgaatttcagcgggcttggtatgagtccctggatgcagcctaggctggataattccttacttggtctccaatctgacatgtaccagaccatagcagcagcagcagcattacaaagcactacgaagcaagttccaccttcagcaatgcagttccaacagcctcagaacattgctgatagatctgctcttctatcaagtcagattctgcagcaagtacaacctcggtttcagcaaatttaccctcaaaatctcaacgaaaacaaaattcaaggtcatacacaacctgagtacctccaagtccaacagcagcttcaacgctgccaatcatttaatgagcagaagcctccgatgcatccacagcaacaacagcaggaaccacagcagcagcaatgcgtccaaacacca

SEQ ID NO: 272642 - DNA, 569 bp, Zea mays
ggacctggcgccgcctgttccacggttccacctctccaaaccaaaaactcctaggttttctaaacgtgaattccaatcactgcacacgtggtcgtttcggtgtgatttgccaggaagacggggcgaattcgtggtgctacctgaaagagaccccatctggtgcggttctggggttcgaggagcggcgaggcaggtgggaaatgagggatgtggtcgtggttgacgaagattgcgtccgcgtgcttgggcccggtccggaggtgcgcgcgtacgaggaaggatgaggacgacagcgataatggccgcggcgtcgccgacgacctgctgtggtcgcgggacctcgggcgccacgcggcgggtcagttctcgtttgccgtcgtgcaggccaacgaggcgttggaggaccacagccaagtggagacaggctctgccgcaactttcgtaggcgtctacgacggtcatggcggcgctgaggctgcccgcttcatatctgaccacctcttcgcacacctcattcgacttgctcaggaaaatggaacaatatctgaggatgttgttcggagtgcgtt

SEQ ID NO: 272643 - DNA, 1032 bp, Zea mays
gctggtctccttttgtccccattacactggacacttccatgctgactgtacttctgttgcgtctctaagtacagattgcgaaatgtccctgtgattgagcctgaaaagcctatcatcaggaatttcattactcagactggtgttgtcaaagggctgcagcaatgtaaaggaagggactggtttgactacatttctgcacttcctctttcagacttaggacttccatttatgtccattgatgaggttatcaccgtcaacagtgatgatcttatcttagaagctttcaagtgcatgaaggataacaagattggtggtgtcccagtagtagaaggccccaaaagaaaacttgttggcagtgttagcataagggacatccgctttctgttgcttagacccaacttattttcaaatttcaggcagttgacagtcattgaattcatgaagactctaggctccactcttcctgattcagagagcaattgcctggtgaagccaccacccacttgcactcctgacgcttcccttggtagtgttattgacagcattgcatcaagaataacacacaggatatatgtagtggatgatgaccttgaggttgttggtgttgtgactctgcgtgatgtgatctcatgctttattcatgagccacccggttattgcgacaactatttggcttcagcgatggagaagcttgaggggaaaggagtcagatcagtggagaaaatttgagcttttctgtagcgtgaatgttgataataacaggtcagtatgtgaggaaggtttatttggttggaacggtgcattcgtgtcgtgttaatccagcaaatcctgtgtaggttaagtaacaaggcttctgtgctgttaaaaatattttactatgtcatttctttggacggttttctgaacaaatgtgtggtaaccattaggccttgttcggtttttcctacaccaaatggattggatgtgattgaaaaaaaaaaaaaaaaaaaaaaaaaaagggcggccgctcgcgatctagatctagctggacgc

SEQ ID NO: 272644 - DNA, 569 bp, Zea mays
attgtgttccaaccactggatacaaccgagatcaaccatatcgtggagatcagctgaatcggggtcaggaccggctgatgacaacagaggattcatctccagtacactgcggaagccgttgagcttctggggtctcttggctttgacccgaactatggtgcgaggcctgtcaagagagtgattcagcagatggtggagaacgagattgcccttggtgtcctgaagggcgatttcaaagaagacgatactgtcctcgtggatgtaagttcggcggcgatcgcaaaaggactcgctccgcagaagaagcttgtccttcagagggtagaaaacggaaacgacgagttagttgccaatgactaggtcagatgggttcaccttttagcgagaatgttcaagtgtgatgatacgcagctgttagctctgcgttttcgcgtatgagaaacttggccttttatttaggttctaccatgaagtcgtgtccagtctccggtggcaaaactcaatgttcaaatctctctgaatataatcttgagagctccccctcaagagctgtaaatatacgttcaggc

SEQ ID NO: 272645 - DNA, 715 bp, Zea mays
ttcatatatagtgattgtaagagttgggaatttggaaatactgtctcgcagaataataagtacacatattctttgtaagcagtttggaaaatagcttgggatcgtgatagttgattttgtgcttcattggaggattcaacttttttatgtgttgcacatgtctgcagtgccttgttgactttgtttatttcggtaataagagccaatgctgataagatttgaccaggtctgtcccatgaatcatgtatatgttttggtttggggttgaaactggtgtgttgtgattttcaggctttgcagcttggacaagatgccaatacaccttttggattctttaacggccagagatgccagatgtgcctccggtctgatcctttgctgaaggtgatggagcgactggctaatcctggggtgcggcgggtgttcattgtggaagctgggagcaaacgtgtggagggcatcatatcactaagtgacattttcaagttcttgctgagcttgtgaggagaggggggcatggcggagtttttttaacagtagcaaccctctgggcctttgggtccttgcggataattggctatcgccagggttcatggtctgtaaagttccttttttttttgtttcgttttttaccatttggcccctcccgcttgtataaccccaattaatataatggcaaccttcatttaatataaggttacttgagggttccttg

SEQ ID NO: 272646 - DNA, 804 bp, Zea mays
cccacgcgtccgcggacgcgtgggtggtaatttgcctattctgaaccaaccagtgtgctccattccgctgggttcctgggttccgaaaattggtgatctgaacagtcgtccattggctatgttgcgacctaatgcatcacttagctctgcccttaacatgttggttcaagctggagtgagctcaataccaattgtggatgacaacgactccctgcttgacacttactctagaagtgacatcacagccctagctaaagacaaggtctacacacatgttcgcctggatgagatgaccattcatcaggctttacagcttggacaagatgccaatacgccttttggattttttaacggtcagagatgccagatgtgcctccggtctgatcctttgctgaaggtgatggagcgactggctaatccgggggtgcggcgggtgttcatagtagaagctgggagcaaacgtgtggagggtattatatcactgagtgatattttcaagttcttgctgagcttgtgataagagaagaggagcatgacggacatttgtttgtgatcaatagtaagaaaacagcagggtatgtgaagcaagctgccatggatctcgcatttcccctccccctccggcctttggtcaagtaaggcaggattgaaggtggcgggctttgtctttgctgataatggctgttggaattcatggtctgtaaagttctttttttccctttgtttttcgttttaaccattttgtgcctcccgttgttaccaaaaaaatctggtgattttcataattatttttggattgttccc

SEQ ID NO: 272647 - DNA, 1108 bp, Zea mays
  unsure (1)..(1108): unsure at all n locations
ggccaggatacgcctgtnttcgaagcaccgctccgacatccgcgagctgatcggcgtgtcgggcgccatcccggcgctcgtgccgctgctgcggagcaccgaccccgtggcgcaggagagcgcggtcaccgcgctgctcaacctctcgctcgaggagcggaaccggtccgccatcacggccgccggcgccatcaagccgctcgtctacgcgctgcgcaccggcacggcgccggccaagcagaacgccgcgtgcgcgctgctcagcctctcgggcatcgaggagaaccgcgccaccatcggggcctgcggcgccatcccgccgctcgtcgcgctgctctccgcgggctccacgcgcggcaagaaggacgcgctcaccacgctctaccgcctctgctcgcgcgcagacaaggagcgcgccgcagcgccggcgccgcgtgccgtcgtgcacctcatcggcgagcgcggcacgggacgtgcgagaggccatggtggttctggggagcctcgcgggcatcgccgagggccgtgaagccgtggtggaggctggcgggatcccccgccctggttgaggccatcgaggacggccctgccaaggagaaggagttcgccgtggtggcgctgctgcagatgtgctccgattccccgcataaccgtgcgcttcttgtacgcgagggcgccatcccaccgctcgtcgcgctatcgcagtctggctctgcccgtgccaagcacaaggctgagactttgcttggctacctgcgggagcagcgacaaggggttgcctgcagagctggagcagtggcagctactagcttggctaggtaaaaaggcaagagctatggtcgaaatctgctccatttattctctgtgagaggtgttgagagcagatcagcgacgccaggggggcgcatctgtaaataacagctggctctggttggtttggctatgtgtctatgtgaatacacatgtggtttgcgagtgaggatgcttgttgggttcctaacgtaacgtcagttaagagtcttaagagggaggagggttcaggggtccccggctatgctattttaaaatttacctcgtaatgaagatgatgctggtttgtagctgagtt

SEQ ID NO: 272648 - DNA, 1633 bp, Zea mays
ctggtctcgttcaaggatgtccccaactcggagaagcagaacctgttcgtcagcaagctgagcctgtgctgcgtcgtcttcgatttctcggacccgaacaagagctcagtggagaaggatatcatccggcaggcattgctggatcttatagagtttgtcgagtcgaccaacgctcgcttctcggaggcagccatcgcggcctgctctaggatgtgtgccatcaacctgttccgggcgttccctccgagttgcagatctggctcatcaggtggtggtgagggcgacgaggaagagccaatgttcgaccccgcgtggtgccacctgcagcttgtttatgagctcctgctgaaatttatcggatcctcgtccttggacgcgaaggtagggaagaagcactttgatcactcattcatcgtgaagctccttaatcttcttgactccgaggatccaagagaaagggattgcttgaaaactattctgcacagggtatatgggaagttcatggtacaccgtcctttcatccgcaaagcagtgagcaacatattctaccagtttgtctttgagactgatcggcacaatgggatcgcggagctgctggaggtctttggcagtgtcattagtgggtttgcattgcctctgaaagaagaacacaagatctttctttggagagttctgattcctttgcacaaaccaaaatctgttggtgtgtatcttcagcagttgacctactgtgtaacacagtttctggaaaaggacccaaagcttgcaagctcagtgataattggtttgttaaggtactggccaataacaaattgtcagaaggaagtgatgtttctcagcgagatcgaagagatcttggaggctaccagccaggcagaattccagaaatgtatggcaccattgtttcggcgaattgctcattgtattaccagttcccacttccaggttgctgaaagagcgctcttcgtatggaacaatgatcacattatcagcttgattgcacaaaaccgccaagtgatcatgcctcttgttgttccagcgctagagcagaacattcagaatcactggaaccaggcggtcctgaatctgaccgtgaatgtcaagaaaatgttatctgagatggacgacgatctcttctcgtcatgcctggccaagtacaaggacgaaaaagaaaaacgcgtgtcgctagaagcgaagcgtagacttacgtgggagaagctcgagtcagctgcagctttccagccagtgactggccatacagccgtcctagtaggccaccggccgtcagcaaatctgatcgccaccatgatctagctcatgcatgtatgccgaacaagcgaaggtggtgctctcccccccttttggtgaggcgcagcaagtgtagtgttctctattttgctcctgtttattattattattttccttttgctggcatgggtaatcagtgtagtagtaagttgtaactatttccggatgtttatgttcttaaggcaaggatacctgtaacttaagactgccgagtgctggcactctacatgtatctttgcctgtttatggatgaacaggtgtcctacagtttaatttcacaatccatcttgcctataggctatatatatagatgactggtatgcag

SEQ ID NO: 272649 - DNA, 821 bp, Zea mays
  unsure (1)..(821): unsure at all n locations
ggctggtgatgctctgggcgccaagtgtgtacatcttgctcctcgcaaggctcattgatgggttcggtatcggtttggcggtcacacttgttcctctctacatctccgagactgcgccgacagacattcgtgggttgttgaacacgttgccgcagttcagtgggtcaggagggatgttcctctcctactgcatggtgtttgggatgtccctcatgcccaaacctgattggaggctcatgcttggagttctgtcgatcccgtcacttatttactttggactgactgtcttctacttgcctgaatcaccaaggtggcttgtgagcaaaggaaggatggctgaggcgaagagagtgttgcaaaggctgcggggaagagaagatgtctcaggggagatggctcttctagttgaaggtttgggggtcggtaaagatacacgtattgaagaatacataattggtcccgatgatgaacttgctgatgaagggctggctccagatccagagaagatcaaactatatggaccttaagaaggcctatcttgggttgcccgacctgttcggggacaaagtgctcttggaagcgcgttaggtctcatcttctcgtcatgggagtatggcggctagtcagggtaagcccctcgtggatcctatggtcactcttttcggaagtgttcatgaaaagatgcctgagatcatggggagcatgaggagcacattgtttcccaactttggcagcatgtttagtgttgccgaccagcagcaggtgaaagctgactgggacgccgagagtcanagggtaagtgaagattatgcttcggatca

SEQ ID NO: 272650 - DNA, 299 bp, Zea mays
ttgtgattgtggatagattgactaaagtggctcactttattcctgtcaagactacttataaaggttctcagctagcagagttatatatggctcggattgtgtgtttgcatggagtaccaaagaagatcgtgtctgatcgaggttcgcagtttacctcaagattttggagaagctttcatgagaacatgagtacgaagttgaatttcagtacggcttatcaccctcagactgatggacagactgaaaggacaaatcaagtattggaagatatattgagagcttgtacccttcagcatggt

SEQ ID NO: 272651 - DNA, 520 bp, Zea mays
cccacgcgtgcggtcagaaccctcagtccctcaccatacctccgaggctccgaccaaaacaccagggtcccagtgctcttggctctaagatggcggcgccggaaccggaggccaagctggaagccgtaaccccatctcggtcctacgagctgccaccggagtccgaatccgacgcccctgcctccaccggcacccaggagctaaagccgtgggagcagcacgccgcggtgatcaacctcccgcgctacgactaccgcgcatcagggtccctcctcctccgttcgcattccggcttcctcatcacgtgccccatcaagcgtgaaaaaagtgcaaccaaggaagccattcccatcctcgaagaggacattgctcattatgttgctccatagaatctaattgtgttcccagttgataatacagtccatgaaattttatcttaaagaacgttgctatttcaatctgcgttttattttagcaatataccaaattatgttgcatttcaccactatttgatgcacac

SEQ ID NO: 272652 - DNA, 482 bp, Zea mays
tcgctgggtcccagtgctcttggctctaagatggcggcgccggaaccggaggccaagctggaagccgtaaccccatctcggtcccacgagctgccaccggagtccgaatccgacgcccctgcctccaccggcagccaggagctaaagccgtgggagcagcacgccgcggtgatcaacctcccgcgctacgactaccgcgcatcagggtccctcctcctccgttcgcattccggcttcctcatcacgtgccccatcaagcgtgaaaaaagtgcaaccaaggaagccattcccacccttgaagagtaccatgcaaattgctgtgtttctgaacatgcagaaccatgtgatgtggaaaatgcaattaagaaaagaaaactgtgctcggaggcatcaggaagtttagaagaggcagtaacgaatgggaatagtagcagtgtttcagaatcaattggaagcaccggaaacacagctcaccccagtcc

SEQ ID NO: 272653 - DNA, 897 bp, Zea mays
acacacgacagtcgtttttagagaattctttgaacataatgcctctaattccaaccttgaacttcctgttagaataaaaaaactaacttaaagtttaataaccaactaattcgtgagtatagaagaaagcaaaccctctatctgggggccaggattgctgctgggactcgaagacggcgaattagcacttgagttttgaactttggttgaactgtgagaacttgaaaaggggcgatgattaataggaccaccaggatacactccaggatactgcaaaccaggcaaaggcgaataggggcttcccaactgcgcggaattaaatgatctaggaactggattaggcgaaacttcagaattagctccatggatcgagcttccttgattaacaggctgaaccatattctggaaggcagcttgattttgcacaggagatagaggagggtattgcataagcccgtaggttccttgtggctggtagccaaatccattgtactgcggcacataacccatatgtaaacctccaaacactgaattctgctgcatagcatttgcattcaacatgttagaagactggaattgagctttttgtgcttttcgagcctgcctttccttttcagtgtcagcccatttgacaaccaagggaacacttgaaccctctattttgtgtgttccatttagagcttctatagcagccacagcttgctcttttgtttcatattttagaaaggcacaaccagctttgctcgtttgctgagagcctctcagaatctgtaaatcctttatatttccatattttgaaaataaatccgtcatttcagcatgtgttacatttttggggagcattccaacgaagagcttgtgctccaatctttccaactccccatcggcatattttac

SEQ ID NO: 272654 - DNA, 582 bp, Zea mays
cgagcgaccctctgcgctcgcgcgaatcccgcccgagatcgccgccgatccgaagcaacggcaccgtgcccctccccctcgcgagatccgcgaccgccccatcccggcgccgcgggatccacgcctccgccctcgcccttccccacccccacccgctaatctcgcggtcgatccgcgcccggtcctgaccccgcctccgtcctcagcaccgccactccgtcccccactcgttcggcgccgccgtctcccgctcccctggcacgcattcggggtccttgcgggcgacaagcacctccgtcccggaggcatctgccgctgcagcatagaccaccatgtcctcgctcggcagcaccgatgttgacgatggcaacgaggaggaggacggctccgcgagcacccccgagatctactgctgccactcccacgcagttcttgctcacgagatctgtgtgcaggttgatgtcctcgtggtgccacgccgacctcgccgccaccaagcgcgccacccatgtcctcaccgacctcgccaaaattggacggatcgaagcaccataataagtgtttagctttcctccgcgcctc

SEQ ID NO: 272655 - DNA, 501 bp, Zea mays
cgagaggaaggaggacgacccgcgcctgtggaggaggtgggattccgacgagcgctacatcttctccatgaacgccgctcacagcatccggaacacgtccagcatcagctacgtgtcgcgcgacggcgccgactcggtccccgcgccgctgcggctgtacgagacggccagggtgacggaggagaccttcgtggtggacaggaagttcaacgtgtcctggcggttcggcgtggaccccggattcgagtacctggtcaggctgcacttctgcgagctggagtacgggagcgcggagcagcgcaggttcaagcatctacaccaacggcaagaccgccgcggagaactacgacgtggtcgccaaggccgggggcaagaacaaggcgttccacgaggacttccttgacgacgacgacgccgcccccgcatcggcgaccgacacgctctgggttcagctgggctccgagtcctccgcgaccagctccgcggctagcgacgcgctcc

SEQ ID NO: 272656 - DNA, 438 bp, Zea mays
  unsure (1)..(438): unsure at all n locations
gtcaaaaaggtcaatgttccaattcatgctttgatggctttgatgcgaagagtgctgttagttgatggatcattgcataacaagctgttcccttctacaacttcattgcatcaagagcttatttgttttgatcttccatcgttacattcaactttcttggatttgctgaatgcaactattaaaggcatgcgaagccaactcttacctcatggtgctagtatcatacggcttataacagagtacttcaaaatagcaaagctgcctactttgaggacaaaaacttatagcattttgcagctgttgctgacctccatgggtgttgggacaaancttcactctgtttttggtaatattctttttattcatttttttgatctttaataaatatttgattaattttttctaaatttttttatttattttatattattttctgta

SEQ ID NO: 272657 - DNA, 363 bp, Zea mays
acacgtcaggtctgtgtgtttgtgatagaatccaaagacgcaagcggctgcaggcagcagcgccgcgcaggcgttgtggcctgtgggagaggaaaaagagaaagaggaaccggccaagacaagcaagcgagaggccagggccgcggcgttgcgtcagatggggaagcacatgcgcaagtgcaggggcgccgcaggcgcggaggtcgccgccgtcgaggttacgcaggtcgtcggcgtccggacgaggtccaggtccgcggcggcgaccggcggtgtcgcgaaggtcgccccgaggaggaagagggcgccggcgggggagcctgctgccgccgtgagcgctggtggggacggcggaagctgcta

SEQ ID NO: 272658 - DNA, 495 bp, Zea mays
gtcggttcgcccgcaccgtttcccaaaccctccggactcgaacccaacccacgcacccacatcgggagacgagccaggccgagctctggaagagtctccggaaggcccgcaccgtcgatggcggccgagggcagcggcgtccaagagacgttcgaggcgcgggtgaagcgcctgttcgggtcccgcctcttcgacgccgtcccggactcctccttcccgacggcctcctggtccgtggccgcgggcgacgtcgagcgccaccgttggtcgaagccgtcggaggcccgcgacgcggaggaggaggcagcgggggaggccggccgcggggacacgccctgcgcctccgcgttctacgacgccaacgggtgccttcgtggccggaggcgcaggtccaggcaggaggagttcgaggggaacctcgactacctagatgaagactaggaggaggacagctagagggagaggaatgcggcagaacatgacgaggaggagggg

SEQ ID NO: 272659 - DNA, 368 bp, Zea mays
tttattagccctcgttcccctcctcttccgctcgagtccatcgccgtcgccggcgccctgccctcgtatctcctcccacgacaccggtgaccaccacaggccaccgtcctgatcctcatccgggtcatccccaggcaggcaggtcggcgaggagggcagcaagaccgagccatgcgggggctcgggacgggaacgggacaggaccccaaaatctcagatccttcctgctcgcccgcccgtgcccgtcggcgcgtctttcttgccgtccgcgccccacctccgccctctcctcctccaggggaatcagatatgccacaggctgcgcgaaggtgatgtgggtttttggctacagctcccttatttggaac

SEQ ID NO: 272660 - DNA, 546 bp, Zea mays
agacatttggggatattcttgcttctagagcaataagggcagcacattgcttaacttccattcagttctcacctacatccgaacacatacttttggcatatggtcgtcgtcatagctcgctgcttaggagcatagtcgtggagggagaaaatgggattcctgtatatactattttggaggtatatagagtttcagatatggagcttgtgagagtgcttcctagtgccgaagatgaagtcaatgttgcatgctttcatcctttaccaggaggtggccttgtttatgggactaaggaagggaagctcaggatccttctacacaatggcgcagacatgataaacatggggtcgggttgcttcattgacgaaaatatggctgagatccagaggtatgcattggaatgctgaataagcttgaccacatcatgtgaattttaggcttacttccatgaaagacttctgtgcaggcttcatctgtgtgatccgttcaagggaaaacattagatgcatctgcaactacattagaacagataattctcaatgggct

SEQ ID NO: 272661 - DNA, 409 bp, Zea mays
ttttctttgttccggacgatctccacatgggggcgccccaccccacctgggggccctcatcaccactgataaacgggcgccgcgaaagggaatagagcatcggccccgtgcaggtcgcagagcggctggaaaagttcaagacaacaattttcactcagatgagcatgcttgccatcaagcatggagcaataaaccttggccagggctttccgaattttgatggcccagactttgtgaaagaggccgcaattcaagctatcaatgctgggaagaatcagtacgcaagagggtttgctgttcctgaactgaactcgtctatcgctgaaaggttcctgaaggacagtggattgcaagttgaccctaccaggtgatggaaccttcaatgaggggggctggtgcaaacacaatc

SEQ ID NO: 272662 - DNA, 388 bp, Zea mays
gccctcatgaatctggccgccttttcctccacccttgccacgctcccctggtatgagatgccatcaataaattcctccgcaactttctcgtcctcactgctccgccgctcgctctgcgcgtcgctccggacgatctcccacatggcctccgccgccgcccccacctccgcgcccgtcgccaccaccgagaacggcgccgcgaaggcgatagagcagcggcccgtgcaggtcgcagagcggctggaaaagttcaagacaacaattttcactcagatgagcatgcttgccatcaagcatggagcaataaaccttggccagggctttccgaattttgatggcccagactttgtgaaagaggccgcaattcaagctatcaatgctgggaaga

SEQ ID NO: 272663 - DNA, 659 bp, Zea mays
tcttctttccgtgccaacggagactgaccgaactgggacgctatgcccggaccgtggggatagataaactattcatctggttgagccaggctggccctatttattccaatggagactagactagcgttagctgaaagataggatttcaaagataggtgttccccatgatagcagtacctttctccctttcgtggtggaatggaccgcgagttaactgagccttccgtacacagtgagacggccttttcgagacaagtcagaaagctcttaagtccagtaagctaagcaaagctttccgttggactagcaatatcggatgaaggaagcagcggtgaacggagtcaagctattggctggttctagcccacacgagatgtaggtcctgattccctgaaccggaagataatgagcatcgcggtaagagagagtctactcgacttgagaatcgttgatagacaaatcatgcccggcaaaggaataggactagtggaagtacccgatctcatagtggactcgcaatcacctcctaatggtattatcaccagggctgcactgcaagagaattcattccattgagctgatgggaggaactcctgttggttgtttcgaagtcaaggatgcggccagggttgttagaaaataaataggcaaagaagtag

SEQ ID NO: 272664 - DNA, 727 bp, Zea mays
gctttccaaagccttggtgtggtgtttggggatttaggcacatcacctttatatgtcttcggcaacattttccctcatgaaattgaagacacggaacaaattattggagcactcgtcgcttgttatttactcccttaccctgattccacttgttaagtacgtgttcattgtcttgagggcaaatgataatggccaaggtggaacatttgctctttactcgttgctttgccggcatgcaaagataaacactattccgaatcagcatagaacagatgaagaactaacaacatacagccgccacacatatgatgagaaatctcttgctgcaaagatcaaaaggtggttagaggggcaccaattcagaaagaatgtcattcttattcttgttctttttggtacttgtatggcagttggagatggaatcctcactcctgcaatatcagttctttctgcaactggaggaatacaagtggaagagaaaaaaatgaaaaatgatgcggttgtcatcgtctctgtggtcatattgattggattattcagcatgcagcactttggtactgataaagtcagctggctttttgcgcccctcgtatttgcttggttcatactcattggagtccagttaagctgggtacattttccaatattacccttctgttaccacggttcttaatcctatctatgtacattcgtacttttaagtttgtcatgtctttccttccttctt

SEQ ID NO: 272665 - DNA, 486 bp, Zea mays
gtcactgggttcttcccgcaggaaagtggtttctccaggtttgactccattagcagctccaaaggcgaggatgtatcaggattcgatacagggaatagctcaagaaattttggtcggtttgactctttcgatgacaccgatccgttcggttcgagcggaccttttaaagcatctggaagccggtctccacccaagttctgatacgttttctgctctgagtagggatttgtgtcttgcgtgctgctgatttgtcaatacaaggttcagattctttgagcgaactctagcgtaacaagaatatttctcctttgctcgacatttcttccgtttgccttgtgtgcaatttttccaggccatctcacgtacaaagtggactggcctgggttatatctttgtatttgtataaacatttttctgtatcttgtaaattacaccaagtctgtctttgtttatattagtttatacgtacgaaaaaaaatataataa

SEQ ID NO: 272666 - DNA, 2066 bp, Zea mays
cccacgcgtccggagatgcacagcttgatttccatccttttggagaattcttagccactgggtcttcagatacaaacatgaaaatatgggatactcgaaagaagagatgcatccacacatacaagggtcatacccaacgaattaatgtgcttagatttactcctgatggccgatggattgtttctggtggggctgataactcagtgatggtctgggatttgacggctggaaaactcatgcatgatttttgtcttcatgaaggtccagtcaactgcttagatgttcacccctatgagtttttattggctacaggttcagttgataagactgttaaattttgggaccttgaaacttttgagttgatcggttcttctggacccgagaacaaccgagaatactttgagctggctagtgtaatccgttctatgaagttcaacagtgatggtaaaacaactttttgtggattacatgaaagcttaaaggctctttccggggaacccaccatatgtcacgatgtggttgatgtaggctggtccacattagcagatctaactgttgacgaagggaaacttcttggctgctcatataaccaaaattgtgtcggtgtgtgggttgtggatttgatgagaaatgagccttatgttgatagtagtgctggatcacacttaaatggaagtataaataggccaattcaatcagatgatagcatgtcatcagtgtttgggaggctatcgatttccagaagcccagccaatgaaattggatcggatactctgcttggatgctcaatgtctggttcaaaagaaagtcctgtctcaacttctgcatcaatgaggggagtggcaaagccacctggaaaaggggacctccggctctcaagatctatttctacacctgttctttctcctagagttagattgaacccaaatttcattgacagacagaagaatcaggcagctactgctgtaccattaccagaaccaatagtccgctttaaagcgaatctctcttcagatgctggaatgttgtctcgcaagtcacatgcatcagcagctcccatgtatagatcaaggtccaatagttctcggtatggtattatggaatcatcttccatacctgttctggccctgaggcatagctctagaaaggatgctggtcccgttcacagtgaagctgccacaggtgagttagcagatattgagcctcaaaatatagaaaaggaaggtttagttgccaatcatggcaaagaagatggcaagttggtacctgtaattgcttcaaggagctcaaagatagtcgaataagttggctatagaagaatcaccaatgatgtaggatgtacgagagtaaccctagaaagtggtttgagagttaattcagatatggactatagaagcagagctccagaaagccacgaggtgcagcatcttatacatctgtcagaacctgctggtttacatgggaaatttataggagaatcttcaggtgctggggacaataactgttctggttcaatatgcactgagagtgctgagtttaatgaagatgatatctggtacagggtatctggttttgataaatggaaccctgctgctgcaaggaatccagaatttgccagcatccacagaaatgaagtgattggaataagacagttgatggagtcaagtggaaagtatgttgttgacgatcgaccttcctcttctaattacgataacatccagtatgtgacaacactatacagctcgaggctgcatccttcactttctggaaaacttagtgcatctgcaagttatgaagatgatatttctggtctagtggaaaaccatcaagaattcattcatgtaatgaaatctcgactaacaaaactagaggtggtttaccgttgctggcaaagaaatgatataaaaggatctattgatgctacatggagaatgttggattttgctgtcactaatgatattgctaatgctctaatggagaataggaactgtatcacattagatgtttgcgcttctctcttacgtcttaccaccagtcttcttgaagcacatatgacaggcatatga

SEQ ID NO: 272667 - DNA, 419 bp, Zea mays
gttggattttgctgtatgtactctactactttcttgtagttgcaccaattacaatttctgaatattctctactcttgtaggtcactaatgatattgctaatgctctaatggagaataggtactgtatcacattagatgtttgcgcttctctcttacgtcttaccaccagtcttcttgaaagcacatatgacaggtcatttctcatatttcctattaatttatcaatattgaaattgtgagatcatttaaatttgaccttgctattgaacattggctgattattttgattaaaagctgacttaatgctcttttggagagttggaactcgcaatgggaattgaatctgattataatgcccctttcttcaaaaagagatggaattctgaatacgcagatatgaaatattgttcatggtccag

SEQ ID NO: 272668 - DNA, 288 bp, Zea mays
cttctctcctcgccttccctcccctcccctcttgaaccctccgccgctccggggaaaatccgatttgaattgaaaatcatccggagacagagatcttttcttcctcgaagctatctgctctctcgactcgatccatagctgctcgcgtccctgttcctcgccggctggcaagtggcggcgacgggacgaggtcttcatcgcctcctcgcgagcgacgatcacccactagtttgggcggtctgtggcacatgattgatgccaacgcgaagcttcacatgcttggcccct

SEQ ID NO: 272669 - DNA, 325 bp, Zea mays
cccacgcgtccggcccacccccacccgtcccgtgctagcttagctctcggctctcgccatggacgctgcggagaggaggctggctcgcgtcgctgcccacctcgttccgtccttcccggccccacacgccaccgggcctcccctcgcgccttctcccgcggcagcgtcctcgtcgtcgtcctcgccggcgggggacagctacaggcgcgtgcacggcgacgtgccgtcggagccaccggagtggcgcaccgccacagacgagtcagggaaggagttcgtcgacatcatctactagaaggccgtctgatagggcattgccaagatc

SEQ ID NO: 272670 - DNA, 359 bp, Zea mays
ggttgggagaggaaaaggaaaagcgggtcgcgagtgccccccaccccccgcttttgctccaatcggcgccgcctcgcgcgagatccgctccggcgtgccccgccgccgcgctgctgccgagatagagggtgtcgtccccggcatcgggttccacggagagttgttgatttgggtacctgatccaattgggggtggattgagtcgcttgaccttttcaacatctgccccgttcctgctgctctggtcaccataggaggcttgcctggttccagagatgatgtcattgtcagtggagatggattctgcgagaagttggttccagaagttccagccgagggacaaatcgaagagtccactgt

SEQ ID NO: 272671 - DNA, 1938 bp, Zea mays
tccacgcgtccgcccacgcgtccgcccacgcgtccgcgcgtccctccttcctccctctccatttccgccaccaccccccctctctctctctcttcttcttcttcaatcctccctccccgcgccggagttggaggagggagaggggacaagctttccggcgccgacgccgacgcggacccggcgccgacacgatccggtggatcaagtgcatcacacctttagggaggccccttggacagcagtttgtgctgcaaattctatatagctctgtcgcagcatggcctcggtgggcgtggcacgctcttctttgggatttcagaatggcacaagttctagcagtgacccagatcgtcttcccaacgagttgggcagtatgagcataagggacgacaaggacgttgaagatattgtagtcaatggcaatggggcggagcctggtcatatcatagtgaccagcattgatgggagaaatgggcaggcaaagcagaccattagttacatggctgagcgggtggtaggtcatgggtccttcggaaccgttttccaggccaagtgtcttgaaactggtgagaccgtagctataaaaaaggttcttcaagacaagagatacaagaatcgtgagctgcaaaccatgcgagtgcttgaccacccaaatgtggtggctctaaagcactgtttcttctcaaagactgagaaagaggagctttacctcaatttggtgcttgagtacgtaccggagactgctcatcgtgtcatcaaacattacaacaagatgaaccagcgcatgcctttgatttatgcaaaactgtatatgtatcagatttgtagagccttggcatacattcacaacagcattggagtgtgccacagggacattaagccgcaaaatctcctggttaatcctcatacccatcagctaaaattgtgtgactttggcagcgcgaaagttctggtaaaaggcgaaccaaacatttcttacatctgttctaggtactacagagctccagagctcatatttggtgctactgaatacacaacagccattgatgtttggtctgctggctgtgtgctcgctgagctgcttctaggacagcctctgttccctggagaaagcggtgttgatcagcttgttgaaatcatcaaggttctgggcacacccacacgtgaagaaattaagtgcatgaatccaaattataccgagtttaaattcccgcaaatcaaagctcacccatggcataagatattccataaaaggatgcctgctgaagcggtagatctcgtgtccaggcttctgcagtactcaccaaaacttcggtcgactgctttggaagcattggtccatccgttctttgatgaacttcgggatccaaacacccgcttaccgaatggtcgttttcttccgcctctcttcaattttaagccccatgagctgaagaacgtgccggcggatttcatggtgaaattggtccctgagcatgcacggaagcaatgtgccttcgtagggtggtgatctctggataagaggatgacgactcgatgattagctgaggaccaagttaatgtctgttagaaactgccggagatcgacattgccagatgtggtgtggtataagataggcaatatgtgtgattattttttgttcgaggttatcaccccccttgccccagaaaagatgagaagatgtcgatgtaacaagccctctgcgcttctgtaagtagatgagtgttgctgcatgccccctgggtacatgtatcggtttgagcagaattctgtttgcctgaatcgtgccatcaccacgcagggatccatcccttgtgtgacgatgttcagcccaacatttgtttatggattcaggctattcgttcatttgtactcctcgcatcctatggatgattaagccatatttgcaattttccaaaaaaaaaaaaaaagggggg

SEQ ID NO: 272672 - DNA, 430 bp, Zea mays
  unsure (1)..(430): unsure at all n locations
gagactttccgttttggaggggggtggcctttccttggcaaggctcccaagcctatctagccatacaaacatgcctgcaactgcaagtgaatgtggatcaagtgcatcacacctttagggaggcccctcggacagcggtttgggctgcaaattctatatagctctgtcgcagcatggcctcgctgggcgtggcacgctctcctttggcatttcagaatggcacaagttctagcagtgacccagatcgtcttcccaacgagttgggcagtatgagcataagggacgacaaggacgttgaagatattgtagtcaatggcaatggggcggagcctggtcatatcatagtgaccagcattgatgggagaaatgggcaggcaaagcagaccattagttacatggctgagcgngtggtaggtcatgggtccttcgg

SEQ ID NO: 272673 - DNA, 2527 bp, Zea mays
  unsure (1)..(2527): unsure at all n locations
tcggacgcgttttatgaaaaccgtggggaggtgacaacaccgaccgtagtacacctgcccagcctgtacagtactgtgcctccggcgtgccaaatacgttactcggctggctgccccgcaggcaaagctcaccgcgccggcgtcaaggtcactagcaacatcgcgcccgatctggacgtgctcatcgtcaaggccaccagccacgacgacgagccggccgaggagcgccacatccgcgagatcctccacctcacgtccggatcccgcgcccacgtcgctgctgccgtggcaggctgctcccgcaggctctcccgcacccgcgactacgtggtcgcgctcaagtcgctcatgctcgtgcaccgcctcctggccgatggcgacccgtccttccaccgcgagctcctccacgccacacgccggggcacccgcctgctcaacctctccgattttcgggacgaggcgcactctggatcctgggatcactctgcctttgtgcgcacctacgcgctctaccttgaccagcgcctcgagttcttcctccatgagcgcaagcaggggtcaaatgctggcagcagcagcagcaccaatggtccatcaccacgggaccgtgaccgctggggttcacctgatccctatggccgccgctctccctcctactcgtcaccccctgggtatggcggatatgatgattaccgcgagagaaatggtggaaacaatgatgacaagaggccgcccaccccagtgagagatatgaagccagagcaggtccttgctcgtatgcaccacctacagcagctgcttgacaggttccttgcttgccgccccaccggtggggcgaagcacagcaggatggtgctggttgcgctgtatcagattgtgagggagagcttccagctctacgccgatatctgcgaggtgctggcggtgctgctggacaggttctttgacatggagtatgctgagtgcgtgaaggcttttgaggcttatgcaagtgctgcaaagcagatcgatgagctctgtgcattctatgcatggtgtaaagataccggagttgcaaggtcatctgagtacccagaggtgcagcgtgtcaccgataagttgctggagacgctggaagaatttatgagggaccgggcaaagaggcccaagagcccatcaccggagcctgaacctgagcctgtcaaggaagaacctgagccggatatgaacagcatcaaggcgcttccagcaccagaagattataaggagcctgaacctgagaaggtggaggaagaggtgaagccagagccacccctgcagccacagggtgacttggtggatctcagagaagatactgttagtgcagatgagcaaggtaacaggcttgctctagctctcttccaggggccaccagctgctggtggaagcaacggttcatgggaggctttcccttcaaatggtggcaaccaggtgacttcggcctggcagaaccctgcagctgaacctgggaaggctgattgggagcttgcccttgtagagacagcaagcaacttgtccaatcagaagccagcaatgtcaggtggcatggacccgctgctgctgaatggtatgtatgaccagggtgttgtgcgccagcatgttagtgcacaggtgaccaccgggagtgccagcagcgtcgccctgcctgctcctggacagaagactcagatgcttgctctgcccgcaccggatggttcaatgcagactgttggtggtgacccctttgcagcgtcccttgccgtcccaccaccatcctatgtgcagatggcagatttggagaagaagcaacagctcttgtcgcaggagcagattatgtggcagcagtaccagagggacggcatgcaagggcaatcgagcctgaacaagctcgaccaggcttaccacaatggtttcgcgcccaacccgggcatgccctatgggatgcccgcggcgtacaacactgggtattactaccctacttactgaggaagcctattctttattcatccttacagttgctgtgaatttttgttctgtgttgtgatcttactctcagccctggggttgtgtccagcatcagctgttgttcccctgtctctggatcaaacctttttggtctgatatatgtaatgtaattttctttgtttggaaccaaatgcagcatccgagggtggtggctatagttgattacataatctcatgttgatctttacactgtttttactgatcctccgcatgttatcacttctcttcacacgattttttgtcacctgcttgtagatgttcctgagagagtggtactgagtgtctctcacctatgaatacatgatctacttgctgtggttagaaatggcctgtttctcagatctagatcgccatgtttgttggaaaagcttgctggttgttggcatgaagggtgtcatgttcggtggtaatcagctattggtatttttgttgtggccaatacttttcagaaatagacttgagagttcagaggccctacttcttagcgaaaaaaaataaaaagnaa

SEQ ID NO: 272674 - DNA, 506 bp, Zea mays
ctcctcggctcctcgccctttcccctcttgcccgccctgcccgtgcccctgccccgcctcctcccgtggaccacttcctccaccttcgcttccatagcaggctagcagctgagcgaggtcaactcttccgccggcggagagagagggagggagcggggaagagacgggagggtctccgcgcacctgccatcagccaccacccgatacccaggtcttgtcccgcgcagatctgctgctgcccttgagatctaaatcaaagcttccgctccggttgttgtcggttggtcggtacctgggcggcggcggcggcggcacgggaggacagcgaacatgtcgtcgagcacgatccggaaggccctgggcgcggtgaaggaccagaccagcatcagcctcgccaaggtcactagcaacatcgcgcccgatctggacgtgctcatcgtcaaggccaccagccacgacgacgagccggtcgatgagcgccacatccgggagatcctcaccttacg

SEQ ID NO: 272675 - DNA, 548 bp, Zea mays
cggctcgagcaacagcgcctcaccagccagccaccaccgcgctccatttcctttctctctctctctcggctcctccgctctcttgcccgagtcgctagcttccctgccccgcctcctcccgtccccgtggacagacagctccccccacctccgcttccatagcatccgagctaaggtcaactcctccgtcggcggagcgagagcgcggaagagacgggagggtcccggatccgagccgagctgcgctccccgcgcgaccgacacccaggtctcgtcgtcccatgcagatctgctcctcctcctgagatctaaaccgaagcttgagctccggttgttggtggttggtcggcggcggcaggggaggctgcgaagatgtcgtcgagcacgatccgcaaggccctgggcgcggtgaaggaccagaccagcatcggcctcgccaaggtcaccagcaacatcgcgcccgagctggacgtgctcatcgtcaaggccacgagccacgacgacgagcccgccgaggagcgccacatccgcgagatccttcacctcac

SEQ ID NO: 272676 - DNA, 851 bp, Zea mays
cccggacccgcgactatgtggtcgcgctcttttcgctcatgctcgtgcaccgcctccttggggatggcgacccgttcttccaccgcgagctcctccatggcacacggcggggtacccgcctgctgaacctctccgattttcgggacgaggcgcactctggatcgtggcatcactctgcctttgtgcgcacctatgcgctctaccttgaccagcgcctcgagttcttcctccatgatcgcaagcaggggttccttgacaggttccttgcttgaccacctacagcagctgcttgacaggttccttgcttgccgccccactggtggcgcaaagcaaagcaggatggtgctgcgtgcgctgtatcacattgtgagagaaagcttccagctctactctgatatctgcgaggtgctggcggtgctgctggacagattctttgacatggagtatgcggagtgcgtgaaggcttttgaggcatatgctagtgctgcaaagcagattgatgagctctctgcattctatgcatggtgtaaagatactggagttgcaaggtcatctgagtacccagaggtgcagcgtgtcactgataagttgctggagacgctagaaaagttcatgatggaccgggctttcccttcaaatggtggcaacgaggtgacttcggcatggcagaatcctgcagctgaacctgggaaggctgattgggagcttgccctcgtagagacaacaagcaacttgtccatgcagaagccagcaatgtcaagtggtatggacccgctgctgcttaagatgcatttcattgttgtcactctctttaatatctcttatcataggataaaatagaacttaaaatt

SEQ ID NO: 272677 - DNA, 628 bp, Zea mays
ggtgatcccttcgcggcgtcccttgccgtgccaccgccgtcctatgtgcagatggcagatttggagaagaagcaacagctcttgacgcaggagcaaattatgtggcagcagtaccagagagacggcatgcaagggcaatacgagcctgaacaggctcgaccgcgccggcccaacccggccatgccctacgggatgcccatggcatacaacacgaaccccatgccaatggcttacgcagggaacactgggtattactaccctacttactgaggaggcctgttctttaatcatccttacagttgctgtgaatttttgttctgtgttggtgatctcccccgccctgcggttgtgtccagcatctgctgttgttcccctgtccctggatcaaaccttttggtctgatatatgtaatgtaattttctttgtttggaaccaaatgcagcatccgagggtggtggctatagttgattacataatctcatgttgatctttacactgtttttactgatcctccgcatgttatcacttctcttcacacgattttttgtcacctgcttgtagatgttcctgaaagagtggtactgagtgtctctcacctatgaatacatgataaacttgctgtggttag

SEQ ID NO: 272678 - DNA, 650 bp, Zea mays
agtgctctcgttctctctactcctctctctctcactctaggcagtgcatccttaatccagtgcatctttgagccgccgccgccgtgaggagctccgcccatccgtcgtcatccgtcaaatcagttgatacgaagacattagaggatataatcggcccttcaacttcaatgaagtctcatacacatccagtgaagcctcgctttcaagtcagcaatcggcctaaatgcaatttgctaaataaaagttctattgattctgagcaaactatccaatcttctatagcctccaagataacaactttgattgacccgcggcaccggtatgaccacaaccttcactgctactacgactgctggctccactccgaaagcaagcaacctttcttctactggccgcacttgaagaaatcttatatcagtttgaggaaaaactccaagctgaaagagaggaagctgctaggaagcaggaagagttgcaagcacaactacaagctcaacaggccgcacttgaagaaaaccaaagtttgctgcgccaggcccaagaggaagtgaaggggatgcataccaagtttgaagagaccaatgcactgctacgagctgtcctgaaacttcagaaaacttgaggtagggatgcataccagtctggggatg

SEQ ID NO: 272679 - DNA, 1698 bp, Zea mays
  unsure (1)..(1698): unsure at all n locations
ggatgaaaaaaatgtatatgttgttatttaattatgcaaaggangtgaactgctggacgaaattttggctagaggtgggaaatattctgagggcgatgctaaagttattattcaccaaattctaagtgttgcttcattttgtcatcttcaaggtgttgttcaccgggatctgaaaccagagaattttcttttcatgtcaaaggatgagaattctgccttgaaagtcattgactttggtttgtctgactttgttaaaccagatgacagacttaatgacattgttggaagtgcatattatgttgctcctgaagttctccatcgatcttatggcacataggctgatatgtggagcattggagtaattgcatatattttgctttgtggaagccgccctttctgggcacgaactgagtcaggaatttttcgagctgtcctaaaagcagagcctagttttgatgaaattccatggcctaccctttctgctgaggcgaaagactttgtaagaaggctactcaataaggattaccgtaagcggatgactgctgcacaagccctctgccatccatggatccgtggcacacaggaagttaagattaatctagacatgataatctacaggcttatgagggcttacataagttcatcttctctacggaaatctgcattgagggctcttgcaaaggcactgacgacagatcaactcttctacctaagagagcagtttacattattaggtccagacaagagtggccatatatcattgcaaaatatgaagacggccttgatgaaaaattcctcgggtgcaatgaatgattctaggattcttgactttgttaactcaatatgcaatatccaatatggcatgattgattttgaagagttctctgctgcggccattagtgtatatcaaatggaaggcctggagacctgggaagaacatgctcaacaagcatatgaattgtttgacaaggagggcaaccgaccaattgtgattgaagaacttgcatcggaacttggacttggcccttcgatctcatttcatgttgttctcaaagattggatcagacattcagatggacacccaggaagttgagttgccccttgaccaggaggaatccacctaccgtctggacgaaaaacgatcccatccatggggcagcgccaggtgtaccgaatctttggcacagcgatcagggatctatttcgcaaatgaacggaaagatagcacaattctttttctttttgtgctagtgccagtattgtggaacgaatttataaggtttgggggttgggctgctaacatttatgttcgaatttggacgcctctctctctctcaggttggaaaggggttgctgaaggacgagaatgctcagaagcttgcgttgcagtactggctggaagcgattgacccgcggcaccggtacggccacaaccatcactgctactacgactgctagctccactccgaaagcaagcaacctttcttctactggccgcacttgaagaaatcttatatcagtttgaggaaaaactccaagctgaaagagaggaagctgctaggaaggaggaagagttgcaagcacaactacaagctcaacaggccgtacttgaagaaaaccaaagtttgctgcgccaggcccaagaggaagtgaaggggatgcataccaagtttgaagagaccaatgcactgctacgag

SEQ ID NO: 272680 - DNA, 355 bp, Zea mays
cccacgcgtccgcccacgcgtccgcccacgcgtccgcccacgcgtccggaaggggatgcataccgagtttgaagagaccaatgcactgctacgagctgtcttgaaacttcagaaagattgaggtagggatgcataccaagtctgaggatgatgcctttgcttaaggtttttctaccttgctagaacatatctgtggttagaactttgtcagaactacgtgcaatctgtttgaatgcttcaaacctttgtggtggaacctttgtatgtttgaacctctgttgtggaagaactagtgtgctggaattgtgtatgacttgtgatgagaatgttgtgtatgatggcttttctgtgtatt

SEQ ID NO: 272681 - DNA, 502 bp, Zea mays
  unsure (1)..(502): unsure at all n locations
caataatgaggtcaatactgaggcgacacagatggttccaggaactcgccctcaccaaaagatgggaaatatgtagcataataattaccatgtgctactgaaataggactaagtacaacaacatggagccggatgctgttgatttctttggggaatgtatgaatactccccgaaatggtcgtactccgcttgcaaatgagatatatgagcaaatggttgcagagagggaaagagagctagaagaaggataagctcaaaagtcaccctccaagattgttgctgatagtctcagccagatcagtcgctcatccaccttccttctaaacattggtgtctgtttgaatgcttcaaacctttgtggtggaacctttgtatgtttgaacctctattgtggaagaactagtgtgctggaattgtgtataacttgtgatgaaaatgttgtgtatgatggcttttatgtgtattaaaaaccaaaaaaaaaaaaaaaaagggcgncaacaca

SEQ ID NO: 272682 - DNA, 682 bp, Zea mays
acttgatctgtctaggcagcattgatgcatgttcatgtgttctttttcttaaactgtcagtcattatttgactatgttgtattgttgttggcatgtaccaatatttcatggcaaatcttatatcccaagtttttatatgccgcagaggactaagtacaacaacatggagccggatgctgttgatttctttggggaatgtatgaatagtccccgaaatggtcatactctgcttgcaaatgagatatatgagaaaatggttgcagagaaggaaagagagctagaagaaggagaagcacaaaagtcagcctccaagctcaacaggccacacttgaagaaaaccaaagtttgctgcgccagacccaagaggaagtgaaggggttgcataccaagtttggagagaccaatgcactgctagcgagctgtcctgaaacttcagagagattgaggtagggatgcataccaagtctgacgaggatgcctttgcttaaggttttcctacctggctagaacatatgttgtggttagaactttgtcagaactatgtgcaatatgtttgaatgcttcaaacctttgtggtgaaacctttgtatgttgaacctctgttgtggaagaactagtgtgctggaattgtgtaaaaaaaaaaaaaaaaaaattaataattaattataaaataataaataga

SEQ ID NO: 272683 - DNA, 377 bp, Zea mays
cacaaaagtcaccctccaagattgttgctgatagtctcagccagatcagccgctcatccaccttccttccaaacattggtgtccctcaacgtccaagactggtcggtccacatcgctagctgcacaagcacgcatgcaagctcagtttgaggaaaaaatccaagctgaaagagaggaagctgctaggaagctggatgagtggggatctgtttgatgcctttgctagaacatatttgtggttagaactttgtcagaactacgtgcaatctgtttgaatgcttcaaacctttgtggtggaacctttgtatgtttgaacctctattgtggaagaactagtgtgctggaatgatgtatgacttgtgatgagaatgttgtgt

SEQ ID NO: 272684 - DNA, 623 bp, Zea mays
gtcgtcgacagcctcgccaactcctccgagctcgtgatccgccgcctgcgctcgctcgcggtggaacacgccaaaaacctcgcgttccacaaggttgatatccgtgacaaagatggattggaaaaggtttttgcttcaacaagatttgatgctgttattcattttgctggactgaaagctgttggagaaagtgtacaaaagcctttgctttattatgaccataatgttgttggcacaataaatcttctggaagtaatggcagctcatggatgtaagaagttagtgttctcatcatcagctgcagtttatgggtcacctaagaactcaccctgcactgaagattttcctctcactccacataacccatatggcagaaccaaacttatggcagaggagatatgccgtgatatctaccattcagatcctgaatggaatatcattttgcttaggtactttaatccagttggggctcaccccagaggataccttggtgaagacccatgtggaacttctaacaaccttatgccctttcgtcagcaaatttgcagtggcaggaggccatcgctaacaatattttggaaataacttcgcatcaaaggatgggacaggggttcgtgattatt

SEQ ID NO: 272685 - DNA, 613 bp, Zea mays
ggcccttattttttttaatataaaaaataaaatgggataagacatctaaaaataagttggtgggtgggtgctccgctcagctcaccctatctttctcttatcttacgccgtcgtcgtcctgctccggcgacggccaggcagccgagcagataaaaagagccgaagcagcaccaccaccacgtgcctctcttctcagcttgcctgcctcactgcacccggccacaagggcaagatgcccgcctctgtcgctgtctacccggccaagatggcatgctgtctccagctccaccatcttcgccggccgtcccctgctccactccctgctcgggtcctcttcctcctctcgaccccgcgcctgcgccccgtcagagcttctcccggcccgtccccgcccaactccttcgctggctggtcctccgactccgacagcgcggatgacggcgccgacaaatctactctagggttcggccgagcaggagggcttcttggacctggacttgctgcctttttcttcctcgccggcattacctttgctgccgtctctatcagaagcagtggcacccacgcagctggaaaattgcaaaacttgcctcagagactgctgcacggaatc

SEQ ID NO: 272686 - DNA, 349 bp, Zea mays
cccacgcgtccgcccacgcgtccgcgtacgcgtgggtttagcaccaggcaaaccgggcgactaggccaacgcagtgtctctagagcactgtaggctctagttctccagaggcccgccacaaccacaagccaaggccacagccagtgccctcgccatggctcccaacctcagcaagaagacgcctgctggcctcctcggcgacgaggtggccccggtggagggactcaagccgtcgcggttcacccttaagggcaaggacctggccgtggacgggcacccggtcctgctggacgtgccggccaacatccgtctcaccccggcgtcgacgctcgtgcccgccgtggactgt

SEQ ID NO: 272687 - DNA, 500 bp, Zea mays
gaaatccatctgtatatattagacggcctccttgcattttgaggattttgtgaagagccacttccgcaagcgtggtcactacatccttaaagcttgccacgcctatttgcaaggaaatgttgttggcactctcactgacgacgcatgcaccaccaacagaagcacggagcactcgagctctgtcggcttcaagcttgcactagcaaagattttaccacggttgattacagccctgaaggagcactggagctgactgcgaccaatacgagcacctcggcagaacagaccccgttacagagagctgatcattgagtgacttgtacttggttcttttgccttttttctctgttcttttttcgggtttcagaaaagatggtgacttcatacctccaggctgttttcctataaatgtacattcaaagtttgttgtttccgtcaaacatttggaaaatatggccccaaatgatttattcgatacatcgaaccgagctaccctgtgc

SEQ ID NO: 272688 - DNA, 808 bp, Zea mays
tgttcacggagcaaaagcatctccaaaaaccctagctcccatcccctcgctgggaagtctcgtcggcggcggcggcggagatgggcaaggcgaaggggaagcagcgtcaggacaagttctaccacctcgccaaggagcaagggtaccggagtcgcgcggcgttcaagctgctccagctcgacgcgcggttccgcttcctcccgacggcgcgctcggtgcttgacctctgcgccgcgccgggagggtgggtccaggtggccgtcaaccatgctcccgtgggtgccttcggtgtcggcgtcgacctcgttcccatacgccccatccgcggggcccactcgctcaccgaggacatcaccgccaccaagtgccgtgccgcggtgcggaggctcatggactccaacggcgtctccgctttcgacgtcgtgctccacgacgggtcgcccaacgtcggtggtgcctgggcgcaggacgctacatcgcagtcggcgctcgtcatagacgcactgcgcctcgctaccatgttcctcgctcccaagggcgccttcatcacgaaggtttttaggtctcaagattacaacgctattatgtactgtcttaaacagttgtttgagaaggtcgaggcgactaaacctacggcaagtcggtctacatctgctgaaatttatatcatttgcctgaaatacaaggctcctgcaaagattcaaccagaacttctcgatataaagcacttgttcagtgtggttccagaacagaccatatctagggatggtatggatggtaggaaacaaagacaccgtgatgggtatga

SEQ ID NO: 272689 - DNA, 219 bp, Zea mays
tttatttcgagcggccgcccttttttttttttttgggtttttttggaggagatagcattcccacagtagaattgtacaagacattacaaactaaacttcaggcatttgctagataatgttttgtacaattctactgtgggaatgctaattattgcggcacagttgtattttcactaagaaaccacagtttgaattatcgaattactatttgtgacgtgt

SEQ ID NO: 272690 - DNA, 566 bp, Zea mays
tcggtctcctttaccccactggctggcgagcagcaaactccaggtgcagagcggacaagttcctcacgagcgcagggaacaacagatgggatccgtactttaaggattgtattggagctattgatggtacacatgtaagagccactgttcctagagatatggagcatgcctttcgtggtaggaagtcctatgcgactcaaaatgtaatggcggctgtagatttagatctacgcttcacttatgtgttggctggttgggagggaacaactcatgatgctaatgtattacgagatgctttagaacgtgtgaatggccttcgcgttccacaaggtaaattctaccttgctggtgcgggatatggagcaaaaccgggattcttgcctcctttccgtggtgtgagataccatttaaacgaatggggcaataatcccgtacacaatgagaaagagttggttaatctaaggcactcatctcttcgtgtcacagttgagcatgccattcgggtcattgaagagaatattcaagattttagatgatttttctcctttcttgccttttccaacaca

SEQ ID NO: 272691 - DNA, 467 bp, Zea mays
gctacacaaggggagagggttcaagcattgcttagttggagggaccctcgtgccacagcagtctttgtcctgttctgtctggtagcagcaattgtcttctatgttacaccgcttcaagttattgctgcattaggagggttctatgtgatgaggcacccaaggttcagacataggttgccctcagtaccagtaaacttcttcagacggttgccagcaaggactgactctatgctataaataagcccctacctggtggtcttatcgttgtaatccctagagatgctttctctgttactgtagtttgctcgccttcgttgctatttgtaactgtgtctgttcagaacttgagagcctgttaattgtatcagttgttgaattctgggaataattgcgagacatggttctgtgttgatcctttctaaaatatcaagctatcaatgtttagtagcttgcttttttggctgtcc

SEQ ID NO: 272692 - DNA, 945 bp, Zea mays
agcctacccagtcaactaaacgaacccgcccggagcagcaaagcataggcgctcgagcgctccctcctgagctcctccgcctcacggtcacgcctcgtgtccccccaccccctcctcgtcctccaccggccgcctcacgccgtcacctccgctcggcgagtctcggctccgaccccagccgccacgtgcgacctcccctactcctgactcctgagagatctgcggggctcggcatggggtgaccagatcgggccgctgctcggtgctttccagctgaattctgcccgcagctcgtgtcggaggcagcggagatggcggaggccggcgtggcacgcggctcagggagtgctggcgatgctttgttcagggaactctggcatgcttgtgctgggccgttggtcacagtgcctcgccaaggcgagctggtttattacttcccgcagggtcatatggaacagcttgaagcgtctacagatcaacaacttgatcagcacttgcctttgtttaatctaccgcacaagatcctctgcaaggtggtcaatgtagaacttagagctgaaactgattctgatgaagtttatgctcaaattatgctgcaaccacaaacagagcaaagtgagcccaccagcccagatcctgaaccacctgagcctgaaagatgcaacattcattccttctgcaagaccttgactgcttcagatacaagtacccatggtggattctctgtcctcaggaggcatgctgaagaatgtttgccccaactggacatgactcagaatccaccgtggcaagaactagtggctaaagatctccatggaaatgaatggcatttccgtcacatctttcgagggcaaccaaggaggcatctacttacgacaggctggagtgtttttgttagctcaaaaagattggttgcgggtgacgcgtctatcttcttgagaggtg

SEQ ID NO: 272693 - DNA, 859 bp, Zea mays
cgcgcggctttacgtcggaaccgtttcgacggcggcaaaaaggagttctggctggacaagggcggtggaggtctatgtatgtcaatttcttcaagggcgctttcaataacaggcattgatgataggaggtattggaacttcattcccagtgatgaatcaagattccgcacggttgcgtacctctcgcaaatctggtggtttgaagtgagaggggaggttgaattcttcttcccagaaggcacgtacagcctattctaccgcattcatctcggccgaccattcaagcgtcttggccggcgagtctacagctcggagcacgtccacggctgggacatgaagccggtgcgtttccagatgtcgacctccgacggacagcatgttcagtccaagtgctacttgagcgatcccggtatctggatcaaccaccatgtcggggacttcgtcgtgaaggactcgagcaggccagtgaacatcaggttcgcgatgattcagatagactgcacacacacgaaaggcggcctctgcgtggattcggtcgtggtgaaacctcagcacctctcgcagaaaaaagcgccctggacttacgtgtagactcgtcgaacaagttgctgctgctgtctagggaggagggatatgatccatagtttccttttggattgttctactaccagatgtgcgttttgtttacagaagtgcggttttttacatttgcacttatacgcgtattttgcagtcatgtaatgtaattgaaggggtaagtgatttttttagttcctcttgtcccccctaggaacatgttggacctctgtaaattgttcgtttgaactttgaaatgtacatcggctgtgttttgccgatc

SEQ ID NO: 272694 - DNA, 544 bp, Zea mays
ccaagtgctacttgagcgatcccggtatctggatcaaccaccatgtcggggacttcgtcgtgaaggactcgagcaggccagtgaacatcaggttcgcgatgattcagatagactgcacgcacacgaaaggcggcctctgcgtggattcggtcgtggtgaaaccgcagcacctcgcgcagaaaaaagcgccctggacttacgtctagggaggagggatatgatccatagtttccttttggattgttctactaccagatgtgcgttttgtttacagaagtgcggttttttacatttgcacttatacgcgtattttgcagtcatgtaatgtaattgaaggggtaagtgatttttttagttcctcttgtcccccctaggaacatgttggacctctgtaaattgttcgtttgaactttgaaatgtacatcggctgtgttctgccaaaaaaaataaaaaatataaataatataattataatataatttataaataatttaatttaatattatatttttttttattttatatttttatattttatgatatt

SEQ ID NO: 272695 - DNA, 525 bp, Zea mays
tcggattaacagtggccacgacggcggcggcggcggcggcgacgccactgagggaggccctggaggccctcgtggcgcacatccaggggctctccggcagccccgaggagctggcgcacctccacagcctcctcaagcaggcggacggcgaacccctgcgcgcccacgccgccgcgctggtccccttccttgcgcacctcagtccagagacccactcactcggctacatctacctcctggatgcgtgcgcggcatccgcttccaatctgagcgacttcggcggcggggacttcctggtcaccatcgccggcttcctcaccgcgtgctcggcggaccagatacgcctggctcctgacaaattcctgcatgtgtgtaaggtgctcaaggatcaggttatgcagctcaacatgcccatcagagggatcgccccgttgcgggcggcggtccgtaagatccagtcctcgcccgagcagctgaccccggtccacgcggactaccttctcctgtgcttgctggcgaagcaat

SEQ ID NO: 272696 - DNA, 825 bp, Zea mays
aaggcatataagcatacagaagcaagggcaataaatacatcaatgaccaaaggaacttacactatggatgagagttcatccggcatggatggtgcttggaatgaacacggttcatgtaatgcttcagccatggaatgcagtgatgattccggttcggagtgtgaaatcttccgagtcaagcgcaggtccacctcatttgacaaacctacttctgaagctaagacatcaaccttgtctgaacagcaggttctgaggcggctgaagaaggtacgtcctggagtacagcaggtcagtaagcgtccagaagaatctggtaatggttcagttcgctctacccatatgagcccgagctcaaatcatgcctcttcggatgatgaaatagacatggctcccctattcttgaggataaagcggcggcagttggaaaaccaagatgttacaagtcgtggcgcgagaccgcagtcatacccgccttccagtggtggttctcgagaagagtttgtggaaagaactagagatgctgcagtagaactccgtccaaaacgagtgaaaatccggctaccttctaatgccagtaggcagattgagcagcagcgcagttcggggcagcgatttgctagggaggacaggttgccgcttggtcattttagggaatcacaggtactaacctctactgggcagacgaattctttgtttaagtgcattgttaactacaaaacgaggtggcagaagagagtgggagggatcaggttgtgattgtggcagagctgatttggttagcacaggtgcagactgactttagaattggcagcaaagggaagtggc

SEQ ID NO: 272697 - DNA, 464 bp, Zea mays
cgggctcgtgggctcaccaccaccgcgccttctcttctccccccaccctcggtctgaaacccaagcttccgcttctctcatggccgacgccaccgccgccctctcagctcggagcaaggtgcacgctttcctggaggctgcgcgcgccggcgacctccaatccctcaagaacctcgtcgcggcgctcgacgaggacggcacgggcgccgcctccgtcgccgccgccgtgcgcgacgccaacaagcgcaccgccctccacttcgcggcgatcggatgtcgcaccgacgtctgtgaattcctcatcggcgagctcggcctccctgtcgacccaaaggacgatgatggcgaaactccgctcattcatgcgacacgcctgggccatctggacactgtcaagtatcttttctaccatggtgctgatcctcggtggccacctatctaggtgccacagtgttacaccatgc

SEQ ID NO: 272698 - DNA, 723 bp, Zea mays
tctagcaaatcaatattgtaaaagttgcttgacatcttgcaagacatggagaagttgaaggcatcagtgatgatagcaagtgctatcagtgacttaataaagcacttgcgcaaatgtatgcattttgctattgaagcatctaatgcaaatgctgattgtgacaagtggtacagtgcactttatgtggccttggaggagtgcctagtgcagttgacagaaaaggttggggatgttggtcctattcttgatatggttggggtaatgcttgagaatctctctcatactgctaccatcgcaagaacaacaatttcatctgtttatcgcacatcacaaatagcagcatctgtctacaagtcatcataccatcagaaggcatttcctgaagctttatttcaccagcttctcttagcaatgttgcactcagacaataagacaaggattggttcacatcgtgttctatctaccattgtagcaccttcaatggcgtgtccatggtcggacatcagctttcctatcccaatgaagggtgatgattcacataacttgcatttgttggttctctcagctttctcttctgaggccataatcaatgaaacacggaccaaaaacaagatccaagaatccttgcaagaaaacaacaaatcagaagctatagtggatcctgagaatggatacacacagacatggcccccctgaatacttccttttatccggacgcgtggg

SEQ ID NO: 272699 - DNA, 514 bp, Zea mays
ccctcgcgtccgcccacgcgtccgattccccttgccatccctatcccttccgcatcgtccccgaacgacgcagacggacgcaaggcacggcgccgacatctcccccgaggcccgagggcccagacatgaaggccctgggcgcgcacgccgccgacctgctccgaggcccgcacctactccgcgccgccatcttcgctttcgccgttgcgctcgccttcttcgttggctaccactggcccaacgcctccccgcgccttgtcttcttctcgtccgacgcctcctcgtcgtctcccaggccgtcctcccgctctccttccgtcgtgctctcccctaactctaacgtctccttcgacccatccctgatccctatccccagcaccccgcctgcttcttctactcccaatgcctggtccccgccctcactaccaccgacgacatcggcgccgtcgcctaccctcccccctactacaccaccagcgcgcctaggcatcgtcggcgaggacggcgctatgca

SEQ ID NO: 272700 - DNA, 434 bp, Zea mays
tcggattgcacaagtacaccttggctacgaccctgggccgccgcctcagcctgaacgtcaactcatctcgccggtggtcgatctcctccatctgctcgccgcggcgcaacccggagaggagaccgcgctcggtcgagcaccacctggggctagcgtcctcgcgacgagctccggcgcggcgtccgccctctgcagccccggtgtccccgcgaccggcttccgtgcggccggcacacagctccacaggccaacgggacctgattcatggcgaaccaggcgtacgccacgagcagtctcgtggtcgggtacgcgctgtgctccagcttgctggctatcatcaacaagtatgccatcaccaagttcagctaccccggactgttgaccgccctgcagtacctgaccttggtggttggagtgtgggtgctcgggaagct

SEQ ID NO: 272701 - DNA, 850 bp, Zea mays
  unsure (1)..(850): unsure at all n locations
cccattctaatcgcccacgcgtccggcaatctgcaccgggggcagttgccgcgtccacttctgcacaggcgagtgcggctgattcttccaaggcagctacaccgggagctttatttgaggataaaccccaatctgcaaatgatacatggagaaaactccactctgatcctctactcctaataaggcagcgggagcaggatgcgatttcaaggattaaaaacaatccaatcaagatggccgagataaagaaatctgttgaagctgagaaaaagcaaaaagaagagaagaaagcgaagaaaaagcacaagaagcatcaccaccataagtcaaagagtaagaggcatcactcagatgagaattctgattcagatgaaataagtgatggcaaagatgagagaaggaagaggtctcattcttctcttcataagaaagaagagaacatgtccaggcataagaagcagcacagagaagattcatcagattcagacgatgaaccgcagagaagaaagcaggatgtatcagaaaatgatgaaccgaggagaagactacatgacgacaatgaaccgaggagaagatggcaggatgacgttgaaccgaggagaagactacatgacgacgatgaacccagaagatggcacgatgacgttgaaccgaggagaagaagacacgatgatggtgaatcaaggagaagatggcaggacgacgatgaactaaggggaagacggcacgttgatgagaaaccaacgganagaagctacgttaatcgtccaagatatgaccgctctgacgctgatgataggaggagacaccattcagctcgagacactaagcccanaagagtggatgatgg

SEQ ID NO: 272702 - DNA, 509 bp, Zea mays
gccgggggtcgccggtttccgcgactccaaatccgcgtgcgccgcccgccctctaaatgtgcctcgccggcagccgggcgggggccaccacgtcacacccagcctctcctctccgcccgcggcccgcccgcttcttcttcctcgccatcccttcttctagcgcggaggcgcagatccatcgggcttcgggggctcggttccatccctctgccagctgggattggattggagcatcttcccagcaccacccacgcggaagccatgaccattcagttgctccgctgacgactcctctgacgacagcacggctgcgctgacctgcaggcctctcgcccacgctgccctgacagggtaaagtcagggggtggcgtgtgtgggtggcggggcgggttcaaccgtgtgataaaatcacccttgttatgtggggactcctttgtgttgatgttagtggcaactgcacacatggaaccttgcgtcgatagtgcgatacatgctatattccctagaga

SEQ ID NO: 272703 - DNA, 942 bp, Zea mays
ctttaattttttggaacagcaaatcctctagtattgatcgctgagattgacaagcttgggaagggtcattctggggatccagctagtgcattgttggaactccttgatcctgagcagaatgttaatttcttagatcactaccttgatgttcctattgacctatccaaggttctattcgtttgcacagcaaatgtaatagagacgataccaaatccgttattggataggatggagatcattgctatagctgggtatataactgatgagaagatgcatattgctcgggactatctagagaagaatacaagacaggcctgtggcattaagcctgagcaggttgaaggtacagatgctgcccttcttgctcttattgaaaattattgtcgagaagctggagtgaggaaccttcaaaagcatattgagaaaatttaccgtaagattgctctccagcttgttcgccaaggggtatcgaatgagccagaccaggagtctctcggtgtcactgtaaatgaggaatctaatagtggtgatagcgtcacagcaaaagacgagattgtgaaggatcctgctgtagaagatgcttcagtcgccaacaatgttacaaatcctgcttctgaggaagctaatgaagtaaatttgacaactgaagcaccaaaagaagacagcacatctaagggcaacaagaaaacaaatggagtagcagaagatgcagcagacaaggcaactgagaaggttgtggtagattcatcaaaccttggtgattttgttgggaaacctgtgttccaggctgagcgtatatatgagcagactcctgttggagtggtcatgggtttagcttggactgctatgggtggttctactttgtacatcgaaacaacaaaggtggaggaaagggaagggaaaggtgaccttgtgctgacaggacagcttggagatgtaatg

SEQ ID NO: 272704 - DNA, 426 bp, Zea mays
tctgtcgcttttatatgttttttgtttgatcgattggtgatgattgcaattgaccgtatctcttaatatatatagaggtacttaatatatttagagggaatgtctagatccatttctaggcatctcccgacagcaaccatggatttagaggaataaactcgcacgaaaaagaaattaagggtcaagccttaagggtcacaaatgatgcttaacacacatacaaacacacatctcatacaaaagtaaccatcagagacatcagttcttcaacacgctcccaaccggcaccatccgcctcttgtagctcaccaccaccttccctctcgcctccggcgaaagcttcatccaatcggtccgagggaacggcgacaccagcttgagctcgaagttcctgagcaggtggctccatatcaccttcacctgcat

SEQ ID NO: 272705 - DNA, 1479 bp, Zea mays
cagtcgtatacatgatactcaagtttgtggtggactttgttgatggtcaagctgtattcctggatgctaaagagacatcagctttggtgagcttttgcttgcaactactccagatatactcctctcataacattgggaaggtaatgctctctctttcttcaagtctgcgtaatgagtcacaagcagaaaaatataaggatctgcgagctttgcttcgtcttctgacaaatatatgttcgaaggatttggttggctttctgtctgattgtggcggtgaaggttcacctgatatcgcagaggttatctacattggtcttgatattgtgacccccttgatatctttggatcttctgaaataccctaaacttagtcgtgatcattttgtgcttatatcgcacttgttggaactgtacccggaaaaggttgctcacttaaatagtgatgcttttacaaggattattggaagtcttgacttcgggctccgtaatcaggatagcgatgttgttgagaggtgcctggcagcagtaaatgctcttgcttcatacaatttcaaagaaagattaggagggagaggaagactgaactcgcagctcatggaatctgaaggatctaatggcaaactgcaggaaagcatatcaagtcacttcttgagacttctgttgcaaatacttctttttgaagatttcagatcggagttagcaggttatgctgccgatgctttgcttcctttattgggctgtgaacaggagctatatcagaggttggtccatgagttgctggataaacagcagaatccgaccgtaaaatcaaggctggcaactgcgttccataaccttacaagttcaaacaatctctcaagctcactcgaccggccaaacaggcagagattcaggaaaaacctccttagcttcatggcggatgtatcgggcttcatgcagatcaagtagatgcgatggcagggaacaggtgatgtttgaccggtcaattaaaccccgaggaagcactgcaccactgtggtaggggtgcatgtgggcaccacatgtctgtggattgatgagagcgaagactgccacgacaagtctagtagatcttgaagagctagtgtcaccagaaaagacagggagatgagctagtcttagggttggcattcatagcgcatttgctggacaagatggaggcgtccctggccacgagatcgtcgtgtaaatgcgtttgttagacgcacagaaacggtggggattttgtggtggcgactcgttttgttcaattcccacaggcagaaggtagagatgttaagttgatgtaaataccgtttgatttaaacatgccttattcgtaggagaaagcgacacggcttgctgtaacttagggtttattactctttctcgtggcataggatccccaaagaagtctttgctggggtatttgcagccaaacgatgaccagtatgattgcgagaggttttcaatcttttgtacc

SEQ ID NO: 272706 - DNA, 809 bp, Zea mays
  unsure (1)..(809): unsure at all n locations
gttcttgcacaaggtcagagctggaggctgaaagtaagcaaacagacaacattttggagtataagcaatcaactcaaaggcacttgtctattcctagccacaagaatgttgagctaaatggacagaccaaaatacaaagagctgagggtaataacttgattccagcaagagaagacgatttatcgccaaagaaaagaacgtgtttgaatgagaataattctgagagagcttcaagagatatggagctagtccacattatggaaaatcagcagaagtataacacacagtgggaggtggatactatgagaacaacatctaggggaaatgatgagaagggctccatcccagcacatcagttggagctttctcttagaagaactgactacggaaaattagagaaccacgagaaaaatgatagaagaacactgaaccattcaacttcctctgcgttttccttgtataattgcagggctgtgccaaccttaggaaatgctggtgatggtcaattatgcagcacctcagaaacactagtggatgttgaaaatagaaatggagattcggcagctccctctgaagacacgactgaaacaaatcgtcctcctatcagagttgtaccatttcctgtccctgttcaatgcttcacatttgatgggcagccgttctggaatggtacaccggtggcatctccattctacccacagtcagctccccccatttggaatagcaaaacaccaacgtggcaagaatcaaccncacaggcaacttcactggcgcanaaatcgcaacagaatgaacccagttgaatggat

SEQ ID NO: 272707 - DNA, 1088 bp, Zea mays
  unsure (1)..(1088): unsure at all n locations
gctttaccgttttcggctcgagagacgaaacatggccttagcttgccgtacatttttcttttcttctttacgcaaatggtaaaacgcttgggaaacacaattcagccctggcctttttccagttgagttcacctcttggctcttgcctcctgcatctctagagaggcacatcccagctccaagcttcgcgccttgttggatcgtggcgtccaagcaacggtggtagcggagcgcgaggcagtggccgcagaaggaagcgcgaagcatccatggaccaacgccaggtggttagcgagaattatgccaatcccataacatgcttcttccatgtgctattcaaggcgggggcgctagccttctacatcctattctcgctctttgtgaagagcttcgtcatcatcttcgtgatcacggtgctcctcgcagcgcttgacttctgggtggtgaagaacgtcagtggcaggatactagtcgggctgcggtggtggaatgagatcgatgatgacggaaacagtgtgtggaagtttgaatgccttgatggggagtctctcgctcggatgaacaagaaggattcatggctgttctggtggactctttacttgactgctgctgcatggatcgttcttggtatattttcactcatcaggcttgaggctgattaccttcttgttgttggagtttgcttgagtctaagcattgcaaacattgttggattcaccaagtgcaacaaaagatgccaatgaagtacatccaggactttcgctcaaaatgccctcgcttcccgtgtcacatcatcgctgcaatcagcattcggtgtcatctgaagtcccccccggaggccctggtattagtatattacccccagcggtgtacaatttgtcaaaaggatgagcttgcattctacgtttactgcctttcctctgattgctaggatgtaattctaccagcgtagacagcaagcatattgtactgtcccgttatcattcttttttccctcatacaacaaataggtcgattttgatgtccaaaaaaaaaaaaaaaaaaaaaaaacccaaaaaaaaaaaaaaaaaaaaaaaataaannaaaaa

SEQ ID NO: 272708 - DNA, 580 bp, Zea mays
tcttctgagtcgagacccaggcagccaggcttgcagttccagccccacctggccggtaccctcctcaaaccctacaccacgccccccggcccccagcccccggccttcgcccaacccgatagcgtagcgccggcgcagaaccggaccctgccgtgcggttgtccaccccgctcggcgccgcccgccgccgccgccgcctttgatgtctcctacctgcgacctcggcttcctctgcccccggtcgcagaagagctcccaagaggtcccccgagccaccccttccggcgcccagcgattggcttccccaccgcagccgagatgagcagcggcggcgagaagatgttgctgtttgggtcctttacggaggacgagactaagttgtttcagggtcagcccctcaaaagtccaaataaaagcgtcaacaaagaatgtgaacggacggagatccagtttggcaccctgaacttttcagtgctgagtttagagaaggtatctacttcaagtgttgttcttcctgcaaaatcagcaaacagcgagaccagtgccatcacgaaggagaatgcatgcaataatgaaaaga

SEQ ID NO: 272709 - DNA, 790 bp, Zea mays
ttttcaatgttaaaggtccctggttatgccaatcctgtacagtttggtgtattgatatcttttgcctatccgctcgaggaaggacttggtgagattgttgtagcaaccaccagaatagaaacaatgctgggtgatacagcaatagccgttcaccctgaggatgaaaggtataaacatctgcatggaagatacgcagtccaccccttcaatggccgaagactcaaaataatctgtgatgctgagttagttgatcccacttttggtactggggctgtcaagattacccctgcccatgatccaaatgactttgaagttggaaagcggcataaccttgaattcatcaatatcttcacagacgatggaaaaataaatagcaatggaggtgcaaaatttgatggaatgccaaggttcaccgctcgagttgctgttattgaggcgctgaaggaaaaggggttgtataaggacacaaagaagaatgaaatgagcttgggtgtttgttcaagaactaatgatgtagtggaacctatgataaaaccacagtggtttgttaattgcaaccacatggccaaggcgggccttgacgctgtaaggtcgaaaaagattgaaattattccccagcagtatgagcaagactggtacagatggcttgaaaatatacgtgattggtgtgtctcaaggcaactttggtggggacatcgtgtacctgcatggtatgtgacactagaggatgacctggataaaaaccttggttctaacaatgaccgctggatagtcgcaagaaatgaaagcg

SEQ ID NO: 272710 - DNA, 795 bp, Zea mays
tcttggacgcgtgggtttttttactcccgaaaccaggcaggagggaggaggcgacgacatcgccatcacaccagatcactgaagaagagagaggcgcgtcgagtctccccaaagaacgagctagtacaaagtctcctcttcctttgactccgaatcccctagaccattgatggttgcgggggcaccggaaggagccactgacgatgggcctctgctcctcctccaccgccgcccgggccgcctccgaccccggcgccgcagccgcgggtgatgccgccgcggcaaagaaggggcgcgggatcgtcgcgtgcgggaagcggaccgacttcggatacgacaaggatttcgaggtgcgctactcgcttgggaagcttttgggccacggccagttcggctacacctttgccgccgtcgatcgcgcctccaccgagcgcgtcgccgtcaagcgcatcgacaagaataagatggtccttcctgttgctgttgacgacgtaaagagagaagtttgcatcttaaaggcattacaagggcacgaaaatgttgtacacttttacaatgcattcgaagatgacaactatgtttatatagtcatggaattatgtgagggtggcgagctacttgatcggatattagccaagaaagatagtcgttacagcgagaaagatgctgcagtagttgtccgacagatgctcaaggttgcagctgagtgccacctgcatggtttggttcatcgggacatgaaacctgagaacttcctattcaaatcaaaaaaggaggactcgccccttaaggcta

SEQ ID NO: 272711 - DNA, 856 bp, Zea mays
tataagattgatgtgcaaaaagctgtggatttcgttgttagctgtaagaacttggatggcggatttggagctatgccaggaggggagtctcatgctggacaaatattttgttgtgtcggcgcgctcgcaatcaccgggtccctgcatcacattgatagagacctcctcggatggtggctctgtgagcgccagtgtaaagacggaggacttaatgggcggcctgagaaactagctgatgtttgctactcgtggtgggtgctatcgagcctagtcatgattgacagagtgcattggattgacaaggaaaagctaacgaaattcatactgaactgtcaggacaaagagaacggcggcatttcagatagaccagataatgcagtcgatatctatcacacgtactttggaattgcagggctttcattaatggagtaccccggggtgaagcctttggatcctgcctatgcactaccattgcacgttgtcaatcggattttcttgaaaaaatagaacattccattcgatctgcggcgcagagatatgctgagatggcgctgtcagatgtggacgctacttcacagaaccacgattcgacggagaaatagctgagggggaatcaattacaggaacatgttgggataccataatcttggacttgtattctcgcattggctgtggccgcttagtcgatgtttttttgtcatttggcacttgccctgttgaatgcttggtgcatgctgtgttttgctagttgatctgattctcttgtttaagtcgtaacattgtgtgtcctgatgacgacgacattagtcaggagctatctataaacagtatgtctttttttgtttgctttttttac

SEQ ID NO: 272712 - DNA, 463 bp, Zea mays
cccaccagtttcagtttggcacctccgaagcttccgtccgaatctctgctgcctccttcctcggccaggcttgcgggcgatggcggcggagcagaccgccgagcagttccggggccaggcgcggctgccccacttcgcgtccccgcggcgctacgacctgcgcctcacgcccgacctccccgcctgcgtcttcactggctcggtggcggtttccatcggcgtggccgcgcccacccgcttcctcgtactcaacgcagccgagctcgacgtcgcgaccgggggcgtcagcttcgcgcctcagggctccgaccaggtgctacaacctttggaggttaccaacgtgccagaagatgagatcctgattattcgcttcaatgaggtgctttctatcggggagggaactttgacgattgcattcaaggggactttgaatgataagatgcatggattctacagaagtgtg

SEQ ID NO: 272713 - DNA, 362 bp, Zea mays
gcaccgcagaaccaaaccctagctgcgcttcctcctccagatcccggcgccccggccccatggccgccctcgtttctagctccagcttctccgcccgccgtccctccgctctctagctccggatcgcacgcgcacgtaaagacatggagcccgcagccgaggacgccgcagccgctgcgccggactcgtgggagacggccgacatagacgggcccatgagtcggctcatcctctccgcgcgacgcgtgtcctcttcgccggacttcgctgacgaccaggacccgtcccagccgccgcccacacttgagccgcagggcgcgccttcggcttcccttagatgcgcgcgaggatgtggttgccca

SEQ ID NO: 272714 - DNA, 361 bp, Zea mays
ccgcccacctcgtccctcacttgccctctccctgccaggcttgccggaaccctagcctcatcgcccctcccctcccggcccgatctccctatcgccggattcgtgctgcgggatggactccgacgtggagatgaacgccgccagcgacgaggaggtgatggacgatgaggattactacgactactgctacagcgacgtgggtgacgacggcgacggcgggagcgaggaggagctggtgcccgtggactacgacgagggccttgaggccgagggtaccgacgaggtggtgtccagacgcgagcagacatttgtggttctaaatgaagaagttatattctgagcgtcaagaggaagatgtaag

SEQ ID NO: 272715 - DNA, 289 bp, Zea mays
ctcctatccctcccccagagccccgacccggccggccggcggccggcaccctagccttatcgcccctccctttcccgcctcgcctccgcgcgatctcccgatcgccggattcgtgccgcggctggatcgactccgacgtggagatgaacaccgccagcgttgaggaggtgatggacaacgatgactactacgactactgctacagcgacgtgggcgacgacggtgggagcaacagcgggagcgaggagctggtggccggggactacgacgagggcctcgaggccgaggg

SEQ ID NO: 272716 - DNA, 460 bp, Zea mays
tgtccacgcgtccgcccacgcgtccggatgcccatcatcggccgcgccctccccggagcaccgaactggtactccttgctcgcgggggaaaagttctcatctttctccccgagctcaccttggcatccccgacggtctgggtcgccacagccaacttcttcactagctggccgacctccaccccttccttcgccttggccagcgtgaggcgcacgaagctgtcaagggtcgtaggggatgtgagcggcacggcgttgacccagttgacagcggtgatgtcgagcgcgttggggaggacatgcccctgcacggcggtcacttgcgtccggtgcgctgtgtaggacgccaggctctccctggtggcatggcagatgtggaggaggtgcgtggggttggcgaggtggtgcgaggccattgtggtaacgcacgcacggtgttcggtggattgccaccacggatg

SEQ ID NO: 272717 - DNA, 614 bp, Zea mays
gctcggacccgcaaaaagagctccgtcagttcctctacctcctctgtaggagcacacttgtttcggaaaggaacgcagattcacgccacgccgccgcctcaattatatggcgccggcgttctcggcacaggtccccgcgctccgacggggagcactgcgcgtgcggtgggtcacggctgcgctgttctcatcggggattctcgccggcaacaagccgattctggtgcgtgacttcgtgaggtcagcgttgtacgaccccaaccatggctacttctccaagcgggcgggaccggtgggcgttcttgacgccagcatccgcttcaaccagctcgaggggaggagtgcatatatacagcaccttgataagctgtataagaagcatgatatcgcttggtttactcccgtggagctctttaagccatggtatgcctacacaatagcagcatcgattctgcgtacagcaaatctttcagtcccattgaagatatacgagattggtggtggctctggaacatgcgcaaagtgcatacttgattacatgatgctgaatgcgccaccaaaagtctacaatgatatgaaatacattagagattagctcctctcttgctgagaag

SEQ ID NO: 272718 - DNA, 1570 bp, Zea mays
atcagaacagacaaaggtggcaagtgctgtaagtttaattgattttagtgcagatcctgaacctgcgtccacagcaccaccacaacccacccctatgccacaacaacctccatttaacgcagcagcaccacagcctattcttgaacaagggaaaagtgttccttctgtcagtggtggtgactgggcatcttttgattcttttggccaacaacaaacaccacaaacaagcagcagtgtaaatcctcttgagtctgcacttgcacagctgtcattctctgaagcaccctctgcaccaaatgtgtcagcttatcctgtttctcttgatcccactttgaaagcaaatgatggaggacattcatctgtgctagaccagtcacattccttgtttgatgcgccctttggaatctcaggcaaccaggcctcaacagtaatgtccggccaaggatcatcagttcaacaatctcctctagctgccccaacagctggacctccatctcaagctactgcaaatccacaaggaaccagtggtattcaaggagcagcctcttctactgacagtaaattcagtagcaggaaagaacttccagcggatatctttactgcactatatccaccatcaactccaatgatgcctggttggcagagagccccccattttggaatgggatacgccatgcaatatccacctggagtgttccagggaatgcaagcatatcctcagcctacatatcagcaacctgtatattcccaacctgcatattcccacccccaacctgtgaaagcttcaaacccttttgatcttgggaatgggccagctccaactcaagctcacatgcccccatctggaccaccaggagtattagcaggcccagctccccaaaccttaattagcaactctagttttggtgttccttcacagcagcctcaccagctctatcaatcagccgcacatccaagccatttcataatgcagcaagttccgaacagcatgcccatgcccgagcaacaacctaatagcatgcttgtaacgcaacaaggtttgggatacctccagccaaacaccccaccttcatacggctccgttgggggtagtaatccattcgggtaaaagaagtgtgggaatacctgctctttcatctctagactaagggtctgcagcactcagcgggacagacatccatcgaagcccccgagagaatgtgtttcatacaaccaggtggtgtattctgtcgggtgtgatatgttgtacaacttgtttccaagggcttcatcatcgaatgtaactctgttttagagggcctaagctgctttcagcctcattccttgtatattgtgtctggcattctgcttgaattgcatagtatgtatattttgtgttcctttgttgtcttggacagtatcagctcagttttagtacgagtcagcttctagttcagttgactattcattttaacgtggatggtaagtactttataatagaccagatgtatgatcgtgatcaaccaattttgtggtttcttttaaaaaaaaaaaaggaaatactaaaaaaaaaaaaaagggcggcctctct

SEQ ID NO: 272719 - DNA, 1038 bp, Zea mays
ccacgcgtccgttgtacggtgtggcagataaggggactgcccttctatctctcctcacggccaacaacaaacactacaaacccgcagcagtgtaaattcctcttgagtctgcacttgcacagctgtcattctctgaagcaccctctgcaccaaatgtgtcagcttatcctgtttctcttgatcccactttgaaagcaaatgatggaggacattcatctgtgctagaccagtcacattccttgtttgatgcgccctttggaatctcaggcaaccaggcctcaacagtaatgtccggccaaggatcatcagttcaacaatctcctctagctgccccaacagctggacctccatctcaagctactgcaaatccacaaggaaccagtggtattcaaggagcagcctcttctactgacagtaaattctgtagcaggaaagaactttcagcggatatctttactgcactatatccaccatcaactcaaatgatgcctggctggcagagagctccccattttggaatgggatacgccatgcaatatccacctggagtgggattgcaatcatatcttcacggagcatttcctcagcctacatatcaataaacctgtatattcacaacatgcatattcccacccccaacctgtgaaagcttcaaacccttttgatcttgggaatgagtcagctcctactcaagctcacatgcccccatctgggccacctggagcatcagcaggcccagctccccaaaccttaattggcaactctagttttggtgttcctccacagcagcctcaccagctctatcaatcagccgcacatccaagccatttcatgatgcagcaagttccgaacagcatgcccatgcccgagcaacaacctaatagcatgcttgtaacgcaacaaggtttgggataccttcagccaaacaccccacctttatactggttcaccggaggatccaaaaacgatcagtagaccaagatatgcggtaatgaacaccgtaaaggcccaattactatagaaatatacaaagatgct

SEQ ID NO: 272720 - DNA, 666 bp, Zea mays
cccagccgcgctccctcttcctcttccccttctctctcggcgacgactgggtggccgtagctgcctccatacgcctggtgccctggtcttcttcgggccattcgccggccgcgagcaccaccaagtacgcccacctcatgaagggagagcttcccaggtagagaaacagtttctccgtactctagcagatggcaaggataaagcctaagcaattgctaatccaaagcaaaacaaagaaggctccatctcgaatcagctactctactatcatcacatggaacttgattgtcatattggttgtgctatctctctatgctacctacagccattggcatcaaaggtctacccaagacttcgaaatggagcttcatgaagctgagcttgctgtgagaccggaggatccaaaaatgataagtagaccaagatatgcggtaatgaacaccgcaaaaggcccaattactatagaaatatacaaagatgcttctgctgacgttgtggatagatttatcaacttgtgcaagagtaatcatttcaaaggaatgccatttcgtcatatcataaaaaattttgtaattcaaggaggtgattttgatttcgatggagcttcccaagaatggataaccaaagctagagctagtggaaaaaatgatctcagtccaaaacatg

SEQ ID NO: 272721 - DNA, 401 bp, Zea mays
ctttgattcctcctaaccaggccggtccacctgcaaccgtgacggttcttgttcttcttcccacccagcgtgcgctccctcttcctcttccccttctctctcggcgacgactgggtggccgtagctgcctccatacgcctggtgccctggtcttcttcgggccattcgccggccgcgagcaccaccaaaagggagagcttcccaggtagagaaacagtttctccgtactctagcagatggcaaggataaagcctaagcaattgctaatccaaagcaaaacaaagaaggctccatctcgaatcagctactctactatcatcacatggaacttgattgtcatattggttgtgctatctctctatgctacctacagccattggcatcaaaggtctgcccaagac

SEQ ID NO: 272722 - DNA, 669 bp, Zea mays
cccacgcgtccggtcaaaagtgtagcgttattgatggttttggctgctctggtcctggcaattttgtttacgaaactcagtgtgagagatgtttttgcttccattctagcatttgtgccaactgggtggggaatcatttcgattgccatggcatggaaacctgtcgtgaagaaattgggtttgtggaaaactgttcgtgccctagctcgcctctatgatgctggaatggggatggtcattttcatacccatagccatttgctcgtggtttccattcatatccactttccagacgcgacttctgttcaaccaggcgttcagcagaggtttggagatatctctgatccttgctggcaacaatccaaatgctgggatctgatggtggcagttccggccttgcttcattaatctgtggacctttcgtacttgaattaatcctcacttctcagttaacagtagcgatgtacatatctgatatctctatgttcaccggagttgtttgccgtgggtataaatatcaacggctatatttctagagttcaccggcttgtacctgtatttttgaacgggtgaactttgtatggcccttcttttgacattgacatgtgctgaccacgtggaaaaataaaaaaacaaaaaaaaaaaaaaaaaaaaaaaaaaaaaacaaaaa

SEQ ID NO: 272723 - DNA, 930 bp, Zea mays
  unsure (1)..(930): unsure at all n locations
ctagttctagatcgcagagcggccgccctttttttttttttttttttgtgtggnntnnnnnnngggcaaaccaaaatagaatgcaggtaacatatgacactaatttaaaggtgacgttgggacaatcaactcatgaagaagaacaaaaaaattaggagggtcttccaatcttgtacatattggaaaaaatcaaacagatgtcactataagtttttaactaaataagtttggaccaaaaacctatcaaaatatgactcactatacataaataagccaatccatataccattgtcttgcatgtcagagtgtacagggcagtgcattttaaaaggtactactactactactactactactactacgaaatgcggtagacgggagcagaacggatggatgcgacaccgcatctccaacacagagctagtactgaacactgatggagcatgtcggcgaaacgcggggaaggaatgtccatcccgccagtagcctagacgcgaccctcccagaggcagggctgttcgtcggcgcggcgccaccgctgggcgcgggtgacgtcgaggcatggcccgtagcgcgtgtccatgtcgaactcgcggcccgccctctctcgctgctccgcctccgcctccggcggctgccagcgccgtgatctggggctgggtggacgttggtggcgagcgcggccttcttgtggtggtgcgccgccgccctcttggagacgccgccagtgggcttggtagtggcggcggccgcagcggcggcgtgcgtcttctgctgacggtagaaggacttcatgtcgcctccgccgcccctcgtcatggctccggcgatctctctcctgctgatggcgctgctggtggcgctgggttggccgttgaagacgatgggaatgggttggaaacttggaatgcggcagcagaggagtgggct

SEQ ID NO: 272724 - DNA, 761 bp, Zea mays
gaaagaaatgccatgttgctggaatacatgccatttctgctctgatcacaagcaacacaccgagacatgaagggttcatcatcatgtggatactagaggcaacacaacacgtgacaggcacagatggtactactactggtgccactgctaccacgagatgcggtagacgggagcagaacggatggacgcgacaccgcatctccaacacagagctagtactgaacactgatggagcatgtcggcgaaacgcggggaatgtgcaccccgccgccgccagtagcctagacgcggccctcccagaggcagggctgttcgtcggcgcagagggcgaggagcgccggcggcggtgcgaggccgagcgcggcggcgcggcgccaccgctgggggcgggtgacgccgaggcatggcccgtagcgcgtgtccatgtcgaactcgcggcccgccctctcccgctgctccgcctccgcctccccctgctggcggctgccggcgccgtgatctggggccgggtggatgttggtggcgagtgcggccttcttgtggtgatgcgccgccgccttcttggagacgccgccagtgggcttggtagtggcggcggcggcgtgcgtcttctgctgacggaagaaggacttcatgtcgcctccgccgcccctcgtcatggctccggcgatctctctcctgctgatggcgctgctggtggcgctgggttgaccgttgaagaggatgggaatgggttggaaacttggaatgcggcagcagag

SEQ ID NO: 272725 - DNA, 588 bp, Zea mays
tctcttagaagcttcggccgcgcctctatctgatctccttcctcctgttgagcccgccggcctcccacagcttactacgaaaaccctaaccccttcccttatcctctgctccctctccacgtttccacgaacgttggcgcgcaagctcgtggtgtgagcggtcactgtctcccatcccatggctccggcgctgagcgggactctgggcgcgtcgtcggtggcggcgctgcggccctgcgcggggaggagggcgccgtccgccgcgagctcggttgcgccgcgcgggagcggggtggtgaggtgctccagagggctcaggtgggacgcccacagaagcagggggaggttgctcagggtgaggtgcgatgcggccgtcgtggagaagcccgccggggaggaggcggctggggagaagttcgagtaccaggcggaggtgagccgcttaatggacttgatcgtccatagtctgtacagtcataaggaggtatttctccgggagcttgttagcaatgcgagtgatgcgctggataagctggaggttcctcggcgtcactgattcttctttgccggctgatggcggcgagctag

SEQ ID NO: 272726 - DNA, 375 bp, Zea mays
ttctttcagccggtccagctgctctaccgcacggttcgcaccgcgcgcgtactggatccattagccgcgcgcgcgcgcatctgtcgtgatctctctcgcccgagagatcctcctcgtcgggtcctactcctacctcatcagtcctccggtccatctgccctcctccggcacaaggacgacgatgcaggtcacgccggcggcgaccctgcggccggcggcggcgcacgcgttgcggctgtctacagatcactgcagggaagaagggccaaagattagggttcggttccgatcgaggaaactatcgtggacagaaacacttgatgatgccactagtccgacgagagccaccggaaggcaacgcaggcattcctcagt

SEQ ID NO: 272727 - DNA, 363 bp, Zea mays
gctgggaatattcagaatcaatgtttggatttgtgtttagtaaatttaatcactgggtcagcactgaacgtcatggttcagcagctgcttgtttctgttggctcccctagcaatgctcttgtgctcaagattccaattcagggtgttggggatgcacttcataggaaaacactccagggcacaggtctgaatgaagagcaaatgagacaggctagcgtcgcagacaatggtcatcgtcagctaaacaagatacttgttgacttggatcaagataacattactgctaagaattatgcaattgcattttacacaaaagagcacattcagattccatgcttgggcggtggacacgaaagtactttc

SEQ ID NO: 272728 - DNA, 489 bp, Zea mays
  unsure (1)..(489): unsure at all n locations
tctttcgcatcgattagctcgagagagggatatctgtttccgcatcggcagcgttctctgcagcggcgatgccgctcctcgaggagatgatggaagcgtcgtgcatccgcacgtacctgcagcagatggcaggtaagtaggtcaacgaattgattcctctcgtggtcgttgtgtgattttgacgcgacatgcgttgcgtgcatgtatctctctgctctctcggtgcctcggtggtagcagcgtcggtctccacggcgagctgcgacccgtctagcggcgccgatgaggtggagtgccgcgacgaggcggcggcgctgaggcttaagatggtgttcgtcgtggccatactcgtcgcaggcgcgaccggcgtcgcgatcccgctcgtcggccgccgctgccacgggcatggagcctnctnctnctnctncaccggtggggcgttcgtgctcgtaaaggcgttcgcggccggngtgatcctggccacgggct

SEQ ID NO: 272729 - DNA, 300 bp, Zea mays
cggacgcgtggggctcgagagaggggtgtctgtttccgcatcggcagcgttctctgcagcggcgatgccgctcctcgaggagatgatggaatcgtcgtacatccgcacgtacctgcagcaggatggcagcgtcggtctccacggcgagctgcgccccgtctagcggcgccgatgaggtggagtgccgcgacgaggcggcggcgctgaggcttgagatggtgttcgtcgtggccatactcgtcgcaggcgcgaccggcgtcgcgatcccgctcgtcggccggcggtgccacgggcatggag

SEQ ID NO: 272730 - DNA, 554 bp, Zea mays
tccctctccaccacagccccatcccccttcccctcctgctccgccgccaccactcgtcgccccacccgcgccttctccccttggcggcgtccctcccgcccccacctcccgaggagctgctccacagtcaggccacgggtctcgtcgctgcctcacaggccaactgcatgcgcggctatcgtggacgccgcggccccggggctggaccaccaccgcggctccgacctgctctgcgtcgtccgcgcgctgctcaagaagatccgccgccgcgtgctcgtcggtgaccgcgtcctcgtcggggcggtcgactggaccgatcgccgcgggatgatcgaggatgtcttcgagcggagatccgaggttgtcgacccgcctgtcgccaacgtcgaccgccttgtcgtgctcttctcgctcgaccagccgaagcccgagccggccacgctcacccggttcctcgtcgaggccgagtcttcaggaattccgtttgtgctcgtcttcaacaaggtcgagctcgtcgacgagcagacaatagcatactgggaagataggttgag

SEQ ID NO: 272731 - DNA, 1306 bp, Zea mays
  unsure (1)..(1306): unsure at all n locations
agatgatgnctgcaanaatgataacgaagatgaacaagagaatgcagaaatgttgatatagtatcaaaaacttctactaatgaacaagggcagacaactgatgaaattagagaagaagaggatcctgttcacatcattcaagcatcagagaaagagatcgcagatgaaatagaagaaagtaaagaaatacatgaagacaatgctatttgtcatgataaattacagacaaattctgaaaaggaagagtcacctcaaccgcattccaatgaaccatacaatgtggatgctaaaattgatgatacaacatctctatgcgaagaaataatccatgacaatacaagtataaatcctagagaaattgaagagataggagaaaacaaaggaccagacttcacttctgaaccttctgtagaatcatccatacagaacaatgttgaagactcaagcagtcatcacaaggttgaagatgaaaagctttcaatgtctgagaaaaatgatgtagatactgaagctatgcaagaaataaatgatgaatctggcgcggatataaaccaaacagaacaatgtcaagaagaaattactgcagatgatgttctgcaacttgaaacagaaggaaattcatttgacaagattgaagagactgcttcaaatgaggaaacagagactagtacagcagccactgaagcagtaacgttcaatgaagatattactgacaaggttagcggagctgatggagcaccgtctaacggaagtctcaagacctttactgacactggaagggatattgatgttccattggtaattacaacatcaaaggaagaaagtgtgaacgacactatggaaaacctcaatcttgaccttcctggacatcaggcacaggatggcaacaccgctgaaaaggtgctcagcttagaggaaagagaaagagagatgccttcatcagagaagctccttcaaactgaaccaggagagaatcaaattcccaatgaacaggatgaaaaggacatacgagatgagaatcaaactctaaaagaaaaggatgaagatgacatgcaagatacagaatttggagaggctaagaaagaagttcaacaagaattacctgtctcccattttctgatgaatctaatattgggaaaagagagcagtgatgcaaatgaagattcagaatctgaggctgcaaggaagcaaggtgaagcgacagaagatgacagctgcacgttcatttctgaacaagaagaaagtctggggtcacttcctacagaaaatagggtggatgacaatcccaccttttgttgaacaagaa

SEQ ID NO: 272732 - DNA, 427 bp, Zea mays
taccctatctctgaggaggtcgaatctggcctgcccttctctctctttctcctacgatcctttctctcagtccaacgaaaccctcggaggcacggttcggttcgacgacatgctgtctggcgtgaagctggttccgcgagaccagatccagtctgatcagaggcgtgggggtgaccacggctccgattccgactcctcccacggcaagaggccgtggaagcacagtaaacgagggcgggtcaagaaagagaggacgagtcgaagcagccggcggcagcggcggcggagctagaggtactcgtcggaagattctttggggtcagacaccgacgattcaatcggagaggaagaggaggatgatgtcagtcggagcaagcgtcgcgggaaggacaggaggcggcgacgcaacttctctgacgacgatgat

SEQ ID NO: 272733 - DNA, 418 bp, Zea mays
tgctatggtccgctgtctagcagaaagtgcgtcgctttgccaaaattgggaggggaatggccacattgcaggatcctcatctgccggacacaaaaggcagactataaattgctattcaggatgtccatcgtctgcagaactttctagaatatggtccttcgtttcagatattcctaatgtagcacctgagccaaactgtgagcaaggaataagcatgatgagcatcagcgacagtggtgtcagtaatcaagataatgctgcaggggacagtattttgttagatatagctagtgcaacacttgtaagtgatattggtacttgtgacaagcttttggtaggttcctcttcaggagctggagtgaacctacttccactggctactggtcaaacagaaacagctggatctgtggattccaca

SEQ ID NO: 272734 - DNA, 568 bp, Zea mays
ccaagacttctggacccaatactatgagcttatcaaccttggaatcctcgccaaattgacccagctgcttgaatgtgtgcctcatgctgtggacgtgagaaaggtgtggagcacgttgaggctcatggttggagctaagaacggtaggatatgggcatctctaacttcggtgtcacttggtgggcagccttccaggcgagttgctgttggactgatgggctcgaccatctagcagcatcaagagaacgtgctgattcattgaatcgctcctgttacggctgtaactcacattgctcatgttaaggctgtaactcacatgagcatatttagacagaaaaggtctctggctttctgcttagaaacatacatcctgtttgtagcatgtaaatcttagcgatacttgtagcctttgtaagtcatgttgtaacattagtcgttagtgccccgatcaggcaggctgcctttggcaagagaaaatgcagcacaagcttggtcttcccctccccagaatacatggtcaaatgcgctgttttatcatgtaatctgcaatgatcaatggacatccttc

SEQ ID NO: 272735 - DNA, 357 bp, Zea mays
gtcagctctcgcttcgctctctcgttgtctgtcgagaggaagaagacgaggcgagggacggcagcagtagcagctccagcatcttctagcttcttcattcatgggattcggtctctactaggattaggggtgcttcatttcatccgatccccaacgacttgacctgattctgatctcgacgacgatgcggaagcgggatctgggcatcctgctgctcgccgccttcgccatcttcttctccctccaccacgaaggcgacttctccttccgggagtcctggtaccacctcaccgacgaggacttccccatcaagtacgaggccgaccgccttgccccgccgttcgtcgccgatctcaa

SEQ ID NO: 272736 - DNA, 413 bp, Zea mays
ccactaccgttcgcccacgcaaacctctcctcaactcgatctaaccggggacggaaaaggcccaccaaaatcccccaaaatttcgtacctcctcagccccagcaatctcgaatcccgatgctcacagcctccaccgaatccctggcggtcgtcatcagcgcatgagctttcttcgctcgctagcggactccttctcatcgctgctcttctcgtcgggaggcggggcggtgtccatggacgcggcgggggcggccccgtcgccggcggcggtggtgggggagcgcgtggcggtgaagctcagggggtacttcgacctcgccaaagaggaaatcgacaaggcccgtgcgcgctgaggagtgggggctccccgacgaggccaccgtgcactaccgcaacgcgatgcgggtcatgct

SEQ ID NO: 272737 - DNA, 1264 bp, Zea mays
cggtgaagttgccattggtaatgatgagaaggatgtgaaagacttcctatttggatcttttgatgtgccattagccaacctggaagcaagcctaagaacttatgaaccttcagaggagccatttgacatatctttggtgtcaagagaagtcaggtcgctaccacctaaagagaaggcagcccctggcaagaggccacctgctggtgctgccgccgccgccgcccctgtttcaactgttgatgcttatcagaaaatgctttcgttcattcccgagttctctgggtttggaaggctcttcaagtcctctgaacccatggagctgacagaggcagaaactgaatatgctgttagtgtggttaaacacatttatgacggctacattgtattgcagtacaattgtgcaaacactatagaagaacaactgcttgaagatgtcactgtttgcgttgatgcctcagatgctgaggagttttcagagatttgttcaaagcctcttgcaagcttgccgtataattcacctgggcaagtttttgttgcttttgaaaagccagagcgtgtacctgttgttgggaagtttttaaatttgttgaagtttacagttaaagaggttgacacaactacgggggaagctgatgaggatggtgtggaggatgaataccagttagaggactttgaaattgtttcagctgattatatgctgagggttgttgtctccaacttcaggaacgcctgggaaaatatggacccagatagtgagcgtgtcgatgagtatggactcggggttagagaaagtttggctgaggctgtcaatgctgtcattaatatccttggaatgcagccgtgtgagggcactgaggttgtaccgaaaaatgcaagatcgcacacctgccttctatctggtgtatttattggcaacatgaaggtcctagttaggttgtcatttggactgagcgggcccaacgaagtggcaatgaaattagctgtgagatcagatgaccctgaagtcagcgataagattcatgagattgtcgccagcggataaagcgcaagacatacaaatcttctgccaaaagtgtagagcgggtagatactagatagccttatacttcgatgcttacagccttgtctcttcgtggacatctcagattatcagatagcatattatatattatatatatatatatatatatatatatatatataattttgctgtacaaataatatcaggtattatctgatgtttattcaagcactgatttcatgg

SEQ ID NO: 272738 - DNA, 353 bp, Zea mays
ctgtgagatcagatgaccctgaagtaacagctaatttcattgccacttcgttgggcccgcgcgggcccaacgaagtggcaatgaaattagctgtgagatcagatgaccctgaagtcagtgataagattcatgagattgtcgccagcggataaagtgcaagacatacaaatcttctgccaaaagtgtagagcgggtagatagcctttatacttcgatgcttacagccttgtctcttcgtggacatctcagattatcagttagcatattctataaatttttttgctgtccaaataacatcaggtattatctgatgtttattcaagtactgatttcatggaatattgggaattgga

SEQ ID NO: 272739 - DNA, 1187 bp, Zea mays
atcaaactaaatctctccagtccacacttgaggagaaacagaagcaaatagattcactcagtacatcaaatacagagttacagaactctataaaagatctggatgaaaggcttggtgcatctaaacaatcacgcgcggatgctgatgagataatttcaagccagaaaggaatgatctgtgagcttgagggacagctaaatgaggagcgaaatttaagaagagaagagcgtgataaggctgcacatgacatgaaatctgcattgcataaagtgcaagccgaggctcaagaagaaattaagaaacaggcggagtcttaccttaggcaacaaagggagcagaaagaagttattagcaagcttcaggaatcagaaaaagaaacccgtttgtttggggaaactttgaggtccaagctggaagatgctcgagataatcttgtagcttccgagaaaagagtaagagagctggaagctcagcttcaggacgagcagatggtatcagccaacaatcgaaagaagtcagaaaatctggaagctgaattgagaaaactgaagaaggaactcgacaatgagaaggctgctcgagaagaagcatgggcaaaggtttcagctcttgagcttgaaatagctgcaacgattagagatctatcaattgagaaacagaggtatcagggagctagagaacggattattctacgggagactcagctgcgtgctttctattcaaccacagaagaaatctcttctctgtttgcgaaacagcaggaacagctgaaagctatgcagagaactttggaggatgaagagaactatgagagcaccttaatgggtgtggatcttaataaagtacctctaaccactgataatgctggtatgaagccagtagactgctcaaaaaatacagtgggagcttcaagtgcttcaccagaaaatactcaggtaagtgaacatgattccagtgacgaagatgccaacatgactgagcagcaggatgatgatggtactgccattggtggcagcactcaaggtctagaatgcaccagtccagaaaggtcagaggggagattgaggtcaggttttcatggcaatcccgtttctacagctcctgagagagaggttacagataccgagcaagttcccgagacagatagccaagctggtaatgctggttgcgatgaccaaagatgtgac

SEQ ID NO: 272740 - DNA, 477 bp, Zea mays
aggaccgtttttgtattcccgggtcgtttacgcgtccgccctccccacaccgccgcctccggagaagggtccacggcggcgtccttcctcgggaggcgctcggctcggattcgctcctgctcggcggcggcgtcgccggctggtgggctcgcgcgcgcacctggtgctgggctccgcgggcgctcctcgtgcgtgacacgcgcccgatgcgtcaggatcgcgcggccggcgcccggggcctgccgtgattctgcggggaggctggatctcggtgcttccgcgtgcgggaaccagtgagttttctttttgtcttctcttccccggcggctagcggcgggccgcttggtgcacgtcagcgcgggaggccggaggttagccgatctggtgctctcgccgcccggagaggtggtgctgggcccactgccgggttctgcttagtaggaggcggaggaggtaagtccctcgtctcatggggct

SEQ ID NO: 272741 - DNA, 386 bp, Zea mays
cctcgcctttgttgatcttttcctttctcgcgttcccctcgccttcctcttcctcccccacacccaccggtcgccgcccccgtcgccccggcctcctcggtccagagacgagggggtccgcgccgttccgacgccacaccgcaaccgcatcacatcaccgcctgctcccaccgtccatccgccctccctcgatcgcgctccccggatcgctggtacctccgcgcgcggctccgacctcatcttcctccatcgactggcatcggcagcggcggcgtgttcccggccaaccttcgaaagggtaatcaatcgccagacttttgggagctgtgttgggggggaccggggggaagagccaagttactgcagaggctaacatttcggttgtc

SEQ ID NO: 272742 - DNA, 385 bp, Zea mays
agattataatctagattatataatttagattatgattcagattatataatctataagctgaaacaaacaggccctaagttcggttgtatcggtgtccagcaaatagaaaccgaagccgagccgatctcttcggttcgtaagaaaggaaaaccgacaccgtttcgttaaaacgaaaaaaacttgattccagttcggctcggttttcggttgaaatgtgcctacccctagtgggtcccccccaaagggatcagagatatcaacaccaccgaaaacaccaagtttgggcaaatcatcgtgtctcttagtcggcatccatctcctcaagagcagcctgggcagcagctttggcatgctccaacagttcatttggaaccttctgatgctg

SEQ ID NO: 272743 - DNA, 317 bp, Zea mays
tcttgccgtctccgggcacggcctcgtcaatcctttgctcctcctccgccgcagccgctgccatggactccacgccggcgcccgaggcggctcccggagcctcctcttccgccaccgccgccgccgaggatctggcggggggcgtggcggcgatgaccctggatgagcggttcgctctgctgcgggggatcggggaggagtgcatccaggaggacgcgctcaggcgcctgctcgagaacaagcccgtccccatctgcttccacggcttcgagccctccggacgcatgcacatttcccagggcattgtgaataccttc

SEQ ID NO: 272744 - DNA, 1309 bp, Zea mays
cgcgaacagagctccctccctcctctctccgcttcttcttcgtcgtggtcttggtgtggggcatctcgcaccccacccatccctgtcctcccgctcgccggtgcgcgcgcttttctagggtttccgctgccccagccgccaatcccgctcacctctcgtcaccggcgatggcgtcggcgtcggtgtcggccccggtggcaggggcaggggccgggggcgggaaggacgaggagctcgccgatctggtgcggcgcctcatggacgccctcgctcgctacgctgatcgcctgcccttcgaccttgatcgccagaaacttcgttcacttactacacttgctgcgatctcgatcacacttctgtttgcctggaaaatgttgagagctcctcaagagcaacctcggaggcctcgtaggagagctgccccatcatctagcaacaccagcactagatcgcgaccaggtgctttaaccgcagcagatgcttgttcatcagcagattcaagagcacacgaagcagtcaaccagcttttccagccagtaaatctgactcttgagcagcttgtcaggcataagctaagcgaagggcgaaggttcacatgccgcttgcttggtgtgattttagaagaaacagctccagaggagcttcagaaccatgtcacagtgaagccttccgtggtggaggttctccttgagattgcaaaattctgtgatgtgtatttgatggagcgcattcttgatgatgagagtgagggaaaggttttatcggccctgagtgaagctgggctttttggtggtggtggcttgataaaagataaggttctcttctgtagcacggagaatggccgtacatcttttgttcggcaactcgagcctgattggcatatcgacacgagtcctgaagttgttcaccaattagctaggtttatcaaatatcaactgcacatctccccgcagcgacctgaaagaatagcaaccaatgttttcaccgctccaagcttggaacagtattttggaggcctagaccagagataaagaggtcaaactccatccaggaaattggcggcggcggcggattagtgagaagggaggacgtcattgttttttcttttctctgctcgaatgatggaactcgtttttttcctgtatcatgtgtaaaagcctgtgctgtgtaccagtaatccattgttgtgcgatatgtagtgcctcagaatctattcaagggaaaacatatgtagtagcatacttgtcgaatcagttgtgttaatgtacaactacaaccaaaatagcatagttgcaagtgccaacctccc

SEQ ID NO: 272745 - DNA, 324 bp, Zea mays
caaagaaggagtattcacaatggatagtcacaagccaaagaagtctcttggaagttatgtcagagttcccatcagcaaagcctccacttggtgttttctttgcagctatttgtcctcgcctgcagccaagatactactcaatatcttcctcaccgagaatagcaccaacaaggattcatgtgacatgtgcactagtatatgggccaacccctaccggaagaattcacaaaggagtctgttctacttggatgaagcattcgactcccttggaagatagcaaagactgcagctgggctccaatttttgttaggcaatcaaacttca

SEQ ID NO: 272746 - DNA, 397 bp, Zea mays
ccacagtccacagcccaaagcggcggtcgctccccgcttaaacccttaagcccgcacaccgacgaggcgaacggaccagagtcggcgagcccccaggaggcgccgactccgcctccggctctgaccggtctttagaccccccctgccccaggcgacgacgaaaccagcagcgctgcgcagcgccgaccactccgggaacctcacgatccaggggagatgctggtcgccgccgccgcctcgccgtcgcagccgtgaaccgggtttcccagggcggagggacttgggctcagattcggcggatcttgggctggtctcgtgcattcgagccgctgcaagccttttggtaacccggttttttcgagggaaagggaacctaaactggttgggccactttggg

SEQ ID NO: 272747 - DNA, 503 bp, Zea mays
ttgtagatcgcgagcggccgccctttttttttttttttttttgttcagccaagacgggtatcgcttcgcatcattgatatgataactatagttattacgaagtggcgaaccaaacaccaacataaaacttatagctaatgaaaacaaggagctatcaaaggaaggattataactaactacagtattaatttattctactactagcacataggatcagacagcagcgctgaaacaccgacagccagctcaggcaataacatccccgcgaggagcttccgttgcctcttcagccttcctttcttccctcgcacgagcccgagccctcgacaaagcctcggtcatatcagagtccactggcacagcagctttcagcagactaacgaaagcttcgacatccttgacctccccctcgtctccgaggtacttaagtatcatctcaagcatggaaggcctagggatccagccagtattgggggcgtgcacagagagggcgttcttggtca

SEQ ID NO: 272748 - DNA, 491 bp, Zea mays
tccattcgtccgctgctccagcgcctaatgcagcacctggatatgctgggatggcctaccaccatctcatccaatcccaccaccaccaccaccctgcgccgcagcctgtagcaaacatggctggcaactacgggtatgagtttgctgatcctacgcgcccgcaagtctactactcacaggcagctgcacctccaacattgccacagtatccgcccattgtctctcctgatgctggccaggctgaaaaacattaagcagactgaggattggtgaattcagggtgaagatgttgctattaggcaaccgtgcatttgcactgggatcaaaacaagcatgcatcatccaaggataggttcaacataaggtttttattggatggttcttgtgttggtgagagacagaagggtgccggattagtttgggggagtgaagtgttggatccctgttccaaattgcttttttttttcctttcttattttgaataaaatagt

SEQ ID NO: 272749 - DNA, 1367 bp, Zea mays
cccacgcgtccggccggttgttgatcccaccaatagagccgtgtactataatgatagatctcctccggctgaattgaagcgagacatgccggtgggaactgaagctgccagctaccgcctccccgtttcagctccggacgctgctgcggcagctgcagccaccgccgcgacacaggcccctcctggatatgtgcttgcccagatgcatgcgcctccgccaccgcagcaacctccaccacagcagcaaccacaacagccagctcctcagcagattgttgctgctgggaatcaacatttcatccacaaccctgccactggcacctttattccaatccaatcctattaccaccatcctgtccatcagcaggcaccccagaccatgcaaaggcagcaacaggcacctacgttcgacccaaatacagggatgtattatgttcctatgcagcagaacgcacatcaggcatatggcgtgcctcctggtgcacaagtcactttgccacctccgacccttgttgataccacgccaaagccaaccgtgccaattcctcagatggcagtaaggcctgaattgcaacaacctggtgtctaccgaacaacagctgcggctacccctgctccagcgcctaatgcagcacctggatatgctgggatggcctaccaccatgtcatccaatcccaccaccaccaccaccctgcgccgcagcctgtagcaaacatggctggcaactacgggtatgagtttgctgatcctacgcgcccgcaagtctactactcacaggcagctgcacctccaacattgccacagtatccgcccattgtctctcctgatgctggccaggctgaaaaacattaagcagactgagcattggtgaattcaggtatgcctcaaattctagaggccttgttatccgtctgttacttatcattattgttgctaccgcatgttacatgaatccgcgtcaaagagtgaagatgttgctattaggcaactgtgcatttgcattgggatcaaaacaagcatgcatcatccaaggataggttcaacataaggtttttattggatggttcttgtgttggtgagagacagaagggtgccggattagtttgggggagtgaagtgttggatccctgttccaaattggtctctttttttttccctttcttcttattttgaataaaatatagtgtccaaaagaacctggtggaaacgaagaactcatcatcatcatcatcatttgtgtagccctctgtatatttgatctcatggatgtcattcaggttgaggtgcagataagtgtgttattagcttgcttgtagaaaccttatgcgagttaaatatatatacatcggttccgtattgtactttg

SEQ ID NO: 272750 - DNA, 1077 bp, Zea mays
attagtagtagtgccgctgcccgctggtgctgggagctcatcatcactcgtcagtactcagtggaggaggcggcggcggggagggagacagatgcgggaggcccaccgcggggtcgccggaccagatggacacgccggataggccccgcgccggcgccggcgccgggttcgaggattctcctgtgttcaatttcatcaacaatctctcgcctataccaccacctaaacctttagactcagcacataatgtgcagctattcaagtcatcagatttggcacctgtttcttcgatctttgcctcaccacatgttaatccaacaaagggaactaaagttctgatcagggacgaatctgttcagcttcctcatgaattgcactcacctagcagtgtcagaactcggataggcacctcaggctcttttagaatgatcagatgcaaagacattgtgccagagaattgtaatatcacttgtcaactaaacgaggcatctattgattcttcagatcatacatcaagctctacaggccaattgactcaatccataaaagatgctgctggcagtatggaaagcgataaggatcaatgcgctggtggtaaaatagaccttaccatgtcccaggagtgcacaggcctagaaggtatgaaccttgatgagagtagcccagacagaatggattcatcacattctgggattgttgttcatgaaaaccagctatctgaacaaaacaatgatgaacctgcggcatataatggggtttacatgattacacaccaatcaagtagtgatatgctgactttagccgtaccatctggaacagaagcacaaccaatgaatgatacacaaaaggctgataatccctacccttgtgaatccttgttggatgttcagtcaagtggaaattgcacccaaaattctgtgcatgaaccccatctgtactggaacggggcagttgaaggggctgcagtagcttatactccccaagcacttcctggtgctttgcaaagtcagttgatgccatgtaacaagctcaatgagccaaaagattacatgcctactgagcaaaatgctttgtcac

SEQ ID NO: 272751 - DNA, 838 bp, Zea mays
ctttcaggcattgctggaacaagcttattcaactcagttagtttgatggcttataatgttttctacacaagcattcctgttttaacgactgtactggacaaggatttatctgaaaagacagtgatgcaaaatccagagatattactttactgccaagctggaaggcttctcaatccaagtacctttgctggttggtttggtcgatcattgtatcatgcaatcattattttcttaataaccatccatgcatatgctaatgagaaaagcgagatggaggagctctcaatggttgcactctcaggaagcatttggttgcaggcatttgttgtgacgttggagatgaattccttcacatctgtgcaacttctggccatatggggaaacctcattgccttctatggcctcaatttctttatcagcagtatacccacttctggaatgtacactatcatgttcggcctttgcagacaaccgtcatactggataacgctggtgttgatcagtggagttggaatgggtcctgtattggctctgaaatatttcagatatacatacagacctagcgtgatcaacattcttcagaaggccgagcgttcacgggggccaatgtacaccctgctgaatctagagtcctagttgagatcagacaaagatagtatgatggtagtcggttccacagcgccagccaagaataagagctctgtttacgagccgttgctttctgactccccgatggcatccaggagatctctttgcaccagcatcttcatttgatatcttccagccagcacattctagaacatcttacccaagaaacataaaagtcaattaatttttt

SEQ ID NO: 272752 - DNA, 494 bp, Zea mays
ggagaaacgggaagcctcagaagctgcaaggcaatcacagcaagagagccacaccaccaccggtccaagtacatcgtcgagtatccaacagccatcacagcacaacccctcaaacgttgcacctggcccatccacaatgccacacaccgcttgggtcgcccagaatcggaatcctcaacagttccgctagcatcatcatactcgcccgtgctggctccatccccaagaccacctctaaaatgatagaaatcaagtgcacactgtacagtatcggatacctttttgttgttctgggagtggtcccgcatgcggacgccaaggctgtttgttccattcgttgacaatgcgatgatgataggaggagtttcaaaaattggcctccttcctggagcatgtaaagagatcgatatgtaaaacggattcctaccctcgacaacagatggaggtaaaatgggagttggttatacgtaaaaaaaaaaacgaaaaaagaaaca

SEQ ID NO: 272753 - DNA, 380 bp, Zea mays
  unsure (1)..(380): unsure at all n locations
gggtctcccagaatcggaatcctcgtcagttccgctagcatcatcatgctcgtccgtgctggctccatccccaaggccacctctaagatgatacccggcgatgccgattttctttttatggagtagaaatcaagtgcccactgttcagtatcggatacctttttgttgtgctgggagtgatcccgcatgcggacgccaaggctatttgttccattcgttgccaatgcgatgatgatagtagtagattcaaaaagtggcctccttcctggagcatgtaaagagttcgatatgtaaaatggattcctaccctcggcaacaaatggaggtaaaatggaaattggctcaaaaaaaaaaaaaaaaaaaaaaaaaantattaaaaa

SEQ ID NO: 272754 - DNA, 743 bp, Zea mays
gcgatatggcacatatcagtgggcttgttgcagcaaaggaatgtcgtagccctttcgactactgtgacgttgttacgtcaactactcacaagaatcttaggggccctagaggtggtataatattcttcaggaaagggaaaaatttaaggacacgagctggatctttttctcaaggagatgagaatgaatacgacttcgaggataggataacattttggtgtttttccttcaatgcaagggggacccataataatcatattgctgccttggctattactctgaagcaagtcgcaactcctgagtataaagcgtacattcaacaagtcaagaaaaatgctcaggctctggcatcagcgttgctcagaagaaaatgcagattggttactggtggcacagataatcacttaatactttgggatctcagaactcttggcttgactggtaagatctttgagaaggtctgtgaggcatgccacatatctatcaacaagacaccaatttatggggataatggctcaatatcccctggtggtgtgcggatcggaacacctgcaatgactactagaggttgcctagaagaggacttcgagtcgattgcagacttcctcataaggtctactcagattgctagcaatgttctgaaagaacatggcaaagtgcaaaaggagtttctaagaggcctaatgaacaataaggatgttatggaactccgaaatcaggttgaggcatttgcgtcacagttt

SEQ ID NO: 272755 - DNA, 435 bp, Zea mays
tcaagaagctgatgataaactatttcttcgcgttcctgaggaacaactgccgccgggcgatcatgttgatgagcatcccgcattcaaacatgatgcaggtgcgcatgacttcttatgtctgattgctggaactgcactggttctgttcatggatgtctgatacaaacccccctgccagtaaaagaatgaacgtggcaaatgcaaagaggatatcggcccttttgtttttgttcataatttgatgatggcttaggttgttgtcggaatctatctcccctgtagttgtacaatgccaaaatatagttggaagttttagctggtacaccattagggtgctgtattaaccttttttactcttgtgcagtaaaaattctttttgtcacccccaaaaacaaaaaaaaaaaaaaaaaaaaaaaaaaaaaaaaaaaaaaaaaa

SEQ ID NO: 272756 - DNA, 424 bp, Zea mays
gttctagatcgcgagcggccgcccttttttttttttttttaggtggggaatataataataaccgaatgaaatgaaagttgctggtagatcaactctcgactggtattacatgaatgcaggtgtacgatgtgcgtatgccattcagacattcacagtcggcgatgttcctgtccgagcatacatggatcaatcatagtatagctatataggctatagctagtacgtagtagtgtagtgcgcaattcagagctcgtcgtggctggagccgtcctcgtcgacgacggcgtggaccttggggttgggcgaggtcttgacggggtaggatgcctccatggcgatgccgcagtgtccctccttggcggccacgtcgcgcgccatgcggatgtaccccttctcgccccactcggggccccacgagttcttg

SEQ ID NO: 272757 - DNA, 1276 bp, Zea mays
cccacgcgtccggcaaaggtcattggtgatgttcaggcactgatagcttttccactgtggccgtgcctgatcctttctatcttgtatatgttctggttttctgctacactccatctcttcagctctggtcaagttgtccgaaatgattgcaatactgattgttgttcatatgatctgaagctgggaaaagtaaattgtgacaactgctgtgggtacagcatccattacacccctcatatcagcattgccattctatttcacttatttggttgctactgggcgactcaattcattctcgcatgctcttcaactgtggttgcgggatcagttgcttcatactactgggcgcgtggtgaaatatcacatgatataccatttctcactgtagtctcttcactgaagcgactgatgcgctacagccttggatctgttgctctgggttcacttgttgtatctgttgttgaatgggtgcggtttatactagaatgccttcgtcgcaagttgaagctagttgattctgctcgagagagctgctttggaaaagcgacgtcctcctcttctgaatgctgcctgggttgcatagactggaccctcaagtcagtaaatcgaaatgcctacattatgattgccatcaccgggaaaggtttcttcaaagcttcagtgctcgcaactggattaataatgaagaacattctgcgcatcggaaaagtcaacgtcattggagatgtcatcctcttcctgggaaaactctgtgtgagcctattctgtgcgcttttcgcctttctgatgttagacacccacaagtacaagtccgcacacaacaagatatcctctccagttatccctgtcctggtaacatgggccctcggctacgtagtcgcgaagcttttctttgcggtggttgagatgtcgatcgacaccataatcctctcgttctgccaggacgccgaggagcaccaggggaacgcgcagtatgcgcccccagctctgatggaaactctggacgaacagggcgaactgcagagactaactcaagggccttgactgtcttttcctcttggtagtagcatggaaacttagcggcagcctaatgttttgttaccccgttccgttctcttggcttgtgaagaggtttgccatttttgcttgctaccctaattccatgtacaagtctgaatctgacatgttctcctggcccaattggcatgtgtaggcagcttatctatatatgtgtgcagtgtgctattgctgataaaaaaaaaaaagaagagaagag

SEQ ID NO: 272758 - DNA, 374 bp, Zea mays
gagatagcaaaaggcgaacggacggtaaccgccaccaccaaatcgctaccgccaatccgccatgatgctcccgacggccaccgcgacggccgtcttcctcaccgcggcgccttcctctttctccacccgccgtcggcgcagtcgcgccatcttcgcatccctttcgccgtccttctcctcctcggaggagccgctgctggtgcgcgcggcgcggggcgaggacggcctcccacgcccgcccgcgtggatgatgcggcaggcagggcggtacatggcggagtaccaggcgctggccaagcgccacccctcgttccgggagcgctccgagaacacggacctcatcgtcgagatcacgctgcagccgtggcgtgcct

SEQ ID NO: 272759 - DNA, 486 bp, Zea mays
gttttattcatagctactctggcagcactaattgctagtcgtgcaatgacaactgctatattctcaactataaagcaggcaacagctctgggctggtgcccacgcctcaagattatccacacctctagaaagttcatgggccaaatatacatcccggtgatgaactggttcttgctggtttcttgtctggcatttgtcgcagtatttgggagcataaatgagattggaaatgcatatggcatagcagaacttggggtcatgatgatgaccactgtcctggtcaccattataatgcttctgatatggcaggtcaacatcgtcatagttctatgctttctcaacctctttctggggctggagttatttttcttttccttagttttgggaagtgcagcagatggaaagtgggtgcttttggtatttgcagctgtattggattgggaatgtacaatatggaactttggaaccaaatttgatgtactaaac

SEQ ID NO: 272760 - DNA, 450 bp, Zea mays
tctctgacgcgtggggttcagtggcgccgtcgtgcctcgacgacggcgggagacgccgcaagcaggtgagagtgagacgggcggtgactagcgggcgcttaggccgacatcggccccgcagcggcggggtagggtgcgtcgacacgcgggactgcgacttgggggggattgattcccttcgctgttctctcttctccggcgcgtgcgcgcgggatcgaaggtagggtttgggccccaaagttcgtgtctttggggacagcggcggcgatggactacaccaacgccatccacatcatcccggacgccgcgggccccgacgcctgggccaacgcggcgtcggccgcgggcgccgacgccagcatctgggccaccgaggacgactaccgccaggggagcgccgaaccaggctacggcgaccggaacccctcgttccgggcggggagcgagcag

SEQ ID NO: 272761 - DNA, 573 bp, Zea mays
  unsure (1)..(573): unsure at all n locations
gacacatgtatggtgatgcttctatttctctttgaaactgaaacttcaggtgtgcctagctaaaggtttaggcgtgcccattggattcaaaggcttctgtatatctatcgagcacgtttatagatttactgatcagattgataacatcacacacacacgaagttcatcttcaacatgcttagtattattatgcatctgatggtatggtattgtctctgatagatccatttgctgaggctaatgctgaggagtctggtgttggtcttggaacgaaggattatgtgcatatgcgcatctaagagcgcaacgatagaaagaggctgactacagtccagggtctgaacaaagaattcagctataacaagaacctcattgatctgaagaaggaattctgctgcaatggtactgaagttcaggacccagagctaggcctggtcattcagctccaaagtgaccagcgcaagaatggcctcctataaaactactatatctatggacaatgttttgcatccccttgtaacacagtttttttgcanacattgagttgaaattgagacagaatgaggaagatcc

SEQ ID NO: 272762 - DNA, 886 bp, Zea mays
gagctgttcgccacctacccctccctccttcctttcatttttctggaagacttcttcggcctcacgcatctcctcctcctcctccaatccaattcacaaacacacacgggcaatcaattagcagaacccgcgccacccccccttcctcggagtcggagcgagtcgaggaacggctcgtctgcctctcccgttctccttcctctcctccccagaagatctgatccatcatcgaggactcgccgggaagaatcaaggatatatagataataaacaaacaaaggttcctccagagcccagaggagggaagtcaccggccgtcggcggggaggagatgtcggacggcgcgggctcccggacgggcgtcgctggcgcgctgggcctctcggtcacctcgtcggtggccatcgtcatctgcaacaagtacctcatcagcactctaggcttcttctttgcgacgacgctgacgagctggcacctcatggtgaccttcttcacgctgtacgttgcgcagcggctgcgcttcttcgagccaaagccgatcgacgcgcggaccgtcatctccttcggcctgctcaacggcatctccattggcctcctcaacctctgcctcgggttcaactctgttggcttctaccagatgaccaagctggccatcatacccttcaccatagtcttggaaaccctctttctgagcaagaagttcagccagagcatcaaggcctccctcatggttctgctgctgggagtcgggatcgcgtcggtcacggatctccagctcaacctcctcggctcgatcatcgccgtgctcaccattttttgcaacatgcgtttgtcatgtattttgaccaactcaaattcagtggtggctgttggtcttctctcttca

SEQ ID NO: 272763 - DNA, 688 bp, Zea mays
agaaaatgaggaacaatcggaaacgtcgctcgctctggctgaggtaactgaaaaggcactgagcatccaaaaccagcacaacgacgctgtcctttaccaaggaagagcaatgtcctcaatgcgactacctcaagggcacgttgcctactcgtggtgctaactggtagaatacgaaggcccagttcctgattcagtcttggtaggcagaatgggcagggcagctggttacagtgacgagaaaactgagagcgcacagtgaaggtagcattatgcgagttgatcagttgctacaggctccccttttttggcggtgaaaaaccaggagggtgcacaatgattcaatcatgcagcctggatggtttaccaacatgtgtacttttgtttaggtgggctaacaggtttatagacaattgtcaacatttttttattgttgagaattcctgtttctagtcccagggaacaatactttggatgctgttcaatcaggtggcttttttgctattaggaactactagtgtgtgcctaatcagtttgtatgcaatagtgagagctatctcactgatgtggggaagcctttttttttctttctaacaactgtggcatgtgttcagaagattagatgtacactattcccaacatgcgctgtactcatccattatgtttgtgcaagacaccaaatttactaagc

SEQ ID NO: 272764 - DNA, 479 bp, Zea mays
cccacgttttcgcccacgcgtccgcccacgcgtccgccttcttccatttccacaagacccttgcgtgctctctctctctcctcttggcgacgactgggtggcaggtgcccaggtcttcttgggacccttcgccggcgacaagcaccaccaggttttgtcatgagtgggcttctcatgagcttccctaagtgatgcttcatatgttttctaacatgtaacatctcccgatgttatccatgtactggatatatccttagaagtcagagatgcagaagtctgatcatcatgagcagaagctaacttcaccaagagggttaatccataagatacttcgtcgtacaaatagcaggcgttcttccactgcagctgatcaacaacctttttctgtatcttcagaaacaagcaactcattaatattctcaatgcaaaaggatgttgatgtgccattaaggattcataatgtttatctcacttactat

SEQ ID NO: 272765 - DNA, 470 bp, Zea mays
cacttttcagcacacgcaccaccaaaaagagggagaagaggggatctcggagaagagtcttcgcctcggagagacgtgctctgcctagcatatatagccacgaaagagagtgctggccctgccggccttcgtctagctatagctaactagccagcagcagcgtgcgtgcgtgcgttcaaggcagcagaggtagagaggttttgagagagagaatggcaagcaggcaaggtgtagccgcctccatgttcgccacggcattgctcctcggcgtctttgcatccatcccacaaagtgctgaggccatcggggtgtgctacggcatgagcgccaacaacctgccggcggcgagcacggtggtgagcatgtacaaggcgaacggcatctcggcgatgcggctgtacgcgccggaccagggcgcgctgcatgcggtgggcggcacgggcatcagcgtggccgtgggcgcccccaac

SEQ ID NO: 272766 - DNA, 425 bp, Zea mays
gcctcgcgcaggcaacagcacaagcgtttacgactactgcagcacaagcgcaggaaacgcctgcacggtggagcaagtagagaacctcaagtcagctctgagcgtgatgcccatgtgggcagccatggtgatgtcgttcctgctgcagagctcctcgttcggggtcctgcaggcagccaccatggaccgccgcgtctgcgcaacaaggttccagatacccgcgggctcgatctcggtcttcgagatcctgaccttcacggcgtggtcaagctgctacgacgcctgcatcgtgccagtcctccggaggatgacggagcggcagcgcgtgctgacgctgaagcagcgcatgggagtcggcgtgtccctggccgtcgcctccatggcggtggcatcggcggtggagacccatcggaggcagcacgccg

SEQ ID NO: 272767 - DNA, 275 bp, Zea mays
atcccctctcattttcctccgccatcgccgcggttagactgagcgactgaggtgggctagcgtctagcgaccaagccattccggattcgggaattcccagttgagctcatcgcggcgactcgccctctcgagtttcttgcaaaaagttacggccgctgctccgctcgccattgctgccgtgtggagcggccatggagctctgctgctcaggcgtcctaagctgcgccggcgctcgcgaccggcgccatcgaggacctcaaggcccgtgaaaatgg

SEQ ID NO: 272768 - DNA, 593 bp, Zea mays
  unsure (1)..(593): unsure at all n locations
gggaaaggaggagggcgcagcggcgacgagctcagcgatacagcggcaccggagagctagccgcggcctccatgctcgcggggatctgaactagtgccgctgcccaatcgcgccgacgactgaggcgcccactcctcatatcccatttccatcactcgtttctccatttcccaccttcctaaacgccacttaaaagagaaaggagagcatcgcagtggcacacgcgcaatggaaggctcgccggtgacgcgcctcccggaggctaactccctccccgacggcttcgttcctgactctgagagccctggcacggacgcgacgtttcccttctccgcgcccatcgttgatgatgcgctcaactccgatatccccgccgcgaccaacccaggcggcgaggaaaccctaaacgatccccccctccctgcgtccagcgccgaagatgcctcctcggacgccgctgctgaagccttgggcacactntctctggacgctgccgccgagccagaacgcgctctagaggagaacggacccaccggcgctgcangaggtgaagcatccttgaaaatttgtgcatcagagctaggggagcgtga

SEQ ID NO: 272769 - DNA, 581 bp, Zea mays
tcggcttcctcctccgcgcttccttcgccgaggcgtaagcgtcagcgagggcgtataaatcgctcccctccgcacattcgccaccgcctctccgctcctcgacaagaccaatggcggctgctgcgtcctctgctctgcacgccgttggcgccgtcgcctccgccaagcctagatccgtcgtccccgcggtggcgacgaggaggagcgtgcgcgtggcgcccgcggccaagcgaggaccaggctcgggaggaggcaggctcgtggctcgcagcgccgttgcagccaaggcggatgaggcggccgctgctgccggatccaagtcaggcggccatgagttgctgatgtttgaggcccttccggaagccttgatagaagagatgaatttggatccaacagtgtgcgtcatgggtgaagatgttggtcattatggaggttcatacaaggtgaccaaagggttggctgagatgttcggagatctccgggtccttgatacccctatcgccgagaactccttcactggcatgggagttggagcagcaatgaaggggctgaggcctgttgtggagagcatgaacatgggt

SEQ ID NO: 272770 - DNA, 876 bp, Zea mays
cccacgcgtccgcgcagaagaaaccccagagtactctgatcataggaagaaattctggtctgctgtcaagcctgcccattttggcgtgaagatcgcctccagatccctgctgatccttgtgcgcttcatcttcaccggaatcttcatcggcctgctcgccaacttctccttcggcaggtccctcctgctgaagtaccctgagtttttctccgctgggctgttcagcagagccggcccgaccgaggaagaggtgaagagcgcctcgttcaagatgtggtttgtcggtcacggctacagcaacgtggatagctcgttggagctcggaagaagcaagccggacaaggaggtgatcaccaaggtttcgggacccgaggtcggttacgtcacaactccgatcgtgctggtgcagtgcgccctcgtcctgctgagccagcgtgccaacctgcccaagggcggggtatacacgcctggcaccgtctttggccctactgatctccagcagcgcctccaggataacgggctgtctttcgaggttaacaccactagagccatgcattgaagttcactggctccactcagtgcatcctgtggaaaaacttggcagaaggatgcaacttgagcaataagaagcgccaattagcaacttaaagggcttgtttggaagtaaggataccgccggagaggagctgaaaccccttgctattcaattttgaatataaggggattttagctccttaaatcccgtcgggtataattgcttccaaaagccataactgtgtgtgtcgtaccaacagtcctatggagtcttactagttactaccgctgtaccttctcaattacctagttccttcttttagcaaaaaaaaaaaaaaagga

SEQ ID NO: 272771 - DNA, 412 bp, Zea mays
cgcacacaagcagcgcgacggagccaaggaagacgagagcgaggtggagagagagagagagaggaaaaccctgccccgtccaggcagccgtcgtcgacgcaaacggcggaggccacagagacgccacgcgagggagccccgccgcagcagcacccgcgccgtcccaattcggcgccccgatcgccggatctcctcgccggcgccggggccctcgatcgccctctccccatgcccgtgcccctccgggggtttcattgcgcgggcgccggccatgtcggacctcgcttccagctgcatggataaacttgcgtattttaaaataaaggagctcatagatatcttaaattagctggggtttccgaagcatggatagatgtattaccttgttacagggtattggctttttttttta

SEQ ID NO: 272772 - DNA, 354 bp, Zea mays
tctgcccgtcgtcgtatcccccggtccgccggtcacctcgacaaacggcgaagggcggcaaaatgctgcagtgcatctttctcctctccgattccggggaggtgatggtggagaagcagatggcggcgcactgcgtggaccgcgctatctgcgcctggttctgggactacgtcgtcgcccacgccgccggcgatccttccaaagtcttacaggttgtggtgtcaccaacgcattacttgtttcaaatctatcgcaatggtgtaacgttcttggcatgcacccaagtggagatggccccactgatggcagttgtgtttctctctcgcgtggctgttgtcttgacagtttatcttt

SEQ ID NO: 272773 - DNA, 337 bp, Zea mays
atctttttcctctcgtctcttccaccccccgacccgaccgggcggcctcctccccgaaccctagcccccctacaaccaccgcgtccggcctcctctgggcggctccgccccagatccagcacagcaggttaaaaagggggcgggcaggcgttggatggacgggccgaagcggtcgcagctgcgggtgcgcctccgcgtcacggcgcgccggcgtggtgccgatggcgacggcgccgggggcgctgccgggcctggggggcgtaagcgccggatggaggcccccgtccgcaactccgtcgccaagctgcagcgccgcgagatcgggggccgccagctc

SEQ ID NO: 272774 - DNA, 482 bp, Zea mays
cgatgacaggccatctgctaggagctgctggtggaatagaggctgttgctgctatacaagctataaggacaggttgggtgcatccaaatctcaatttggacaatccagagaaaaccgtggatgtcaggatgctggtgggcccgcagaaggagagatgtgatgtgaaggtggcgctgtcgaactcgtttggatttggcgggcacaactcatcgattttgtttgcaccattcaagtgatagccgttgacaaatttcttgtggtgggctacacaccgtcgaactgagaccttgtataagaaagtatttaccggacgcagcaatatctcctgtactgcaagattaggaagagatccaaaaggcttagtaggatgtgtattgccccacaaccggacgaaagatggaaactggtccgaaattatgtcgaccgagaagggcatccgttcagatgcccccccccccctttacgtgttatattttctttcc

SEQ ID NO: 272775 - DNA, 548 bp, Zea mays
cccactcgtccgctcgtccgatcaggaaggacggtggatgaaaaagcgccctgcacgcctgaacgatcggcattattgttcactatctccttttgttttccctctcccgttcatctctctcctctttggccttcctttccttgcgacgacgactgggacgagcgccccccgcgcttctgcaggcgagcaccccgccaccagtcggagatgaacgcgtccaggaaatccagccatctctccagcaaggacagtgcagagaccgcgagggatatcatcaccacgtccggccaaatccaacccctcaaaatcccggacgctgttgctgcgctcgcacaggctgctgcaaaggcaaatggtgagaccgagaaatatcttccagggtggcctgtgttctcgcctcctaaggtgcagttggacaagtgtaccaagtgctccagagaattctgttctgcaatcaacttccggaggcacacaacgtgttcatccgtagatccctcaagatagatggggattttccaaagaatagagaccttctcgctgcattctgg

SEQ ID NO: 272776 - DNA, 551 bp, Zea mays
  unsure (1)..(551): unsure at all n locations
cacacgcgtccgcggaccgtggtcacactgcaaaagcactcctctcttcgtcctccccctcccacctccatcccatcacataccataccattccataccaccagagaagaaccagtctcgctcgctcccaactcccaagccaagccggatcccaaatcggcacagcgcacccactccgctcggtcccttcgttcacccccatcatccatccatccatccagccatgggcggcaaggactgcggcaaccacggcgaggacgacctgcggcggtcgtgccggcgcctgctagcgatcctcctagtcctggccctgatcgtgggcgtgatcgcgctgatcatctacctggtggtccgccccacgcacccgcgcttctacctgcaggacgcgtcgctgcagcagctagacctctccaacgccaccaccaccaccaccacctccgcgtcctcgtccctcctctccacgacgctgcaggtgacgctggcctcgcgcaacccgaacgagcgcgtgnnggtgtactacgaccggctggacgtgtacgcgtcgtacaagt

SEQ ID NO: 272777 - DNA, 431 bp, Zea mays
ttgtcgcgtgggcgttcacccccatccatccagccagccatgggcggcaaggactgcggcaaccacggcgaggacgacctgcggcggtcgtgccggcgcctgctagcgatcctcctagtcctggccctgatcgtgggcgtgatcgcgctgatcatctacctggtggtccgccccacgcacccgcgcttctacctacaggacgcgtcgctccagcagctagacctctccaactccaccaccccgtcctcctccctcctctccacgacgctgcaggtgacgctggcctcgcgcaacccgaacgagcgcgtgggggtgtactacgaccggctggacgtgtacgcgtcgtacaagtaccagcaggtgacggtggccgcggcgctgccggccgtgtaccagggccacggcgacgtggacgtgtggtcgcccgtgct

SEQ ID NO: 272778 - DNA, 523 bp, Zea mays
agcagctcatgctgaggtacggtagccccggcctggaccgcttcgaccctgccctcttctccccgctgcacgagtcagtcgacggcgacggctacggctacgagcagtcgccggcgcacagctacgagcccgagcgaagcccttgcgctaggcccggcgggacggcgacggcctcgtcctcccccgccgcagcaccggggaagaaagcggggccgcgcaggctcaagcttctcggtaacatcaagaagctgctgccggcggtcggcaagagaagccactcaaaccacgggcacgggcacgccggccacgatggcaggaaggcgccggcgccggctccggctcggagggacgagtacctcgacaaggccatgcagtggctgtcggcccacgacgtgctcgacggcgaccactcgtacgtgagcacgccgctgtcgtcgtgcgagaggacgccgctgagcagcgccacgaccagcacgaccgcggactcacgcgcccgctacggcgacggtggtggtggccgcag

SEQ ID NO: 272779 - DNA, 551 bp, Zea mays
ccacgcgtccgccacgcgtccgccaaaacagaggagcccgtcggccgtcgcaaaaaaacaaaacaagaccaccgcaccatggaatcgctgacgcttcgcgcttcgacggccgcctcgccgctgcagcgacgccggctgctccccgggcggcagcgcgcgacgtacgtccgcgccacggcctccgccggcgagccggacctctccgtgcgcgtgaacgggctgcagatgcccaacccgttcgtgatcgggtcggggccaccgggcaccaactacaccgtcatgaagcgcgccttcgacgagggctggggcgccgtcatcgccaagactgtgtcattggatgctgaaaaagttatcaacgttactcctcgttacgcaaagcttcgggcagaaccaaatggggctgccatggggcgcatcattggctggcagaacattgaactcatcagtgacaggcctctggagaccatgctgaatgagttcaagcagttgaagaaagagtatcctgacaggatacttatcggttcaattatggaggagtacaacaaagctgc

SEQ ID NO: 272780 - DNA, 645 bp, Zea mays
  unsure (1)..(645): unsure at all n locations
tctgtgccctacatctccatgggcgcgctcctgaggcaggagctcaacccaggctcgcaactctacaggaagattgcaaactctgtgaatgaagggaggcttgtgccggaggacatcatatttgggttgctgacgaagcggcttgaggacggatacaacaagggtgaaaatgggttcattcttgatgggattccacgcacccgtatgcaagctgagattcttgacgagattgtggatgttgatttggttcttaatttcaagtgtgctgatggctgtttcatgaagaagcaatcgagaggcaacatctgcgcccactgtggacagctctttgacgtcagcaattcagcatctacgaactgtagccccagcctcgggagctatacatggcattctcaggcagaacctgctggtgttttaggcctcgaagcctctaggatggagaggatgcgcacatatgctgagcaggccatgctgcgcgtttagtcttggccttgctttatgccaaaggatgcatagaacagtatgcgcttcgcctttactgaccagtatagtgactctacagtagtacagtcaggccttactaaacttgtttctgtattaaaaaaagagaaccacanatcttcaattgcattattggtctaattt

SEQ ID NO: 272781 - DNA, 365 bp, Zea mays
  unsure (1)..(365): unsure at all n locations
gcatggatgctcacaccactcacattgttgcaagaaagaacacttcgctttcattcacctcaaatgagctcatggatcattttcccttcgcttggttacccatggaccccttcacagccatggcgctcagcggtaccctctcaccctcgttctctaccacatctaccaatgataccatgtacaaccttaacccagcgttgtatgcatccctcgtgccaccaataaggaaacctgcaaccccgaccacactagaggtagggaggcaatgcaaggaggaggaggatgcatccattcntctggtgcacctgcttatcacttgcaccaattccattgagactgttgactactcgatcgcacaaagaaac

SEQ ID NO: 272782 - DNA, 639 bp, Zea mays
cccctcacccgggcgtctgtttcgcctgccccacccacccacagcatcagaacggagggaattagggagctttggccggttccgcaacatcggggaacggcgggaaccagggagctcccgccgcctagaaccggagctcccaatcgatccactggccgttgagccgacacttcaatggaagcccacgcctcgcggggccgccgcaccctggaggagattcggcagaagagagccgcggagaggatgcaacacgccgtcccgatcgcggcgtctcacgtcgactctcacgggaaccaaagagctggagctgagcttcttgctcgagttcaagaacttgaaaatggcaacacggaattggagagggaaaacaaaatgctcttgtccaagatcgctgagaaggaagttgagaaggacgcccttgtaaaccgtttgaatgatctcgagcggaatgtagtgccctctttgaaaaaaaccttgaatgacatttctttggagaaagatgctgctgtagttgctaaggaggatgctctagctcgactcaggagcatgaacaaacggctcaaggaagcagaggaagaacagtatacggtatttattcgaagatgatcgttatcagcattatgatcacttggctaatct

SEQ ID NO: 272783 - DNA, 429 bp, Zea mays
gcagggtgctcactaacgcccactcggttgagcattacacccaggtgaagctcaagaagcgtggctcggacaccaagtaccttgcgactgtccttgccataggcaccgagtgtgacattgcaatgttgaccgttgaggatgatgaattctggaaaggcgtttcacctgtagagtttgggtcgctgccagcacttcaggatgccgtcactgttgttggttacccaattggaggcgatactatctcggtgactagtggcgtagtttctaggatagaaatactttcatatgttcatggttctacagagcttcttgggttacagatagatgcagctataaattcaggaaattcaggggggcctgctttcaatgataagggaaaatgtgttggtatagctttccaatctcttaaacatgaagatgcagagaaca

SEQ ID NO: 272784 - DNA, 398 bp, Zea mays
tctagatcgcgagcggccgccctttggttggtttttttgaactttaagggggatttctcattaccaatgctcagctaaaattctaactttccagggctcagtggagcacttctgtttccagacagattcacaagaaatgtacaagtggactgaacttttgggaaggccagtgtggttgtaaaatgagtactcttgtaaaagcagatgcattcttgcttaatctccattgcccagagtgttgccgcttattcagcctctatgtctaatattctcctcaaatattccaattgttcaaactcaccttgtaggttctcccactcttgaagagacaacgaaactaacttccacccagaagcagtaatgtagcgtcgtttaaatgctgtgtggcctaatggtgt

SEQ ID NO: 272785 - DNA, 1123 bp, Zea mays
gaacgacgacctaccctgtctgcggtctgcctgcaaccacacgcactggaagcatcgtgcgggtgcggcgcagcgagcgagaggagtggaggatgacggcgcccaagcctggcgggggagcggtggcagcggcgcgggcggcggcggcggggcccaggacggtgctcatgacgggggtgagcagggggctgggccgggccctggcgctcgagctggcgcgtcgcgggcacgcggtggtcggttgtggccgttccgccgagcagctccgctccctcgaggcagagatcacgtcaccgtcgcgccacttccttaccgttgccgatgtctagccagtggagctgattatcgtctcagactatggactagaacagtctgtgcatgagttgctggagcattctccacattgaagaactggtttccaccatattaaaaatggggagatgagagatctgacagcagtatgtccgagctggcaaaggctgttttggaaaagaagcaagttccagatattatagtaaacaacgctggttcaataaacaagaataacaagacatggaatgttccagcggaagattttgatatggtggtcgatacaaatatcaagggaacagcaaatgtgcttcgccattttgtaccacttatgatagagaagagacatgggattataatcaatctatcctctggttggggaagatctgctgctgcagaggttgctccatattgtgcttcgaagtgggcgattgagggcttgacacgctcgttggctaaagagctacctcctggattggcagccattgctcttagccctggtgttgtgaatactgacatgcttaattcatgctttggaagctctgccgcattatatcaaacaactgaaacatgggcacccaaggcagctacaatgatactaagcctttcactggacgataacggtgcctccttgactgtatgaagtggtgaaattttgtgctcaactgattactgatggggggtctgtatatttttgcgagattatggtgatgtaaaatagtagttataatgtgtgtgcactctgatgtccctagctgctgcctgaacgttattgtttagccttacctctatggcctatgcacatgctcttctt

SEQ ID NO: 272786 - DNA, 698 bp, Zea mays
  unsure (1)..(698): unsure at all n locations
tgntcttttgctcatgactggggtnagcaagaggcttttcacaaaccctggggggtcgtctaacacgtcncggtcactctgtggtcggttgtggccgttccgccgagcatctccgctccctcgaggcagagatcacgtcacctttgcgccacttccttaccgttgccgatgtctagccagtggagctgattatcgtctcagactatggactagaacagtctgtgcatgagttgctggagcattctccacattgaagaactggtttccaccatattaaaaatggggagatgagagatctgacagcagtttgtccgagctggcaaaggctgttttggaaaagaagcaagttccagatattatagtaaacaatgctggtacaataaacaagaataacaagacatggaatgttccagtggaagattttgatatggtggttgatacaaatatcaaggggacagcaaatgtgcttcgtcattttgtaccacttatgatagcgaggagacatgggattataattaatttaacctctggttggggaagatccgctgctgcagaagtcataccgaaagccaccaaatgcattatagttgatcctttctgttgaatcaaaatccttagtgcatactaaattgcacgttgccatttcaggttgctccatattgtgcttcaaagtgggcgattgaaggcttgacacgctc

SEQ ID NO: 272787 - DNA, 302 bp, Zea mays
tcatgctttggaagctctgccgcattatatcaaacaactgaaacatgggcacccaaggcagctacaatgatactaagcctttcactggacgataacggtgcttccttgactgtatgaagtcgtgaaattctgtgctcaactgattgctgatgggttctcttcatctcttgtagcctgatgtgtagatttttgcgagattatggtgatgtaaaatagtactgataatgcgtgcctgcactctgatgtccctagctgctgtctcaccgttgttgtttagcattccccctatggcctattcatat

SEQ ID NO: 272788 - DNA, 456 bp, Zea mays
cacgttttaagctgcgagcgagatctgctttcacagcgtggctgaccagcagatccgtcgttgccggaacccacgctcgccggctgcgaatgcatctgtagcctgctcttcgtccacacggacaattggacgagctagactctgcgtcgccggcgatggggtgctccttctcagggctgaacgcactgtacgacaccgtcggcggtcggggtggtgacgtctgggttaacgactaccacttccgcgtgctccgcaggctcggcgatgccggccctgcgggctcgtcggtcttcctcgtcaaggaggtcgtcgccgccgcaaccgcctccgacggcacggctgggtcagagcccggcgcctcagggatcgccgggaagaaaggcatcgacccatcacacatctcagctgacgggacatatgctctcaagaaagttcttgttcagagtgatcagcact

SEQ ID NO: 272789 - DNA, 1016 bp, Zea mays
tcgtttacgcgtccgtccacgcgtccgcccacgcgtccgtgctctttcaaaatatgtggattggacagacagaggtacatgcatcctttttggtgatgctgctggtgctgtgttggtacaggcatgcagcgctgatgaagatggcttgcttggtggtggtgttcaaagtgatggcaatgggcaaaaacacctaaatgccgtaacggcaaacgatgagtcaatcttgtccaataccaatggtgttcctggatttccgccaaagaaggcaacctactcatgcattcagatgaacggaaaggaagttttccgctttgctgtccgatgtgtgccacagtccattgagaaggcactccaagaagctggtttgcccgcctccagtatagactggttgttgttacatcaagctaatcagcggattattgatgcggctgccagccgattagatatcccgtccgacaaggttatttcaaatcttgccaactatggcaataccagtgcggcatccatcccattagcattggatgaggctgttcgcagtggcaaggtgaagactggtgatattattgccgcatcaggttttggcgctggacttacctggggttcagctattgtcaaatggggctaattattctacgtgagccataacaacatcaatgagatcttcataggccttggggacctacatctatttggtctctccccccttccacccattttctgtgcaacatttttctatcgcatgtgtcggtcttccttgcacatgaaaatctagtgccattttaccgtattcctttggctcattacacaactgagagtagattggtggatgaaaatggttgaattttgcatcgaggatgattgtggtggtactaaagatgagattacactgtaaagttaatgagcctttttgtcagggaattttactgaataagcatgtacaaggagaggtgggccgtggacatatgctgtaggacaattcttagtaattttgttctgcttttattatacacctattg

SEQ ID NO: 272790 - DNA, 555 bp, Zea mays
tctaaaggctttggatttgatattacagctgcttgtagtgggtttttagtcggcttaatcacagctactcgctttatcaaaggcggaggttttcagaatgtcttagtaattggtgcagatgctctttcaaaatacgtggattggacagacagaggtacatgcattctttttggtgatgctgctggtgctgtgttggtacaggcatgcagtgctgatgaagatggcatgcttggtttttgtgttcaaagtgatggcaatggacaaaagcacctaagtgccatagcggctaatgacgagtctatcttgtccaataccaatggtgttccaggatttccgccaaagaaggcaacctactcatgcattcaaatgaacggaaaggaagtttttcgctttgctgtccgatgcgtgccacagtccattgagaaggcactccaagaagctggtttgcctgcctccagtatcgactggttgttgttacatcaagctaatcagcgtattattgatgctgctgccagtagattagatatcccatccgacaaggttatttcaaatttt

SEQ ID NO: 272791 - DNA, 606 bp, Zea mays
cttgccaactatggcaataccagcgcggcatccatcccgttagctttggattaggctgttcgcagtggcaaggtgaaggctggcgatattattgcggcgtcaggttttggtgctggacttacctggggttcagctattgtcaagtggggctaattatttgacgtgagccgtagacatatcaatgagatagcttcaagccttcgaaggcctcgggaggcctacatctgttggttcgtttccgtgtttttctgtgcaacatttttctttcgcatgtaccagttttccttgcacatgaaaatccagtgcccccttttcccgtaatccatctgttccttaggccccttccccagttgagagagattgtaatgtagttgccagtagtttgagtggtggatgtaatgtaagttcttgaattttgcatggaaataaatttggtggggttaaaaaatgagatccccctgtaaagctaattggccttttgtctgggaactgtactaaccggtttccgatcttgtggcccccgccaataagcatgttccaagaaaaattggcccgtggacgtatcctgtaggccaattcttaggaattttggtctgttttttcccc

SEQ ID NO: 272792 - DNA, 648 bp, Zea mays
ggtctccgcgcctccctccctttccctaatcccccgctaccgcggcgcttccccctcccccgctccctccacaattaggccagtagcccgcttgcagctgcggcgtcggtcgggaagaggccttgctcccgtgccgcagatcgggagaggagctccccgctcccgcctcgtcgtccgcttccccgccgccggtctctccgggaggcgtctccgtcgccggcgatgagctgcttcgtctgcttcgggtcggcggcgcacgacgaggagcctaggaagcccgctgccgcgggcgccggcaaggacgccgcgccggatcgcgcagtggctcgcgtcggatcagataaatcaagatcacagggtggaccagactctaagaaggatctaattatccataaggatgggaatagtcaaaatattgcagcacagactttcacttttcgtgagctcgctgcagccactaagaacttcaggcaagattgccttttaggagagggaggttttggtcgtgtatataaaggacgctcggagaatgggcaggctggtgctgtgaaacatcttgatcgtgatggtctcccaggaaacagggaatttctggtctgaggttctcatgctcagtctcttacatcacactaacctggtcaatctaat

SEQ ID NO: 272793 - DNA, 536 bp, Zea mays
cgctgagcagagctgacttttgctccgcttgccttgccccaaacctcatattcccctcctccttgctgtagctatagctgtagcttttcatcctctccctccacggcaccgcgcctccctcccccccttccccatatcctcctcccctccccaattgggccaatagcccgctccgcttccagtcgcggcgtcggtcggggaagaagcttcgctcccgtgccgcagatcgggagaggagctccccgctcccgcctcgtcgtccgcttccccgccgccggtctctccgggaggcgtctccgtcgccggcgatgagctgcttcgtctgcttcgggtcggcggcgcaggacgaggagcctaggaagcccgctgccgcgggcgccggcaaggacgccgcgccggatcgcgcagtggctcgcgtcggatcagataaatcaagatcacagggtggaccagactctaagaaggatctaattatccataaggatgggaatagtcaaaatattgcagcacagacttttcacttttcgtgagctcgc

SEQ ID NO: 272794 - DNA, 325 bp, Zea mays
gtcttgcttgtggagagtgatgattcaaccaggcaggtcgtcagtgccctgcttcgttgctgcatgtaccaagttatctctgccgaaaatggccagcaagcatgggcttatcttgaagataagagaaacaacatagatcttgttttgactgaggtttttatgcccggtgtatctggtatttctctgctgagtagaatcatgagccacaatatttgcaagaacattccagtgattatgatgtcttcgagtgatgctatgagtacagtctttaaatgtttgtcaaaaggtgctgttgactttttagtcaagcctatacgtaagaatg

SEQ ID NO: 272795 - DNA, 670 bp, Zea mays
ggagaatgcaagtgttaaagttgcattgaatcgcattgccgttgtttctgtcctggatgcacataccctgtcagtgatgtcttatgaagcttggaggctcatacatctgtttctgttggctctctctagctatatgcagtggagctgctaatatgcatgaagtttgggctaggtgagcttcctctttcacttgtcaaaccagtataggtattggccgatgtcaagaagacaaggccggcgacgagaggacgacagcgtgcaagaagagaaggcccatgttaggcgcaactatagggctcaaggtcaatcagttgtggtcacacttttccatttttacgttcagctaaactgaccccctgtctcatggtgcaactgtgcaaggataggcaacaagtgttcaacaatatgtctgtggatcaattgacctgcatttcagcttttagttgaggatcaaaatctcgtgtcgttcagggccctcggtagagagacattaatgtgtcggcaccgtggatcgtcgcagttgtgggtcactgtaacggcactggtcacaggcaccatctgcctctgttcgtcctcctctattggcctcctcagcacctacagggtccagatggaaaagtttctataatacatatgtaacaaatacatactccttgttcaagagatcgta

SEQ ID NO: 272796 - DNA, 522 bp, Zea mays
gacccacaacgtcagcccacgcgtccgtagccatgggcagcgcaccaccaccaacacctggcaccgtcctccgccgtcgtcgtcactcgctcgaacgctcctccatccatggcgcccaagaacgctctccccgccgccagcggcatgacgctggagccgaggtaccgcggcgtccggaagcgcccctggggacggtacgcggcggagatccgggacccggccaggaaggcccgcgtgtggctcggcaccttcgacaccgccgaggccgcggcgcgcgcctacgacgccgccgcgctccacttccgcgggcccaaggccacgaccaacttccccgtcgcgttcgccacggccacggccacggacacgcgcgcgctcccgctcccgctccggctcccgctgccgccgtcgacgtcgtccaagaagctggccgtgagccccagcggcagcaccgtggagtcgtcgtcccgggactcgtccgccgcgccggcccccgcgccgtcgctcgacctgagcctcggcatg

SEQ ID NO: 272797 - DNA, 392 bp, Zea mays
ccctgcccatcagcacaaccaccaccaccgccgcctggccgtaacgtcacgcgctcgcctccttccatggcgcccaggaacgctctccccgccgccagcgccgtggccaacggcatgggtgatggagccgaggttccgcggcgtccggaagcgcccgtggggcaggttcgcggcggagatccgggacccggccaggaaggcgcgcgtggtggctcggcaccttcgacaccgccggggccgcggcgcgcgcctacgacgccgccgcgctccacttccgcgggcccaaggccaagaccaacttccccgtcgcgttcgccgcgcttccgccgccgccgcccaagaagccggccgccgtgaccgtgagccccagcagcagcagcaccgtggagtcc

SEQ ID NO: 272798 - DNA, 380 bp, Zea mays
cggcgacgcgcacccgccggcaaccagacggtggcgcgtcaagactccccacccggctgtccggcgaggacctcggctcctcgcccctccgccgctaaagagccgccatccagccgcccagccccaggccccaccgccccagctccacctcggtcccctcgcctcacctcgacccggattccgcccctcgcctcacctcgacctacatctgcctcgtccccatggaggcggcggcgagccgcaagcgcgcgtacagcatcatcgtgcctacctacaacgaacgcctcaacgtcgccctcatcgtctacctcatcttcaagcacctcccggatgtgaactttgagatcattattgtggatgatgggtagtccatatggaac

SEQ ID NO: 272799 - DNA, 1577 bp, Zea mays
cctcaatccgcagcacttgacaaagcatctccagttcgcccaaaatctccagccatgaagaaagcatctccaattgctcccaaatctccaccagttgataaagcctctccagctctgccaaaatcattatcaggtgctaaagatgcgctttttccttctaggtcgctgcagattgataagtttactccagccgccccaaggttatcacaagatgataaggctgctctgccttcttcagaacagtcacatatatctccagctactacttctgaagctcaaggggcaactactaggaaggtcacaaccaccacctcactttcagaggctgctgcagcatggaggccttcaagtgctcctgtgttacccacaccaagatcaaccgggccagctgcttcacatattcaaacttccacattgctttcccgctctatgagtgaagcagctgggagaaggccagtaaatgatccttcattttctgccccatcttatactccacagacctaccggaatgcaataattggtaagtctggtctgtctatgacctccgcaagccttgcgtatcagccgtcttctctggatcaagacactgctccttcacggcctctatcagcatatgcatcaagtacagtcatgatgcctcctgcaggaagatctgatcagtcatcagctaggcatggattcaagtctgggcctggtaagttagaagcacatgacggctggcagcagtggaaaggtgacagtaatgttgatatgcatctctggagggaccacgctccttaccaacaaatgaccaacagtcaagcatatgagcagtctcggagggacgatacttatcagcaagcatgcagcagaggaacagaaaagttcagcaggcatgcaggactgcaagctaggcagcagttccaaaccgagacacccgccagtcatgtatggcatcaaccgcaggggccagtggcagaagaatttccacaccttgacatcataaacgacttgcttgaggaggaccagatcaacggcagtataccggagtcgtttcgtcaagattacaatgtgtttggcctgccattttcaccaagaggaaacgtgtcagatatgggaatggcttctgttagaagtcctgctcggttcaattcacccaagtacgatggtggattgtcgggggcttatgacatgaatgctgtcaatgggttgagggaacggcagtttccctcgttggatatctactctaatggcctgtctgacgtgagtgcttctaagccttggctgaatggctctgccagtccatcggtgagccttggggtcaacacaaatggataccaccccccaggtgggtgagtacctgggaggtggggtgaacggggtctccttgtggcgccgccatgccaacggccgctggtaatgcgaggtgcctgtatacaatcatacagtcggaataatgttttgttgtaacagatggtttcgggcctgagctgatgcgccatgtaattaaaagtttttaagttttaaaagggaaagaaagagatacaccctgtaaagtctgcgcctttattaggataatttgagtgcttttctggttg

SEQ ID NO: 272800 - DNA, 1198 bp, Zea mays
acttccattcttccgctctcctccccgtcatggcttccaccttctcccccacttccgccgcgagggccctcctcccgggctccacctcccgcccactcttcctcgccgcttcagcttcctcagggcgcattcaaccatccaggaagggactggacttccgccgcggccgattcaccgtctgcaatgtcgccgctcccaccgccgccgagcaggaggcgacggcgatcggcgtcggccgcgaaggagacccagcgccccgtgtacccgttcgcggccatcgtggggcaggacgagatgaagctctgcctgctgctcaacgtcatcgaccccaagatcggcggcgtcatgatcatgggcgacaggggcacggggaagtccaccaccgtccgctccctcgtcgacctgctcccggacatccgcgtcgtcgtcggcgaccccttcaactccgacccggacgaccccgaggtcatgggccccgaggtccgccagcgggtcctgcagggggacaccggcctccccgtcaccaccgccaagatcaccatggtcgacctgcccctcggcgccaccgaggaccgcgtctgcggcaccattgacatcgagaaggcgctcaccgagggcgtcaaggcgttcgagcccggcctgctcgccaaggccaacaggggcatactgtacgtcgacgaggtcaacctgctggacgaccacctcgtcgacgtgctgctggattccgctgcgtcggggtggaacacggtggagagggagggtatctccatatcccaccctgctcgcttcatcctcatcggctctggtaacccggaggaaggggagctcaggccccagctgctggaccggttcgggatgcacgcgcaggttggtaccgtcagggacgccgagctcagggtgaagatcgtggaggagagggctcgtttcgacagggatccgaagacgttccgtgagtcgtatcatgacgagcaggagaagctccagcagcagatatcatctgcacggagtaaccttggcgctgtgcagattgaccatgacctccgtgtcaagatatccaaggtgtgctctgagttgaacgttgatggactcagaggtgacattgtgactaacatggctgccaaggcgctggctgcgttgaaaagaatggacagcgtcaccgtggaggacattgctactgtcattcccaactgcttgaggc

SEQ ID NO: 272801 - DNA, 874 bp, Zea mays
tcttcttcagatattcattaaagctttagcagatgtgcctgaacataggcgattgacgcttatggtttacctcttaaggaccatgggaaaagaaaataatttgagtactgtgatcatgcatctgttacactcggtggttgagcggatttcacactcgttttctgtacatcatggggacgattatagattggctatgtcacaggagtgggagtatggattggcagtaaatgtgcttgaccagttttcgtataaattgtggtttccttgtttgagtaagcttctaaaaaacatcagggtgcatgagaagcaagatctgcatcttatgctacatttggcaatgaggcttattctatttaagttgcaagatacagaacttaattttgaacttgaatctgaggaagctgctaattctatccagggttctcttggggcacttatggaggaagttatcttgtgtggtgtgtatgccagagataaaaaaagagatatttgtactgacattactaaagaagtcagagattttgcaaatacaatactcaaaactattacaggctggatgcgtgcttcgacatacttgatgggaattactctgctgttggatcattcagataatcatgtgaaaagaaagacacttcggattttgtctgaaacggccagaggaaacagtttggttcagaagaatcaaaggaaagcacgaaaactgaagcatatatctggtactactattaaagtagacaagagctctggtccttatttcagcaaattgtgcttaaagattctggagttgattgacagagttggtgattcggacactaaagtgaaagtagctgctatttcttcgcttgaaacactagcaaaagaatatccctctgat

SEQ ID NO: 272802 - DNA, 520 bp, Zea mays
ttctggagatcgccttcttcgacaagtacaccagcaccggcgaggtcgtgggcaggatgtccggcgacacggtgctcatccagaacaatgggaaggttgatgccaatgctcgtccaggcaaacaaatatcaataaacaagtcagctagcaggaggtcgtcccgtgataacagtagccaccattcattctcagtcccattcggtatgcctcatgggattgacattcaggatggttcatccaacaaactgtgcgacgagatgccacaggaagtgcctctcagccggctcgcgtctcttaacaagccagagatcccggtcctcgtactaggttccattgcctcggtcatcagcggagttatcttcccgatcttcgcgatactcctgtcaaatgtgataaaggcgttctatgagcctccacatctcctaaggagggactcacagttctgggcgtccatgttcctggtgtttggtgcggtgtacttcctgtcgctccccgtcagttcctaccttttctccatagc

SEQ ID NO: 272803 - DNA, 995 bp, Zea mays
tcgtttaggctgccgcatacaaaatgttcgagacgatcaacagaacgccagagatggacgcgtacagcaccacggggaggaagctggaggacgttcgaggggacatcgagttcagggatgtctatttctcctacccgacaaggcccaacgaacagatattcaagggtttctccctcgccatacctagtggcacgacgatcgcgttggtaggccagagcgggagcggtaaatccacggtcatcagcctgatcgaacggttttatgaccctcagcttggcgatgttctgatagatggtgtgaatctcaaggagttccagttgaggtggatcagaagtaaaatcggccttgtcagccaggagccggtcctttttgctgccagcataaaggagaacatagcttatggcaaagacaacgcgacggatcaggaaatcagagctgctgctgagcttgccaatgctgccaaattcatagataaaatgcctcagggttttgatacttccgttggtgagcatgggacacagctttctggtgggcagaagcaaagaattgcgattgcaagggctattctgaaagatccaagaatcctactattggatgaagctacaagtgctctggatgccgagtctgaacggattgtgcaggaagctctcgacagggtcatgacaaacaggacgacagtcatagtcgcacaccgtctgagcactgttcgaaatgctgataccattgctgttattcatcagggaacactggttgaaaaaggtccacacagtgagcttctaagagatccagaaggagcttatagccaactgataaggctacaggaagcaaaccagcagaacaatgggaaaggttgatgccaatgctcgtccaggcaaacaaatatcaataaacaagtcagctagcaggaggtcgtcccgtgataacagtagccaccattcattctcagtcccattcggtatgcctcatgggattgacattcaggatggttcatctaa

SEQ ID NO: 272804 - DNA, 325 bp, Zea mays
ctgacgcgtgggcgcgagcggccgcccttttttttttttttataatgaatggtgagggttggatttatcgaacaaaataaatgtaaaatggtctcacgatgagtcattcatatagcaagggattcctcaaataataacaccacataaaaagtttgaaggatcccttactgctactgcgtgtcatcatgctagttagctatctttatctcttgaaagtaggcggtcttctgactttcgtagcttgctcgaacgcataagcgatctcaatcaacctcggctcgtagccctggagcccaccgaagcagatcgcgaaggggactccctg

SEQ ID NO: 272805 - DNA, 425 bp, Zea mays
cgctactgcgaagctccccccagttcccacggtttcccccacgacgccggcgatgggcaagcggggacagcgcggcggcggcgacggagaacccgccgcggaaggcggtgctggcggaggacacagcccctccaccgtgttcgtttccaacctcccctacaccttcaagtcctccgatctcgaggcggtgtttagcgaggtcggcccactgcggcgctgctttatggtcgcggagaaagggtcggagaagagtcgaggcttcgggttcgtgcaatttgcaactgttcaagatgctgatcgagctcttcaacaaaagaatggatctcctgttgctggtaggaaaatcagagttaagctagcaatgaatcgtgctccactgaaggaacgtttgcaaaaggtgaacatgcaagtgaaggactctgatg

SEQ ID NO: 272806 - DNA, 1147 bp, Zea mays
tcagaatcggatcaaagagcaagcgacggggatgagagagaagagaggaccgtcgtctccccttcctccctcacaagtcacaactcacacgccagacggagacgcggccgcagccgagcttacccccgccggcgagttcacccccacatggtcggccggatggagcggcagaccgcgtcgtcgccagcgtcgtgctcccccgccgccgccgcctcctcctcctcctcggcctgcggcggcaagaaagcgccctgatatcctcaacatgatccggaatgcagcctgtcttaattcgtcgtctgctgataccggcaagggaaggagtaaattgtcgaccaacaaagttacacatggattccacctggtggaaggcaagtccggccatgacatggaagactaccatgtggcagagtacaagtatgtgaagaatcatgagcttggtctctttgccatttttgatggccatttaggagataaggtgccaagttacttgaaagctaacctttttagcaacataatgaaagagcctctcttctggtctagccctcaagaagcaataaagaatgcatactgctctacaaacaagtatattctagaaaataccaaacaacttggaccaggtggttcgacagcagttactgctattgtagttgatggtaaggacatgtggatagcaaatgtaggcgactctagagctgttgtgtgtgaaagaggctctgctaagcagctcactgttgaccatgagccccatgaaactaatgaaagacagaggattgaaaagcacggtggctttgtgacgacatttcctggtgatgttcctcgggtgaatggtcagctcgctgttgctagggcatttggtgaccaaagcctcaaggcccacttgagctctgaacctgatattagtcatgtaccaataaactcaagtatagagtttgtcatacttgccagtgatggattgtggaaggtaatgaagaaccaggaagccgtcgatctcgtgaagtcaatcaaggatccacaggcagcagcgaaacgattgaccactgaagcgttggcaaggaagagcaaggatgatatctcttgcattgtcatccgtctccgctgctgagttaccctctctccacggcactgatatccagtcttcacctca

SEQ ID NO: 272807 - DNA, 460 bp, Zea mays
ttcggtccagcacattgcagaccgcctcagcgcctcaccaagcgaaactcgttggcggctagggttttgctgcctcccgagcccaaaccctagagcacccgcgcccatcccatggcgtgctaggcttcgattgagactggggggattagtaccgcaggctgggattagagcaagcgccgagcggaaatggcatcgagtaaccaattcgatctacttggagacgtcgagaacgacgaccctgcccacctcctcgcagctgccgagaagaacggcggccgcggtgcctaagcccgcgcccgcgccggccaagttgcccaccaagcctccggcgtccgcgcaacctgtgagggaggaaaggaactttggtgctccaccgcgcgatggtccaggacgtggaaaaggcggccgcggcggcaggactggcccgaggcgagattttggcgatgctgatgcccacggc

SEQ ID NO: 272808 - DNA, 647 bp, Zea mays
cccacgcgtccgaagaatcccagcttctttttgaggtttactttgttttaggccttcctagggtgttatatctactcttgggaccatatcaaattcacaaagtctcgacacaatcggatggtttgcacgagatccatgtattcttcatcgtgttggtgaagttcttttaccagccgctgtaggtggacttaagcaaacaaggcaatttgtttttgccgatgactgctttcagctgctaaaggtctctaatcagaaaactgtgcatgccataaaaaatgctgtccaggcattacgtggatccacctaaacacatcaatattggccaatatatttattccaatgtacctagcctgaaggagttttgcgaaccagctacaaagttagaagaaggaacatcagccctgaaagcaatctccacagtgatgttgttattacagagatatgagtttaaagcaaaccacgaggagtgggttaacactgttaaacctaagcttggccttgatatctctactcgtgtgctacaagccgtgaattttgcacgggaaaacatcaaatctttgtacgcaataagaaatgaattgcgggttgcactcaagaatcttctaaaggatactggaattttagttctaccaaccacagctggatat

SEQ ID NO: 272809 - DNA, 620 bp, Zea mays
tcgcttatcaccaagcatcacaactggcaacttcatggcattcaaaagatagtggaggcagtgcaagtggctcatttgatcaaggcagcaacattattgatgagatcagacaaggtgctacaaaaagatttgccgttcctctagtaactaggagcacactagaagttgtcataccaaatagtgctgttgcaagcctcaccatgagagctggtagcaagcttgctcaaataagcgagatctctggtgctactgtaacgctagctgaggacagacctgacatcttagagaaagttgttcgaatatctggtacccctgagcaggctagcaaaactgagaatttgctgcagggatttattctaagcatccccagatgacattccttcaggctagttgaagaccctctgcatgtcatagttgttagttcgtaaaattcctgtgtatattcgaggtagaatatgctgatgtcatgtgattatttgtttaattgagcagcatgtattcatgtgtggatacatgctgttttccttgtaaccgttaactggctgacgggggtgtaagattagcatgtgaatttacagattgattcaacattcaattctcatgtccatatgtgaccgctg

SEQ ID NO: 272810 - DNA, 452 bp, Zea mays
gacccacgcgtccggcaagtagcaacccgcatcacgagttcacccacgctccccgcacaggctctgttgactagcgaccagggaggtcaaacaagaggcaacaagaacgaacgccaccaccgcgctccggtcgctttgcttggttcgggccactgcaccgccattgttgatctgttctccttctccttggaggagaaagaagagggggagaggaatgatggggcggacgagcgtggcggcggccgggcggccctgctggtgctggcggcgtgcgcggctctgccggcgaggacggcggcgaacaagatcagcatcaactggaagcccaacgtgaactacaccgactggctgaagcagcacagccccttctacaaggacgactggctggtggtctactacacggcggggcaggcggacgtggtgcatgtggacgaggtgggctacaacaagtg

SEQ ID NO: 272811 - DNA, 1627 bp, Zea mays
ttgccttctcgtccgggctttgcctgcgctcacggacggtcactggctcacgctcccctcgcctgcgtcgcctcgcctagacaagagacaagacgcctagtcgcctccgatcgaaatcgaatcgagtcgggtgggctcgggcccggtcttgttgtcttgtctcccagctaggaatagcgcaacgagatccctcgcgcgcgcggaccccggagaggccgagggagggtgacagggcgtgtcctcgaccgcgaggggaatgggatcggagggacgggcctggaacggcgcgggcatggccgccggcagcggctatggcggcggggtagaggcgaaagcgaccaccacggctgtgtcggccgcggcccccgcggaggttcccacgtcggcggcctccgtcgacatctcgctgccgctcctgaagatgtcgcctcgcatcatagctctctgcaaggaattggtcgaagggtggtcgtcgattgacagctcgcgcttctccatcgagaccgtgtctgggggcatcaccaatctattgctcaaggtttctgtcaaaggaaacaatggcaatgagtcttctgttactgttcggttgtatggaccaaatacagacttggtgattgatcggaaaagggaattgcaggcgataccgtatctctcagctgcagggttcggggctcggctgcttggaatgtttgaaaatggagtagttcagtcattcatctatgctcgaacactgtcacctgcagacatgaaagaacctaaaatagcagctgaaattgccaaggagctacgcaaatttcatcaagtagacataccagggtctaaagaaccacaattgtggaatgatatattcaagtttttgaagaaagctgcagcattgaagtttgaggataatgagcagcaaaagagatatgtaaagatctcatttagagaaatacaagatgaagttaaagaacttaaggatctcttggacattctgcatgcacctgtggtttatgcacacaatgacttgctttcaggaaatctgatgctcaatgatttggaagggaagctatattttattgattttgagtatgggtcatacagctaccgtggctatgacattgcaaatcatttcaatgagtatgcaggatttgattgtgactataatttgtacccagataaagatgcccagtatcacttcttcaggaattatctacacactgatagacctagtgaggtggatgcacaagatatggaagtactttatgtggaaacaaacactttcagactagcatcgcacatttactgggcattatgggcccttattcaggcaaaggtatccccaattgactttgactatcttggatacttcttcttgcggtatggtgagtacaagaaacaaagggagtcctgcttctccttggcacaaagctttctctccgagctaaaaaatggctagagcctgagaatctgttcacgagtttatactggtgtacgcatgctcggagcgggtacgcgttgtgatcatcggctgctacccagaaactctattgtagcggttgtagcagatcttcattgttgtatctgatgttaggttcgtcatttgctaaggactattttgggtactctactattgagcttaatccat

SEQ ID NO: 272812 - DNA, 457 bp, Zea mays
tcagactagcatcgcacatttactgggcattatgggctcttattcaggcaaaggtatccccaattgactttgactatcttggatacttcttcttacggtatggtgagtacaagaaacaaagggactcctgcttcgccttggcacaaagtttcctctccgggctaagaaatggctagagcctgagaatctggtcaagggtttgcactgttgtacgcatactcggggcgggtacgcgttgtgatcatcgtctgctactcagaaactctattatagtggtggtagcagcctcattttgttgtatctgatggtagtttcgtcatcgcctgataggaaagtctcatgatcgccctcgggaacgcagggtggcgagatctgtacttatatttgtaataaacacaatccggatgggttctgtcctgtgcaatttgttgtgcgcataagcattccgtgtttttat

SEQ ID NO: 272813 - DNA, 437 bp, Zea mays
ttgcctcactcgtcccgatcttgtctggtcctgtcttggctccccgccaggaatagcgcaccgagatcccttgcgcgcacggaccagcagatcgcgcgcgggagtgagagggcgacagggcgtggccgcgaggtgggcatgggatcggagggacgggtctggaatggcgcgggcgtggccgccggcagcggctatggcggcagcgtcgaggcgaaagcgaccaccgcggcgcccgcggacgttcccacgtcggcggcctccgtcgacatctcgctgccgctcccggagatgtcgcctcacatcataggtctctgcaaggagttggtcaaagggtggtcgtcgattgacagcttgcgccttttcatcgagaccgtgtctggaggcatcaccaatctattgcttaagggttttgtcaaaggaaacaatggcaatgattc

SEQ ID NO: 272814 - DNA, 511 bp, Zea mays
cccgcgcgtccgcccacgcgtccgttcactcgtccgcccacgcgtccgggctcgcgggggctctccccctccgctccgcatccacagccccgtcggcggccagggcccagcctctcccctccgccgccgcgccacgccgcatcccagcgcgactttcggttgccgcgggcgggggcgagcagcagctcgtcaccgcgcaggaaccggcgcacgaacctgattatggagttgtcagcattcaccatgtcgggatcctgtgcgagaatcttgagaggtcactggcgttctacaaggacctactgggtctgagggtgaatccagctcggccaaacgacaagctcccgtacaggggcgcttggctctgggtgggttctgagatgatccacctgatggagctgccgaatcctgatccgttgaccggacgccccgagcacggcggacgtgatcggcatacctgtatagcgattagagatgttctgaagctgaaagacgtctttgatgaagctggaat

SEQ ID NO: 272815 - DNA, 492 bp, Zea mays
ttccggaattgcccgacgcgtccacgttttcgtttctgcgcgcccacagacccgctccgtctggctcctgcgcgccgccagccgtcagcccgtcaccgattggagatccttggaaacctgcgcgccgccagcccgtcaccgcttggagacccgctcagccgcgcttccctgcgcgccgccagccgtcgccgatccgtggccgcgtccgccgccgccagctctgaggtcgcgccgtcagccagcccgtctgccgtcgtgaggtactgagcattgttccaagtggttattacgcttcatggatatgtctcaagagcaagaacaggattttggcgtactgctgaagcaaggtgcacaagggagggtatttgcttcgacatttgtgggacgaaagtgtgtaatcaaagagcgttttcaaaaaagtaccgacacccattggtgggactcgacgtgactctaagcgctaaatgctgaggctcgggcatgacaaaagca

SEQ ID NO: 272816 - DNA, 796 bp, Zea mays
gatccttggacacctgcgcgccgccagcccgtcaccgcttggagacccgcgcagccgcgcttccctgcgcgccgccagccgtcgccgatccgtggccgcgtccgccgccgccagccctaaggtcgcgccgtcagccagcccgtctgccgtcgtgaggtactgaggaatttttctggtaatcagcatggcactgtcatcaatgtttaagagaataaatgtgaaagatttgacctccaaggtttcagtctataccagtgctacaggcgctgggccacgaaaaggactgctggatcaacaaaaaatggtcgcgattccaatccaaagtatttgggggtaaagaagtttggtggagagaaagtactaccagggaacatcattgtccgccaaagagggacccgcttccatcctggaaactatgttggcatgggcaaggatcatacacttttctgcctgaaagaaggcaatgtacgctttgagcgcaacaaactctcaggcaggaaatgggttcatgttgatccagttgctggtcatgatcttcaccccatttacgcagatggttttgctactacatccgacactgagccaatgcaataaatgtgcttggggatttgggctgtcattttgttccaactcattcagctgccattttacagtttcatgtgtaaactttagcaggcttgaacgtagctggatcttttctttgtaatcataactactttgaataatataagttatacactgtaaaaagaaaaaaaaagggcggccgatcgcgatctagaaccgaacgcgtgggcgt

SEQ ID NO: 272817 - DNA, 604 bp, Zea mays
cggacgcgtgggcgcgcgcaccatcttctgcgcgccgccagccccgcttgttctggctcctgcgcgccgccagccgtcagcccgtcaccgattggagatccttggacacctgcacgccgccagcccgtcaccgcttggagacccgcgcagccgcgcttccctgcgcgccgccaggccgtcgctcgatctcgtggcccgcgtccgcgtccgccgccgccaggccctaacgtcagcgccgtctagccagcaccgtcttgccgtcgtgaggtactgaggaaatttttcctggtatatcagcatggcactgtcatcaatgtttacgacaataaatgtgaaagatttgacctccaaggtttcagtctataccagtgctacagagttatctggtggactaaacatgatatttaggcgctgggccacgaaaaggactgtctggatcaacaaaaaatggtcgcgattccaatccaaagtatttgggggtaaagaagtttggtggagagaaagtactaccagggaacatcattgtccgccaaagagggacccgcttccatcctggaaactatgttggcatgggcaaggatcatacacttttttgcctgaaaga

SEQ ID NO: 272818 - DNA, 731 bp, Zea mays
tcctttcgtccgcccacgcgtccgcccacgcgtgcgcggacgcctcggcgcgggttgccgagacgcgtacgcggcattctccttgggtgcgggggttcctctcgagtctcggcaacgacgaaaacgaaaataccgagtcgagtcagcgatgaatcccttcgccaaaaaaccaacaccgcgagaggtgatgcggagcagcaagcgggacctgacgaatgctacgcgagggatcgagagggacattgcgtcattacagcaggaggagaagaaactcgttgctgaaattaaaaggacagcaaaaactggcaatgaggcagcaacgaaaattctagcccgtcagctgatcaggttaaggcagcagatttctaatttgcaaggtagccgagctcagattcgggggattgcgacacatactcaggcaatgcatgccaacacttcagtggctactggtttacaaagtgcgagcaaagcaatgggagctttgaataagcaaatggaacctaccaagcagatgaaaataatgcaagaattccaaaagcagtcagcacaaatggatatgacaaatgagatgatgcctgattcaatcgacgatgtcttagacgatgaccaggccgaggaagaaactgaagaacttgctaatcaggttctggatgagattggtgtagacattgcatcacagttgtcctcggctaccaaaggaaaaattgctgggaagaaggttcagggtgatg

SEQ ID NO: 272819 - DNA, 579 bp, Zea mays
cccacgcgtccgccgccatggaaggttcgaaggggagtggaggtggtggggccggtgccgggtccgaaaagccaagcgccgagtcgaaccctagtctgaatctgccgccacctaccgcagcggatgtcgaagccacggatgacggtggcgccacggccgcggccgcggcagctgccgaggcggccaggcggccgttcactgccctcagccaggaggaggctgacctcgccctagcccgcgtcctgcaggagcaggagcgggcgtacatgttgctccggatgaacgggagcggtggcgagggcagcgactacgggagctctgatgcagggagctacgagtacgacgaagagggagatgactacgaagaggaactggagcaccacctccgcgtccaccaccacgaacacccctcgggcgatggtgatggagagggagagggcgagggcgccgaggggagcgattacgacgaagagtacgaggaggacgaagaaggggagccggaagtagatcccgcggagtttgagaacgatgaggcttatgcgcgtgcgctgcaggatgctgaggagcttgaggtcgccg

SEQ ID NO: 272820 - DNA, 405 bp, Zea mays
ttcctcgcgtccggcgaaagccatcaccccccaccccaatcccacgttcgccacgtgcgcgccacctcccccaccgcgtccgcgtcgccggccatactccatcgcgaacgagatcacgggctggtttcgcgggccgaccatggggacgctcatccggccggggcccgccgcgtcgcctctccccatcgcttccccctcctcctcatccgcccacgtggctgtcgttggcggtggtgcgaggagcttgcggcatcgggtgtcggtggcggtggcggtgttccggtccccgagtacgcaggttctggcgacgagatggcgccgccggagaggtatggttgtgcggtcggatgtcgtcgccggtggcgcagcccccgcggcagctggggattcgacgcgggcgctccc

SEQ ID NO: 272821 - DNA, 414 bp, Zea mays
tcggcgccgctcaaggccatcgacttcggcctgtccgtcttcatcggagggggcaaagtttacagggacgtggtggggagcgcgtactacgtggcgcccgaggtgttgcgccggaactacggcacggagatcgacgtctggagtgctggcgtgatcctatacatccttctatgcgggtcgccgcactttctgggaagaaacgcagaaaggcatatttgacgcaatattggccgacgagctcgatctggtctcctccccgtggccctccatatctgaaagcgcgaaggatctcattagaaaaatgctgaacaaggaccctcagaggcgcattacggcttcacaggccctagaacatccatggctcaaaggtggtgcacctgacaggcctatcgacagcgcggtcctgtcaagaat

SEQ ID NO: 272822 - DNA, 418 bp, Zea mays
cggacgcgtgggctgcagaaccgaaaccactcacgcgcgctcgctccccgcgcccaattcggagatccacccccccaccgaatccgctcgcctgcgcctgcgcctgctacctgcgatccatctctcatggcgaccaccagcgccaggaggccgagcggcccggtgctctcggccgcgcactaccgctccgcctcgccgacgcgcgtctcgctcgccgggcagcccgtcagcgtcagcgtgtcctcgtcgtcgcggggccggcggacctgcatgtgctcgccgaccaaccacccgggctcgttccgctgcagcctgcacaaggagcgcgtcaagccggcggccgggccccacggccacgggcacgggcacgggcacggcaagccgagctcgccggcgtcggccgtcagcccgctgtgcg

SEQ ID NO: 272823 - DNA, 468 bp, Zea mays
ataggaaaagctgtgccgcctgccggaaccgtgcctcatttacagcgtccacccacgctttctgtgtggcctctcgcagataattggggggtgccaaaagaaactgttagggatactgacgaacgtgggctagtcaggctgaagtatacattcaaatacgcagacacattcgttgagccagatgatgattggctaaagagcattgagaatgtaagtgatgaattgcttggggtatattcgaaggcccaagacactgcattgtcagcggccttcggaggccgaaaaaaagcaaagactcaacccagtgtttgatgctgtcgggttcgcctaccccgactaccgctatctagtgcggtcgcaaaaaagaaatggtacaactttctgcgaaagaaacaactacaaatgctgctatcggggcggatcacaacagaaaaaaggtaaacgttgtcacacaccgtccacgctata

SEQ ID NO: 272824 - DNA, 553 bp, Zea mays
tcgcgttgccgtagccgtgttcttggactctgttacgtgctgccattttgccaaggctagccccctcctcctcttcttcctcttcttcttttcgcgacgatcagagaagaagatgacgatcaccattgaacagccccagctcgatgcggtggcggagaggaaagtccccggcggaggtgaccccgcggagctggtgctcgacgccggcttcgtcgtgccggacgccaacgccttcggcaataccttcagggactacgacgcggagtcggagcggaagcagacggtagaggagttctaccgggtgaaccacgtgaggcagacgcacgagttcgtggcgcggatgcgggcggagtacgggcggctggacaagacggagatgggcatctgggagtgcatcgagctgctgaacgagttcatcgacgacagcgacccggacctggacatgccccagatcgagcacctgctgcagaccgccgaggccatccgcaaggactaccccgacgaggactggctccaccttaccggactcatccacgacctgggcaaggtgctg

SEQ ID NO: 272825 - DNA, 418 bp, Zea mays
atttaatcctgatgggcggagtttttcaagtggtggtgaagatggatatgtaaggttgcatcattttgattctgactactttagcatcaaaatgtagataaagaacagacgaatcagaggctgtttgatgaccaaccggttcagtttcttggttcagatgttagatgttgctggttggccatggcgcatgtagagcaggctcagatcctaggtttttggtctgcttgtttgatgatgttgctctggataagcagctttttggtctgcttgaggaatttgtacacacttggcaatgaaaagatccttggactgagttgtcattctcgctcatgtttccagttttgtttcgatttgtagtgctcacatttcaaaacctgtgttttaactctacatatgaggctgctgtattactgaattg

SEQ ID NO: 272826 - DNA, 727 bp, Zea mays
tcccccttcgcgtcctatgcatacgccctcctcgccgctcgccgcatgtggctcgatgaggtggatgtcaacggatggctcgaggccttcgcggcgcacccggcaatcggaaccacctccccatctgtctccaagtggagcaaggaggagcaatcagcagcgctctccgcagccacggactcgacggcccaggagctagcagaatggaatgccagatacagggagaagtttggcttcgtcttcatgatttgcgcttctgggaggactgcagctgaggtcttggctgagcttaagaggcgttacacgaacaggccaattgtcgaacttgaggctgcggcacaggaagaactcaagataactgaactacgtctcacgaagcttttctcattggagcctactgttccctccactacaattgaaggccccaccgtccaatcagataaagcagcagatccgcataccgattattggagcacatcttgggagctctccctcctgccttgtgccaataaagctcctgaaattacaggtagctcgaaccgaagtcgtccgcctattacaacgcatgtgctggacattgcccgtggatcgcctgcgtctgggatcgaagttcacctggagatgtggaaggattgttcagctcctccgtcgttcggcggcaaagatttcagcggatgggaaactctaggctattccgttacgaacgatgatggacgcgtggccagct

SEQ ID NO: 272827 - DNA, 391 bp, Zea mays
actcgagccgattcgactcgacggctcgaggatagagaacaccgacaatgccactcctgctgctcccaccaccggcgcgcaccacggcagcgacgtcgctcgctttctcgcggccccggccttcgcgggcgcgttgggccaacctctcttacgcgttcccccgcctgaggaaatacgggcgtcgccaccgcgtgcccgtggccggccccagcctcgatgatgacggcgccgaggaggatgagacggaggcagaggactgggagtccgacgatggcgatgaagagatggagatagacgaggaggagtttctgacgatgcggcccaaaccggctggatttggcgaggggaaaacatattccactgacattgaggagccgtttcttcgggagat

SEQ ID NO: 272828 - DNA, 1020 bp, Zea mays
  unsure (1)..(1020): unsure at all n locations
cccacgcgtccggggcaagccggtggagagcgtgcgcctcgtggatcgccagcttcgccatctgcccgaggcgttcgggaggatcctggggctccgtgtgctcgacgtctcccgcaaccagcttgaggttattccagatgctataggaggacttggtcatcttgaagagctttttcttactgccaatgatttggtatctctacctgataccattggactgctatccaatctgaagattttgaatgtatcaagtaataggcttagggccactgccagatagcatttccaagtgcaggtcgctagttgagcttaatgtgagctataatggtcttacttatctgccaaccaacattggttatgacttggtaaatctgcgaaaactctggattcatatgaacaaattgcgttctcttccatcatctgtctgtgagatgagatcgttgtatctcctggatgcccattttaatgaactatgcggtctaccatctctcttcgggaaacttagcggccttgaaattctcaaccttagcagcaacttcagtgatttgaaagagcttcctccctcgtttggtgacttgctaaatctgcgtgagcttgacctaagcaacaaccagattcatgctctccctgacacttttggtcggctggataaactggagaagcttaacctagagcagaaccctctagtcatgccaccagaggacattgtgaacaagggcgtggatgcagtaaaagagtacatgtcaaagaggtggctggacatattggtcgaggaagaacaaaggcgcattgcggcagagaccccagaaatgtcatcgactcctaaagcttggctgactcgcagcgtctcctgggtcacggacgtttctgagagtttggcagggtacctaggtgggaacaagtcagagaaagatgcatatctggaccagcagttttgatactttatgtttcttttgcctaatgtgcattcgccccatgtatacacnaataacgtttaccaaaaaaatcttcattacagat

SEQ ID NO: 272829 - DNA, 340 bp, Zea mays
ggcagcatcgacatcatgccaaaccgatgacatggccaagaaatcgcttgaactttctacccgtagatgatttcatttctaaaccactcattgatgagcacttgagcaataccagggagataagaaagagaattcaggactccgtgctgacatagcagggcgtccatatgcttctgtatctttggcgttggaccgttggtagtaaaagatatgaatgtctcgtgatatttgtacttgtctatgcctagtctgatgtctgacgactcttccataacccataccatgtccgtgcagatgttcatgcgtgtgcaaccgtcttatgtctgagcagtttttttat

SEQ ID NO: 272830 - DNA, 445 bp, Zea mays
gcaagttctcccatctagcaacaccataatcgcaggagaatcgctgctccaccagactcggtttcctcttgcttcagcgtcaaaatcatggccgcagctggcaagtcgtcgtcggccatggaggagacggttgcggcgacggccgccgcgcgggggcggcgcgggattgaccggcaggccgtcgacaggggcatcgcctacctgctcatggtggccgccctcgtcgccacctacgcgcttcactagatttcgatctgctccgctccggcgcgggcagacctcacgggaaaggaaggcttttgtgcgcttctgcttcccgccggcctcagcctcttcagagttcccctgcaccaaacttcattcgttcgtcttccaaccttgtattgtatggagaattgcagatggagatgcctgtgtctgtgtgctacatctccatacactgcac

SEQ ID NO: 272831 - DNA, 647 bp, Zea mays
cggacgcgttggtaaaatcatccgcgcagagggacagggcacacgcactccgagggagcgcagccgaggagaaataatggccacggcgacgaccctctctttcagcggcggcggcggcggcactaccctgctccgcgggcacgtggccttgacgtcggggcggtgctgcacgttcccgagctcgcggtggaggccgccgcgcttgtcggcctcccgcgcggatgactcctcgccggctccgttcgagatgacggtggaggacgcgctgaagctgctcggcgtcgctgagggcgcgtccttcgacgaaatcctgcgcgctaagaactccgtcctggcctcctgcaaggatgaccaggacgccgttgcccaggtcgaagcagcctatgacatgttgcttatgcagagcttatcacagcggagggctggaaaggttgctaataacagcatccgctatgctgatgttaaacctgtaaagagtgcaggagctggggcagtcccacagtggatgcaggcaaccatgaagaatgcacctattacattcgagacgccatcttcgagtagcttgggcatccagtcttgcgtttatggtgcactaatggttttcacgtatgctagtggaagcatcgactctttgccatctgcttcac

SEQ ID NO: 272832 - DNA, 558 bp, Zea mays
tcgatcagactcacatcactagtaacgccgccgccaccgcgttgagaggcgccgcgacgcggaaggcgagggctctcaaggaggtgtggaacatcgcggcggttatcccggtggagaagggcccgggcccggtcggcggaggaggccaccaacgccagaagcacggcgcgcccaagcagcagcagcagctgcaccgcaagatggatagcgacggcagcagcgtcagcgacctctcgctggaggaggagaacagcttcctcggcatctgcagccaggagctgcttgctcgcggcaccgagctcctcaaacgcacccggaaaggcgctctgcactggaaggtcgtgtcggtgtacatcaaccggatgggcctggtgatgctgaagacgaagagccggcacgtggcagggacgatcacgaagaagaagattaagttgtggtggtcgagagtgtgcagtggacgtgccggcgtggcccgggcggcacctgctggaggacggcgggcaccggcggtacttcggcctgcgcacggcggagcggcgggtggtcgagttcgagtgc

SEQ ID NO: 272833 - DNA, 423 bp, Zea mays
ttctcggtttccccccaaacccgtccgagaggcagtcatcccgccgcgatgagggccaaggtgagcttccctcccgtcttacgaatctcgttgcgccgctatctgtttcgtctcgtagtggcctcgcgccgtgcggttctctgtgatgagcaaacagatgacgagtccgatcgaatccattccattacaccatgtggacaaccgaggcatttgtctgagagaacccaccgttcttgctgtattgatgctagtatttttttttggtgtttcctagtgtcgttcggttgtttgttttgcctttatttatttatttattttttggttggcatgatgaggaaagaaatacaagtctgatctgctagatgagaaattcctcctactcattctgaatgccgacgttccaactatgtattgcactaatgt

SEQ ID NO: 272834 - DNA, 429 bp, Zea mays
gtcagctcatttgctccacattgaatgggtgtaacagaacttttggagatgtttgtttttagccctgtagaatgaccaaagatgtctaaaatgccgatcattgttgagatatcctgatgagagggccgcatgaacaaaacaacatcatcagcatagaaggagatacaatgtttcgcatgttgatttgcaatcggctgcaggatatgttccctgaaagcataactgaccatagcattcaaagcctccatgacaagaataaacaacatgggggacaaaggatcgccttgccgaagaccccgatgatgcagaatgtattccccaggctcaccattaacaaggatccgtgtagaggaagtgcaaaacagtagactaataaggttgcaccagattcgaccaaattccaagtgttgtaacatgtcaagcaggaat

SEQ ID NO: 272835 - DNA, 538 bp, Zea mays
tcgagaacatgtgatattgataccgaagcagcgtatattattatgatgatgatgttatataccacacatctgtttggctgaggtatggacactttttgggtcatcaggttgcatgctgggaaagcacagatgtgaaaccgccgcgggtaaggtggtctccaggatccttgatgttcgtgacaggaacgtcggagctgtcctgctgggtgccggatttgtccaagctggagtccttcaccatcagccacaccaacaccaggtccagctcgtccctgtaggcttggaccgatttgcatgccgtgtggctggttgacgcgactccatcaagagcaggaggaacaagaaagcatagcggagcatcttgtacgaatgagttgtgatggttggattcttttcctgatggcccggtaaagctactcttgcaacgatcgtggtcttgcggcaacgctgcgcgttgtttctgtagtgaacatgaactgggcagttaattggttactttttcaaagaaagatataaagaaaatacagctctcttattt

SEQ ID NO: 272836 - DNA, 499 bp, Zea mays
cacacacactcagcagcagcagcacaccgaccatcaatacaccagcctgtagccgtacgtacctaagctagcttcgtcgtctcgttgcacgtacgtagtagctagacagccgaatcggctctctagctagctcctcccttccgatcgatatcatcgccatgtcggggatctcgctggcggtggcgccaaggtccgacccggaccacgggtcggagcggcagccgacggcgatgctgggcggcgtgatgggctcgctccgcgtcatcgagctgcagctggtggccttcatcatggtgttctcggcgtcgggcctcgtcccgctcatcgacctcgtgttccccgtcgccaccaccgtctacctcctcgccatctcccgcctcgccttcccgccgctgcacgccaccaagtcgtccaagcctgatgacgccgccggctcgcccgccgccttcttcccagtcgtccccggagatcttccgcggcagtaagctgttctaggtgt

SEQ ID NO: 272837 - DNA, 640 bp, Zea mays
  unsure (1)..(640): unsure at all n locations
ttgtgattggtttctactagcggacccatgcgtaccgtctcgtgtagcctaggccttcacgccggttatagggagaccgaaacgtaaatcgctggcggctcctacaacgcatccgtactggtgagccggctttgaccagccttgttgcgacgcacgatgattgaaggaggctgcactggggaaccggtgatgtgaacatggtgctctgctcagaggaaagaccggggtctaatgacacgccgtttaggactcgccacgctgcatgaggtgcagcggacaaccctaaacaccttgcccgtgagcagaaataaaaataccaatttggaggatacttcagttgcttgcacttgttttacggtctctgtattgacggtcgcgcaccataacttccatggtattttggagtcgtgtcgttagtcattaccctcttggaggactttgggtctgctgaaaacatggttactcagcaatatctgctactgttcacgactgacattcaaagggttactcagcaatatatggataaaatttggtgttaaanataagttgtgtcgtgtgggttgagttatgtgtgttgtgttgtgctgtaccttcttccatctattaatggaaagatccctagatctcctgcgtattcgag

SEQ ID NO: 272838 - DNA, 456 bp, Zea mays
ctcctccttcccgcacgtcagacgtcttctttcacaatctagcgcgtacgtacgtcccaaaccaaaccatgtccgcgagagctcttctcctgacgaccgcgacgctgctcctgctcgtcgccgctgcgcgtgcggggcagccgctcgccggcgggtggagcccgatcaggaacgtcagcgacccgcacatccaggagctcggcggctgggcggtgacggagcacgtcaggcgggccaacgacgggctgcggttcggcgaggtgacgggcggcgaggagcaggtggtgtccgggatgaactacaagctcgtcctcgacgccacggacgccgacggcaaggtcgcggcgtacggggccttcgtgtacgagcagtcgtggaccaacacccgcgagctcgtgtccttcgcgccggccagctgaccaccagctggacgtaattaatcagcggcgccgcaat

SEQ ID NO: 272839 - DNA, 451 bp, Zea mays
gttgtttcagaggagagggcacgaatgctatgtcttgggcggtagaagaagctggagaaagacgggcttcctaaaattgatgaggggatggcagacgagctagaaattaaagaagagactcctgaaagagttgaaatgaccattattgtcaaagccgatgtacaaggcagtgttcaagctgtcacagatgctttaagaagtcttaatagcgcacaggtgttcgtgaatgttgttcatgtaggtgttggcccaatcagtcagcatgacattgatctggcacaagcatgtggagcatatatagttggtttcaacattcgcagtccacctagtcctatcactcaagcagcagcaagagccaacataaaggttttgcttcacaaggtcatctatcaccttattgaggagatgggaaaggccattgtggagaaggcaccgggaacttgtgaaaccc

SEQ ID NO: 272840 - DNA, 1432 bp, Zea mays
ccggcccacacacactacgccttttttttgagagggagagaggacacgcactacgcttcacactctctcggtggccagtggcctggtccgttcggctccgatttcccgattcgattccaaccatccctctcccggcgtcctgccgtcctgcgggagggaggtgcaagcggaaccagcccggcaatggcaggcgggctgcgcggcggccgggggcgaacccaggggcggcggcggcgcggggaagaggagcgcgtggttggcggcggacggcagcaagcgctggggggaggccttcttcctgctctacacgcccttctggctcacgctctgcctcggtgtcgtcgtcccattcaagctctacgagaggttcacggagctggagtacctgatccttggcttggtgtccaccgtcccggcgttcgtcatccccctattcctcgtagggaaggcagatagtgttagaaatttcaaagatcgatattgggtcaagatactttaatattctgtagcaatctaccaatacaaagaagtagacccgtacttctcaattggttatggatttccttttactattgagctatgttggtaactacttctggacacattacttcttcacagttcttggcgcgtcatatacttttccatcatggaggatgaataatgtacctcatacgacatttctcctgacccatgcttgtttcctgttctatcatatggcatcaaatatgacacttcgtagattgcgccattctacagctcatttaccacagtctatttgctggttatttgaagctgcatggattttagcactgtcatacttcatagcgtacctggagaccctagccattgcaaatttcccgtactatgaattcgttgaccgggatataatgtacaaagtaggttccttgttctacgcaatatacttcaccgtcagcttcccaatgttttcaaggattgacgagaaagacgagaagtggcagcctgtccagggtagccgtcgactctctgggcgcacaatgctggtgacgataatactggacctatggcgcatatttctggggccaatagttcccgtcccagagtcgaggcagtgtggccaaccagggctcgcatggttccaagcgcagaacggaagcacctgattcagtgaagctgcaagttctgcgtttccacttgaatacttcatcatcacctagcattcaccgaggcggagatcttagagcaataaccctcgagagaaatcatggcctcactccttttgataaatagctgtgccttctgtggccggatgcaattgtgcaaatgccactttcagtagttatatttgtatgttttctccgtttggtgaattacagagagatatgtctgtaacgtgaacaagatcatgctgttctaattcctgaaactctatgcggtgctttgtgttcggatt

SEQ ID NO: 272841 - DNA, 617 bp, Zea mays
gagcggcccgcgcacgcgtatctgacccgcggggttctcctctcctccctctcgcagctgggcggcggccgggggcgaagcccaggtggcggcggcggcgcggggaagaggagcgcgtggtgggcggcggacggctgcatgcgctggggggaggccttcttcctgctctacacgcccttctggctcacgctctgcctcggtgtcgtcgtcccattcaagctctacgagaggttcacggagctggagtacctgatccttggcttggtgtccaccgtcccggcgttcgtcattcccctattcctcgtagggaaggcagatagtgttagaaatttcaaagatcgatattgggtcaaggctaatatttggattataatttttagctatgttggtaactacttctggacacattacttcttcacagttcttggcgcgtcatatacttttccatcatggaggatgaataatgtacctcatacgacatttctcctgacccatgcttgtttcctgttctatcatatggcatcaaatatgacacttcgtagattgcgccactctacagctcatttaccacagtctatttgctggttatttgaagctgcatggattttagcactgtc

SEQ ID NO: 272842 - DNA, 1043 bp, Zea mays
gcaccacgacgcggttaactcgggacggaagcaacgcaactcggcacgaagaaggaaaagccaccaccggttcctccgccgtccccgcggtttcagttccttgcttgcttgcttgctcttgctctccctctctcgtggaagccagccacacaaggcagaaagagagagtgacgttgtgttccatcccgttccgctgaagcaaccgctctcctacaccaaaccacccacaccactctaggtctctagccgatgcgatggatgtggatccagcagcggaccagcggaggaagaacaagggcgggctggagtcggagctggagcgccactacgacgacctgcagcgggagatgatgctgatggccgccgatcggccgcacaagcaactgcaacagcatcgacgtcacgggcaccgccccgatctgctccagaactgcgacctgcccccaccggccaagctcttcggccccgtacccaccctgcagaggctggagaccgccgctgccaaggaccacaaggccgacgacggcctgctgcgggcgctgcgcctgtcgcagtcgcgcgcgcgggaggcggaggacaagctggcggccgcgggcgccaccaacgtcgacctcgcggcgctgctcgtgcgggactccgtcgcgctctccgcccaccgccgctgggtcatgatgctggaggccgagaattccctgctccgaggaccacgacgagatgcggatggtccggaaccggaccacggagccggcggggtggccgcgtggtgggtcgcgctcgccgtctgcgtcggcgtcgccggcgtcggcctcgcgctcggcaggttcctctgctgaacaactgtgatggatcattctccttccttcctgctgctgtagaaagtgtaaatctacttcgagacgacgatcgatcgatcaatcaatcagtcaaaaaaaaaactgtaaatactgctacagtagtacggagtaggattggtctccatgttaaagtacccattcctgcacgctttctgctttagcttgtggaaacaatctgttgagaattta

SEQ ID NO: 272843 - DNA, 424 bp, Zea mays
cccacgcgtccgatcacatgctctcccaccttactcaagctagtgcgagcatagcaatggggttcgcccggaagagtggagttgcagcagtaggggtttggtggctcctcctgctcgccggcgtgctgttgcctttggcggcggcatttggccggcacgccgatgccggcaacgacatgtgcgacatcaagtgccagcatcacagcgacccggccaggaggcagcagtgcgtggatgagtgccatagccgggagcaccatcacccggcctagcagagagttttgcgagatgaagtgtcagcaccaccaggaccctgcaaggaaagagatctgcgtacagcagtgcatgagctatggtctcagccaccgtgcgagtgccagtgttgttgatgacggtgaaaagcgcttgcatggctgggaaacga

SEQ ID NO: 272844 - DNA, 443 bp, Zea mays
  unsure (1)..(443): unsure at all n locations
ggtgcgcgtgcgcatccgcaactacgatcctgcgaagctggacgcattctggacgtcgtaccggcagaacgtgacgtacaacctcacgcaccggaactgctcgagcaccgtgtcgaacgcgctcgaagccgcactcgacggcgcggtgtggcgcctgaagggcgcgcgcgccggatggggcgcgttcgtgcgcttgttggtcacgcccgagctgtgggtcgccgcgcagatccgcaagcgcgcggtgacgatggcatggacgcccggtctcacgctcgactatgcgcgtgcgctcagcatgctcgccgatccgcggccgttcgcgtggtggaaggtcgcgcgctcggcggtgaaggcgatcatggcgtcgcgccgcgcgtggcgcgagcaggacagtgcggcgctgtcgtccggcggatcggaagccgcantcgatgaagtga

SEQ ID NO: 272845 - DNA, 521 bp, Zea mays
  unsure (1)..(521): unsure at all n locations
cggaatncccggggncggacccacgccgtcncnngagatattagacactgagaggcgtcattatcagaaaatcaatgatactcaaaaccatagttcgctttcaacacattttggatgcagacgatctttgtcccagaaaatgtgaggggaccacgatcctacatagaagttgttttatgaccaacatgatgcccgaagtcattggcctccatgtgggcttgcttaaaggaccccacttaatttatgaagaggaaacattgtggaaacatcatgcggtttgatgttgcatggtatttccacttctgctaacttgattggtaacattttgacaaggcttgtcttgtttcctgaattgcaagatcagctacatgaggagattgtttcagtctgcaataaatcatctaaagtggaggttgatgatctgcttaggatgcaagttctacttgctactgtatgtgaatctgctcgccttttgcctgctggacctcttctgcaacgatgttctttgaaacatgatttga

SEQ ID NO: 272846 - DNA, 357 bp, Zea mays
tgatttcagcaagttgaccaggtcaggctacaaacgggttgggaatgttaatgtgaagcgcatggagaccaccattttcaaagacagagaggatgtacatatagcgataaagaatactattggtgttgagctgaaaacgggaataccatagttgtattgtaaagatgggcacgccctgctgctatcgctgaagagatgggagggcgagcgatactccggtctagttgctggtattcttggtgtatttcttactataatggcccaatcttaaggttatatgagcagcaatttttatgaaccaaaacccaaaaaaaaccatcatgggtcatcatatacccttctcgaatgcatttcccc

SEQ ID NO: 272847 - DNA, 518 bp, Zea mays
ctcgagccgctctcctcacttaaaccctcctccgctcgacgacaccacacgaaaatatacgtcagaataaaccgcagcaaatcttctccggcaccggcagcgcccaaatccggcaatccgctgctccgaatggactcaggttacaatccccggacggtggaggaggtgttccgggacttcaagggccgtcgtgccgggataatccgcgcgctcaccactgatgcggaggatttcttcaagcaatgcgacccggaaaaagaaaacttgtgcctgtatgggtttcctaatgagagctgggaagtaaatttgcctgctgaagaggtgccacctgacctcccagaaccagcattaggcataaactttgcaagagatggaatgcaggaaaaagagtggttgtccatggttgctgcacacagtgatgcatggttactttctgttgcattttacttcggtgctcgattcggtttcaataaaaatgacaggaagcgcctctacagtttgattgatgatcttcccat

SEQ ID NO: 272848 - DNA, 504 bp, Zea mays
  unsure (1)..(504): unsure at all n locations
cggaannacccggggtcggacccacgccgcgtccgccacttcatcaccaaggccgtcgtctctccccacgccggccgaacggatggcggcggcgccgactgcggatgccatggacgtcgacgcgccggctaggacgctgactacctctccggccaccaagttgcgctcccctcacgacctcctcgcagagacacgcgcctccatcgagaaagtcgcagcccggatactcgccatcaagaaagacggcgcccccaagtcggagctccgcgagcttgtcactcagatgtctctgcacctcgtcacgctacgccaagtgaacagagagatactgatggaggaggacaaggtcaaggcggagacggaggccgcgaaggcgccggtggactccacgacgctgcagctgcataacctgttgtacgagaagaaccactacgtgaaggccataagagcgtgtcttgactttcagacgaagtatccggggatagagcttgtgcccgaggagga

SEQ ID NO: 272849 - DNA, 528 bp, Zea mays
gctagcgatagtgccgcagaggaagaagacgccggcgacgaaaactctctgaaaaatccgacagcttccactgtgacgaagagtgtgtcgatgacattgcgaagtgcaatacgggtgcacggtgaagagagcctggacgctgatggcttcttccatcagaacggtttcagcaacagcaaggagtcaaggcgagcgaggaagtccaagaagagatggccctgctgcttaatccctaccactatgggatgatgtgggcccatcgtaggacctcgttcgttcaagttaagttgctgattttttgagtgtactattaacaaacagtaaactacagaaatttagcgcttcgtcagttacacgatgtgggttcagacggtatgctatagcgcgtagataacgtcttggtaaatgtaaagtagaatcgttgtaaacaacacgtaattcttctcacgagagctctgatttggggtatatgggtaaagtatatgggtaaagtacatatactattattttcacgcatggtggttatgc

SEQ ID NO: 272850 - DNA, 788 bp, Zea mays
cccacgcgtccgcacacgcgtccgggcgcaccgtggagtccctctctgatttttggcgagcagaacatacctgagacgacaggtagaagacgactgactgcctcgagcagcagagatcagggaggccgagggcgggatgacgatccggttcgtgctgttcgtcaacaagcagggccagacgcggctggcgcagtactacgagcacctctccctcgacgagcgacgggccctcgagggcgagatcgtccgcaagtgcctcgcccgcactgaccagcagtgttcgtttgtggagcaccggaactacaaggtcgtttacaggcgctacgcctcccttttcttcctcgtcggcgtcgacagcgatgagaatgagttagctatccttgaattcatacatcttctggtggaaactatggatcgccacttcggcaatgtgtgcgagctcgatatcatgttccatctggagaaagtgcacttcatgttggaagagatggtgatgaatggttgcattgtggagacaagtaaacagaacatcttggcaccaatacaacttatggagaaaacttcctaaaatagtgatatccatttgtgtagttttacatccacttcttagcacatttgcctgtctgcccctttccataaaatttccctctgtatgtgagagtgcaaaacaatctctgtaaccatggagtattgaattgacctgattgtgtgctttcagatattcctgtgatcctcttttcatgtatgcattcgatttgctcacatatgtataaaaggtgtattatctt

SEQ ID NO: 272851 - DNA, 640 bp, Zea mays
ctccacttcaccgcccccacccaaaatcgtctcgatggaaccgctgcggcgcgtgctgcgcctccgactcggacggcctctcgctataaaccccgcccactgaatacggccgttccatttttgactctattccccgcttcccgattcaagtcagcggtttttagggttcgagatctcggcatcgtgtcgcggaagccatggcgacaagcatgcttagtaccgtgaaggtgagcaatgtatcactgaaagcagcacaacgtgatataaaggaattcttttccttttctggtgacattgtgcatgttgaaatgcagagtttcgatgagctttctcaagttgcctacattacttttaaagacaaacaaggagcggagacggcaatgcttctcacgggggccaccatagttgatatggctgtaatcgtcacgccagccaatgattatgagctaccagcttctgttttagctgctcttgagcctaaagacacaaaaccttctgcccttcaaaaggccgaggacattgttgggaccatgctggcaaagggatttatcctccgtagggatgcactggacaaagcaaaagctttggacgagaagcaccagctcacgtcaactgccacagctaagtgtcttcctttgac

SEQ ID NO: 272852 - DNA, 903 bp, Zea mays
acaatatgatgagaaaaatatacgacgaagagtttatgatgctttgaatgttctgatggctatggacattatatctaaagataaaaaggagatccagtggaagggcttgccgcgtactagtataagtgacattgaagaaatgaagacggagcttgtgggactgaaaggtaggattgaaatgaaaagtgcttacctacaggagctgcaaggccaatatgtaggtctgcaaaacctgattcaacgaaatgagcaatcatatggttcaggaaacacgccttctggtggagtggctttgccatttatcctagttcagacccgacctcatgctaccgtggaagttgagatatcagaagatatgcagctggtgcattttgacttcaatagcaccccattcgagctgcacgacgactcatacgtcctaaaagaaatgcgattctgtggaagagaacaacatgacagcactcaagagtcgatatcaaatggaggtgagagctcaagcgtgtcaaatatttattggcaacacgtacagcatgtggaaaggccaaacaatggcacaggtaggttaccgagctcaccgcctattccagggatcttgaaagggcgtgcgaagcacgagcactagcgctagggtgttggttcactttccttttcgtctgagcagttggttttattgcatttctccgttgtgtaaagggccctgtaaattattaggcaagcgggagcgtagcttgatctaatttagctctgcaccagattggtagaacgacgggtgctctaagtagttgtgtaactatccctgaatcggtttctttagtatggttgagagaagggttgacatgtaattttgtagagacttgtaaaattaaaattgttgatttctatcagggtgaaatttctgggcgc

SEQ ID NO: 272853 - DNA, 376 bp, Zea mays
ctacgcgtccgctttgggaattccaagcagagccagctctgccacagcccacagcccgtgtggagaagcgagcgcgcgatccagttggtggccgtccccgcccgcacaccatggctacgccgtggtggtggccgtcgctgctgccggcgtggctgagctccagcgcgctatggttcctcgtcgccaacgcggtcgtcgccgcggtcgccatcttgtccaggcgcccgccgttgtcgttgccgtcgtcccgccgacgccgacgtagaagcggcgccaccgacgcgctcacgcggagagccttgtatgcgctgttgcatggcctccgctccttcttcatatttgccgtaccctttcgtctgcttaaacaccaccacgc

SEQ ID NO: 272854 - DNA, 384 bp, Zea mays
gtgcaggtccgggatcgccgcacgcgctccggagaagggggatggagcgagaagaataagacatcgtcttcgaccaccccggccggcccctccactcgatctcccagcccctccgtcagccacctcgatctcatccgatgctctagctaggcaggctagcttcgcatggattcacccgcggctgcgtcgtcgctgctcctggaccactcgtgccgccgctcttcctcttactcttcctccgccgcctgatggtgatggccagcgccggcgtcaacgtgcccggcggcgacgaggtacggaacccgaccgctgcgttcgcgttcaccccagaatgccggatgcgcaggcgccaccgcctcgagccccaaggatccggcgacgccg

SEQ ID NO: 272855 - DNA, 298 bp, Zea mays
tcgggagactggagcgtccctgcactggggttattaaagtcgccggagaagaaggcggcgttcgtacgaggagccgcacggttgaagattacaggagtcaggattcaagaagctcaagcttgccgagctgcctgatccgctggacaatacgtctaaggaggatctatctgaactattcacacctctaagtgacatagacgaaagagaagtcaatgctctgttgtgtagtagtgatgacagtgtataaatcgtagtgatacatacgcctgctaacatcgagattactaaagagaaactt

SEQ ID NO: 272856 - DNA, 433 bp, Zea mays
ggagacgctgaggaacctgctgcgccgttacgggcccgagtacaagctcatcctcaccggccactcgctcggctccggcatcgccgcgctcatgaccgtgctggtggtcaacaaccgcaaggaggtcgacaacatacccaggagccgtgtcaagtgctacgccctcgcgcccgccaggtgtatgtcgctcaacctcgccgtcaagtacgctgacgtcatcaactccgtcgtgctccaggacgactttttgccaagaacaccgactccgctagagtacattgttggttctatcttctgcttgccctgcatgctatttctcatctgcttgagagatacatttaaacaagacaagagaaaatttatagatccaagaagattgtatgcacctgggcgaatgtatcatatcgttgagaggaaattttgcagatgtgga

SEQ ID NO: 272857 - DNA, 541 bp, Zea mays
tgctggcgattgtttggttggtggtgttctttcagctctatgtgcaggcttcgatatcatccggagcgttgcagttggggttgctatagcaaaggcatctgtggaatctgaagccaacatacctgatgacatttctgctgcgagtattgcagatgatgcacaaagtgtattgcattctgctaaggtgctttggtgcaaatgaagaatagaaaaactaccatcccggtgtaaattgaagacagtcaggtgctattgaagctattgaactctgttactgttccaacggcacaagacggataagaatgaaatcgctatatatgatggatttttggttggaagaacagagggatcaccaatcagaattctttctactatagcatatatttttcatgtacattgtgggtgcaagttcgatcaagggagcaaattctgttgtatttttttagttagtgagattatgtgatgaaaaattggttagcgtcaaatttgcaattgcacagtgactaatataatgacatcatataatacactgataagatat

SEQ ID NO: 272858 - DNA, 683 bp, Zea mays
cagaagcgcagtcatccatcagctattcattcagctatcacaaaagaaaaaaaaagggaaagggccgcgacgagccgacgagcaacgacgaccatggcgacgatggccgcttcttcctgccacgggcaacttctcctgtttctcctcgtggccgtcgcgtcggcctgcctcggctccgcggcagcgcatcaagccggatctggagagggctacacgatcgctggccgcgtcaagatcgatggcatgagcgtgaagggctttggtcttgcaacaaagacatcaaacacaaaagtgatacttaatggcggccagagggttacatttgccaggccagacggctactttgcattccacaacgtgccagctggaactcatctgattgaggtctcctcaattggttacttcttttccccagttcgagtagatatcagtgcaaggaatcctggttatattcaagcagcattgactgaaactagaagagttctaaatgagcttgttctggaacctctgaaagaagagcagtactatgaggttagggagcctttctccgtcatgtcacttttgaagagccccatggggttgatggttggttttatggtcttaatgggctttgtgatgcccaagatgatggcgaacttagatcccgaggcgatgaagcaagctcaagaacaaatgaggaacaa

SEQ ID NO: 272859 - DNA, 504 bp, Zea mays
ttctcgcgtccggaaaaaggccgcgacgagccgaccagctctactgcccccttccggccttcggcgaccgtgacgagcaacgacgaccacggcgacgatggccgcttcctccctctgccacgggcacttgctcctgtttctcctcgtgtccgtcacatcggcctgcctcggtaccgcggcagcgcatcaagccgggtctggagagggttacacgatcgccggccgcgtcaagatcgatggcatgagtgagaagggctatggtcttccagccaagacatcaaacacaaaagtgatacttaatggcggccaaagggttacatttgccaggccagacggctactttgcattccacaacgtgccagctggaactcatctgattgaggtctcctcaattggttacttcttttcccctgtccgagttgatataagtgcaaggaatcctggatatattcatgcagcattgactgaaaccagaagggttctgaatgagcttgttctggaacc

SEQ ID NO: 272860 - DNA, 291 bp, Zea mays
aaaggccgcgacgagccgaccagctctactgcccccttccggccttcggcgaccgtgacgagcaacgacgaccacggtgacgatggccgcttcctccctctgccacgggcacttgctcctgtttctcctcgtgtccgtcaagatcgatggcgtgagtgcgaagggctatggtcttccagccaagacatcaaacacaaaagtgatacttaatggcggacagagggttacatttgccaggccggatggctactttgcattccacaacatgccagctggaactcatcttattga

SEQ ID NO: 272861 - DNA, 725 bp, Zea mays
cggacgcggggccggacgcgtgggtcggacgcgtggggtgcggccactagatttttcctgacgcggtgtctgctcccacttcccctcctctcccccaggtggcggcagcggcggcggggtagcatttgtgctacgagggcttttgcaatggcggcttcggggttcggcggcggcgaggcgttccggctctcggccgcaccaggggccggcttactgaagctgcacaagggcgacatcaccctctggtccgtcgactgcgccaccgacgccatcgttaatgctgctaatgagcgaatgttaggtggcggaggtgttgatggagctatacatcaagctgctggaccagagctagtgcaagcatgccggaaagttccagaggtcaaaccaggagtccgttgtcctactggagaagctaggattactcctgcttttgagcttcctgcctctcgggtgattcacactgttggccctatatatgatttggacaagcatcctgaggtgtcattaaagaaggcctatgaaaatagcttgaagcttgctaaagataatggcattcagtacatcgcattccctgctatatcttgtggtgtttatcggtatgttccaagttttagtttttgctcacgtacctttggtgcactcagctcttttttttcccatttcggggtttaatttgtagtgtaacttgacttggatcttgtacagctatcctccaaggaagcatc

SEQ ID NO: 272862 - DNA, 433 bp, Zea mays
aggtgtcattaaagaaggcctatgaaaatagcttgaagcttgctaaggataatggcattcagtacatcgcattccctgctatatcttgtggtgtttatcgttatcctcccaaggaagcatcaaaaatagctgtttctaccgcacaaaaattttcagaggatatcaaagaggtgcattttgttctgttctcggacgacctttacaatatatggcgcgagactgcccagcagttgctatcacagtttgagaaatgaatggtccattggcagtttgctagcagttgcccagcagtcgttgtctagtgttgagatgtgagcgccataggcagtttgcctggtgtaatacaaatgggtgtatcagacaacgtttaaatcttgatgaaaccgtgtattgcacctgtggtataatgctgaatgagtaaagtttggcgttt

SEQ ID NO: 272863 - DNA, 648 bp, Zea mays
ttattgggataaatgtcagatactcaccgatcagaattcgtatttagaactgacaggccctgtgcgtgctgtcctcctatctggtcatgtgatatttgaggcttcattgtatgtgaaaggtgctactagatctgatgacaaagaattgagccttctagctattacttcattgggggtgtgcgaggttgctcactcatactgggtggagcactcttacactagcagacttagcacacttgaactgatgcttggttatcttacttattctgtggaagctacaatcgaagtgcgagtcatttgcgggacatggccagctgatggttttcgtttcatctttgaggccaatgccggtataggacaatggattgtgttgcttgagactgcatagactgcagatgttggtgataagatcagccttgcacggcaggttgtttctgttgactatcatagagatagagagctgaaagttgtggccaccattacgaatggttctgctacctatacagatgaaaagggcttcaaacctctgaaaatgggtgcaagctccaaggaacttagtatcggtggcttagggttgcaagtcactgtttattggtcctgcttcccatttgcaccggtttagttagtttaaatattttttatttattc

SEQ ID NO: 272864 - DNA, 755 bp, Zea mays
cccacgcgtccgcggacgcgtccgcccactgcgtccgcccacgcagtccgcccacgcgtgcgcgacgaggagattgcttggcgggaggagttggtgaggagaggtcgcgaacatggagaaccttgctctgctttggggcatcatcggcccgggcgtgtccggtgccatcttcggggccggatggtggttctgggtggacgcggtcgtttgcagcgcggtccaggtctccttcctccactaccttccagggatcttcgcttcgctggcggcgctcatgttcaattgcgtgaacaaggatgagatcggatacgactattactcaccctacggggacgattcagagtggagagtgaagctctggctttttgtggcatatgtcggttcttttgtctgtttagctggatccgtgggtttattggtgcaagatgccctgacgaacaagggcccatctgtctggactggtgttgctggcgttctgcaatgtgttcttgtgttgataagcggcctggtgtattggacatgccactcagaagattaagggcgtaatgtcatgagcagacttgcaaggttggtcacagttgtgtgaaggaaattatttctggcaacatatgattttgtgtgatggaaatgacggacactgttcactgctgagtgggatgactagatgtttcatctgtgcatatctgacttttggaaaatgatgtttcttaacaccggtgcatgttttagccccagcttcttgtgagttgcccccc

SEQ ID NO: 272865 - DNA, 1037 bp, Zea mays
  unsure (1)..(1037): unsure at all n locations
cgggccgacccaggcgnccgctactccaaaacgaaaaagttcacagagtgctttagaaagcaaccgccgcccgcccccgcgctccacgactccatcactagactagagagagaaacccttgtaccctttgttctgtttatcccccatttctccgagtcacccgcccatcgccgagcttcgagtccaaggaagcggagccgccggagaaggggagatttgcctttcccgtcgggggcctagggagcaggagggatgcagcggcggcggggccacacgtgggcgggggtggggaagacggcccaggcggcggcggcgcacgccgcgctcttctgcttcactctcctcctcgcgctcagggtcgacggacgcaccgcatactcctggtggataatattcagtccactatggctctttcatggtattgttgcacgcggaaggttttcaatgcctgccccttctttgcctcatggccgtcattgggcaccatgtcattcgattgttgcggcgcctttactaattgcgttcgagctgcttctttgtatatatcttgaaagcataagagttagaaatcatccatctgttgatctgaagattgtgttccttcccctgttggcctttgaagcaataatccttattgacaattttagaatgtgtagagctttaatgcctggggatgaagaaagcatgagtgatgaagctatttgggagacacttcctcatttttgggttgcaatttcaatggtgtttcttatagctgctacaacattcacccttctcaagctgtctggtgatgttggtgctttgggatggtgggatttgtttataaattatgggattgcagaatgctttgcatttcttgtctgtacaagatggtttaatcccatgattcacaagtctcccactcatggggaggctagctcatcatcagcgattagataccgcgattgggaaagtggtcttgtcctcccatcactagaagatcatgaacaagagaggctttgttgtctacctgatattggggtcatgtaatgaaaata

SEQ ID NO: 272866 - DNA, 501 bp, Zea mays
tggctccaagcataagattgctccgatgcatgtgaacaatgttcgtgaagttcctgtttatgagtttgtccccgctgagctggatttcagtaatggcagtgatttatccaagggcacgtttagaaaagcaacatggaggggcattccggttgctgttaagaagctggacgatgatctaattgcggacggcagcaaagtgcaggcattcagagacgagcttgatgtgctgcaacttatacgtcatccaaatgttgtgcaatttttgggcgctgtgacacaaagcaatccaatgatgattgtcgtggaatttatgcgcaagggtgacttgcgcactcacttgagtaagaaaggagctctgccaccatcatgtgctgtgaagttagctcttggtattgcaagaggaatgaattacttgcatgagcataggcctcaggctatcatccatcgtgatcttgagccttctaacatattgagggatgacactggacatctgaaggtggc

SEQ ID NO: 272867 - DNA, 1081 bp, Zea mays
aaagctttcttagaatgtcgttctgggaaggcatttatacgtgcctggtggatgtttctgaagaatctggtgttttttcattcattgaaaaatgcattcagtgcttgttgcctcttttgacgctccatagtgatggtcaacctgaattcatgaaagagtggtctgttgctatcttatgtcttacaaacgcccagaaaaaatggctggatgatattttgcagattcgcagtactgccttagtcaatgaaggacatgttgatgttgcaaaaaagattatcctcagagcaagattgtgtgcaactggttgtggttcaacacatgagctgggaaatataaagacagcaatattgtgtacaaaagctgatggtgtttggtggagtgtccttgttgagatcacttcagccttaaactcagccgaaaacatcatcaaaagacagtggcttctggatgcattagacattggctgtgttacagctcacccctcaacggtgctgtgttttgttggcttgctttgtgggagctgctgcatctatatgccgcttcttcttgttaattcgataaatgtactgagcgacttgccggtcaccctgcctgcctttctctccaccatcgtttctgatgatttcaggaactctgtggcagacaggctatggctgttgactactgacatctatacttgggctgaacaattagctcacggacacgatcaacctggacatgatcgtattcatagaagtgaaactgagattgcgacttttttggccaatattctgctctctacatgcattacagtcgaggactacctgtctgttgataagcggctaaagcttgcaaatcttgaagcactctaatcaaagggagatgtgtttcttttctattttatgtatgtatttatgtacggtatcagtcatgttttaatagttgatgtccctgctgatgatccagcaatgtttttttcatgtacataattaatttaactaactcatcttatgcactgaaaacaatctattgttcaaagatagatagacctatgaaataaaattcacataaatgcagagttaagttgttcctgagctgagtg

SEQ ID NO: 272868 - DNA, 614 bp, Zea mays
  unsure (1)..(614): unsure at all n locations
cggaatnccgggccggccgcaggcgtcctcagcgagcgagagcaaggcgcccaagcaaccaccgcgagaacaagtcgcagccaaacagccccgtctcccagcgaagcttgagcttgcattattctaccatgtcttccatggagctgctccacgccgtcgtcccggagaagcagagcgaggaggaggtcgcgcccgcagcgacgaccacgagcagcagcgccaccgccacgggcggggacgagggcgcccacgtgccccaggggtgggccaagaggaagcgctcgcgccgccagcgatcggaggaggagaacctcgcgctctgcctcctcatgctctcccgcggtggccaccaccgcgtccaggcgccgccaacgccggtcccgtccgccgcggagttcaggtgctccgtctgcggcaagtccttcagctcctaccaggcgctgggggggcacaagaccagccaccgggtcaagctgccaacccctcctcctcctgctgctgccgccgccgctgtaactgtcccggcagcagtgcccgtcccggaggcccccgccccgatcaccgtcgtcgtcccgccgctgccgccagtcgaggtcggccgcgagccggccacg

SEQ ID NO: 272869 - DNA, 407 bp, Zea mays
tcgttcgaatcaagtcagattcagggaggggaaggcttaaccctaacctctctcactccgccgccgccgggggagcgcgaggaggacccttcatcgacccgccgcacgaacaaagctcccatggccaacctcggcggtggcgccgaggcgcacgcccgattcaagcagtacgagtttcgcgccaactccagcctcgtcctcaccacagactcccgcccgcgcgatacccacgagcccaccggagagcccgagacgctctggggcaggatcgaccccaggtccttcggcgaccgcgccgtccaaaacaggccgcccgagctcgaggagaacctcttcaagtcgcgcaccaaaaagtctaagcgcgacgctgctggcccgctcgacttcggcgaccttccccgtcgcga

SEQ ID NO: 272870 - DNA, 380 bp, Zea mays
ataccatttatttactctactgcgcagcgcatctccaaccgacaccataccgtgggggcgcggttccctgcctttcctggcttgggtttcgagcgccacctcaactcataccatacgagggtgcggttggcatccaccccacccgggtcatttaatgtacccgctgcatttcatacgtcacgttcacctgacatgtcacgtgcatttcataccgcacggccagctgacgtggccggtccagttgacatggcacggccatgtgatgtgcccgcgtcatttgatgtggcgaccatgccattacactactctactgaaccggcctgagcttaatcctaagccaaaccaatgccattgccaacagaacaatccaatccaatccc

SEQ ID NO: 272871 - DNA, 370 bp, Zea mays
atgcctggttttgggtaatatcttaagaggtgcaacgttctccgtgggtgttggtacgaggggggtttttcacaggtccggggacaagaaaagagccgaattagtgtaggaatggagatttctactttccgtagttgggttcgaacctgaagatggttttgtggtgtctgcttcgtctctagattatgcttcgtctccagaatccctaccctaaagagtgaaattgcgtagcttaaggtaggtgtttccccaatccgcgcaaaataaacgtaagggctgtctattggtaatagaattgaaagggttgaaggtttcaacccctcggcattgttgggagaagtttaagtgggagtaagcattgcccccttac

SEQ ID NO: 272872 - DNA, 715 bp, Zea mays
gtcaccattacaccgcccgagaggccgccacaaatccgatccgtagccgccgtgcctcgctttcgtcttttcccctctgctcgagtacgagcggctactcccggcggctgcggggcggcgatgagcgcggtgaacatcaccaacgtggcggtgctggataaccccaccgccttcctcaatcccttccagtttgagatctcctacgagtgcctcgtgcccctcgacgacgatctggagtggaagcttatatatgttggatcagctgaagatgaaaactacgatcaacagcttgagagcgtgcttgttggccctgtcaatgttgggacctaccgttttgtccttcaggctgacccaccggatccctcaaagatccgtgaggaagacataattggtgtgactgtgctgctattgacatgctcttacatgggccaggagttcatgagagtaggctactacgtgaacaacgattatgatgatgaacaattgagagaagagcctccagcaaaggtgctaattgaccgggtgcaaagaaatatcttggccgacaagccccgagtcaccaagttccctatcaacttccatcctgaacccagtacaggcccggggcggtagcagcagcagcaggagccccagacggcctcgccagagaaccacgcacgcagcggcgaggccaatggtagcaagcctgaggctgaccaatgaacacagttggctt

SEQ ID NO: 272873 - DNA, 410 bp, Zea mays
gagatccaccgtttcaacaaggggcagcaggatgcgctgctgccgttcgtcgagtcggggctcgtgaccttcatcggcgcgacgaccgagaacccgagtttcgaagtcaactcggcattgctgtcgcgtgcgcaggtgtacgtgctgaagtcgctggacgacgaccagatgcgccagttgctgaagcgcgcgcaggaaatcgcgctcgacggcctcgcgttcgacgacaaggcgatcgatacgctggtcggctatgcggacggcgatgcgcggcgcttcctgaacctgctcgagcaggcgcaaacggcggcctcgtcggccggcgtcgcgacgatcgacgccgagttcgtcagcagcgcgatgacgctgaacgcgcggcgcttcgacaggggcggcgacaacttctacga

SEQ ID NO: 272874 - DNA, 580 bp, Zea mays
aaaggagccgcgtgccaaaccacaaggaggtttcgacaccaggcagcaaatctaatgaaggcagtgacaaagccaaacgtaaagcatcagtgctgtcgtatcaaggcctgaggtcgagcaaatctggtgttgtgaagaaggtgaaagtgacccagcaacccagcaaccaagggaagcagaggaaaactgatgaaactggagcaactgctggcaaagctaagcgacccgctgtggctgcaagaaaagcaaagcagctggccaagaaacgcaaggtggatgcatcaacccctgagaatacacacaggagcaagaaaccaaggaagtaagttgtccattgcgctggtcgtttgcccttgcttcgcattgtaacaggagcttcactaaatcaaattctggacgatcttgtcagatgattgtgttactaggtagaggcaatgtgcgacctcaagtcaggttagggcaaatacaagagcgctctcgctactgtaaaccttgtaaccttatgtggcacttgttttgttttactatttccctccacaaacatttgcattttactatctccggcacaaagttccttcct

SEQ ID NO: 272875 - DNA, 539 bp, Zea mays
  unsure (1)..(539): unsure at all n locations
tcatgcttccgtgagccttacacaccaacaggtggtttctttggtggtgggaaccctgtaaaggggttttattcgcctgaacttagaggggatcttggtgctggacttctagaccttcatgctatggatgatactgggcttctgtctgaggatgtagcatcggaaccatttgagccatcaccttttatgccgaaggatattgatgatgatgatgaggatgtgatagcagggagtcagcaagcctcagtagataattatggtgtggtgaccagtgaaaaagagaccactgctagagaaaataatgtagcaaagattaaagtagtggtaaggaaaagacctttgaacagaaaggagctatctcgaaaggaagaagacatcataactgtggaggattcatcatttttgacagcttatgagcctaagctggaggtggatctgacagcctatgtggagaagcatgaantttgttttgatgctgttttggacgaacatgtttcaatgatgagggttaccgtgaaacagttgaacccataaattca

SEQ ID NO: 272876 - DNA, 793 bp, Zea mays
accaagccttccgccgaaagctatacgctcggccgttttctgcatcaacggtggcaggcggagcaaccggacacgcccgccgccgccctactcccacctgcccccgtcttcgttgccggcgacgagcacccactacaccagattaacatcctataccatggcctctctgccttgttcacaaataaagttaagcaaagtacttgtcaggaggaagtttcatgagagtggacagaccaatttgccaagtcctcttcactggaaacccttgcgaccaggctgttttgaaaatcttgtgctgcgatgcaccaagaatttgtcatgggaaacatctcttccatatgcctctgcagaggatgatgccagtatcatcaagggaacaggtgttgttgaacctattgatacagaagaagctccacagattccaatcctccagagtgatgaagatgttgtagaggtaaagaatgaaccttcttggcatcttaaggcatttaaactgccaatgtggctagtagggccttcaatcctgttggttacgggtatagttccaactttatggctcccattgtcattcagtgtttcatggtcccaacatcgctggccttctatctctagtcggacttgacttcatttttaatatgggagcaatgttgtttttccttatggctgatgcatgcggccgtcaagagaacagtatttttgacctgaaaaggcagataccaatttcctacaggttctggaatctggctgctaccatagtaggctttgtggttccatttgccctgttttttgcatc

SEQ ID NO: 272877 - DNA, 393 bp, Zea mays
aggacgcgtgggctcagtaacaacaatggttctgagcttgataatacctcttttaacaatgggcatggtatggccctggactggaccagcagcatcagcgactcttgccccttatttggttggactggttgtacagtttgcatttgaacagtatgcacggcatcggaaatcaccttcttggccagtgattcctatcatcttcaagtttgtgatctgatcaatcgtacctgatatttgggagctgggacttgggattggctatcagtgtatcaagtacttctggactctactgggagcattttgaggaatctatgggcggcaactaagactgggaaatgtggaagaaaataatccagtatacaggcttcaccaactgaacagggcagctcagct

SEQ ID NO: 272878 - DNA, 524 bp, Zea mays
tcgtccacgcgtccggtctagctcccatccgacctcctgcattccccactagtcccaactcccaaccaccgccagccgtccgctctccgcaagcgcgaccttccggccagatccgccccgtcgcgccgacgagcggtccttctgcctagtttctccgcccagcgagcggcgggttcctcggagattcccgctggccgcggggatccatttgtgactgctcgcgttgcgcctggatctggtttgggacggaggagtgaaacgcgacggtgatcgtgcgaggtgggacgccatcagtgctctgtctggggttcggtctcttcttcggctgcagatctggaagggtttcgtgggatccgtcgctacgatctgtcccagtcagagcacctgcatcatctcgggtcgggccatggagactctgctcatctcggaggagcgcaaccaccagctccaccacttctcgggtcgccggaagaaggcgttagcagcgtcgcctcagtccacgcgcagctaccatgctggcaact

SEQ ID NO: 272879 - DNA, 1130 bp, Zea mays
cccacgcgtccgcccacgcgtcagcccacgcgtccgcccacgcgtccgcccacgcgtccgcccacgcgtccgcccatccatcgattggaacccagatccgcaggccgcagcacaagagggtgggatcggatcggatcggagcagagggggacaaccgaccagaatccgccggcgaccaccatgggctccgcgagccgtgccgtctcgtgcctgtgctgcccctgcaagtgcctggcgtgcgggctcctgagctgcctgtgcagcatcctcgtctcgctcgccgtcgtcctgggcgtcgtcgccctcatcctctacttcatcttcaagccgcacatgatcgcggccaccgtggactcggcctcgctctcccagttcgcgctgtcggcgtcctccacgctctcctacgacctcaacgtcaccatgacggtgcgcaaccccaacacgcgggtggggctctactacgacgacgtccaggcgctggccctgttcagcgaccagcgcttcggctacgccccgctcgacgccttctaccagggcacccaggcgtccacccagctcagccccgggttccgcggcacgcagctcctccagggcgacgtcaccgccgccgagttcaggcaggagcagtccgcgggcaacttcgccgtcgacgtcgacctcaacgccaagctcagggtgaaggtctgggcgttcaaggtccgcgggcccaaggctaaggtcacctgcaagctctccgtccccgcacccggcgccgccaacgcctcgcccttccagcccaccgtttgcaaagtctggttctgattttccatgttgtgggatttagatttacctggtaggcattctactagtagtagtagataatgttaccagctgatgctgatgtcgattattgttttctttcgttcattcgttggtcgtcagtcccgctctggattttgctttatgtatatatatactgctctccttcattcgtaccagcactatgctttgctgtatacacttttgtttgctctcagtttttaattactactgtaaacaaatttactaagttgtcccggctaatctcgtaattctttggacttgaaatgattgctctcctgaaatattaatcaaattgctcggttgcaatc

SEQ ID NO: 272880 - DNA, 472 bp, Zea mays
tcgacgtgcaccaccgtcttgccgtcgctcatttcctcctcgctcggctgcttgcctagggtttcacctgctcccggccccgcctccagccgtcgcttcagatcccgccgctgccgccgctcgatcctccttcgttgctcctcgctgatcccgctgagctcggatttgcgcccttcctccccgccggaacagcgtccggacgcgcgggcgcagatctgggttttggtggcccgcttgttgtatgagaaggcctctaaagcttgggagcaatggaggtggagccagcgaggagggacgcggcagcgctggacctggagctgctgcagctggcggagctcgcgccgggcgcgcttcgtgagaactccatagctgatgcactgtacgcgcagtggctcgtgctacctgagacgaccaagctggtaaagtctttgattgaggatgcaaagactggtgctgtgcttaatggtgctgg

SEQ ID NO: 272881 - DNA, 867 bp, Zea mays
ggagtgaagtactcggaagacgagatcctgatgagataccggcgggcatacgagcaaccatggggtggatcacgtctcaggtatgtggatgatgggagaaccttttggcagcacatagtcacttcttctacaggatgttcagatgcacagtactttgaggaactctatcaatactttatgacagaaaaggcctggaagctttgtgaccccgatgccgaaagtgtatttaaagctttgaggaaagctggcgttaaaactgcagtcgtctccaatttcgatacccgtctacggccactcctgcaggccttgaaatgtgaccactggtttgatgcacttgcagtctctgcagaggttgcagcatagaagccgaacccaataatattcttgaaggcctgtgagttactgggcgtgaagcctgaagaagctgtgcacgttggcgacgatcgtaggaatgatgtatggggagcgagagatgcaggctgcgatgcttggctctggggcagcgacgttcgctctttcaaggaggttgccgagcggatcggtgttgaggtgacgaagtgactaagtgagctaggatggtgaatatacggaggcagaggtagtacccaggatcgcggtcgtcaaggaagccagtgaccccatccttgtggtgaaattcctgtgctggtttgtaggcttgtagctgtatgtatgacaacttattagggttccgttgaacctgctatgcatgcatgcttgctgccctgacagtgacaggcgaatgcgtcccatgcacttgaatatgaaggtctgggttctggacttctgggactcttgagttattgaattattgtcgcctagtttgacaaaattatattatttattata

SEQ ID NO: 272882 - DNA, 528 bp, Zea mays
tctgtcgcccacgcgtccgcccacgcgtccgcccacgcgtccgcggacgcgaggggcacgcggcacttgcccccgcgatcataacctcaccgcccgccaccagctgcagccacaagcgcagcgctcgacagcctcaccagccgccatcactcgcggcagtacccggccgctgggactgcaagagtggggagaggagacgctgctgctgttgccgagtccgaggagacactactagtcactcaagactcaacagcagcaggggcgaccgaagctctgcgtgcgtggggagaaccggagaaggcagcagaggagggagggagggagcgcctggacgggctaggcgcagcagcatgggcgccgggatcagggtcctggcggcgctcttggcggcgctcgcggcatccaccgccggcgtgacggcgcagctgcggcaggactactacgcggcggtgtgcccggacctggagagcatcgtgcgcgccgcggtgtccaagaaggtgcaggcgcagcccgtcgccgtgggcgcca

SEQ ID NO: 272883 - DNA, 554 bp, Zea mays
cccacgcgtccgcccacgcgtcctgcggcacttgcccccgcgatcataacctcacaccgcccgctaccagctgcgcacgctctgacagcctcaccatccgccatcactcgctgcagtacacggtcgccgggactgggagagtggggagtgagacgctgctgctgttgccgagtgcgaggagacactactactcttaagagtcaaaactcaacagcagcaggggcgaccgagctctgcgtgcgcggggagagctcggagaaggcagcagcatgggcgccgggatcagggtcctagcggcgctcttggcggcgctcgcggcagccaccgccggcgtgacggcgcagctgcggcaggactactacgcggcggtgtgcccggacctggagagcatcgtgcgcgccgcggtgtccaagaaggtgcaggcgcagtccgtcgccgtgggcgccaccatccgtctcttcttccacgactgcttcgtcgaggctggcgggccgtcgtacgcggtggagctggtgaggctggacgggctggtgttcatgttcaccaacgtcgac

SEQ ID NO: 272884 - DNA, 649 bp, Zea mays
ctacaacacatgcttaaccctctctgaggtgctgtgtgcagtcaggtctgctcttaactgtttctcctcccagccgtatgttataaaggaaggcagaatccaggggctgctgcgagctgattacgtagcggccaacagcatctcacgctactgtgcctacctgcttgtaaaagaaccagatttgctacctgacagctacttggctgctgatgacctattccgaagcaccatccacgaggctaattcggacgtactgagtggctgtgacaccctgcaaagcatatacagagctctgattagagaaggaggagatcagcggcagcaacaaggcggcagcgacagtaatactacgacacttgagaaagccggccagcttgctgggtcactgattcaccagttcacggatgaaaaggctcgttggaagtttctcgcagaggtgtgggccgacatactggtacacactgccccctcttggaacgccgcggctcacaagaagtgccttgcgactggtggcgagtttataacccacatctgggccattctttctcactgcaacgtccagagcagcaggcgctggccacgtcaggaatccccgcaagatgacgacgaggtagtagcagagaatcatgcactgtcacaacaggtagta

SEQ ID NO: 272885 - DNA, 796 bp, Zea mays
ccaggtcataacaattgagaaagagaggtacattgttggtgaagctttatttcaaccacatatattgggcttggaagattatggtatcgttcaccagctagttactagtgtctcaaatgtttcatcagagtaccatcgtcagctgcttgaaaataccatgttatgtggtggcacctcatcaatgactggctttgaggacaggttccagagagaagcaaatctgtctgcttcagcaatctgtccatcacttgtgaagcctcctgaatacatgcccgagaacctagcaaggtactcggcctggttgggtggtgcgatattggctaaggtcgttttccctcaaaaccagcatgtgaccaagggcgagtatgatgagacggggccgtccattgtgcacaagaagtgcttttagagacaaatgccttgaactagcacggttggtgcaccatttgctgctgttcatgtcgcagttgtgctcgtacctgaacgttgcggccttgcgggtgctgatgcagcgatgcttgtgtctacaccttactccagccacagttcatacctgacggttgctaagtgttgatgcatctagctagctcggttaggatggattggtccttaggtttatttagagtggaatggagtgtagcctcggcatgtattccttaggagttttagccaattgctcatttgtacctgtagtaccagagaatttcttgagatttccttttaaatttacattatgatccattacctgttcccaaaaaaaaaacaaaaaaaaaaaaaaaaaaaaaaagggcgaaaa

SEQ ID NO: 272886 - DNA, 422 bp, Zea mays
cagaaaagcacactcttcctgatgggcaggttataacaattgaaaaagaggggtacattgggggtgaagctttatttcaaccacgtatattgggcttggaagattatggtatcgttcaccagctagtcactagtgtctcaaatgtttcatcagagtaccatcgccagctgcttgaaaataccatgttatgtggtggcacctcatcaatgactggttagttattgatttcatatgccagatgccttttgttctttatgtgcacctttgttttattcaacattgtgagctagctatatatcaaatgcatatctattagctagatagggtaagtaatactccctccattcacagatatatgacgccgtttacttttttcaaaaactttaatcactcgtcttattcaaaaaatagtaagttatcat

SEQ ID NO: 272887 - DNA, 485 bp, Zea mays
ccgttccgtccgcccgcccgcctgcccgcttctctctccccctctccctccacccaacccgcgagaccgccgacacctccaggacaggacgaggagcggcttcaattcgtccccgcgccgcgcgcccaggacccgcccccgctgcctctcccgagggttccagctggttctcaggcagaggcagaggtcaccttctgctgctcaacgcaacactgcacatacatacatacagatgggttccgaggggccttctcccgtcaccaccaccgtccacgtcactgggttcaagaagttccacggagtcgccgacaaccccaccgagaagatcgtgcgcaacctcgcgtcgttcatggacaccacagggctgcccaagggcctggtgctcgggagctgcaccgtcctcgaggcacgccgggcagggcgcgcttggcccactgtaccaactgctggagtccaccgtcgtctccggccggggacgtgggatg

SEQ ID NO: 272888 - DNA, 1554 bp, Zea mays
tttttactgtaggctagcggagaggtgggggatggcgaagccgacgccggtggcctcggcagaggaggcggcggcgatgcggcgccggctgaggcgcctggtggccgcggtggcggccgggagcgccgacgccgaggccttcgacgaggctgcagaggcgctcgccaagctcagggacgccgagcttggcccccgcaaggacaggaccagcgacggccgggagaacaagcgcagcacggaggccgccgtgccggagcacttcctttgccccatctcctcagagatcatgagggatcccgtcgtcctcgcctccggccagacgtatgatcgtcgtttcattcaagaatggttaagcgctggaaaccggacatgcccacagactcaacaagtcctttcgaacacaattatcaccccgaaccaccttgtgagaagcatgatctcacagtggtgcacagacaacgggatcactctgccaccggttgagaaccaagatgaagatctggttacaaacaatgagcgggagacatttcgtaaactgtttgagaggatcgtatcgtcgtcgtcagacctgtctgagcagagggaagccattaaagagctcaggctgcggactaagtgcaacagttcactaagagcagcgataggagagagaccggattcaatctcgcagatgatttccgtagcgtccagcccagagctagaaaacagtgcagaagttgtggaggatacggtgacagctatccttaatctctctatccacgagagcaacaagaagatcattggagacgacccactggcagtcccgttcctgatcaaggccttacagtcaggaaccatggaggcccggagcaacgccgccgccgccatcttcagcctatccgcgctggacggcaacaaggcgaggatcggcgagctcggcgcgatgaggccgctggtggagctcctcgagcacggcagcacggcagcgaggaaagacgcggcctcggccatcttcaacctgtgcacgctgcacgagaacaagtcgcgggccaccaagagcggggccgtcgacgtgacgctgagggccgtcgcctgcgccggggacggctctggctccggctcgctggtggacgagtctctggccgtcctcgcgctgctgtcgggcgaccacgaggcggtggaggaggtcggcgagacgggcggcgtggcctccatgctccacgtcgtgaaggacgacccgtgcaagcgcaacaaggagaacgcggcggccgtgctcttcgcggtctgcgtgtacgaccgcaccaggctgcgggaggtcgccgagcacgagaagctgaacgggtccctgggctggctcgcgcggaacggcacgtcgagggcgcggcgcaaggccgccgggatcctcgacaagatgaagaggtccatgcaccacccgcactactcctgctagtgctgccgccgtggctgtgtgtgatcagggggggaataagggtggtgtgtgttgtgttggactgctcgttgctttcgcgctgtatatatatatatatatatatatatatatatttcagcctgcgt

SEQ ID NO: 272889 - DNA, 943 bp, Zea mays
ccagcggataataaaagtaggcaggaattgaagaaagcagcaacttctttcctttctgcagagctgcctgaggactgcaagttttacttggcagacacaaaggatgatttgcataagttcatgtggcttttcaaggagcagcatctttcctcgccacattggagaaaccagagatcttatgttatgtctgagcaggtctgcataaatcctgatgaaaatacgggattgtgcacattgctcgtgtctggatatttgcgggcccacaatctttcagtgaatcagcttgtccatgtttcaggtgctggtgattttcagttaggccaaattgatgtcctcaaggatccatgtcctcttagtgagcggaaaagctctgatgtaatggaaacagaagataatggaattcagattgttaacacttttgttccagacccttcaagtcaggaacccttacttgtggaaaatgtgccagatcctctcgccggggagcagacttggccaacggaagaagacatggaggaggtcgacataaacaacaaacagagaaaattggaaaagaggaagcttccccaaggcacttcagagtaccaggctgcttggattgttgaggacacagatgatgaagataacgactctgatgatgacaaccagactgaatctggaatggtcattgatgagcaaggtcactcagaccaaggaagtgatggttcagatatagatgcagtgtctcactttacggagaagtttgatggagaaactattggggatactgagatggcagatgaagaaaatttgacgaaagaccagatagaggcagagattaagaaaatcaaagaagctaatgctgatgatgacgaatctcctgatgaggtggagacaccattagatgtcccagcaaagaagcggtttgcaaaatacagaggactaaagtcatttaggacatcat

SEQ ID NO: 272890 - DNA, 351 bp, Zea mays
  unsure (1)..(351): unsure at all n locations
tgcgnctcncctctcgtattctctgaccctttccttcccttcccttgttttgatggccccaccgcgagccgccgccggcgtgtcaattcctgctgatcctgccgccgacagtccagaggcagagtcggagagcaagctgcggcaaggtgcagcagacgcgcggtggctcgaaaccctctccgagccggagctcgatgtgctggtgagcctgagggaagtcgccgtcacgcgggcttccgatggccggccatcctgggctcgccgacaccgtcttccatctccgcgcgcggcgggctctcggggttgaggtcgtggaagagttgtaagagcgcatcaatgcacagttcaatt

SEQ ID NO: 272891 - DNA, 733 bp, Zea mays
cgcgtccgcaaaatgttcatcaggtttccttaatggttaaccaaacaaaaggattggcccaacaatcaaaaattacccaagggaattttttaaaggaggcaaaaaaaaaccttgcaattatcctaacaatccatccattggaaaaggaaaaggtattgtgtgaccggcttgcatctttgtgatggcgatttccaatgccttggaaaccctaaagagctaaaggctagatatggggggacatacatattcacagtgacaacacccccagaccaagagatggaggttgaacatctagtgcgtcagttctcgcccagcgcaaacaagatctaccatctatctggaactcagaaattcgagctgccgaagcaagaggtgaaaatagcccatgtttttgacatggtcgagaaggcgaagcgccggctctcaatacatgcctggggactggtcgacacgaccttagaggacgtcttcatcaaggtcgccagaggagcacaagtgttcaacgagtttgcgtagattacacctttaggactgccttcgtagcaagcacgggaccccaattattggatgggcggactgcataaaaaatcttgtggttttgtaggtatttttcattagtgagtcattcttgtgtggaaaataggctccatatgcttggtttacgtggttgtacataaataaatacatttttgagactgcagttgcagaatagaataattgtccagttgtgtac

SEQ ID NO: 272892 - DNA, 468 bp, Zea mays
aaaggcttatcttttcaatgattactgggaagatattggaactattaagtccttctttgaggcaaaccttgctcttgctgaacagcctccaaggttcagtttctacgatgctgacaaaccaatgtatacatcacggagaaacctaccaccatctatggtcaacaatagtaagatcactgattcaatcatttcccacggatgtttcttggataactgcaggatagaacatagtgttgttggagttcgttctcggataggctccaatgtgcacctcaaggatactgtaatgcttggcgctgattattatgaaactgccgcggaacgaggagagctgcttgcagaaggaaaagttcctattgggattggagagaatacaacgattcaaaagtgtatcatagacaagaatgcgaggatagggaagaaagtggtaatctccaactcttgaggtgtagatgaagctgaaagaac

SEQ ID NO: 272893 - DNA, 584 bp, Zea mays
cccacgcgtccggctctggacacatcagtctgttaatcctgaatgggagcaaagacatgtccaagttcaaccaggaagttcctattatgcaggcactgcaagtgatccatccaacctgggtgtgcaagttgctgtgggagttccaggaaatactgctaatgttggtatatgtgatttgcggaatcatgagtgcccgcatgttcataattcatacccacatgccggtggtacatcaagatttgtcttcccaactactatgtacagccctagcatgtcagcagcagctgtcaacatatatattcctcagactcaaagctttggactgggcagtgtgctaccaccatctttacataatcaagtttccacaggaattattgatgagagtagcagcagtgtcaattttggtgatagtgctattggattcatgaaaaggaaaaatgcagtagttgctggaagccataattttcttcatggatttgctgggtcacagttcatctgtccatgtgcctcacaatcctgcgcatggggcatggaatcctgcatctcaatcaaattgggcacccaattttgcaactttaaaacct

SEQ ID NO: 272894 - DNA, 301 bp, Zea mays
cccacgcgtccgctatgagccaagtaaagagagaagccgataaactgtgtttcacgtcccggcgatgagcccccgtgtggtcctcctcttcctcgccgccctccgcccctgcgccgccctcgtccgccttcactccaccactttttccttcactttccttgacgccccagcgcgctttggcccccgagtgagcggcgatgggatctgcggctccctgcgtgccgctgacccggccgaggcgtgtgagaccatcaaagaccgcggcgggcgccgcggtgcgggcaggaaagcttttgtgctg

SEQ ID NO: 272895 - DNA, 451 bp, Zea mays
aaatttaaaaaaggagctgagaaggaaacaaaagaggagaagaaggcaagaaaggcagcagtgaaagaagaaaagagagaagcccggaaagcgaagaaagagctcaaaggcctgtataaatcagaaacgcagaaggctcagaaagttgccgctgttactggaccttcttccattcgactaatgtgatggttgatctgtggcacgtttactgatgagcgacgactatgacagtcttgaatccaaaagatcgcctggacaaatgcatcaaagctacgaacgatgtatgataccagttcatatttgtgctatactcatggattttgtcgacaggatacccaatgcttgcttactatatattagttagttgaaggagaagataattatacacacttatcgaaggcatggcagatccttaaaagaaactttacgtcggaaccaggtcatgatggtg

SEQ ID NO: 272896 - DNA, 572 bp, Zea mays
tcaagatattcagagacgctggaatccatggtcacgcattccttgctgctggaaaccttgcggaactgtcggagggtgagtacaagaacttttcggcttctgaatttcggcaaacgttccggagctctgctggcgttgggattattttgcctaccaaacttttccgggtggaggtgaactattgccgcatcctaaagcaagctgagcatgacagcgcgaagactggaatccagttcagcttttcctcgcccatgtaggaacttgccatggcagccgaaacagctgcactttcctctgtagacttgcatttcttcccgttcttttcatgctgaagcaattgaagaggttatttacgtgctcccttttcttgtgacgcttgttcattgacacgaggagctgctccttttttttggtgtcttcaggagatgggtttattatttgctgtttttgacctcacgagggatttgtcctcgcacaactcaaataccgatgctgtggctacacaatggtggatagaataatattttggcccataatgttgtataagtgaaaaataaaaaaagggaggacga

SEQ ID NO: 272897 - DNA, 367 bp, Zea mays
acctctaatggttctgagcaacctttatttttctttcaggttttacttcattctggtcagtttgaaggtgctataagattcagagttgatgacttgcaaaagcctattgataaacctgagaacataaactggggaagttatgcaaaaggtgctgttagtgcactgcagaatagtggatatgatctaaggaaggtaatccatcattgtttatctcttacacagtacagattgtgttgtacttcaaaaattttggcaaatgatttcttgtagggtatcataggatatatttctggtgtgaaaggtcttgatagttcagggctcagttcttctgcggcgggaagtttactgatattggatacattaccga

SEQ ID NO: 272898 - DNA, 1517 bp, Zea mays
  unsure (1)..(1517): unsure at all n locations
catactttaaagggctagccaaggttgagagagagccatcttgtcaaccaatcacaaagatggagtttgagtttgaaaggagaagagtgacaaaagaagacattagggagctgatattccgtgagatattggaatatcatccacaactgctcaaagactatatcaatggcacggagaggacaacctttctgtacccaagtgctgtcgaccaatttaggaagcaatttgctcatcttgaagaaaatagtggaaacggacctgtgattccaatggaaagaaaacatacttctcttcctaggtctactattgttcactcatctccaattcctgtcaaggaacaaccccgtatcggcccatgtagggaaaggccttcatctgatgagtcctacaggaatcctcgggagacagaacaatattccggcaatctccccagaacgtcacaggctccacaaagagtgccaacagcgagaccaggaagggttgttggtccagtaatgccttaccaaaatggagacaccaaagacccctacgacacacgaaggttggcaatgagctcaggatatcctccccaacaaatcccacaaacgtttggttattatcagacacatggtaaaccagcttgctgcgagccatcacaggctgaaaggtacacgctgcatcagcaggctgcctatgcctgcgcaaaccgtacagccgcgtctgatgttgctctggacatgagagcacccccttttcagcatctatcggcagggcagagaagtgactcttgtgataggctgacagcagagacaaacttgtacacgagatcaaccaacggcatcgctgccactgcagcaggagtggcagcaactactcacagaaaggtcggcgttgttccgtttggcatgtcaaacatgtattagtgactggatcatggccgaatcatggtgaatcctctgtgcggttgatgggtctatgctgccttcaggtggctaaacaccgacaacttgaagcggccaatcaaacctttggctggatgctgcaagtttagagtgcagtagacagtgttttttctgtgtggtcaggaaaagaggaacaccgccggcggcatgaagcctgccaaaaagtttgtatctgcctgtgcctgagaagtgtgcccttggttgcacactgagaaggggtatagtcggcagtccggcggcatgtaatctgggcaatttaggcgccaatttcttttctagagcgaggaggcagaagggaaaggaaggaacattaacgttttaaatgttgtatagagacgtttctcatgcatcaatgtgctacatcagaattacttcagaaagatatgagatacagccaaaaaaaaaactgtatggcatatgcatgttttagatctatcgngactacttcaaaacatgctgcccattatcttgactatatangtgagctcgtatgatcggaggaaaaggcagcttttccttggtattgtgagctgtatctagcttcaaaacttgtcattgcacggaaacgtacttgac

SEQ ID NO: 272899 - DNA, 616 bp, Zea mays
ggataataagcggcaggacaccgtcatggctgcgccagcgacgccgcggcagtcgctgatcctcccacgtgcctcctcgcactcgcactcccaacccagcgccggcgggctcacctcttaccgcgtcaccgcctcccaccgccggcgcggcgatttcgttttcgtcgtcaaccccttgggcgccaatggctcgcacgggaaagcagtggcagcagttgctgccgcttctccgcacccgcctcgctgacccgtgcaacatttgcgagtgcatcacttcgggcccatcccatgccctagatgtcacaagggaggctataaaggatggggttgatgccgtgatagctggtggaggtgatggtacacttcatgaggtggtcaatggtttcttttgggaaggaagtcccatgtgtgctctggatcgagggcctgatcattcgacggcgctgggtctcattccacttggaactggctcagattttgctcggacatttggctggacaaatgatccccatgacgcgattgatcgaattgtgagaggagtaaaatcaaaactagacgtaggcgtgatggagggtccaaacagagaaccacacttccttgttaatgttgctgatat

SEQ ID NO: 272900 - DNA, 453 bp, Zea mays
gacaaccctatactgctacaacacacacactcccacatgcataatggttggtacatggtaaaactatagcaagcgaaggtcgatcgctcgtctatagctagaccactaccaccagtaccaacttcatggtttcttgactgatagattgacggacgagaatgaagaagctagctagctactagatatatcattcagtagagtgttcagttgttgatgatggcctcctccttgcccctggtcaccactgggctgcgccatcctcctcctccgcagcagtcgccgagggtggtcctgcagagcgaggacccgaccgagtggtgcgcgtgggcgcaccaagggcaccgtctgtgggtggccatgccggactccttctgggtgtacacgtacaaagtggaccggtgcccgttccggggcaaccacgtgtggacgacgtgcccctacgcgcactggggg

SEQ ID NO: 272901 - DNA, 490 bp, Zea mays
acgcccacgcgtccgcccacgcgtccgcccacgcgtccgagagccgaaagaagttgaagaggcaacgaagggtgagaaaaagaagaagactattacagagaaatattgggattgggaactagccaatgagacaaaacccatatggatgagaaatccaaaggaaattgagaacaccgaatacaatgagttctataagaagacattcaatgagtttttggaccctcttgcccacactcacttcacaactgagggtgaggtggaattcaggagtgttctttatgttccaggcatggcgcctcttagtaatgaggagataatgaaccccaagaccaaaaatatccggctatatgttaaaagagtcctcatccccgatgaacttggatggtgaacggttcccaagatacttgagctttgtgaaaggtgtggtggatttaaatgatctttcctttaacgtattcttggttgattctttatgaaagttgtttttgta

SEQ ID NO: 272902 - DNA, 445 bp, Zea mays
  unsure (1)..(445): unsure at all n locations
cacacgccgaggcggtggctgcagctgcggcgccgcgccggtatttcgatttgtctcctgaagcaagcgcagcaatgccagctcttcccgcttttcccctcacccgccgcccatccgatgccagacgccgcggtcgcctcgtcctttccctcgtcgtcttcgttgctgtctccgccgccgcagccctcgcctacctatctttcccctctgccgggcggacatcgcccccggcggtccggacggaggccgactgctgcaggggtatggagggcctcgagctctggggcccggcggtcaagtggggctcagaccaccgtctgccctccgccggcgtctgctgcgccgcctgcaaggccatgtgccctcaccataaggacggngcctgccgctgcgactcgtgggtcttctgcggggacgagcgcaaatgcaaagacaggctcgggga

SEQ ID NO: 272903 - DNA, 466 bp, Zea mays
ccaagtgctgctgcgacgacgagcagcagcagcggttcggccggcgtgtacagccctccagcgatgggtccgtcggccctcaacgacaacagcgctgccgccggcgtcgtcctcccgatggctggcgctgggcggctgcctgatcctggcctgctgctcgctcgtcgctctctactacctcggcgcgtgatgatcgtgtgaggacgagacgccgctccccgctgccgcttgctgttgttggggtgtcttgttccttagcccttttcttttctcctctagtggcagtggcaggcaggagagaaccttgtgatgatgggcgcactgcactgtcttccaccggtggaggagagctgggcagagtgaggcccctgtaaatcttaggttctagggagggagggatgctgtgttgacttcttgtacatgggtgctcattgttttcattatatataatattattctatgtggg

SEQ ID NO: 272904 - DNA, 419 bp, Zea mays
gctcggcccccatcacaacgctctacgaccgcatcctcgacgagtccaagaagaaggaccgcaagaactcgtgcggcctgctcaaggagatccaccagattgagctctgctccaggcacctcatggagatcactgacgccgccgacttcccgttgcgcgaggacaaggacgccgtcttgcgggaggccgcgcaggacctagtgcacctgtgcgaatccatcaaggaagggctcgacccgctcgagcgccaggtcagagagatgttccacaggattgtgcgcacccgcacagaaatccttgactgcttgagtaagccacatggcaccgggtgatgggatataggagattgccagcccgtttgcttgctgtgatgccccttaaccaaacattcttggtgaatgcaacagcggtggtcaaat

SEQ ID NO: 272905 - DNA, 668 bp, Zea mays
ccgcgagatcgaattcctcaaggacgagctacaattacttgaaggagttccaccagtttcgagaaggggtaaagaggtaaatgactttgttggtactaaacaagacccactaattccgatttctattaagacacacagatcatgccgtcttttttggtggatcagatcaaaactgtgcatatgcgtgccatggttctgctgttcctgccattgcatgcccaactgcaaaaggccatgctgcttggattgctcctgctgttcatgcccagatctgtcatgctgctatcccagctgcaaatcatgcaacaaaccatgctttgggcccaacagctgctcatgttgcgacatatcatgctgcaagccagattgcccatcctgtacctcgagctgcagctcgtgctgcaatcggccatgtggcaacccagactgcagctcgtgctgcacctgcaatccatcatgctgtaaaccaagctgcaactcgtgctgcagaccaaactgtagctcgtgctgcaatctgtcatgctgcaaacccagctgcagctcatgcttctcatgctgtaaagcgaactccagctcatgctgtaaacccaaatgcagctgcttcaaggccctctcgtgctgcaaattacagtgcagcccaaactgctgcacttgcagtctcccgagct

SEQ ID NO: 272906 - DNA, 630 bp, Zea mays
atgcgtgtcctcttgtgcacatatctgtgctgcttacaattggaagtgaaactgctgaaaaagagctaagacggctatcagcaataaagcgctcgattgagtggttctttgagtatccatataacaactttttgcaccatcatgttgagaatataattgttgcttgcctggagggtaaaagacctgaagttgttgagcatgttcttcatgaatgtgatattgctggtaaaattcttgtctcagagaggttttcatccttgtcgactgagtctaatgggcctactgttccctctgaagggaaaacccctccaagaattggaaatgttggtcacatgacaagaatagccaataaacttattcagttgggcaatagtaacaacacaatccaggctcacttacaggaaaataatgattgggttgaatggcaaacaaatgtgctggtcaaacgcaatgaagtggagaatgtttatcattgggcttgtgggcgcccgacatcgttacatgaccgtggttgggacagctatgtttatgatttttcggtacaggtttttcgatttgttattttttgttaatacttatgttctggctttctttatgttatatttatttatcataactttttcttagctc

SEQ ID NO: 272907 - DNA, 249 bp, Zea mays
aaacaaatgtgctggtcaaacgcaatgaagtggagaatgtttatcattgggcttgtgggcgcccgacatctttacatgaccgtggtagggacagcgatgatgatgacttccgggacagggattacgacgtggcagctcttgctaataacttaagtcaggcatttcgttatgggatatatagcaacgatgacattgaagaggcacaaggatcacttgaacgagatgatgaggatgtgtattttgatgatg

SEQ ID NO: 272908 - DNA, 401 bp, Zea mays
  unsure (1)..(401): unsure at all n locations
cttttccaccccgccnccgaagccaccgtgccgctagccttccccgccgccgcaaaatggccgcctccgcgcgacccctggttaccgtgagggccctggagggcgacatggccacggactccgccggtgttccgctggcggacgtcctccgcgcaccgatccgcccggacatcgttcgcttcgtccacaagctcctgtcctgcaacagccgccaaccctatgcggtgtcgcgtcgcgccggacaccagacctccgcggagtcctggggcacggggcgtgcggtatcccgtatcccccgcgttcctggcggtggtacccaccgcgccggccagggagcgttcggcaacatgtgtcgtggtggacgcatgttcgcgcccaccaagatctggcgccgctggcac

SEQ ID NO: 272909 - DNA, 367 bp, Zea mays
gtcgtcgccgacccagacgccgcataaaggaaagctttctccgcgacaagagggccagaccgtgacgcagcgagcggccatggggaagcagctctgcgacatgcaccgctcgcgccgccgcgcccgcatcgtcgccgccgccctcctctccggcttcgccgccgccgccgccgcgctcacggtgtacctcgtcttccgtccgctgaagccgcaggcctccgtggtgcgcgtcgccgtgtaccgcatggccacggccgccgggaactcctcggaggggcgggccccgccgccgtacacgctcgcggcgagcgcgcggttcacggcgctgctgcacaacccgagcgaccgcgccggggtgggctacgac

SEQ ID NO: 272910 - DNA, 1504 bp, Zea mays
cgcaacgtcgcctgcttgactatctgcctccagccctccagcaagacttcagtcgcctgccccagcctggctgccgccgccctccagcaaggcagcaaacgccggcctccggccgcccgtccctaggccagaggcacccctaggccgctaggcttccaccgccgacgcccacagaaaccgtaggcgccaccaggccaccacgagatccctgccgtgacggagaatggaggccgccgcggccgtcctccccacgctggtgccctccgggagcgcggtggtggtgctcctcgcctacctcgggtatctcgccgccgctggagccatcctcccagggaagctcgtcgacggagccctactcccggactcctctcgcctccactatcgctgcaacggtttgctctcgctcctgctgctgctgggactctcggcgttcggtgtctacatggggtggatgtctcccacggttgtagctgacatgggactcgaacttctgtcggtgacctttatttttagtgtcattgtctcttttgcactctacattgccggcatcaagtccggccacaaaagttcttctttgagaccacatgttagtgggagcttcatgcaagattggtggtttggagtgcaacttaatcctcattctatggaagttgacctcaaatgcttctttgtgagggcacgaatgatggcatggttatttattaacctctctttgtttgcaaagagctactttgctggttcagccaatctttcggtcattctctaccaatttttttgtgcgtggtatatcattgattacttcgtccatgaagaattcatgacctcaacgtgggacattattgctgaaagactgggtttcatgctggtgtttggtgatctagttttcatccctttcaccttcactattcaggggtggtggcttttgaagaacaaagtagagctgtcccttttgtctggtctagctaacttatgcatctttcttattggctacctagtgttccgaggagctaacaagcaaaaacatgtgttcaagaaggaccccaaagctcctatatggggaaaacctcccaaagttgtcgggggaaagctactagcatctggttactggggcatcgcaaggcactgcaattatctcggagacctgctgctagcactttcgttcagcttgccctgtggagtgagttccgtggtcccatacttctaccccacgtacctgctcattctactggtcttgagggaaaggcgcgatgaggcgaggtgctcgcaaaagtacagggagatctgggcagagtactgcaagctcgtgccgtggaggatcctgccttatgtgtactgaagagacggtagaaaccaaggcagctcatggccctgggccagctgtaaaccttattttgtttgcccttaaccagttggtgaatgttgatgtagcactcggtaaactgtgaccgtgcaaacttttgttattgttggtccatacatgtgtggaatcgtgaatcagaccgcc

SEQ ID NO: 272911 - DNA, 396 bp, Zea mays
cggacgcgtgggtggtcacctctagtcacgttcaaagcgacacgcgcaccggtcctggaggcagcagtgaaccgggcagaggaagagagagagagaagtagagaacgcccgccgcggcgccgccgacgccccacccggccgagccgaaaccgagactgcatcctccttcgcggcgcgccgagatgagcggcatgagcctctcccatcgtctccctcccgccgcggcggcggtgtgacccctactacgtgtatgcggcgcacccggacccacagcggcagggcgtgctcacgctcttcgtcgcggggctccccgacgacgtgaacccccgcgagatccacaacctcttctcccaccgccccgccttcgatcactgcctcctcgagtacaccggccgt

SEQ ID NO: 272912 - DNA, 430 bp, Zea mays
cccacgcttccgcccacgcgtccgcggacgcgtgggcgcgacgcgacttattcagcaccaccgccgcctttcattttttccttcgcatcttgagagagagagagagagagagcggaggaggagagcaaggagatgggcggcttcgaccagcaggtgaaggagcggaccaaggagctgaagcacctcaagaccgcggcgatgaagggcatcaaggcggccggcgagtcgtgcaagaaggcgtggagcaaggtcaggagcagcatcaagcgctaaaaggccctaggcgttgttgctctgctgctgcgtggttttctgagttgtggactgtggtagatttgcgcttgtggtttctgtttgttggatctacttatttattttggatatacatcatgtgtgaagatctgcatgtgtgtgttccaagtgttttttg

SEQ ID NO: 272913 - DNA, 739 bp, Zea mays
tcgagaaaatgtcgagcctaatgttgattacgatcacattgcaagattgtgcgagggctttactggatcagacatcctagaggtgtgcaagcaggcagcattctaccctatcagggagctattggacaatgagagaaacgggaggaaattagataaacctagacctttgagacaatcagacttggagagagccttatcaacatctagaaagtgcaagaaggctgcaagttcaggactgcagtcacccttgtgggttcggccgacagattcagaagacgatcaggtacagaacgcgatccttgagatatctaagctgatgtctcgaatagttgagagcagccagtcggaaccccaagagccttcttcaccttaacctaatccttttgctagatctcgtgaaaatctgcagcggagtaaatgcaggcattacgtcgataccgttaggtttccttatgcagtttgcagaggttcaacatatttatatatgtattaattcgttttgcgtttggaacctccacccggttttttttgaagcaaactgcagctggcgaagtggcaagcgtgccctcgtgtttaagttgatcatttcaaaatacgtgccccctgtgggccgtaaaactgagaactctatagttgtctggtcaacagtcggtcttggttgcctctgtattttatcttcggtttgactactctagggtggcgaattccaacatacagtataatgcagaaaggttccccc

SEQ ID NO: 272914 - DNA, 715 bp, Zea mays
cccacgcgtccgccaaaatcctaccccgcgggggggattctcagttctctcggcgacgactgggagactgccgccgccgccatcctccaggtgccctgagaactcgatcgggctcttcgctggcgacgaacacccaccagctatcaggtgtacaaccatgtacttcaccgtgtccgcccctgcaatgtctctatgatcctccagctacggtagacgccccgttcgctagctgaggacctcctggttcctgtgagcaggcggcgtggttagctgctgccttcaagcatgcagagacccaatgcgccgtcggcttgcgccaccatcaccttcgcggaggctctaaggagggagatggagtaccgcaagtgggtggagaggacccacccacatctgctcgtcggaatctgcggagcccctgaaatgcagagagatttcagtgcaggatcagtacctgatgcgatcaagagaaaactagctgccgagaccagtgtgcctccacaacaatcaagtttcagctgtgtaactggacagaagcagccccaaaactggtaccccacaaagaaaaaggtgaaagttccacatcttccatcgcagattctgcagtgtcccagaccaaacgtggtgccatccttctggtgcaaaatctgcaaggtcgactgtgtcaccgagttcaatttcagcgctcacgttggaggcaaaaacacagggccaaaag

SEQ ID NO: 272915 - DNA, 389 bp, Zea mays
ctgcaatcggaagaaccaggcagtgaagtggtaaagccacagagcaagtgttcttcgcgtcatgaagctaccgtctaacagtaaactgatagctggttggctcaataacagcccctcagtcatcctctagatcactgaaggatacatcttcctcctccccaactgcagcatgggtgccagttttgctgggcacagagtcgacatcctgtagccaatcatctacttctttttcatcatcatcatccgcagggtccgggttcgattcctcactggcacttgagataggatgctcgtcagcctcaacattcggcacagggtcagaagttagttcttggaatgacggcgcttcagatactccgtgcttgttttggatgcttgacgtacttctc

SEQ ID NO: 272916 - DNA, 402 bp, Zea mays
tcaccaactcttcttgaattacagacttgtcaactatttctgcctcagtacttgagataggatgcttgtcagcctcaacattcggcacagggtcagaagttagttcttggaatgacggcgcttcagatactccgtgcttgttttggatgcttgacggtgacaactcactctcttcaggttctctagtattcctgcttcctgataccagcttgtgctttgtcggtgaactttgcagtagtccttctcttgcttccaggatttgtggtgttgaaagaatttcagcatcttgcttgctgagtttcgaatggagaagcacaaaatatatcttccagaagcacgcttcactcatattggtagagcaaagctcagtcctgaggtatgataggcttggcacaagccgct

SEQ ID NO: 272917 - DNA, 442 bp, Zea mays
aatctgtgcactcccagccgctgcacctggcttcttcgccactctctcctctcctcgttcactctgccaggtggccggccgcccctgctcccatctcccacagccgccgccgccctcagctcctcagccacctcccatggcctcgtctccctgctgcagcgaagccgaccaccgtttcctgcagcctcgatagctccccccccccccccccccccatgccgtccctgctcacctcaccttcgtcggccgtccttggacgccgtgctcggcgcccgagctccctacgccggccaccatcctccccatggcaggagctccgatcggcccctgctgaccttggcactcggcgtggctccaagcagcgccttctcccccaggaccggctcaccgtcagccgcgagctcctctccctcacgtcccctacagacaagcagtgtcgccg

SEQ ID NO: 272918 - DNA, 643 bp, Zea mays
cccacgcgttcaacaagcaggaccagctagctagctcctcccactgctatcacccgggccccggccagccatctcgctgaaagagaaaagcgcagccatgaagactactagctcgggcattgcagtcgtcctcctggtggcgatgctggcagtccagtccgcggtggccgacatctcgtgctccgacgtgctcaacgacctgtcgccgtgcctgcccttcctgcagggcaaggcagccaaacccagcgagagcaacaaccagtgctgcgacggcgtgaggaccctgtacgcggcggcggacaccaggcccgacaggcaggccacgtgccggtgcctcaaggcggcctacgttcaggtccacgctgtgctctccgcggcgcaggagctgcccggcgactgcggcctctcgctgtcctacaacatcacccccgacatcgactgcgacaagatcgaatgaagggatactgttcccttaccagaatccatacgacgggatggtgatgttcagtgccctgctagcagtaggctgcatctgcactgagtgactagaataaaggatttggtgatgtttgtgctgattggtgtgttcgcctgtaatcgtgtgatgccgtcgttggcttcttatatccgtgtctaatctcgc

SEQ ID NO: 272919 - DNA, 517 bp, Zea mays
ccacgcgtccgaaataataaattctagggtttgcctcttccctctcggctctcgctcccaccaccaccaccaggcagacgcagatcggcggcgggataggctagcaatgatccccaattccgacttcctctagactgcctggcggtcgaattccgattcgattggagtagggaacgagaagggaacaaatacaccggcaccaccaccagaccagacagcacgtgcctccatactatggtttacgccccgtgccgctcatcgacgccgccgtcttcctcgccgatgctccacaagaacctccgcgccctcggacccggcttgaatcccttggctcccttcggcatgggcaactactcccgctagccgtttcctcctatccctctttctccgattccgatctctgagtgcttccgcctccgcccccggccgcttcctccatcggaacccatccccggtattttaactcccgtcggttcaatggtcccgtgctttggatctgaatcttgagaaccttccc

SEQ ID NO: 272920 - DNA, 448 bp, Zea mays
gctgcacctcttttcatttcaccatctcctgcccccttaaaaaaaaaactcaccgtcgacacgccctcccgtcccgagagttctgaatcgaaaccgtcggccacgagagcagtgcgaggcgcccaccgcgatggctcgaaccaagcaccaggccgtgaggaagacggcggagaagcccaagaagaagctccagttcgagcgctcaggtggtgcgagtacctcggcgacgccggaaagggctgctgggaccgggggaagagcggcgtctggaggtgactcagttaagaagacgaaaccacgccaccgctggcggccagggactgtagcgctgcgggagatcaggaagtaccagaagtccactgaaccgctcatcccctttgcgcctttcgtccgtgtggtgagggagttaaccaatttcgtaacaaacgggaaagtagagcgctatacc

SEQ ID NO: 272921 - DNA, 1075 bp, Zea mays
tcacagctagcaacatagagagcacatgattgctcctgcattgaccaccaagatagatggcgcaacttatgcttgaagcctaacaggccagcacttgttctgagccgcacatgctggactcctcacgaacatttaaagctacttttggaagcaggaatcatgtacgacagacgcgttcctgcagctatacgccgaagatgatacactgcatgatgcgcaactgcggatcgatatccataacagcaagcagaccgtctacccaagatcactgatcattattacaggtgaaggacctgataggacgaaatatgacgatcaaataaaaaggttgaagtctagacgtgttgccttgcggacaatgtggcttgcatcagaggactaccctttattgctcgggtcagctgatctaggagtgtcgttgcatacatcttcgtcagggctggacctaccaatgaaggtggttgatatgtttggatgcggattgcctgtttgtgctgcttcattctcctgcattgaggagcttgtaaaagtaaacaaaaatggtcttcttttctcaacatcttcggagcttgctgatgaacttatgatgctctttaaggggtttccagaagaatgcaatgccttgaaatccctcaaagaaggtgccatgaagtcagcatcatcttcgaaatggtcaacagaatgggaaaccaatgcactacctttggtggaccaggtcattggatgagatgtgtgcttacatacatcagatagaattgttgtattgcagagaaccagagatcggtgtactagagagaccagatgtacattaaagggtacggtttgctttcaccaaaaatcaattgctagttgctgccagtgccatgtgcaccacttcagcaaaacttgggcaagtttgtagctacgaagctctttcctttttaggctgggaaacatactctgctgaacacatgtctaagttgtttcaggatgtatactactgtaggccagcactttgtttgataatatggtctgtattggaatacctctaatctgttacgtcagaaggaaaacatagaaaaccatattgttttcc

SEQ ID NO: 272922 - DNA, 387 bp, Zea mays
agcatcatccaagagcaggcctgcatcatgtccaagcacttcaagtctgataagccaagtggcaggaggcatagcggtctggatggcgagcgtgaggcatctgccgaggtgtaaaagcatgtctgtagcaaggatatatctgttctgcaggacctcctgattttagtaagtaccgaggtagtatgttgcaggatataacatggtcctgtgctgttgtagcccgagtttaggtgctgtctatgcagtatgatgtgcaggagcatatcctccagtacatggctaacccgatcacatctaagtcacatgtagcgtaactgtaatcatattcatactatatgaagaatgtcagtgtagcaccccttgaaaaaaatggacctttcggccctt

SEQ ID NO: 272923 - DNA, 434 bp, Zea mays
gtccagactcatttcgaactaccccgccgctccgcctcgaccctcccctcctccccaatcccgcgcccttccaccctcccgccgaaagcccagcccggatggcgtctctagaaggcgaccggtggtcggagatcgtggccagcggccgtgcccggccgccccgcgttggcgtcgtgtacggtcgtcgcctggtcgaggaatcgtccggcagggccaacatggaaacgagagccagcttcagtggcctgcggcgcccgagcttcgtgccgcgcaagcgaaccagctggaaccggtcgctttccatcagagggagagagagtattttcgtcgcacctggtgcaaatcttcaacagaaaccatgtgaagcaatgaaacgaccaccgaaaccgtgcaaccgagtgctgactctactatttctacatgcatattgttct

SEQ ID NO: 272924 - DNA, 1022 bp, Zea mays
ctttctgcattgggtgatgtcatttcagctcttgctacaaaaaacagccatataccctacagaaattctaaattgacacacttgctgcaagattctctaggaggagactcaaaagcattgatgtttgtgcaaattagcccatccgataatgatgtttcggaaacattgagttcactaaacttcgctagccgtgttcggcgtattgaattgggaccagcaaagaaacatgttgatactgctgaacttcaaaagaccaaacagacgcttgaaagagctaagcaagaactcaggcttaaggatgattctttgagaaagctagaagaaaacttacaaaatttggagagcaaagccaaagggaaagagcaactttgcaaaaacttgcaagagaaggtgaaagagctcgagggtcagttagattccaaggcacagtgtcaaataacatcagagaaacagcaacggcagctttctggaaaactaaaagagaaggaagaaatgtgtaatgtacttcagcagaagattgcggacttagaatgcaagcttagacaaccacaacaatcagaatctgagggtgcacttcttaagcaaacgatccaagagttggaggtcaaagttgagggaacaacaacatgaccgatcagccatggaattaagtatcaaagagatggagctaaggttcaaggaagaagaacaccagcgatctgttgcagaactaaagatcaaagagctggagctgaagctgaaggaacaggaacaccagcgatcagttgcggaactaaaggcaagagaaataggacatgagctgctggagactcagagaaccgagtcaatgcttcagattaagctaagagaacttgaaagcaaggcgaaagagcaggacacaaacatgacggcagtggtggagtcccgcgtcgtcgtcgcgactcctgtaaacgcgaaggtgatgagcgagaaggaaacccacgtctgaggatctcaaactccctgaacaagcagctggctcacgtggagaacactcctgaggc

SEQ ID NO: 272925 - DNA, 535 bp, Zea mays
  unsure (1)..(535): unsure at all n locations
cggacgcgtgggcgacacgtcgcccccggacgcagacgtcgccgaaccggttacacctgcgcatgccatattgaaattacgtttctagctcgacgacgccggcgaggagcgtgacccaaccgacgccaaggaggaggagctgctcgacaaggcacgggacaggcggaggcggctggccaggatacgtcagtgggtgggggagaggggactggagcgagagcagcagcaatggtggcgagaagcggaggaagagggggcaggcgagcaggctggccaaggccagttcctcctcttcggcgtcagtggcgtcctcctccgcgtcatgggcgagtggctccactgtcatggactggggcagcgccgaggaggcccagctgcagagcggcgacggcttctccctcctcgtctacgcctggaagaactagtgtgacgggctagcggcggcaattcagtgaaccngcttttggtcttaaattagtgaggatttctcttcccattgttgtaaagttgcaaattgttcagcgagcaaatgttc

SEQ ID NO: 272926 - DNA, 466 bp, Zea mays
gcttctggcgaccaaattctgccgtctccaccgccgccgcagccagcgtcaccggagggatctgccgtctcccttgctccacgcgatgaacaccgacatcaccgcctcgactaagccggagtacccggtggtggatcggaacccggccttcaccaaggtggtcggcaacttctctgcgctcgactacatgcgcctctccaccatctccgccgtctccgtcaccgttggctacctctccgggatcaagccggggatccggggcccgtcgatggtcacgggcggcctcatcggggtcatgggagggttcatgtacgcctaccagaactccgccgggcgcctaatgggattctttcccaacgacgccgaggttgcgcgctacaagcacaagcttcattgaggatccagctccattccgtctctcttttcgcaaccgtttcgcctgttcctttcctgattccgtgttaac

SEQ ID NO: 272927 - DNA, 738 bp, Zea mays
aggcgttttgatgagatgattcagttaaaaaaagatgacccgttagacaaaagggctcattagagaccgactccttttgtctaacgggtcatctttttttaactgaatcatctcatcaaaaaaagatgacccgttagacaaaaggagtcggtctctaatgagccatttctcactttactcagcgtttgcatccaaaatggacgatgcgggtttccatatgatacttcacttgaatacaaatatcaatcctatcagaaaacacgagaagaaaaacatggggaaaacgtggggaggctatgccgagctatactctgccgtgtgtggcacaatagtcaggagccacatcatgttctctaccatgacaaccggaaactgcactagcaccaatcctataacacagtaaaaaccgtgttctgttacagtcgttacaacttttagatatcaatcttattcagcaaccccatgggaataagtcgaggattggggccattttaacttccgattcctttttatgatgatctctaagggtttagaggctcatcttccgcagtcatcattacagcctttgtcgatctgtgaagatcagagacagccattaagcgcctctgcaagactgctgccatgagaaggaaaatggagcacatgtcgtacatgacagttattgggaatgcattcacaattgtatagtaccacgcaaacaaacaggttgagcggtatacggaagaaattcatgattgt

SEQ ID NO: 272928 - DNA, 581 bp, Zea mays
ggagatacacctacccattgctcgaggaggccggattggaggcttgggctgtggacatccttgggtggggcttctctgatttgggtacgccccatcctgcacaccatgtgatctgaaacacggccgccatgtgatgttgcatccaaacgcgagcatttttaccagttctggaaatcatacatcaaaaggcctatggtgttagtcgggcccagccttggtgctgctgttgccattgatttttcagtcaactaccccgaagcggtctcgaaattgatcttcattggtgcaagtgtatactctgagggcccaaaagatatgaccaggatgcctaaatttgtttcatatgctggggtgtttatattgaagagtcttccactgcgatttttagcaacaagattggcatttaaaaaaactccaaatgaattctttgattgggtgcaaattggccgtctgcattgcctacttccctggtgggaggatgctacagtagattttatgattagagggggttataatgtcataaaccaaataaaacaggtgaagcataaatgcctgatcctgtggggagaggatgatggaat

SEQ ID NO: 272929 - DNA, 592 bp, Zea mays
ccaggtccaggaaaggccggtggagcgaaggcctgagctgggcgcccagccattcccctcatgggcatggcaagcgcagggctcccctcacgtgccgttgcaccactctgcagcatcatcaggattctctaccgccgccggggccaacggcggcatgcccctgccgtctcacccgccggcgcagttcccgactactacaaacccgttcttcttcccctagaccgcttttgacatgacagcttgctgttccggctcagctctcggcgtctgggatggcagctggtcttgcgtgtggcgtctagcagctctggtgatggaagaaagtgattgtgttttgtgtgtgtgtgtgtgagagagagagagagccataataagaagcgacatggctggtctccctctggtatgtgcctgttaggatatgggatatctccatgcatggattgtttccgagacagtagtagtattttgttgtagtggaccatgcgtgtacatcattataactggatctttgaagagctgagattttatgactcaaaaaaaaaaaaaaaaaaaaaaagggcggccgctcgcgatctagaaccggacgcgtgga

SEQ ID NO: 272930 - DNA, 652 bp, Zea mays
cccacgcgtccggccatattctcttgccgtcatcttattatacattgtctgtgagtgagaggagatcatatgaatgttgccaagaaaatttcattagtgataagcttgtaaagagaattcttaaagctcatgaaccttataaccataatgacaatactaaatgttctgttgtttctgagagggtatcatatgaatttgctcctgaaaggaaagcttgctcctcattaaacaaatcagtggtacacaatgcaagtggttgtgataaaagcaataggaacaaatgtttggcatctgggaaagctgtgtccaagaaaaaagatcagagtaccaataatagcttggataaagaaaatatgtcatcttgtggttctggtggcacaaaggtgtcatctccaggctccttgggtttagctagggaggttgattctggaaattgtctctccctcttggataaccggaattgtcctatgactaggacctcaaaggcaaatcacaacaattgtaggcaaactgcggacatcttggattttaatctcagagaatgtagttccttcaagaaaggtcatagcaagggtttatctgaagcccagaagcatgaaaagtcgcttcctggctacttcattgcatgtgatattgaagtgccggtgattgc

SEQ ID NO: 272931 - DNA, 443 bp, Zea mays
attatctttgcttgagaactcagttttttattgaaataataaacatgcaattaaatcaacggtcttttgtgtcatgcataaggtaactaacagtcattatcatgcaaacatgtggcaagccatgaaccatttgaagcgctacttgcttaatgtctctcttgatcatttgtgttagtggcatttgtcgaccttgtttttctgtgcactttctgccttcattgcaaaatgtcagtttttttatctgcattgtcgtcgatgactggttaacatggttgtgttgggggcacgctttagcacctaggcaacaaggtgtgactaagacctcttggcatcatgcggtgtcatacattttttgtacataatatggctcttacaacttattctttcaaacaaatgttattctttttggagacttatttagcaatgatatcattacatgtaag

SEQ ID NO: 272932 - DNA, 738 bp, Zea mays
cttgtttttgcttctgttatggcaacccttggccttcagataattctagaatcagtacgctcattggtgtctgatggagatgaattcagcttaacaagtgatcaagaaaagtggcttgtggacatcatgctctccgtgacattggtaaaacttgccctggttatatattgccgctccttcaccaacgaaattgtcaaagcatatgcacaagatcactttttcgatgtcatcacaaatgtaattggcctggttgctgcactacttgccaattacattgagggctggatcgatccgcttggtgcaatcgttctagcgatctacacgatcaggacatggtcgatgacggtgctggagaacgtgcactccctggtggggcagtcggcctcgccggagtacctccagaagctgacttacctgtgctggaaccaccacaaggccgtgcggcacatcgacacagtccgcgcctacacgttcggttcccactacttcgtggaggtggacatcgtgctgccgtcgaacatgcccctgcgggaggctcacgacatcggcgaggccctgcaagagaagctggagcgcctgccagagatcgagcgcgcgtttgtccacctcgactacgaattcacccaccgccccgagcacgccttgtcccacgagaaatagcatgctaggaccgaactgatgcagcaggcggaaggacacggcttcgtaatcgtaactgaaacaattttagttgtagcc

SEQ ID NO: 272933 - DNA, 676 bp, Zea mays
ctcatgatctccggatcctgcgatcaggctgacgccggcaggggcgacttccaggagctcgaccagatcgccgccactaagcccttcgccaagctcgccgtcaaggcaacaaccatcgccgacatcccgcgcctcgtcttccaggccctcgccgccgccgtgtccggccgtcccggagggtgctacctcgatatcccgtccgacgtcctccaccaaaccctccctgaatccgaggccgcggctctcatagcagcagcagccgccgattcggccgcatccgatccttccccgtcaatgcacaagtctcttgacgagggaatcgccaaagctgcggacctgctccggtgtgcggagcggcctctggttgtgattgggaagggtgcggcgtatgcgcgcgcggaggaagcgattcggaagctggtggacaccacgggcatccccttcctcccgacgccgatggggaaaggggtcgtgcctgactcgcatccactctccgccacggcggcacgctcactcgccatcgggcagtgtgatgtggctctggtcatcggtgctaggcttaattggttgcttcactttggcgagccacccaagtggtccaggatgtcaagttcattcttgttgacgtctccgaggaggagattgagctccggaagcaacacgtggggattgttgg

SEQ ID NO: 272934 - DNA, 863 bp, Zea mays
ctccaaagctcgggcaggcattggatgttctacaagcgaaggttgggagcaatcgcctggaagttgctgagctgcttatagaactagagacggagaggtttagtaaaaagagattagacgatgatttggatctaatgtcaagcaaagctaattctctaagagagaaggcggataattccccagtccttcaaaaacttctccatgaggctaaggagtacaggggaatactgaagtgtggtatttgtcatgacaggcagaaagaggttgtgattgccaaatgctaccatctcttctgcaaccagtgcatacagaagtcgcttggtagccgtcagaagaggtgcccatcttgtggactaagcttcggtgttaacgatgtgaaacctatctatatatgaaacagaaggttggcgcctgtgtcgcacacaccagaactgcctggcgcttactaatttccggtatatggtaggcggccatggtaattcagtcggtgatgtagcataagattatgtagcatttaagttgctacatgtgattgctggtacccgctggcatatatgatgctggtgttacctcaagcgccttttgtaaagtctgcttgccttgcccaatctggtagaatagcctgacatcgtcaaccattagttccttttaggagaaaaaaatatccaacaaatgaggattgatgcttcctgcaatagtgagcaatgtacaatatatagctttagtcagtttcattgttgtagctgacagtaagaatgtagttttcttttctttttaatataccggttatccagtttgtatgtttctggagtttgccaattctgtttatcaaaaaaaggagatttagtcaaaaaataagagat

SEQ ID NO: 272935 - DNA, 371 bp, Zea mays
cctacgcttccgctcctccttcctccgtccctccctccctcgctctcccatcctcctctgttctcacaatttttgcttctgaatttcctgccggtgtgtgccggcatcttctttctactgaggcgtagaccaaggaggagagtaattggcgagcggttggagaacgaatacgagacggctccggcggccggaggcccattttttgatgcgtggtgccgtcgaggtccacacgattcgcagagacgtcgccacgccgagtcccctgaggctcagagaccctccggcattggacatgatgaggtaccaaaggctgagcccggactgccttccgctcggcaacagcagtggcggaggcggaggctccttgcccc

SEQ ID NO: 272936 - DNA, 1474 bp, Zea mays
ctgcaggcgacctacaagctctttggaggagtagagacttccagccatcccttctacgctctccccgttcccgtgtcgtcctcccgacaaagagggagccgctagggtttagcggcttccgcttctgggcgagggcttacccgcgagggacggcgcgacgcggcggcacttgagctagggtttccctccgatcccgttcctttcccggcgaggcgatggacgaggcggcgattgacgacttgatccggcggctcctcgaggcccgcggcgggcgcaccccgcgcaacgcgcaggtgactgacgccgagatccggcgcctctgcgccaccgccaaggacgttttcctctcccagcccaacctcctggagctcgaggcccccattaagatatgcggggatgtccatggccagtattcagacctccttcgattatttgagtatggtggctatccaccagatgcaaattatctgttcctgggtgactatgttgatcgggggaaacagagcatagaaacaatatgccttctcttggcgtacaagataaagtacccagaaaacttctttcttctcaggggaaaccatgaatgtgcctcgatcaaccggatatatgggttttttgatgagtgtaagaggagattcaatgtgcgtatctggaagatattcactgagtgttttaactgcctcccagtggctgcacttattgacgataagatcttttgcatgcatggggggttgtctcctgagctaaagaacatggaccaaatacgtaacatttctcgtcctgtggatgttcctgacgttggtcttctatgtgatctgttatggtcggaccctgataaagagattgttgggtggggtgagaatgacaggggtgtttcctacacctttggagctgacgtagttgccgagtttcttcagaaacatgatctagatttgatctgcagggcccaccaggtcgtagaggatggctatgagtttttcgcaaatcgccagcttgtaacaatattctcagcaccgaactactgtggagagtttgacaatgctggtgcactgatgagcattgacaactccctagtatgctcgttccagatactcaagccttctgagaagaaaggaaaagcaggagctgagaacatgccaaagcccggtacacctcccaggaagataaaaataagtgttacccatatttagccaggttctcgctatcaatctgcatttgagaagttgtgattaagtgctcccccaaacttgtggtaagtttttttttggtgagcttaacacgattttaaactgtggaccatcgtgcctcatgtctttctgatctgaagtctgatgcaaatgtatcctgacattttgccaaccaagagagatcatgctgacagaaacttcaggatttttttttattgtggacttatgttcttactccccgacaaatgcaacatgtttatgaatgggtaggggaaatgctatcaagc

SEQ ID NO: 272937 - DNA, 609 bp, Zea mays
cccacgcgtccgcggacgcgtgggctaagccacttatgcagctctggaaggactgcactgaggtcaagtccacaaaagcttcttcaggtcacttcataatttgagggcagcgatcatcatcacaagagccacaaccgaaaaactcaccacctcaggctgggggagagtatgagatggaaacaggtggtctgccgatggatttaacagatggcattgaaaaactcagggcaaacatgagtgcaaaatatgacagagcttacaatattcttcacagtgaccatagtgttactcctggaagtcctgggttaagtcgcaggtctgcttcaagctctggtggctctggatcggcgtttatacaattggatccagaagtacaattgccatcaggaagtggaaggtgactgttgacttatagtaacagcagcatgtcacctatatactgaactatgactatgtgatattttggtactgaaagaacttgtccatctaaagttgttttcgtcatcacaacagaacctcttattgtatatgctcgtaactagtgagtgcagaaactaaagtgtgtaatcttcttgatgaagtggcaggcaaataaaaaaaatgtctagc

SEQ ID NO: 272938 - DNA, 419 bp, Zea mays
cttatgcagctctggaaggactgcactgaggtcaagtccacaaaagcttcttcaggagggcagcgatcatcatcacaagaaccacaaccgaaaaactcaccacctcaggctgggggagagtatgagatggaaacaggtggtctgccgatggatttaactgatggcattgaaaaactcagggcaaacatgagtgcaaaatatgacagagcttacaatattctgcacagtgaccatagtgttactcctggaagtcctgcagggttaagtcgcaggtctgcttcaagctctggtggctctggatcggcgtttatacaattggatccagaagtacaattgccatcaggaagtggaaggtccaaaagggggcagcattcgtctgcaagaagcttggggaatcttgatactgttgaggaagattt

SEQ ID NO: 272939 - DNA, 452 bp, Zea mays
cccacgcgtccgtgggatcaacattagtgagaagctaacctatgttgaagcccgagtccttcctgcaccttggctgaagtatcatgacactggaaaagagaaagagtgcttaccacaggttggtcagtggaacatggtaaacaagaaagtgataaacggatgcaaggtgagccactgggcatgtataaacttctcaaggagtgttccagaagccacagctcggggattttgccaggaattggcacaaatgtgtcaaatttcgggcatggaatttaacagtgagcccgtgatgccaatatactcaactagaccacgatcaagttgtggagggacttaaaagtgggtataattattgcactgaacaaacttaagggttaagaactttgaccttctttggctatactcgccgacaacaaaggtccgttatatggtgccatcaaacgtattttgtg

SEQ ID NO: 272940 - DNA, 568 bp, Zea mays
tgataagtcatttattattgaattgaaggctcaacttagtcatgaatttgataggaaagatttcagaccagcaaagaagattcttatgatggaattttagcgtgatcgtcatgctgatattccttttctatctcaaaaagttatattgagaaagttcttgaaaagtataatctcagtagttgcaaatctgttgctacaccatttgcttcacattttaaattgtcatcgaggcaatgtcctcttactgaagatgagacagagcacatgtctcacatgccgtattctattgctgttgggaatcttatgtatgctgggatctgtacaagacccgatttggctcatgttgttagtgtggttagcagatttatgcacaatcctggtaaagaacattggaatgcagtaaagtggattcttcgctacttgaaaggtacttctcatgcattttggactattgtttgacaagaattcagtgaaggcaattgatgttatgtgatttgttgagtgatttgttgattttgactttactagtgatcttgataagagatgctccatatcttgctatgttttt

SEQ ID NO: 272941 - DNA, 460 bp, Zea mays
gcaaaaattgtctcatgatggttgcaagatagtttgctttgttggttgttactccttttgttctaaactataagatattttgttttttagatacaatagtttttctaaatatataggagagataatatatatttaaatgtatagcaaaattatatagttaaaatgaaaatatgttatctatactatacttaaagcaccagtttcaacggtcgtcatgcgtcatctttttacaaataaccctcacaactatttcaaattaatccgttgcacacctataaatggccaaacagtggctcggcacgggccagatgcacgcggaccacaactatggcttaggcacgtcatgccggcctactgactgtgccgggccagcccatcggcccatttgattaaatcagcataaaatgttaaaaaatgatgcaggaggtgggttcgccctaatgaaagaaggggcggagaa

SEQ ID NO: 272942 - DNA, 435 bp, Zea mays
catatacatgcatattcatacactaatgtgctagaatacacgccctgctgtctatcacggaagaggagttttagtatcttccatgggtttctgataaaagggatttactacttacgtagctgatggagacggaatgatgtaaattaaagtggtatttgtaggttgtcacttgtcagtagcttagctgtatttttttggtttctttacaagaggactgctcatttgtttgttggctaagacttgatgtttatgtgcccggtttcttttgaagtttggaatgatcagtttttgtttgttgcaactattgttttttcctgatttcaaacagggtggagccttttcattcttgcaaagtgtttgtcgctcggaacaatgctttctctaagaaagagtttctcaaaataaagaaaagtaaacaaaaaatatattttgaag

SEQ ID NO: 272943 - DNA, 923 bp, Zea mays
ctgtgcttttgggagagttgagctcatggagcaggacaagagagccaaggtgctgtgcctgcacggcttccgcacaagcgggagttttttgaagaaacagatcagcaaatggcacccttccatatttcagcagtttgagatggtcttccctgatggcctcttcccagctggtggaaagtcagagatagagggcatatttccaccaccatacttcgagtggttccagttcaataaggaattcactgaatacacaaatctggacgagtgcatttcatatctatgtgattacatggtgaaaaatgggccttttgatggcctgctcggattctcccagggcgcaacactttcggcccttttgataggctaccaagcacagggcaagttgctgagcaatcatccaccaattaagttcatggtctcaatatctgggagcaagttcagagacccaatcatctgtgatgtcgcttacaaagacccgatcaaggtgaaatcagtgcacttcattggagaaaaggactggctcaaggtaccttccgaggagctggcttctgcctttgatgagcctctcagcataaggcatcctcagggtcacactgtccctaggcttgacgacgtgtctgtgaaacagctttctgaatggagctcacgcgtcctggaagacctcaagagtgcagatgttcctgaggccttagattcaggcaaaccatctgataaggaggctgctggtgcggaattcacagaaaacctggtgaaagcttgaggcatgcccacttcagccttgttcggttattcctatcttacatggattggatgggattgaaaaattttaagaaagattttgatttgctatggatttaaacccatccaatcttgtccaatccatatggattggcaccgaaacgaataaaccctttcatggcatg

SEQ ID NO: 272944 - DNA, 715 bp, Zea mays
gtgaaaaatgggccttttgatggcctgctcggattctcccagtcgagcataaagtggagtgttgcaggttatgcatccattcctctttccagggcgcaacactttcggcccttttgataggctaccaagcacagggcaagttgctgagcaatcatccaccaattaagttcatggtctcaatatctgggagcaagttcagagacccaatcatctgtgatgtcgcttacaaagacccgatcaaggtgaaatcagtgcacttcattggagaaaaggactggctcaaggtaccttccgaggagctggcttctgcctttgatgagcctctcatcataaggcatcctcagggtcacactgtccctaagcttgacgacgtgtctgtgaaacagctttctgaatggagctcacacgtcctggaagacctcaagagtgcagatgttcctgaggccttagattcaggcaaaccatctgataaggaggctgctggtgcggaattcccagaaaacctggtgaaagcttgaggcatgctcactagtcacttcacccttgttcgattatttctatctcacatggattgacatcgaaacgaacaatcccttccatggcatggctgcatttgggacttgtaccgtttttactatgatctgagtagtgcgtggaacttgtttgatcgcgtgtgtattgcatttggcaaaccaataaatcgttatttagagct

SEQ ID NO: 272945 - DNA, 1895 bp, Zea mays
ttttccgggggtatattcggcgagcacacacatcctctaagtgctatctaatctacaatctaccaccagacactgtcgtcagtcgtccctcatcaaccgcgcgcgcgcgacttcaagcatcagactaccataatcatggctccgccgccggcaatgcagagcccaggagagctaaacgacggcgcctacgacgcgccgcacatcctattcatcccgagcgccggcataggacacctgacccccgtcttccgcgtcatcgccggcttctcgagccggggcatcgacgtctccgtcgtgaccgtgctgcccaccgtgtctgccgccgagactgactacttcaacggcctcttcgcggactaccccgccgtccgccgcgtcgacatgcacctattgccgctggacgcctccgaattcacgagagaggacccgttcttcctccggtgggaggccctgcgccgctccgtccacctcctccgccccatcatcactaacgccgcgccgcgcatcacggccatcatcaccgacatcaccctgacctcctgcgtcatccccatcgccaaggagctggacgtcccgtgccacgtcctcttccccacagccgccaccatgctctcgctcaacgcctactaccccgtctatctcgagaagctcaagggtggaccggagccgggcgtgatcggcgacgccgtcgacatccccggcgtgttccgcgtcccgcgctccgccctcccgccggcgctcctcgacgtgaacaagctcttcacgaagcagttcatcgacaacggcagagcgatcgtcaaagccgacggcgtcctcgtcaacacgttcgacgccgtggagccggcaccgctggcagccctgagaggcggcaagatcgtccccgggtacccgccggtgtacaccatcggcccactcaagtcgcacgccacgaaagcgggcgacaagccaggtgacgcgttgcttgacgaatggctaggtaagcagcgagcgcgatctgtggtgtacgtggcgttcggcaaccgcagcgctgccaggctggaccagatccgggagatcgccgccgggctggaggacagtggctatcctttcctgtgggtgctcaagaccacgaaggtggaccgggaggacgacgccgagctggcggaggtgcttggagacggataccttgagcgcgtgaaagggcgcggcatcgtgaccaaggggtgggtggagcaggaggagctgctgaaacacccggctgtgggcatgttcgtgagccacggcgggtggaactcggcgctggaggcgtcgtccgccggcgtgccgctgctggtgtggccgcagctcggcgaccaccgcgtgaacgcgatggcggcagtgagggcaggcatcggggcgtgggcggagcactggagctgggacggggaggacacgctggtgaccaggcaggagatcgccgacaaggtgaaggaggttatggccgacgggaagttgagggcgagcgtggcggtggcccgcgaggaggccgcaaaggccgtcgcggagggcggcacgagttaccgtaacatgcatgacttcatcgccaagcttaagggaggagcttgaggcttgaggagatgatgttacgaacgcaacaatcatgcactgcacgtccattcccaccattccgacgagtgaagtgactgctgttacactcagccgtaccactttggttctgggttttcatttcatgttcatgtgtcttctactactatatacaagcatattcagtgtcttatgtgaactaaagatgatttgaaatggagtcaaataatatatatgtaattagagtaaaatgcatctgtggtctttaaagtttgcacattgtgtcattttggttaacttattggtcggcctatcaaaaccggatttagccc

SEQ ID NO: 272946 - DNA, 490 bp, Zea mays
ttttatttaactacaactaccaccagacactgacgggaggggtttattatgaatcgagcgcgtgtacataaaccaaaaacacacccttaataaaaaatccgcacagcttaagccagagcccaggagagctaaacgacggcgcctacgaacgcgccgcacatcctattcatcccgagcgcccgcataggacacctgacccccgtcttccgcgtcatcgccggcttctcgagccggggcatcgacgtctccgtcgtgaccgtgctgcccaccgtgtctgccgccgagactgactacttcaacggcctcttcgcggactaccccgccgtccgccgcgtcgacatgcacctattgccgctggacgcctccgaattcacgagagaggacccgttcttcctccggtgggaggccctgcgccgctccgtccaccttctccgccccatcatcgtgaccaaagggtgggtggagcaagaggagctgctgaaacacccgg

SEQ ID NO: 272947 - DNA, 366 bp, Zea mays
  unsure (1)..(366): unsure at all n locations
aaggtgaaggaggttatggccgatgagaagttgagggcgggcgtgncggtggcccgcgagaaggccgcaaaggccgtcgcggagggcggcacgagttaccgtaacatgcatgacttcatcgctaagctcaaggcaggagcttgaggcttgaggagatgatgttacgttcattcccaccattccgacgagtgaagtggctgctgttacactcagccgtaccactttggttccgggttttcatttcatgttcatgtgtcttctactgctatatacaagcatattcagtgtcttatgtgaactaaagatgatttgaaatggagtccaataatatatatgcccttaaagtacaatgcatccccggtcttt

SEQ ID NO: 272948 - DNA, 543 bp, Zea mays
gttatgtactccttccaacggttgtcctctaaccaataatattttttcacctaatgaatattgagcttttattttctttaccccaaaacaaaattatgctagttctgagattttagagtaaactaaaattgagtgttgcgattagactatgtccataggcatgagaattacaaaatatatatgtccttacttattgttggttatttctttgtgctaatgactacactgttgaagttattgttctcgtgaggaattatttgtgaaagtctccaattttctgtacaacgttgatatgattcatgtcggcgttgtggagcatgctcatatgcgtgaaagagaagatcatgtactcatgcttcgacgcgaacgcgaggcatgaaaccgtcgtcaacacttcatcgtgtccgccatgctccatgttcaccacagcttcaggcgccgcagtgacatcgtacccatgctccagatgcagacggactgccactgagaccgtctttcaggggaaaagaacgcatctcatcaatgtggttgtgacggcagtca

SEQ ID NO: 272949 - DNA, 400 bp, Zea mays
gaattctctcggtctctaccaaaaaaacagcgacctctaacgcttagctagctctttgtgtcagcgcctgagcatcgagctattggcatggcgcactccaccaccttggccctggtgattgtcgttgtgctggcgctcacctttggtgccacggtcagtgtctccgctcccgtgaacaagtcgtgcgtcagcggtagcgccggcgccagcgtgagcattggctacggcggggcaagagccagcgccggcgctggcgtgtcccttggcgccgacgcgtaccggagcacgtgcccccgtgccgaggagatcatccgtgcggccgttgagagggccgtcgctgccgacccacgcatggcagcgtctctcctgcgcctccatttccatgactgcttcgtcaacg

SEQ ID NO: 272950 - DNA, 473 bp, Zea mays
cccacgcgtccgcccacgcgtccggcacgcctcggccgaacagttccccgagtccccgactgctctctgtctctctattggcgacgactgggctaccgccgccacaggcgccctacgccaggtgtccaggtctcgggcccttctccggcaccgagcacccaccagcggaatataccatggaggtcaggcccatggtagctctgcgtgccgccctagttggtggggtagcggcatttgcgaagatcggtggggcgatgaaagccgcaggcggtgtcaagattggtgcagccgctgcagccgtcacggctgcaacatcagctgccatatcgggaaaagacgcaaaagaagacacttcaaagccggaaacgaaatgatatgacccatggattggtcgacaagtatgaaatcgcctctccagaggtttagaagagagagggtgccatagtcaataagttacaggagtaaattttgat

SEQ ID NO: 272951 - DNA, 1390 bp, Zea mays
tctagttctagatcgcgagcagccgcccgcgatcaagaacaaggactctttgatgcaattatacctcattgatgcaattgatgaaaacagacaaataacgactgttggacgagttatagcagagcttcctcttgagccgtctctttcaaggactttgattgaagcaaatgaattgggatgcctatctcaggcggtaactgttgcatcgattttgtcagcagaaataacattgcgatcagttagcaaggacgtggtggatggaaagaggaaaaggcaggagctccctgatgggtctggctggggtgaccatatacaattgcttcagatatttgaaagctgggaccaaactggctatgacacaaaatggtgctctcatcatgatttgcaggtgcggggtatgaaattgagcaaagatgtgaggaaccaactatgtcagattattcaaaaaattgcaaaaggttcaactgatgtggatgcaaggaaaagccggaagaatgaccctgattatagaaagctgaggagagctctctgcgtaggatatggtaaccagctagctgagaggatgctgcatcacaatggctaccatactgttggctataggacccaacttgtacaggtgcatccatcttctgtactggaaggcgatgagtatggaaagtttccaatgtacgttatttatcatgagctgataagtacaactcgtccatacatgagaaatgtctgcgccgtcgagcaagcctgggttcagcctatattaaagaagctcgacatattagacataaacagattaagtggtggttcgagtgcaccgggagattctgaacttctgggagacaataagcaagtgaactcgtcaaagaatgacgtgggtgtaaaacaatcagaggtggacagtaaaatccaggcagctcgagagcggtaccttgcacgaaaaggcaagaaatgacaatcgacacgtttaactgatcgctcagcatccttctggtcagcctgaagcttctctgaagatcataccgaggaaccattcgtgttattgtgggtggtgtatgcttcaacgtgcacaaacaagagaatttcttatgtaatcttttgtttgaggactctaaccttttcttttatttggcattactgtgatgtgaccttttccttgggccgaaatattttacaggcttttctgcatgggctagattcttttcccccatattcctatatggtgttgtctgttgaggtcttgtccctcctgcctagcatatgttgagtcccaagcaaggcaacaccgcaatatgatgcgatcttggaagtgatactgatatgcgctctgcttgggtttctctaacaaattttagagtcccgctctccctccgttccaaaatataatttgttttagatt

SEQ ID NO: 272952 - DNA, 1193 bp, Zea mays
aagcaagtatactgttttcgcattaatccaaggtataacccaagatagaaagggctaggttatcatcaggaacaaccattttgccttcttcgtcgactctgatctaagcctggaatttcgagactgatcattggggcactatgactgtcttcgccgctagactttcaaatataaaggcaaaaaaaaaaaaaaaatcttgaatctaacaacctgatcactccaggaaagatgtttcaagaggggaaaggaaagaatatccccaactaaatggtcaccagcaaaccagagtttgaagctaggcttgatacacacgaatattcacatggtttagaatggactctcctgttctgaatcgcctgccttatggcaccctgccacggaatgcagatgctcctggtcagcgcttgacagctccacgtttgcacggcctcggttgagctgaggatgcgcctggacccttgcggggtttcctggaccgagctttctttggcgcatagcctataacttccaagtcctcgcatatctcttgcctccctagaaggaggccaggaatgatctccctctgaaaatttctcatacccctccctctctttagcttgatccgacatgctggtccttcgatatagggtggtgccacattgatcgattgaccgtcatcttggatctcctctaagttcaacacggtttgctcgaacgagtccaatgaaggctgaggctcatcgttcacgttctgagctgctgtctggttgctgcttccaaagcaatgagcaatgcgttcagaactatgctggaaaatggaaagaagggttctagctgcagtatcagctgttgtgccatcaccatcgaccttgtcttgaagcatgcttaactcttgaccattcgatgctccattgtcggatatcccaagtcttggagggaaacttgtatcaacaagaggagatccagggatcaaaaactccttgttaatggttccagactgtgtcaactgaaccttattgataccattagctgttggggatgtgagaagcaccttactatcatccttgtgcgccaacatatgatcatgtccaagaaccacatgttttgtggaagtttctgcatgcagactatctttattggagaaagaacgacagggtgctgttcctttacttacatcattatttacatcccggacgcgtgggcggacgcgtggg

SEQ ID NO: 272953 - DNA, 752 bp, Zea mays
agacatttcatgggaaaaggtgggagaaattcaacagtgagaaagtggcctcacttgcttatgctagaatccaaggaaaatcagctctagttgctcatttccagaacgcaagtttgatgaatgaggataaacgctgccgccctatactcttccactctgatggtccgaatgcaggagatcaagaaccattccctgtgggatcaaatgtccgttccaggcctggaaggtccaggattttgagctgggaacaaaaccaccaggacattgtgtctgatcataccaaaggtggaactccgagcagggctggtggcactccaggttacatcgccacggatactgatcatacggctgttgattgacgaacttgcgacaacacccgacattctgacaattgcaatccagtttttttttttgaaattgcatcctctcctacctcttttttccttttgttatgttgtatctatatctacttccgcgtgatattttggcaccggaggctctagacggctgcagatttggtcgctgacaagtagcgaggagatggatgttgtgccgtcagtttctccttactttggcacagacccctcagcgggattttgttggacagtttgaccccctttcaccaggaaagatatccatatttgggggagtttccctattgctgtttggcagtgctgtcatgaacattttcctaatgctgtggatgtgaaatttcagaatgatcaaatcgaatgccggatgaatgagcgccc

SEQ ID NO: 272954 - DNA, 734 bp, Zea mays
cccacgcgtccgtacactttgaggccttccagctgggcatgtcacccgtctacatcgccttcctgaggttcatgggagacgacgcggaagcgaagaactacagctacagcctggaggtagggggcacggggcgcaagatggtctggcagggggtgccgcggagcatcagggacagccaccggaaggtccgggacagctacgacgggctcatcatccagaggaacatggccctgttcttctcgggtggcgacaggaaggagctcaagctgcgtgtcaccgggcggatctggaaggaacaatgagcttgatgggtcagctagtacgtctgtcccgctccgctgctgccctgaactcatgaatcgcatcgcaaagagcttttgccagtcgtaggaatgggcgactctgtggttcgttctgtgttttcagcttcttctcgcttgctattgtcttcatggttcctgcagggtaggtaggtgctgttggatgtgtagatcatgtagaggttggaggttgctaccgatgcagaattcgtggagatttcctattttattgaactgtctttagagcagcttcaagagatgagctattagtgttgtcgagtaaaaaatttggatgcccttcccgcgcggaagcatctttattcccgcacgtagccaatatcggtgctgcgagtagtagatggcaacggctataaacccattgtatttttgccctctcaaacccgtacatatgaa

SEQ ID NO: 272955 - DNA, 1263 bp, Zea mays
cttagctgttccccttttaagctccgctgcagctaccagtaatgctgaactaagtatactccctcaatcaacaatttataactggagttgtggccgcttctctaggcctcttttaattggctctgatgataacgaagaggcaaatgctagaagggaagagagagaacgacttgcactagattatatcgctaagtgccagcgctcctcttgcaagatgacaaaccaaattgctagttgggatacgaggtttgagttgggaacaaaaacagctttattgttgccattttctccgatcgttgttgcagctgatgaaaatgagcaaataagagtgtggaactacgacgatgcgctgccagtgaactcttatcaaaaccataatttgtcagacagagggctatccaaacttttgctgattaatgagcttgatgagagcttgcttttagctgcctcaagtgatggaaatgtacgtgtatggaaaaattttactcaaaagggaggacaaaaacttgtaacggctttctcatccgttcagggacatcgaactgctggtcgcagtattgtgattgactggcagcagcaatctggttatctttatgcatctggtgacatgtcttccatcttgctatgggatcttgacaaggaacaacaactcagcactattcagtcatctggtgatagtgccatttcttcactgtctgcatctcaggtctgctctggacattttgctgctggttttgctgctggttctgtcaggatatatgacgtacgctctcctgatagggttgtctatacggccaggccacacgcaccaagaacagaaaaggttgtaggcatagggtttcaacctgggtttgatccttacaagattgtaagcgcatctcaagctggagacattcagtttcttgatgttagaaggtcagcagaaccctacctgactattgaggcacacaggggttcacttacagcattggcggttcaccggcatgccccagttgttgctagtggctcagccaagcagatgattaaagtgtttagtcttgaaggagagcagttgacaataattcgctaccagccatcttttatgggccaaagaataggcactgtgaactgcctttcttttcacccatacaaatcactcctatctgctggtgctggtgataatgctcttgtctctatctacgccgaggaaaattacaagtaaggtgaggcctacatctcatgacaatgcagccacaaggcaaccggcaggcctggtgttttttg

SEQ ID NO: 272956 - DNA, 1064 bp, Zea mays
cccgttcgcgccggcctctggaagaagaatccaccgaaggcgaaaacgacgatggaggtccggctgactcgtctgggtctttgcaacagcggcaagcgggttggagctccgcttcgggcaggggagaaccacgtggagacctggagtcacgctgcctagactcgccgctgggtggattcgtcgcggtggaggtcggattgtgaacacgccgtccagttaggacgctgtcgtctccagatccaggggatggggttgctcggcatggcggccaagggcccctcgcccacgcgtcgcctcctgccgcagccgcacttggccgtctcctcgctggcggcctccgtggctctgatccaccgcttcctcaacacccaaagatggttgacgtcaccttcgccgtctcctcgccagtggcctccaccagccccgcagtccaagacaaagccgcgacatgagtcaacccaagtccggtcgcacctacaccgatgaccgtacccaacgtgagtcaagccaagtccattcccctcccttgcttcctcaacttgttgtcttgtggtctgaagtttgtctcggagaaggtgatgccatcatcatcagttgtgattatgaattatattctaccgataggtattcaatctctctattcggcaacaccttaaaaagatttacttcaaaatattgacaagtggattgcaggcttagataatttttggaacacaacattgctccaaaaaagtttttctgaagaaaaggtatcaatctgcagtttggtaagtgagtctgaatctgcagcaccaaggacttcaagaattagtctgaacctgcacttacagttccatgggtcttctcaattattaataatattattttttaatgaataattgaatatatattgagtctgtgtcatagattcagtcaccttaacaccctttgttgttttcccacttaagttagttaatgagatgaatggatggaaattacgtagtgaatgtatgataagtccaggctacatgttaaaagacacacttggctacttgagctctgtattgccatgaagaaatcttact

SEQ ID NO: 272957 - DNA, 520 bp, Zea mays
gaccgacgcgtccgggcggatcttgatattggagaacgtattggtttaggatcatttggggaagtttatcgtgcagactggaatggcacggaggttgcagtgaagaaatttcttgaccaggatttatcaggtgtttcactagagcaatttaaatgtgaagtgagaatcatgtcaaggctaaggcatcccaatgttgttcttttcttgggatatgtgacacaatcgcctaatctctctatattaactgagtacctcccaagggggagcctatatcgtctgttgcataggccaaatagtcgaattgatgaagtacggaggctaaaaatggcattcgatgtggcaaaagggatgaactacctgcactctagccatcctaccattgttcaccgtgacctgaaatcccccaatcttttagtggataaaaattgggttgttaaggtgtctgactttggcatgtccaggttgaaacatcatacttttctttcctctaagtcaactgctggaacaccagagtggatgg

SEQ ID NO: 272958 - DNA, 988 bp, Zea mays
atgcattgtcagagtctgaagccaaaactagtcttcagtctgatattgatcgttttataaatgagaagatagttcttgcagacaaagttattgtcagccatgccatcacaaaggtcagagacaacgatgtcttactgacatatggatcatcaacagttgttgaaatgattttggattatgctcatgaacttgggaggaactttcgagttgtagtggtagattctcgcccaaagcttgagggacagggattgctgcggagattagtggcaaagggcattaattgcacatatacacacataaatgccatctcatacatcatgcatgaagtaactcgagttttgttgggtgcctcatcaatattatcaaatgggacagtttattctcgagttgggacagcatctgtggctatggttgcgcatgcatttggagttccagttctggtttgttgtgaggcatacaagtttcatgagagagtgcaacttgattctatatgtgctaatgagcttggcgatccagatgtcattttgaaaattcctgggaaggcagaggaccatcttaagaactgggcagacagtgcaaatctccaattgctaaatttaacgtacgatgccaccccacctgattatgtgtcgatgatcataactgactacggaatgcttccgccaactagtgtaccggtcattgtgagagagtaccgcaaggagcaactatggatatgactcgctgccctactggcgtatggtagcatttttggtgacctttgcctgagtgcaacatgataaatgattgcactgttggcctgagtttttttttgtctgtccttgttgcctttttaccaaaagacggtccgtcgtgttttgcgatcacctgtataacttgcaactctgaatggtgcacccgtgtgccctcggacatcgttgagtcgatggatcagtgatgagtggggtttttaagccccccgggtttaataaaagccccccgtgcagcc

SEQ ID NO: 272959 - DNA, 773 bp, Zea mays
caagaagcccgaggaggcctccgaggcatcctccttcaccctcatccagttcgcagacacgatggagaaagcgaggaagctggggacgttcaagaacttcgttgccgggcgggccagcgaggccaccgtcgtgaacgtcttcgagaagcactccgctgtgctgcgctacctcggtgccatcgaccccaccggcgagaacctccgaaacactgacaaaattaacgcgaccaagcactgcaactgcacaattgctgacgtggagcacattctggccaagtacacatgggctaaagaggctcagaagaagattgcaaagctcaaggaagaagggaagccattaccgaagtcatttaacgaggtccaaaatctaatgggttctacaccagtggatgtcggcagaagtaatctggcaaagagtggtcagataagtaggaatgctttctgcccatgtggttctaagaaacgatataaaaggtgctgtggagcttcatgagatgaacaactctaccaggtgcagcgtttgtaagctcttttctttgccaaactctaccaagctctttcgcggacaacacctgaatttgaagcttgcaatttgtaaagcactatgagcgagccctttgtttcagaaggctttctcttaaactctgatttcttgattggagctgtcgtttaacattgattcagttcaatcctgcatgaatctaggaattattatccactagctcgtttttgaaaaaaaaaaaaaaaaggctgccgtttagagatccagttac

SEQ ID NO: 272960 - DNA, 470 bp, Zea mays
tagtatagaaatggagtagtagaaagtatgtcagtagtataaacatgctaaaacatgaaagtcacaagtaaactttatgcgatatagtgtcatgtcagcttcggtatccatgtccgcttcatgagaagcgtccacttaacactctgtaagcccatctatttatggatacattcacttcacatgggaaaatcacgttgtgtgaaaatgatcatttcctatttcggtaaggaggagccttatcttatgcaatggtgataggtacatgtgttcggttaaatgctacaatgtaattatcgagctaaggatgtatatgacgggatgaggacagcaagccagagatggtggacgcggggcgacgaaatcaccgctctgctccgccgtccagctctactcgcgagcaggacatcaccgcgcgtccaccatctctggcttgctgtcctcggcgcgtcatctccatccctggcttgaga

SEQ ID NO: 272961 - DNA, 417 bp, Zea mays
gattggtggaccaggagatgagcataatggcgcagaagagtccttttggtcatctgaaacagtgcacggctatgcacgcatctggcctagacatggacaggtttccagctattcaattggcaaaaagattcaccactacgaactctggaaccctccactctgcaagcactctatgaactcatctcactggtccatgatggtgctgaagcggttagccaaatggacaaaatagaagccacatcccaggataaatcctccaaccaaagagatgacacagatactagtgctgctgcagacgattcatccctcttggacaaagatcctgttgcaaaaatcattttgccagttgaaccacttgaattgcggactatgctgcttgcaatggtgcatactttcccaaggacgttagaaaatttg

SEQ ID NO: 272962 - DNA, 660 bp, Zea mays
caggaacaagatcctgcagcgacaggatgcccctgctgctataatgcaagcgaataaactaaatgatccagaagctgtcacaaagaggtcaaagctaatgctgacgcctcctcaaatttctgaccacgagctagaggagatagcaaagatgggcagtgctggtgatcctgctttagctgatgagcttggtgaaggaagcactgccacaagaaccttgcttgccagctattctcagactccaaggcttggtatgacaccattgcgaactccgcagcgaactccagctgggaagggtgatgcaatcatgatggaggcagaaaatcttgcacgtctcagagaatcacaaacgcctttattaggaggtgataacccagagcttcatgcgtcagatatgcatggagatgagcctttcaagactgtgctaccgtctccggatcaactggtaccttctttggcaggccatgacggtcttgatggcccatggattaatttgactccattcagagcggtgcagacatttggtctaccacagggcgccacttcttttttggttgagctgaacattaatgtggtgggaatgcacgacatcactaaacttgtgctttgtaggcaagccgaactgagggaaagcctgcgatctggttttgcttctattccaca

SEQ ID NO: 272963 - DNA, 657 bp, Zea mays
ctctgcacacctcccgccgcgccgaccacgcgcctttccccttttcctctcccccagatccacccgccgcgccacccctctcggctcctcccaggcggcgtcggccctttcctcgccctcctccgtttctctccggcgtatatatgggttcgaaatcggtagatgaggtgctcgatgccgccgccggagtccattgctctgctctccgtctggacggtcccaacgtccagttttccgcctcctccgaggaagaaccaacgacgtctggcctggagaatggccatcaggagccctttgttattggcgttgctgggggtgcatcgtcaggcaaaagtaccgtgtgcaagatgatcattgatcagctccgtgaccagcgcgttgtggctgttacacaggagtccttttattatggattgtcggatgaagaattagtccatgttcatgattataattttgatcatccagatgcatttcatacagagctacttctctcttgtatgcaaaacttgaaacatggcaaagctgtcgacatccctaattacaacttcaagacatacaagaagtgtaccaaatgcaaggaaggttaatccttcagatgttattattttgaaggaattctagttgttcatgattcacgcctcaaggatttgatgaaca

SEQ ID NO: 272964 - DNA, 540 bp, Zea mays
caaaatcactatttcttatatattctattccctctcctctctgcaccgcccgccgcgccgcgcgcgcctctccctccctcgatccagatccaccccatacctccgcggcgccaccccttcccgctccttctagccggcgtcggcgcgggccggagatctgttttctccggtaggaaaaatcctattgcgatctaaatatgggttcgaaatcggtagacgaggtgctcgacgccgccgccgccggagtccattactccgcactccgtctggacggccaggcttccgcaacgacgtctggcctggagaacggccaccaggagccctttgtacattggtgttgctgggggtgcatcgtcaggcaagagtaccgtgtgcaagatgatcattgatcagctccgtgaccagcgtgtcgtggttgttacgcaggagtccttttattatggattgacggatgaagaattagtacatgtccataattataactttgatcatccagacgcatttatacagagcttacttttttcttgtatgcaaaacttg

SEQ ID NO: 272965 - DNA, 814 bp, Zea mays
ctgcgtatgacttaagctacatcttgagcaacatgctgcagatgggagagctgaatggatggagaaggtcagagatgcgccaccacatattgtcaagaaagaggacaaaaagagtgatcggcttgagaaaaataaaaggaaagagaaagataaacacaaagagaagaaaaaggagaaagaggcaaagaaggagaaaagggaacataaccacaaagagcataataaaacacgagaaaacagtataagttatcccatagatagtcttaacttgaagcactcggtccctcctttagccccaccagttgatgatggaaaatctgttgtgcctgatgagaacctgaagaagcgaaagaaccatgaaacgaatggttacttacgaagcaaccttgatatgcggcctacaaagttgccgtgaccagcactccccagcaatcgtgtggcgaatggtgcaggatctcatgtagccgctccactctcttctgtgaagcaggaagccataaatattgaagaggctgaaaggctccacaaggaagagaaggtcaatggcaaccaacacggtcagcagcgagctccagtcgatcccgtggctgcttgtgagaatggcacaagctctaggaagccacctcaccccgactgcaagtatcttagccagatatacagcattcctgaagcacctcaaatgatggaattgcctgggcaggaaggtgaggactggctgttcgacaaaggcggcacccagccaaggaagccggccagttcagcgcctgaggctgatggagtcccccaagtgtgggctcaggctctgaaaattgac

SEQ ID NO: 272966 - DNA, 2202 bp, Zea mays
ccacgcgtccggcacgtctcgtctccctcccacaaaaaaaaaaaactgctcggttgctgctcctgctccgccgcgccggcatcatgtgtggcatcttagccgtgctcggttgctccgactggtctcaggcaaagagggctcgcatcctcgcctgctccagaaggttgaagcacaggggccccgactggtcgggcctctaccagcacgagggcaacttcctggcgcagcagcggctcgccgtcgtctccccgctgtccggcgaccagccgctgttcaacgaggaccgcaccgtcgtggtggtggccaatggagagatctacaaccacaagaacgtccggaagcagttcaccggcacacacaacttcagcacgggcagtgactgcgaggtcatcatccccctgtacgagaagtacggcgagaacttcgtggacatgctggacggggtgttcgcgttcgtgctctacgacacccgcgacaggacctacgtggcggcgcgcgacgccatcggcgtcaacccgctctacatcggctggggcagtgacggttccgtctggatcgcgtccgagatgaaggcgctgaacgaggattgcgtgcgcttcgagatcttcccgccgggccacctctactccagcgccggcggcgggttccggcggtggtacacccgcactggttccaggagcaggtgccccggacgccgtaccagccgctcgtcctcagagaggccttcgagaaggcggtcatcaagaggctcatgactgacgtcccgttcggggtcctcctctccggcggcctcgactcctccctcgtcgcctccgtcaccaagcgccacctcgtcgagaccgacgccgccggaaagttcggcacagagctccactccttcgtcgtcggcctcgagggctcccctgacctgaaggccgcacgagaggtcgctgactacctcggaaccacccatcacgagttccatttcaccgtacaggacggcatcgacgcgatcgaggaggtgatctaccacgacgagacgtacgacgtgacgacgatccgggccagcacgcccatgttcctgatggctcgcaagatcaagtcgctgggcgtgaagatggtgctgtccggggagggctccgacgagctcctgggcggctacctctacttccacttcgcccccaacaaggaggagttccacagggagacctgccgcaaggtgaaagccctgcaccagtacgactgcctgcgcgccaacaaggccacgtcggcgtggggcctggaggtccgcgtgccgttcctcgacaaggagttcatcaacgtcgccatgggcatggaccccgaatggaaaatgtacgacaagaacctgggccgcatcgagaagtgggtcatgaggaaggcgttcgacgacgacgagcacccttacctgcccaagcatattctctacaggcagaaagaacagttcagtgacggcgttggctacaactggatcgatggcctcaaatccttcactgaacagcaggtgacggatgagatgatgaacaacgccgcccagatgttcccctacaacacgcccgtcaacaaggaggcctactactaccggatgatattcgagaggctcttccctcaggactcggcgagggagacggtgccgtggggcccgagcatcgcctgcagcacgcccgcggccatcgagtgggtggagcagtggaaggcctccaacgacccctccggccgcttcatctcctcccacgactccgccgccaccgaccacaccggcggtaagccggcggtggccaacggcggcggccacggcgccgcgaacggcacggtcaacggcaaggacgtcgcagtcgcgatcgcggtctgacgagagtacgtgctcgcgcacctccctgctagcttctaccgggctgcagcctgcagcatgcactgtgcgagcacagccgatcagcgccaataaactggaggataagaacgactggtaggtgtgtgtgtgtgtcgtgcgtgcccaccggccatatcccggtgcggcagcacgtgctattgttacgtgttgtactgccgccagcgtacgtgtctgtgtgtctcgatcatatctgtacgtttttagatttagaagaaaaaaaaaaggcatgtccgtgtctgtatgtctggatcatatctgtacgttcttagatttagaagaaagaagaaaaacattatatagaaaaaataacaaac

SEQ ID NO: 272967 - DNA, 303 bp, Zea mays
gcagcacgagcgctcaccgtctctgtctcctcctcccacaaaaagcagctgaattgctccgtcggcgtcatgtgtggcatcttagccgtgctcggatgctccgactgctcccaggccaggagggctcgcatcctcgcctgctccagaaggctgaagcacaggggccccgactggtcgggcctctaccagcacgagggcaacttcctggcgcacagcggctcgccatcgtctccccgctgtccggcgaccagccgctgttcaacgaggaccgcaccgtcgtggtggtggccaatggagagatct

SEQ ID NO: 272968 - DNA, 319 bp, Zea mays
cccgtacaacacgcccgtcaacaaggaggcctactactaccggatgatattcgagaggctcttccctcaggtgattgattcagcttccagccagcctacaacgatgcgtgtgttgttgcactgcacccgtggtagccaattattcagtacgcgcggcgtgctgctgagtccgtgaacacggtggtaccctgcatgcaggactcggcgagggagacggtgccgtggggcccgagcatcgcctgcagcacgcccgcggccatcgagtgtgtgccacagtggaaggcttccaacgacccctgcggccgcttcatctcctccc

SEQ ID NO: 272969 - DNA, 498 bp, Zea mays
cccacgcgtccggccctccttttttttagtttacccgccgtcccgcgcgccgccgtttcggttgctcggctagagggactagggagtgccagcgagtccatggcagcggcgagggcgtgcatcgtcgcgctggcgctggtggcggcgctcttcgtggccggatcggcggcggcagcggcggggaatgccggaggccggccgcagctgtcgctcaggcagcggcgccggcagctgctgcggcagcggcaggtgcgcagccacctcaagaggctcaacaaggcgccgctcgccaccatcgagagtccagacggagacatcatagactgcgtgcatatctccaaccagcccgccttggatcatcctttcctcaagaaccacaccgtccagatgcggcctgcataccacccggaaggtctgtacgacgacgagttcaaggttgcattcgagcggaacgcgcaaacgatcacccatttttggcattaagaacggaaggtgccc

SEQ ID NO: 272970 - DNA, 347 bp, Zea mays
ggcttcttggcagggaattttcagcagtgcaaggaaaaggtagaatcatgcgcagaacaatggattactgcacaaaatttggtgttggcacttggaagaaggaatgcagaagccatcggtttggttataagtgatgggaatgaggtgagcaaccaactgggtgcaagaatttcatctgctgttgctgctggatttgaagataatgacatttcaagcaaatcccttctaagttgtattgacgattcattgaagttggaccatggtattcgcgagaatgtgaaatccatcgtcatgacatccagagcacaacttcatgacttgggacatggtcactatgagatgacaaa

SEQ ID NO: 272971 - DNA, 440 bp, Zea mays
attgacctttgcttcgccaatgaggatgaagctagagaggttatagggggaggtctggaatcagatccagaggaggcgcttgcgttcttgggcaagtattgcaaatgggctgtggtcacacttgcttcaaagggatgcatggcaaagcatggcaaacaggtcgttcaagtgccggccatcggggagagcaacgcggtggacacaactggagcgggcgacctgttcgcgagcgggttcctgtacgggctggtgaaggggttgccgctggaggagtgctgcatggttggggcgtgcagcggcgggtcggtgacgcgggcgctcggcggggaggtgcggccggagaactggcagtggatgtaccagcagatgcacgccaggggcttgctgctcccggagctcaagaactgaatgaaactattgctgctgtagctttagctagc

SEQ ID NO: 272972 - DNA, 336 bp, Zea mays
aaaaaaaaaaagaagaataccccgaacacgaccagaaggcctactaaaccctgccgccgccgccgccgcgccatgggcgacgagctcgacgagctgatcggcttcctctccgaccgcaacccccacgtgcggggcgcggcggcggacatcgtgcgcgggctgacgggtggggaggacggcctccgggcgctcacggcgcgcgccgatagcgcccttccggcgttgctccgcctgctggccttcgcgggcggaagtggctcgggagaggccgcggcggactcgctcgtcaacctcagacaagacgcgggccttgcaacgcgccttgtggcgctcggg

SEQ ID NO: 272973 - DNA, 746 bp, Zea mays
atcccgcctccgccttaaaccctaaaccatgacctctcgcgccgccgcggaggccgccctcctccttccgctccgcctccactctgccccgctccgcctgcgcttcttctgtacctccgcctcccggctccgatgggcgtgttccgcggcggcgctgcttgccgtcgtttcgctcgtcaccgccatctgcgctatgcccgacgccggcgccggcaccaacgttgaagccgatgccggcgccttgcggttggagattgaagcgctcaggctaaaggtcgcgcggctggaatctcttctagaggcaaattcgaaggcattagacattaaggctagtatcttggaggaggacaacaaactcaatgaagcaatggaacgtgaaatccagcttttaacgaatggaccagacagaactaagaactcccaaagcaaatcatattctgctggcaatattaaatctatggaagatgaggtgcggcaacttcagcacgagatcattaagataaacagcaattcttacaccgttgaatcattagcacatgatactgagaaaagggtggaagctttgagcttggaggtaaaaaagatagaggatatgactgcagaacaatggatccaaattcgacaacttgaaccaagcatttgtgttaaccaagatgatgacgtcaaaagttcatgagagaagtaggccatcagatacagtttataagtggcctggaaaagatatattgttaagtatgtcaggaata

SEQ ID NO: 272974 - DNA, 733 bp, Zea mays
ggacgcgtggcaaaggctttagctccatttatgctcgaggattatcggaaagtaacgatcggtcagagaggtgaggaaaagcaatatacctacgaagatattcttaggtgtatgaagaaagtcacaccaatggacttgaagcagactgttcaagtagataaagaccttgtgatccgtgcctattatgctggacatgttataggggctgccatgatttatgcaaaagttggggatgctgctatggtatacactggggattacaatatgacaccagatagacatcttggggccgcacagattgatcgtctgaagttggatgtattgataacagagtccacatatgctaaatctatacgtgactcaaagcctgcccgagagagggagttttttaaaagcggtacataaatgtgtttctggtggaggtaaagttctaattccaacgtttgctctgggaagagctcacgaactatgtatgttactggatgactattgggagaggatgggcttgaaagttcctatttatttttcagctggtttaaccattcaagctaatgtgtactacaaaatgttgattgggtggactaggcaaaaaatcaaggacagccatacagggcataatccatttgacttaagcatgtttggcactttgaacgtttctttattaacaaccctgggccctgtgtactttttgcaacacctgggatgattactgggggatttcccttgaggcggt

SEQ ID NO: 272975 - DNA, 412 bp, Zea mays
  unsure (1)..(412): unsure at all n locations
aagacattctcatttttcagagtgaagagtttgtcaaaaggaagcggcgccgagaaagacttgtctttggcactncctttaagagagtcgaactcttccccactgccttcagttgtaccctcattctctgcatctgagctggggaacgatatcaccgggagaagcaatttcggttggcccaagcagcagtatgttaaagaacagcctgctccaacatttgttgaaccaatgcccaaggcaaaggatgcgggggagttcacatcatcaaatatagctgaagtaccagatataatgtaccagctgggaaggcagccatcaaggaaacatgtcactttggcgaacaatatgagaaattccgttgcttacccaactagaagggttgaaccagatgatgatgatgagcatctaaata

SEQ ID NO: 272976 - DNA, 492 bp, Zea mays
gggccggggagactccactccacgtctgtgtcctcttcatcgcaactgcctgggcctgctttcgtttctgcttgtttgtgtgtcggagaacctcccggctccccgcagtccccctggcctcgcagatccgcggcctgcttcgttgctgccttgccagcaagcagccgcgctcatcctcgcggacgccagcggcggggcagccccctctcctgtgatccactccggcgcccggggccgcggctgctcccgtaggtgccgccgccgcctcctccccctcttcatcctcctcccagatctatccccgggcccgcggcacctgccggcgtcgggaaatcaagtgccccggcgcccagggagcgacctgccccaaggtggggagttcgttccttttccagtaacgaggagggcaaactcatattccatcatgatggaagaggacatggaaaatggaaggtcgtatcaagaaagaccaagggacttttcaacagtacg

SEQ ID NO: 272977 - DNA, 415 bp, Zea mays
cctggatggaatcatggaaccgcgtgctttttagctaccgaacggcggcgatgcgtcttttctccggcgtcctcgattcttcgtccgcgcttgcctccgccgtcctgggctccgtgtccgaccgcctcggattctcgcgcatagtttgcggtcgagcgagcccttcgaacatgccggctctcgcttgttctccctgccgctaccggcgcccagaaaccgtggctcttcgtcggtctggggaaccccgggcggatgtacaaaggcactcggcataacgttgggtttgagatgattgatgctattgcggaagctgagggcatatcattcagcagtaagcaatttaaggcagttgtcggaaaaggcctcattggtgatgtccctgtaatgcttgccaagccacacacttttatgaatg

SEQ ID NO: 272978 - DNA, 276 bp, Zea mays
cccacgcgtccgtactgctcctggcatactacctcgttctaacggggtgcgggctcctatagttatggcacacagtcatgcactacaacaactacgacgtcgccgccgggccgggccaccgccgccacgtcgtcgtcaccgtgcacgacgagccaccacgccggagcggcatggaggaggcggccatccgccggatccccacgttccggtaccgccacggcagtacgcgcctcgtgcgcgcgcctgaagccaaacaagcctctttcgccgtgtgcc

SEQ ID NO: 272979 - DNA, 917 bp, Zea mays
gtcagcggccacatcagcgagaaaatgttcatgaaaggctacggcggcaacggcggcgggtcctatctgaaggccaacatgctcgccgcggaggcagtgagcaacatccggacgggggctgccttctgctccgaggagaaggtgataaagctctacgcggacgagctcagggagccttctaagaggtccttccggcgaggccagggcgccggcctcttttacggagtctcccaggtcttcctcttctcatcctacgcactggcgttatggtatggttcagtgctgatgagcaaggaattggccagcttcaagtccgtgatgaagtccttcatggtgctcatagtgacggcgctggccatgggggagacactggcaatggcacctgatatcatcaaagggaaccagatggcgtcctcggtgttcgagatcctggaccgtaagaccgacgtccggatcgacacaggtgaggacatcgagagggtcgaggggctgatcgagctgcgcggcatcgagttccggtgcccgtcgaggcccgacgtgaccgtgttcaagggacttgacctgctgatgaaggctggcaagagcatggcgcttgtcggcatgagcggctccggcaagagtaccgtgctgtcgctcatcctccgcttctacgacccgatcgccggaagagtcttgatcgatgggaaggacatcaagaagcttaagctcaagtgtctcaggaaacacatcggcctggtccagcaagagccggcgctgttcgcgacgacgatctacgacaacatcctgtatggcaaggacggggccacggaggccgaggtcgtcgaggcggccaagctggctaacgctcactcgttcatgagctcgtttccgggggggtacatgaccatggtatgtggagcgcggcttgcatctgtcgg

SEQ ID NO: 272980 - DNA, 320 bp, Zea mays
gcgtccgccgaagaaagctactcataccactacatcccccagttggcaaggaacatcggcgacgtacaacgaggcctcgcctcaccccttcatcaacctcaagggaatccttgcgggcaacgcggtcaccgacaactactacgacaacatcggcacggtcacctactggtggacgcacgccatgatctccgaccgcacctacaaggccatcctcaggtggtgcatcttcagcagcagcagcatctctcgcccctgcaaccgcgctatgagctacgccatgaaccacgagtgcggggacatcgaccatttcatcatttaca

SEQ ID NO: 272981 - DNA, 470 bp, Zea mays
ggagattgtggactcggttatcctacgtgactagtctgaagcaacgatcggtgttgatggttggagtttgtacactgaaatgaaccagaacgtcctctccttgtttcaggcatctaaggaaagttagactgcaatgctactttcgcttccgccgcgatcagatggacaaacgagtagtttcatctctgccctctagaacctccccgaggaacaacatatcctcctcgtgccccccttttttttcttttttgaagttattctcttttttcctgggaagaaggtgctgctgctgggagagtactatgtggctacgaattgtcgctttgtgagtaccactgttcgagcccagcagtttctttagtagggcaatagttaatgtgatcatcctatgtatacatggtgaatacatgctgtgatgatttgtaggttctgttgcatatataccacccccaaccctgttttggccgtcc

SEQ ID NO: 272982 - DNA, 815 bp, Zea mays
  unsure (1)..(815): unsure at all n locations
gaggtcggagacggcactgctggggagggcgatgaggagcagcggttgcgggctgctctgcgtcacctgcaggcggaggcgggggtgctggagcgcctggtgtacaagcaccggaaccagcaccgtggcgccgcctatttccaatacctcctcaaggtgaggagggacctcaagcttctgctcggcgccggcctcgcggaggttctcaacgccgtgttcccagttctcgcatgccgcaagccggccaacacgatcctcgtccccaacaagcagactaagaagaaacctggtgcaaaccacagccatcaccagaggcttttgggtgtagcccgcttgttatcccagatgtctgaacctgttatgaaggcagcaattcagataacatttttacttgctagatcattcttcgttgatctttgcacggctgtgctttctttgcttgcacgagtaagggtcctgatccaacagatgttacttgatgttgtgtctatatacaataaggtcactgatcttactgaaaggaagcaggctgttaagattagcatcagtggagtgcaggctttcagagagtactacccctctatgaatgatgcatgtacagttctggagtgtgtatggataaaagataaattcgttttgcatgaaaaggttaaagatatctctcaggagacccaagttgagaatcagaagtgctgcggtcctgaatctacagtccagtatgaaacgcttgcactgattagtgaagattctaatgctttatcttctatttgtcacaatatatgcatgatgatccattgatctngnatttttttttg

SEQ ID NO: 272983 - DNA, 382 bp, Zea mays
ctacccctctatgaatgatgcatgtacagttctggagtgtgtatggataaaagatgaattcgttttgcatgaaaaggttaaagatatctctcaggagacccaagttgagaatcagaagtgccgcgggcctgaatctacagtccagtatgaaacgcttgcactgattagtgaagatatgaaaatcctagaagaaacgaacttgccagacagacagacagatactgctctagcggagcaaccggataaaatgattcattgcaatgatgctggagattctcagaaggggaggcaactagaaaatgaaagcagtgctcgttcagttcctgacacccttagtactcggaagcacctgaagcccgagtctaagaagagagtagcattt

SEQ ID NO: 272984 - DNA, 883 bp, Zea mays
gcctagaacatggcataggtaaaaataactacacgcccgtaactaatgaacttcctcaggtcttaacagtcacgactcaagacaagaaacataacctgccatagctgccacggctgcatacatgactacacgggacaaatcactgtcgcagctcttaaaacctacagccgcagggttccatatatctaagcaggctccaactgaccgcctactgcagagatcattgcgcgatgatgctcgtggctttagcacatggctaaacaccactaccttatggctcgtggccattgcccatggctgctgcagcattctctagctcagagccaagcgcagacatggcacttccgttaccaccatttagaattggagctgattgttgtagagtgaagaggtacaggagatttggataggtccctcaggagacccttatttgcccacatgaggccacaagcgttgcatagtgttcttggtccatcaggtccccgacgcatcattggtgtagctgttgcattaataccacagtgatgacattcagcagcagatggaggtcggccttcaactagtgcccaattcagagagccatctgcagctgccatttctgatgctgctatttcatcaggctttggttttgaagatgtaaactgacctctattacgctgcatcctaagtgcaacttccttccggacattgtaccggatcttcttatcaaagttccgctccttccgcttttccctaaatctcatcagtgatgccacccgatgtggaaagttcaacctcttactataaggtgcagaggacgacgctccgctcaggctactcagctccctgcctccaagcagcagaagcacggcttggaccgtagcgtgggcggacgcgtaggcga

SEQ ID NO: 272985 - DNA, 431 bp, Zea mays
ttaaatcaatttttttttccgattaattttgtttggacttcaacggttcttaacagtcacgcctcaagacaagaaatagcttcgttatagacgcagcggctgcaaacatgacacgggataaagcactgtcatagctcttaactacagggcaccaaggtaaatggaaggattccatatctaagcagcctccaactcaattatagtacagcagctgaccgcctactgcagagatcactccgggatgatgctcctcgtggcttttaccccatcgctggattaaacaccactactcgatgactcgtggccattggtcatggctgctgcagcattccctagctcagagccaggcgcagacatggcgcttccattaccaccatctagatgcggagctgattgcgtagcttggagaggtacaggagattttgttacgt

SEQ ID NO: 272986 - DNA, 1268 bp, Zea mays
tttgaagacaaggaagtatttattggcttcacaagctttctttctccaggcattattttcaggtgtaacttatcatctacaatccctgaaatgaagatgtttcgagaaatttcagttcctggatttgatcgcacaagttttcaagttaagcaggtttttgttcctagcaaggatggaaccaaaattcccatgttcataatgtcgaagaaagatatcgatcttaatggatcgcatccaactttgctatatggttatggaggattcaacataagcataacaccttcatttagtgttggtcgcgttgtgctatgcaagaacatgggctttgttgtctgtgtagcaaacattcggggtggtggagagtacggggaggagtggcacaaagctggagcacttgcaatgaaacaaaattgttttgatgactttgctgcctgtgctgaattcctcatttctaatggttacaccagttccagacgtttatgtattgaaggcggaagcaatggtggtcttctggttgctgcttccattaatcagaggcctgatctctttggatgtgctctcgctcatgttggcgtcatggacatgctccgttttcacaagtttacaattggtcatgcatggactacagactatggttgttcagataaggaagaagagttccagtggctcattaaatattctccccttcataatgtacggagaccttgggagcaaagctctggtaataactgccagtatccagcaaccatgttgttgacagctgatcatgacgatcgtgttgtgccattgcattcactgaagttattagcaactttgcagcatgtcctgtgtaccagcactgaggacagtccgcagacgaatccaataattggtcgcattgatcggaagtcagggcatggagctggcaggccaactcaaaaaatgattgacgaagctgcagacagatatagctttatggcaaaaatgttaggggcttcgtggactgaatagtgaattttgtccagcttagtgtggagatggtgagcaagattactctatgcagtcaaagtaaagtggctgtaaaagttatattgcttatgttttgctcttgcttggatgatcatccaccaaatagtatagtgtttatgcttcggtttgagataagggttcagggagcattgtcatgcttggcgttggtgcaccatttctttcatatatatcttttgattgttaaattttatacgttactacttcattgattctaaattataagatgttttggttttttc

SEQ ID NO: 272987 - DNA, 475 bp, Zea mays
ccggcggagccacgcgtccggcttataatacttacaacaaaagataagcccacgaatcagtagatcgaggtcccgcccagtccagcagaagcgcacacggagatgtcccagctgagccctgctggccacatggctgcgacgctcctcctcatcctcctggcctccgcagcagcagcagcggtgtcagctgaccaacaggtctctgcctgccagaatgacatagacgcactgtggcgcagctgcaagcagttcgtccagaaggaggggcccaagatgcctccgtccgaggactgctgcaaaaccatcaaggccttagacgcgcacgcgtcctgcatctgcgactacgtcggctccccggacgccaggaataagctagacctggacaaggtgttcttcgttaccaaacagtgcggcgtcaccgtccccaagggctgcggtgcgtagcagggctgtagcgcggctgggcctgtgtgca

SEQ ID NO: 272988 - DNA, 1490 bp, Zea mays
cggtcgcgtgggtgaagaggcagagcagttcctgtgctccatgctcggggataattccgagcttggcatgggtgttgtcagagacgtgctaggccagtatgggtacgatgttgagaaggctttggatgcattgcttgatatatctggtgtgtcttcagttgaaaacatggaaacaaaccatcaaagtgccagaaggaatgacacatgtcatctagatatgttttctggaaatgggctatcagtggagaatctgactgcagggaatagaagaagtctacgccagttgacagatgagatatccaacactgggctccagtctgaattaggacacgagtttttatggggtgaacctcagatcagctatgcggaggctgttaaggaggcaccacgctcatcaacattgccgtcaagatcaactgtaatgaaagctggtccacaacaagtcctggattcactgtttaaaattcctgaaacacgcacgtatgagccaagttctatggactggaaaaaggtagtaaagaaactgcaaacaatcaattataccgctgcatcaaacaatcacgaaaggcctaaggatgggggtggctatcgtgagctccgtggtgttgctgcaaggcattacgataaaatgaaagaatactatcagaaagctgcctttgcatattcgaagggtgacaggtcatatgcttcttaccttgctgaggaggggaaacattatcgagaactgggtcgcatagaagacgagaaggccagcaggaatatatttgaagccagaaataagcatataacgaacacagtaaccatcgacttgcatggccaacatgtccaacatgctatgaaccttctcaaaattcacatgatgatttgtatttgcattccatctgtcttactgagggtaattaccggttgtggttcagaaggtacagggaagggaaaaataaagcgctcggttatagagcttgcggagaaggaacatattgagtggcgcgaagagaactctggaactgtagcccttcgacttggtgggccaagagagtatcggttccttgagcatgaaagcgattctgacctagtggggaactttaacatagattaacttctgatctaatctatgtattcccgtatttatgtgttatagctatggatgctgcctaggttgcgatgtaggctgtagttctgacacagaagctcggtattgtagttgggtaaattatggtgtaatgttgaccccaggctgctaactgtgcaatcacagaagctctgactgtacaaccgtagcccttctgtgaaccaacacaggaaccgtaatcatcgtgagttgaagaatatcatactatggccgattgccacgggaaccaattttggcctgtaccaactggaacttacgatttacgatttgtatgaaaatatattctacacttaggcctcctgggaatatgctgagtgatagtttatcaggtgattataaacttaagtcagggggggatgca

SEQ ID NO: 272989 - DNA, 520 bp, Zea mays
cccccgcttccccattctacacgcgccgccgcactcctgtacacgccccgccgccaccgcctccaccaccacagcgcgcaggaatccctcgttctctgagggtttcaggcgtcgtatgtaagagaagatggcgctctcagtatccatggagggcatcgaggcgcgggcgcgggatctcggggtggacctctccgctgtcgatctggactccatcaccctcccggccggcgaggacttcggcatcgtcagtgatgacgaggaggtacttcgtggtgaggatcttccagaacttgaaatgggtttgtccaacattattgtcgtggacaatctgccagttgttcctccagaaaagtttgagaagcttgagaatgtcatacgcaagatctacagccaaattggagcgataaaagaaaatggtctatggatgcctgtaaacccagagaccaagaagacatacggttactggttcattgagtatagtacccctcaggaagctgagctggctagggaaaaaaccaat

SEQ ID NO: 272990 - DNA, 398 bp, Zea mays
cggacgcgtgggtcactcagtcactagcaagtgcctcgtcacatggcagcggcagcgctagcggcgtggtggtggtctctgtcgctcctggctaccatcgtcggcggaggcagcgcctcaccgtcaccggtgcccggctgctacacgcgcatcttcagcttcggcgactcgctgaccgacacgggcaactacgtccacctgacggcgagcagccacagcccctacggcgcgccgccgtacgggaggacgttcttcggcaaacctaccggccgcgccagcgacggacgcctcgtcatcgacttcatcgcggaagagttcgggctggcgaaggtgacggcgatccaggcgggcacggcgccaggggactttcagaacggcgccaacttcgccatcatctc

SEQ ID NO: 272991 - DNA, 477 bp, Zea mays
attccatttgatctaaatgagcttcctttagatgagctcgatgaagacttccaggagccggatgatgctaatgagctcggcctcaacgatgtgctgttggaaaatggcaacgattttgatttgaacttacctctagatgagtgtggcgcggttgtagagaaccaccgacgaaaagagatgacaaaagatatgaggaaacaagtgtaccaagcgttgttggctagaagcaataacgggagactccacaagaaagatacccaaattgttgccaaccaatttgatctccaccttcggtcagtgcagcgcgtatggaacagaggttaaatacaacttgcaaactcggtgccggttgtggttgctagtctaaaaaagggaagagttggtcgtaaagcaattcctattgatttggaagttttgcgtaacattcctttaaaggataggatgaccttagaggatgtttgtgccaaggctaacatg

SEQ ID NO: 272992 - DNA, 641 bp, Zea mays
cggctcgagcggctcgagaagttctgtagctgaattactaagtatttaagtaacctaccataacatggagttactgaattgcttagtcagtaactagcatttgtagctcttgttttttaatacagcaatctcaaatacaatttcctttgtagaaatattttagttgagcaatctgctggaaatttaatgttggcgattcatccaggatgaagctgttcaaaaggtggtagagtttatggatacatactctttaagccaggaagacttcgatacaattgttgaagtatccaaatttaagggtcatccaagtcctatggatgggattcaacctgctgttaaaagtgccttgacaaaggcatacaaacaaggaagtagttcccgtgttgttcgagcagcagatctaataaacattccaggcatgaaaaagcctttaaagaaacgagtggcggcgatcttggagccggtagaagagagcctacctgaagaaaatggactagcatcagctgaagatgatgaagatggttcttctgatgctgacaataatgatgagcttgtgcctgctgactctacgccgaagctggaccttgcaagcgacaagaagaaaggaattcaagtgcagcttgacctgaagagcaatgggg

SEQ ID NO: 272993 - DNA, 467 bp, Zea mays
gcaagcaaacttggacagggatgcattgaggttggattatcttactcttatcttgagagagctgactgacccactgaaaaaaatgtcagaaaggatgaagctgttcaaaaggtggtagagtttatggatacatactctttaagccaggaagacttcgatacgattgttgaagtatccaaatttaagggtcatccaagtcctatggatgggattcaacctgctgttaaaagtgccttgacaaaggcatacaaacaaggaagtagttcccgtgttgttcgagcagcagatctaataaacattccaggcatgaaaaagcctttaaagaaacgagtggcggcgatcttggagccggtagaagagagcctacctgaagaaaatggactagcatcagctgaagatgatgaagatggttcttctgatgctgacaataatgatgagcttgtgcctgctgactctacgccgaagct

SEQ ID NO: 272994 - DNA, 458 bp, Zea mays
tgggctccggtacctggtggtggttcggggaatggcggctgcggttcttgggttggtgtccctcctgcaatagcaagcaagcaggttcagaagaagaacacggagaaacttgaagtaatgctaggtaggttagcacgaagtagtttctgcgcgttctctgtgatcttttggcatttgtttttggctgctggtggcttaccatcgtcagatggtgacggaggaaggagggaacatggatctggatggtgtgagccacagattacattacagtagtagagtaaactatgagagttcttgtggactgaaggtgtgtagtggtggatagggtagcttctccggggttcttttgtgtgtaattagcctgtgtcgccctgtggtgtcatgttacaacagcaagtggaaatctaagctggttcgtccgttgttggagaatcaggaaaaaaaatttgtcgtgcttc

SEQ ID NO: 272995 - DNA, 779 bp, Zea mays
  unsure (1)..(779): unsure at all n locations
gtcgctgatgtgtggtcatgtggagtaacgctgtacgtgatgctggtcggtgcatatgggtttgaggacccagatgagcctaagaatttcaggaagacaattcagagaatattgggtgtgcagtactcaattccagactatgtccacatatctccagagcgccaaaatcttgtctctaggattttcgtcgccgacccagccaccaggatcaccatccctgagataaggaaccatccatggttcttgaagaacctgccagctgacctaatggatgacagcacgatgagcaagcagtacgaggagcctgagcaaccgatgcagagcatggatgagatcatgcagatcctggccgaggcgaccattccagcagctggtccccgtggactcaatcagctcctgaacgacgacggccttgacctcgacgatgacatggacgacctggactcagataccgatcttgacctggaaagcagtggggaaatcgtgtatgctatttgacagcagcgaggcaatgcgtatcatcagtcgtgctcagatcgctcgttgcgccgcaggttaccgagataattagagagacagggcggtacgtatctgctgcagatgctgctcgtgtctgatgccgcgatgcccccctttttttcatcctgttatgtttggctgttgtttggttgtggtgcacctccagtgttttacaacagtttggcccttcgaattggtgtctagacctcgccatctgnaagacctttgttttgcatccagctagaacaggaagacttgat

SEQ ID NO: 272996 - DNA, 1090 bp, Zea mays
ctactcccttccgtcgtctatctcctcctcaaccaccgccccgagatctccccttctctctcctcgcgccgttttcctctctacctctttgatccggcaatggccgcgcccgcccctgccaccaccggcgacctcctacgcgtcgaccccctcgagctacgcttccccttcgagttgaagaagcagatctcgtgctccatgcagctgtcgaatcacaccgacgactacatcgccttcaaggtgaaaactacaagtccaaagaagtattcggtgcgacccaacactggggttgtcttgccacggtctacctgtgatgttgttgttacgatgcaagcacagcgggaagccccgcctgacatgcagtgcaaggataagttcctagtccaaagcgtcgttgcccctgctggtataactgtgaaggatgtcactggggatatgtttacgaaggagtctgggtataagatggaagaggtcaaattgcgagtgacctatgttgctcctccacagccaccctctccagttccagaggaatctgaagaaggttctccacctagggcttctgaatcagaaaacggagatggaccttctggaggattcaccagagcactaagagagcgcattgagcctcaagacaaatctacagaggctggagctttggtttccaagttgactgaagagaagaattccgcgattcaacagaatcatagacttagacaggaacttgacttggtgaggcaggagatcagcaagaggcgtggagggggcttctccttcatcgtcgtcataatcgttgctctgatcggcgccatcctcggctacctgatgaagtcgtaattctttcaggctgtcctctgctggccataccagaggcagtcgtgcaagttgtgtttgggaagaactcgaaaaaaaaagactgttgaaaccagatgtcctgagatcatccttcatattttgtcgatataggagtgggtacgtgaggaatgctgggccagtgtttaagcttttcttttccttgttgtttctccgttggatgggcattgcggacgctgtaacttgaaagttgcatcaattgcttctgtttcatagtttt

SEQ ID NO: 272997 - DNA, 437 bp, Zea mays
gcgcggacgcgtgggtgaaattacagaagccacaagggaacaggtcacaatcatccatggagatctaagtgccttccagaaggaaatggaaacagttcatcttgtagttcgtagtctggaggcaaagcttggacgcctagcttatactcaagatcggacaacacgaggaatatatgatttgtgtgaattcactaaaagattggatcagagcccgaaagctgagactcatcaggttacatcatcaacttctcgccctgctattgaatcctcagagagaattgctagggctggttctttgcccccagctttggaaccagagtctcctagaatagaggcgcctaaggttgtgcgctcatctacaatcatgtcagcatcgggacttagtttgctagctggaactacaataccacctaaaagagatcaaccgggtgtgtaca

SEQ ID NO: 272998 - DNA, 1397 bp, Zea mays
ctccttccacgcgcccgagctaagctcagcctcacacagcctctcctctcgagctagctagagtgctactagcttagaagaagcagcagcttacagctgaagctgcagcaatggcgaaatcttacaccttactgttcgtcgcactggtcgttctggcccttctagtgagccccattgcttgctcccgcaagctcgccaagccgaacaagcccaagccgacccacaagccggcggccagggtcacgcccggcagcaaccacaccggtatccccgcagtgtccgccgcctacggctccggcggctggttgtctgccggcgcgacgtactacggcgccccaaacggcgacggcagtgacggcggtgcgtgcgggtaccagaccgccgtcgggcagcgccccttctcgtcgatgatcgccgccgggagcccgtccctgttcaagggaggcaagggctgcggcgcctgctacgaggttaaatgcgacagcacacccggcatgctccggccagccggccaccgtggtcatcaccgacgagtgccccggcggtgtctgcctcgcagaggcggctcacttcgacatgagcggcacctccatgggcgccatggcgaagcccggcatggccgacaggcttcgcgccgctggcatcctcaagatccagtacaagagggtcccgtgcaagtacagcggcgtgaacatcgccttccgggtggaccagggatccaacccgttctacttggaggtgctcatcgagttcgaggacggcgacggcgacctcagcgccgtccacctcatggaggccgggtgcggcacgtggacccccgatggtgcagaactggggcgcgctctggcgctacaactccaacaccggcaaggcgctgaaggcgccttctcgctccggctgacctccgactccggcagggtgctcgttgccaacaacgtcatccccgccggctggaaccccggagccacgtaccgctccttggtgaactactcctgattgatgaactgcggcagcggttcggttctccgccccccattgcatgcgcttggctggattattatgcgtggccaagaagtgctttccagggtgcgtggtgtttaaagaacgagtctcgagtttgttttctgagaagaagaagaaaatgtctgttcgggtgtccgcgagaggcggtgtaagaagaggaggaggaggacaagaaggttaaggagccgtgcgttcttcactccctccacggtctctgcagtcacctagtgatgtgtgtagtggtcggtgtcggtttctttttcgttgtgatggctcaggacaggagttgggcgttgtatcagtctctgtgtgtgtgcgtagttttctgtaccacgcaatcctttcagagaattgagttcctgctttcttgtttc

SEQ ID NO: 272999 - DNA, 479 bp, Zea mays
ttgacgcgtgggcggacgcgtgggtcttgggtaaacctgttttgatccctttgcgaatgcactgactgcgccatatcaaatgctgtgctgtgtttttgtagcgttaagatgtctggctggtcaagggtgattcgtgattctgcagatagggatcctcgttacattgcatgccgtcgtccgcaaattactgctccctcaggttgttcagtaatgtgctggttgggcactgaggaatccatcaggttgcatccttttgtctagacgtcgatttgtgttgttgaagtggtaaacattttcatcctgggctgtatcgtcatcatgtatagataggctcgagtctctctctttttttttggctccacaattttttggagatataaaagcggcaggagttatgacatgcccacagtcggccctccttgtagaaatcctttggatgtaacctgtctctttcttatatacatactgaaagtcaaggc

SEQ ID NO: 273000 - DNA, 523 bp, Zea mays
gtcggccggcgtcgtggacgtctcgtttgcgcacaacaacaccaagatcggcgccatcgtttgggccgggtaccccggcgaggaaggcggcacggccatcgccgacgtcctcttcggaaaatacaatccaggaggacggctgccgctgacatggttcaagaacgagtacgtcaaccagatccccatgacgtccatggcgctgcgtcccgacgccgcgctgggctaccccggccggacgtacaagttctacggcggcccggccgtgctctacccgttcggccacggcctcagctacaccaacttcagctacgcgtccggcaccaccggcgccactgtcaccatccacatcggcgcctgggagcactgcaagatgctcacctacaagatgggtgcgccgtcgccgtcgccagcctgcccggccctcaacgtcgctagccacatgtgcagcgaggtggtgagcttcagcctcagggtggcgaacaccggcggtgtcggcggcgaccacgtggtgccagtgtacacc

SEQ ID NO: 273001 - DNA, 678 bp, Zea mays
tctccacgcgtccggaagaacttgaaggtttcatgtgtctgtagaggtctgatgggctaccttgggaacaagggatccatatcaatcagtatgtctctgcatcagacaagcttctgcttcgtttgcacccacttaacgtcaggccaaaaggatggagatcaacttagacgaaatgcggatgtggtggaaatcctgaggaagaccagattcccgcatgttcatggagcaggcgacaggaagtcaccagagacgattctggatcatgatcgtattatttggctcggggacctgaactaccggatagctctttcgtatcgctcagtgaaggctttagttgagatgcacagctggaaacagttgctggagaaggaccagcttcgcatagagcagagatttggtcgggtctttgcaggctggaaagaaggaaggatttactttcctcccacctacaagtactcatacaactccgatagatacgctggcgacgacatgcacccgaacgagaagcgaaggactccagcatggtgtgaccggattctatggtacgggcgaggcctgtcccagctatgctacgtgcgcggcgagtctcggttctcggatcacaggcctgtgtacagcatattcacggcggaggttgagattccgagccagtcagctgctcacttcggcgcatcactc

SEQ ID NO: 273002 - DNA, 377 bp, Zea mays
ggagcacaaagattttatgccaagttgtagcacaaaggttttatgcccacgagaacactgcggtgaaatggctccgttttcaacgggtgacagacaacctcgaaggcttgttagatgtccgtgtcccggaatcttgaaaagagttgtaaacagacaactgagcaaccagtgatgtaaattggaggtattaaacagatcactgagcaacgagtaatgtaaattggaggtactccctccgtttctttttagttgtcgctggatagttcaattttgcactatccagcaacaactaaaacgaaacggagggagtattggtctatcccatcaagaaggctcagacctcttcttccagctgtgaaatgatgctcagaaacacc

SEQ ID NO: 273003 - DNA, 455 bp, Zea mays
  unsure (1)..(455): unsure at all n locations
acttccccagcagagcaggcaaaccgctcccagtcccagtctctcacctgaggtgactggcgtctcttgtcgcgagccgccagaagcttcggcccctgacgcgtgggggccccgtccgcccccgcccccgtccccacgttgccggccatggcggggcagccaccgccgtccggggcctccgaggacgacttcctcgagcacttcttcgccttcccctccgcggcctccgccggcgctgccgggggccacgcgggcgccggtgttggcggggaccaccccttccccctcgccctcagcctcgacgccgccgccgaggccaagccggaccgtgaccccgtgcagctcgccggcctcttcccgccggtgttcgctggcgccggcggagtgcaccagccgcacctccgcggcccaccgncttcgcagattgtccaggcgcagccgaagccgggcgaggg

SEQ ID NO: 273004 - DNA, 436 bp, Zea mays
cggacgcgtgggcgccaagccaatcacacggaaaaagaccctaacctaccacaaacttatcttccaaccaatccatgcgctgttgctagacatctcggtgtttttgtagattgaggatgaatcgaagatccgatcgatgaaccggaagcgcggtgacgaagctctcgccgagccagtcacggtgatgttctgggttgcaccagaagatgaacgaaccatgagaaattcctcgttggagttgtcgttagagttgggaagagagtcgtacttcgacgagatggtcatggcggcttatggctacaagcttatctggcaatgggctgttgcgaggctatagagaagataagtctatggttgatggcaggtgcgacactaggtatttacggctctgagaaaggagagtccgatagagatttcctatcttttctttcaactc

SEQ ID NO: 273005 - DNA, 533 bp, Zea mays
ccgacagctaaaactcctgggttcctctttttcctccagagatttccgtcccgtccacgcgagctccaagatcccaaccatggtggccgcgacggcactctccttctcctttctgtcactagcaacgacactcttccttcccctcctgcgcagcctcatcttcaaccagaagcgccactgtcgcttcccaccgagcccgccgtcgtccctgcccggcatcggccacctgcaccttttgaagaagccgctccaccgaacgctgtctgctcttgcggcgcagcacggccctgttctcctcttccgattcggctcccgccgcgttgtccacgtcgccgaccctgccgtcgccgcggagtgtttgagcacccacgacgtcaccttcgccaaccgcccgcggcttccctccgcccgctacctctccaacgactacaccacgttgggctcgtcaagctaccggcccaactggcgcaacacttgccgcatatccaccgtcgacatcttttcctctcatagcgtgctctgctccgcggatg

SEQ ID NO: 273006 - DNA, 831 bp, Zea mays
cgcatccctgttaggaagaactggcgagcgacaacatgttccagtttcagaatataaaaataatctcaaaatgattgttaatcatttgaaggattgttctaattccatggttattgtgcttattacgccacctccaattgatgaagaaggaagagaaagatttgcacgaatgcgaggaagctacctgaaaggacaaatgaaatggctggggtctatgctggttattgcgtcgaactagctagagaaatgtgtataccctgtgttaatatctggtcaaagatgcaggagacagaaggatggcagaaactttacctaagtgacggtctgcatctgacacaggaaggaaacgcagttgtccacaggggggttgtcgaagcattgagaaatgcttggtttcatagctgaacagatgccgtacgactttcctcatcactccaaaatagatggcagttgtccagaaaaggccttcccatgaaatgatttcgagttgtgtgatgttttggagttttggatcctgcattgaagattacgataacgtccaatgacatgatcttgagctgttacattttgggagtttgaaatcttgcgtatattttggagtttgagatcctgcattgaagattgtaatttcctccgtgcaaattaaggacctaggcttctccaagatgccggtgttgcttcttctacacttacattgttccattttctggattaagacatgttagcttccatttctcgttattgtggtggatggtttggatattgaacgaattgaatattcggatatcatggtgttctgaagataccgcatacagatctggatgactggat

SEQ ID NO: 273007 - DNA, 729 bp, Zea mays
atctagacaaaaaggccgaaagcaaacataatgcgatacaagatttggcagtggaatgttctgttccaaagggaagttgcttaggctcacagtcaatagagggaatgcagaggtcaaagccaaagatttctgcagaagaggtgatagaagcaatcttcactgtacctgaacgattggaggaggagccaaaattaaaacgatatggattgggcgcaaaccgaaacagagtcccacatcagaaaccagtcctgaaacctcttgaggacgttccaacatattctactgagtttcccatcaacattatcataggtagcaaagcaccgtctatgaatgaggacgaataccagaactaccgcagggctgcaaagcagcactggtttatgatgaagcagtactatgagaaggctgctgatgctttcagggagggtaaccagaaagaagtcgattatcttatacaggaaggcaagcgctattatcagatggctcgactcgctgatgagaaatctgctagggagattatcaagcccagggaaacagagtcaaaaaatgaattttgtcttgatctgcgcaaacaagatgcaggaaatgtatctaatctcttgagactccatcttaaacagttggcaaacattccatcttttgattacctgagagttattattggtattgacgacagcagtttcaagatgggacaaagaagaagaaaggtcatgaagtatgtggaaaaga

SEQ ID NO: 273008 - DNA, 430 bp, Zea mays
  unsure (1)..(430): unsure at all n locations
cccacgcgtccgcccacgcgtccgatcgagacgatcgactgctttgtctcgcctccccaagcgagaagcgaccgactcccgccgccgttgccagccatggacggcggtgacgacctcgccgccctgcacgagcaggtcgccctcgcattctccgccgccatctcggcctccgacctcgaccttgccttccagctccaggtcgccgaggccatccaagcctccctcggcttgcccaatgccgccgccccgtcatcatcgtcgcaagccgccccagagtcatcctccgacgccacctacgccttcgccgtccaggccgccgatctcgcgcgcgcagaggaggaccgccgcgacgccgaggcctgccgagccgtcaacgcccgagccgncgncaacgcccgcgtcgtcgcgcacgacgccctcttcgcccgcg

SEQ ID NO: 273009 - DNA, 497 bp, Zea mays
  unsure (1)..(497): unsure at all n locations
cccacgcgtccgcagcatatgcagctccaagggctcttgtctctatatcagctggtctaaaagattttgcactacttgagtctaacagtctactgctaacagcatgcataatttgccacgccagattgatcattccttttattgaagactatgttctgaattgaccataataggagagagaagcatggggagttagcatctcggcctcatccatttccaacaagccaaaagcactaactgaaagtctggcacttttaagcaaaaataacatgtgctaaaagcacagtagtataattgatcacaattcacttcataaaatacatggataagtcataagtgctcgtatgtgagtacaaagaagaggtgattgtatttacctagatctgcaaacgctacatgttagttgtgtaatctccttttgtttctctctcatccgctcgatgagcacagatgaaatgtatatgtttacaacgtnctcataaccatccctcaccata

SEQ ID NO: 273010 - DNA, 494 bp, Zea mays
ctcggaacgaatcgagccggggcccacttcgatcgaaacgagatggctccggggaagcgaggcaaggccaaaggggcggcgccgccgccgcccaccgcggcggcgagtaccggagctgtagggttccctggctgcctccgcctgatgccgccgtcgaccgtggccatatctatacacgccaagcccggctccaaggtcgccaccatcacagagattggggacgaggcggtgggcgtgcagatcgacgcgccggcgagggatggcgaagccaacgccgcgcttgtcgactttatcagctcggtacttggggtgaagaaaagagaagtgtctataggctcgggttctaaatcgagggaaaaggttgtgctggtacaagatgcgactcttgaaggtgtctacgatgctctgaagaagtcttgtaattgtgcatgagcttgcaaacacaagttagaaaatgaagtgagacgaggctgaattgttcgttcttggttgat

SEQ ID NO: 273011 - DNA, 712 bp, Zea mays
accgcgactgcttctccatccttccacgaactagacgagggaagagcgctgaagcctgaagctgtggaggaaaacgaaggatctccccgtgcttgtgtatgccaggtcgcctgctctccgtccgcatcccgtccctcgcgaaactcggcgctcccaggtgtgcaaaatccatggcttcagacactggcaagaagctcatccagatcgatgtgagctcggacacagtatgcccttggtgctttgtcggcaaaaagaacctcgagaaagcgatggagcaaagcagggacaagtttgacttcgaggtccgctggcatccgttctttctaaaccctgatgcgcctaaggagggcgtcaggaaatctgacttcttcaaggcgaagtttggtcctgttcagtatgagcgtgtcatttctcgcatggccgagatatttcgaggactcgggcttgagtatgacatgtcggggctgacaggggatacgatggatagtcataggctcatagcacttgctggacaccaaggctatgacaagcaaaatgctcttgttggagaattattccttaattacttttgtgaaggaaagtatattggtgacaagcaggttttgctggacgctgcaagaaaggtgggcatagaaggggccgaagaactgtttcaagacctaccaaagagtcgtgaggttaagaagactaagagtattcattgcatctcggg

SEQ ID NO: 273012 - DNA, 729 bp, Zea mays
  unsure (1)..(729): unsure at all n locations
acgaattacacgagggaagaacgctgatgaacaaatggcgtaaatctctatcgacgaagctgtggaggaaaacgaaggatctccccgtgcttgtgcatgccagatcgcctgctctacgtccgcatcccgtccctcgcgaaactcggcactcccagggtgtgcaaaattcatggcttcagacacccgcaagaagctcattcagatcgatgtgagctcggatacagtgtgcccttggtgctttgtcggtaaaaagaaccttgagaaagcaatggagcaaagcaagggcaagtttgatttcgaggtccgttggcatccattctttctgagccccgacgcgcctaaggagggcgtcaggaaatctgacttcttcaaggcgaagttcggtcctgtccagtatgagcgcgccatgtctcgcatggccgagatatttcgaggactcgggctcgtgtacgacatgtcggggctgacaggggacacgatggatagtcataggctcataacacttgctggacaccaaggctatgacaagcaaaatgctcttgttggagaattattccttaattacttttgtcaaggaaagtatattggtgacaagtgagtatggatcaaaccttntttttctcaaacacatacattatggtgacaagtatattagaagaactgcgtaccattttattatttgaagagaggagatagtatcagactcatacattgatacattatggtatg

SEQ ID NO: 273013 - DNA, 446 bp, Zea mays
tcttgtttctccatccttccacgaactagacgagggaagagcgctgaagcctgaagctgcggaggaaaacgaaggatctccccgtgcttgtgtatgccaggtcgcctgctctccgtccgcatcccgtccctcgcgaaactcggcgctcccaggtgtgcaaaatccatggcttcagacactggcaagaagctcatccagatcgatgtgagctcggacacagtatgcccttggtgctctggcggcaaaaagaacctcgtgaaagcgatggagcaaagcagggacatgtcttgactttgaggtttcgctccccctctgcagatccccgtcatgatcccgggttcagaattcttggttacgcgggtgccaaccctggggctgtctgcttgcttttgcttggaaggtccgctggcatccgttctttttaaaccctgatgcgccttaggagg

SEQ ID NO: 273014 - DNA, 670 bp, Zea mays
cggacgcgtgggtttccatgctctacatattgtatcaaattgttgcatggatgaggtttccatgctctctagattgatgtaaagatgaaagttaccttacctggagtacatgatgcctctggatttttctagctacttatcagtagcacattgtataccgagatgtgtttgtgatgttattttagtagtgtgataagtgttgtctgttatgctcttaaatggaggcatttgaccatccaatttagcttttctatgtgaagtcaatgaagcagaacctcttttttttgtgtgtgcacgtaatgtacctgggccttgtaaagtacggagcgtttgggattatgtcggtttacattttgttttgctctttacattacagaaccacggcaatcctacgagccataaaccagagctagtactgaacaatttcactacacgccttggtcatcgtgttggaaggatgatccagtctctcttccctcaagatcccaatttccgcgggcgccgtgttgtgaccttccacaaccagcgagactacatatttttccgccatcacaggtacatcttcgagacaaaagaaaagaaggttgcttcgaaggaaaagacatctggaagcaaaagcggatctgagaagcagcaagtgatttgtcggcttcaggaatgtgggcctcgc

SEQ ID NO: 273015 - DNA, 284 bp, Zea mays
acgagccataaaccagagctagtggggttgccgtggttctgtaatgtaaagagcaaaaccacggcaatcctacgagccatagaccagagctagtactgaacaatgctcactacacgccttggtcatcgtgttggaaggatgatccagtcgactcttccctcaagatcccaatttccgcgggcgccgtgttgtgaccttccacaaccagcgagactacatatttttccgccatcacaggtacatcttcgagacaaaagaaaagaaggttgcttcgaaggaaaaga

SEQ ID NO: 273016 - DNA, 460 bp, Zea mays
gcgactgctcccgctccacaatttcaacctccagatctggccactcccactctcacacgcccagtctcctaaaccctacacatctctctcggccacggtaattgccatcgccatggccgggaggcgcccggcaccggcggccatcctccttctcctcgccgcggcattcgcccccatctcctccgccgttcgcccagtctccgacgcgcacagatccgctgccgtggagcttttcgccccctccgctgacggatccttcggcgatttggagagtacgtatgaggcggtgaggactttccagatactcgggctggagaactataagagtctgtctgggaaggcgtgcaagtttgccgcggagaacctggcttccaccgattccaccgcgaaagatctgttccacgcagtcccgatcagtggcgcgctgggatgtggcgttgatgccggcgtgtatgatggt

SEQ ID NO: 273017 - DNA, 451 bp, Zea mays
acaagaagcaagtgatagtcaattggtcgtcaacgtgtgacaagtgttgacatcccgttactaatatgaccgtccctccacgaagtgggtctaatttcgacgcactttgtatgtgcttcatgcatttcattctcatatctctataatctcttataaagcaccaattttatttctcccaccgtcaccctttttgcaaaaaaggttcttatacttttttctaaacaatccgcgatttataagtcagatctgatcctgcggactccacccgaccccacacatctcgcaaacggtagttttgattgaccctgcctgtacccttcctccttatcgcctcgcatcccaactcgacagggtgacagtcgggcctacgtcaggtgttccaggcctacattttcaggccttatccagcgatgaacaccctatgtacgccccacctcgtctcctccgttcg

SEQ ID NO: 273018 - DNA, 634 bp, Zea mays
aacaacactcgcgagtcgcgagcacagatcgaacaggcaggcggcctctgtcctctgatctgtcgccattgtctcgttgtgttgtcccggaggagcagcagcaggagcaggagcgatcaggccaacgctttggactcctggacctaccccgatggcgccagcctcctctccgatgagacagtaatccagcgagcgcgagtgagaggcaaccagcaaccatgaggccagacacggcggcctccgcctctccgactccgaagaagaaacccgacagtaaagccgcgctggacctcgcgtcgtggagcttcaacgtcaccacgtccgtcgggctcatcatggtcaacaaggctctaatggcgacgtacgggttcacgttcgccacgacgttaacggggctgcatttcgcgaccaccaccgtgatgaccctcgtgttccggtgggtcggcctgagccagccgtcgcagcttccgttaccggacctagccaagttcgtggtgttctccaacctgtccatcgtggggatgaacgtcagcctgatgtggaactccgtcggcttctaccaggtagccaagctgtgcatgatcccggcgtcgtgcctcctggaggtggtcttggaccgcgtgcactactcccg

SEQ ID NO: 273019 - DNA, 596 bp, Zea mays
gcgatgcacatacttttggtctcatcaaagtccgtgaaccctatccttttggggtggacccaagctggcgtggaagtcggtctgagctaccctttctaaattcattaaagatgaagatgtctatactaatgggtgttgcccagatgaacctggggattgtattaagttattttgatgcacgatatcatggaaatgctcttgacataaggtatcaattcataccacagatgattttcctcaatagcctttttggttacttagcactcctgattcttatcaagtggtgcacgggctctcaagctgatctttatcatgtgatgatatatatgttccttgatcctgctggagatcttggagaaaatcaactgttctggggccaaaaggaacttcagatattgttgttacttctggctttgatcgctgtcaggatgctcttcccaaaaccttttatctgaaaaacttcataggagagattcaggtcacacttatcgttctaggacatctgaaatggatccagattctgacctgattcgccgagcacgtatgatgatttcaattcagcgagttttgtgcatcaatgatacatccattgagtt

SEQ ID NO: 273020 - DNA, 848 bp, Zea mays
tccgaagtctcggacttttttctatcctagctcctgggggcggacagggggtacctcgccaccagattgatgggaacgtttggctacgtggcgccagagtacgctagcaccggcatgctgtacgagaggagcgacctgtacagctgcgggatcctcatcatggagatcatctccggccgaagccccgtcgactacgccaggcctgccggagaggtaaaccttgtagagtggctcaagaacaaggtgaccaacagggactacgaggccatcgtggacccgaagctgccggagaagccgtcctccaaggctctcaagaaggcgctcctggtcgcgctgaggtgcgtggatcccgactcgcagaaacggcccaagatggggcacgtaatccacatgctcgaagtcgacgacttcccgtatcgagaggaccgtcgaactcttcggccgggcaacggcagccccctggagaaggcgaggaatccggcggcggggtcatgcgacggcagcagctgctacgggggcgacacgaccaccgcgagcacgccgtccagactagtgcaggacatgtagtagtgatgtgtttgtagccagctgctgctggccttctgagctctgcctgcgggctgcggggcaacatggagatggacatgctgcaactctgctccgtcgttaattaaaggttcccttcctaggtgttgattttggactcaacagtgacttgacgtaagctttgccgcccgatggccaactgtttgtatagggaactgctgctcttcatctcaggccctaagtttgactgttctttgattcgcgtcatgatgtaaaaataaaagcgtgcgtctgtattggtc

SEQ ID NO: 273021 - DNA, 474 bp, Zea mays
cccacgcgtccgcccacgcgtccgcccacgcgtccgcccacgcgtccgcggaattctagaccgcccaagccagcttacccctggcgccatacatacgtcttaccaattgtatccatcacaccgacctaccgcaccccctcctttacccctccaaatccatttttgtttgtttgtttgtttgtttgttgttgttgttgttaagttatcctcctctgtgtagcatctcccgcgcgctagggctcgagtaggatggctgctatgttgtaccgtcggctgtatatatgatttagtgacacatgtgaagcctgccatgtaatctgatagcgctggctccctccctccctcccctccgatccactaaagctattgtataatttgtatttgcttggctaaagcccgtaggaatttgcgtattggtaacaagacgatatgatggtgtacctgttgattatgtcaggatctattgacagcttt

SEQ ID NO: 273022 - DNA, 301 bp, Zea mays
aaacagacaatctgcgagcacttcagaaatccagtccaacaagagcggatactcgaagaaaaaaaagtggtatctgcgggtgcttaatcagctgccgaaatcaagccgaaaaacctcagacagatcatgaagacatcaaactatcaaagtgagatctttctcgcaggaagccgcatcgtgtcctcggtccgccgtctccagtgcacggacggcgccggagtcagcccgctgctgaggagggtcgcctcctccgactccggctgtctgagatggtgctggcgagcaccgacgagcggggcaa

SEQ ID NO: 273023 - DNA, 1252 bp, Zea mays
aacccgggatagaacccgggggggcgggaggactccaagggggggggttggagacaggcctcctaccgttaccaactcagcagcaaataagcgcaggcggaagaaccagtacaggggaatccggcggcggccctggggcaagtgggcggccgagatcagagaccccagcaagggcgtccgcgtctggctcggcacatacagcaccgccgaggaggcggccagggcgtacgacgccgaggctcgcaggatacgcgggaagaaagccaaggtcaatttccgggacgaagcggcggcggcagcaggtgctcagaagccaccagccgcaactactccaactgcttgtgccagcgcagcgaggctagctcctccacctccaccgccgaagttccgtgctgacgaggttttcgggaacatggacggtggcagcaacgatctgttcgcgattatgctcgcgttcagtgacagtaggggtaaggtcgttcgtgtggagccaggtgagggcgccgccggtttcctccccgcagatctgttgcccggcagtaagaggtctgcggctaacatgctgctgctctccgaccagagcagcgactcgtatggctcttgtgacttggggtgggagtgggctgggacgatgacaccatgacctcagactacgcctcagtctttgctccagctgctcgcagtaacgttgtgccagcatggtacacgcaaggtggaccggtgtcgaagagaacgaggagcagctacggctacgggccggccatgccgggcggctttgaccctgagacgaactaccagtaccagccgttgccttatgtcgtcgagagcagcccgtcagacggcgcgtcgacggacgacatggactgccttcaaatgatgcgggctggtgatgttccacaggatggggcgagcagtggtggtggtggcggcgacggcggcgatatctggagccttgacgagctgctcatggccgctggcgcttactgagaaaagctatgtgcatcgcattcgcatgtgctagacggctacttgctgtgccgtgaatggagtgtttctcagcttcgttttgcttttaattttttgttatgccaggtctcctgcttgtgcttgtggtgatgatgcaggagagccatggtgggtactatgcttttgctgccagtggaactgtaagacaatgtttatatagtatctatactatgttggtgcgtcgatggttcatggttaaaaaaaaaagaagaaaaaaagggcggcc

SEQ ID NO: 273024 - DNA, 534 bp, Zea mays
agagctctgtagaagagaggggaggaaggaccgaggaccaaccggagccccactcggccgccgcctctcacctccaccgactgcctgcgtcccaccgctcctgctgccgcccgttgctctcgccattgaagccctcgccgcctccgcccgcttgcccgccctcccgtcggctgccttccggatgagaagcggcgcaacctgggcggtggaagcgtggtcggactgagccttcgtgggggttagcgccgagaaggatcctggagattaagcgcatgggttccttggaggcccggtacaggccgaccggggcagctgaggacacagctaagagaaggacccagaaaagcaaaagtttcaaagaggttgagaaatttgatgtttttgtgctggagaaaagttctggttgcaaattccggtcggtgcaacttttgctcttcgctatcatgtctgctgcgtttctaacactcctatacacaccatctgtgtatgaacatcagttgcagtcaagttctcggcttgtcaatgggtggatat

SEQ ID NO: 273025 - DNA, 446 bp, Zea mays
gttaaaatgtgttagaggttaacaagaatccgggctggatatgtccagtttgccgcggcatctgtaattgcagtctatgcagaactaagaaaggatggttccctactgggtctgcgtataggaaggcgatcggacttgggtacaaatctgtggcacactttctaattgcaacacatcgagcatcatcagtcaattcaagctcagtcgacaataacaagctgccgtctgctaaatctgagacctcgtgcatttctgaccatgccaatgagagcccagaggatggagaaacgaccagcaaagctaagcagaacaaagcaactcgccgccgagtgaggaagagttctgatggcgacaacgatagcagaagtgggtccgcggtgacatctgactgccaggatgatcaagccaacaaggatgctgggtgtgtgactccgtcgactaagcca

SEQ ID NO: 273026 - DNA, 623 bp, Zea mays
gcgagctgaagcatccaggctctggaatcatcgtcaggatgtctgtgccagcatcagcccaggtgcctcacaccatacgacctgctgggagctgctgcttcaggtcgtcgcatcaactatctgcgcagaatctgggccgacatcgcaggtggcgggggaccggaaagaagaagatcctttccacccgtggcgtgcttgagtccaggaacggtgcgcatcctggtggccttacgaagagaaggaaggtcgtggagcacatcatcctgctcagagccaagcccaacatctcagacgctgaagagaaagacatgctggactacctatacacatcgcagtaccagatgcgagggatactcgcggtctcgctaggccgcatcgaggaccccaacagcgacaacttcacgcacgctgtgttcatgcgtttccagcagaagcaagacatcgcggagttccagagtaacgcgtactactccaaagttgtcgacgagcacgtaaagcccgtttcctatggctcggtttctgtagatttcgagtccgaggtggaagacgacattatacctctctttcgcaggggagaggattttaactacggcgtcgagtttatgctgctggtgtctttcttg

SEQ ID NO: 273027 - DNA, 395 bp, Zea mays
gcgagctgaagcatccaggctctggaatcatcgtcaggatgtctgtgccagcatcagcccaggtgcctcacaccatacgacctgctgggagctgctgcgtcaggtcgtcgcatcaactatctgcgcagaatctgggccgacgtgagttcccgatctcagctttgagtggccttctttttgaaagtgagcacagggtcttccaaagcccgtgtgtgttcgtgtagatcgcaggtggcgggggaccggaaagaagaagatcctttccacccgtggcgtgcttgagtccagaaacggcgcacatcctggtggccttatgaagagaagggcgggtcgggagcacattattcttcttagagccaagcccaacatctcaggcgctgtagataaagacatgc

SEQ ID NO: 273028 - DNA, 436 bp, Zea mays
tacatatttaacacatatttttatggaaagcttgaagaagcattgtgtcggcaggatgagttctcaaagttgagaagatggtggaaaggtgtcaatatattaaataaagcatacataatcttgccgatccatgggatggcgcactggagcttggtaatcatttgcattcctgcaaaagagagtatttcaggaccaatcatacttcatctggactccctagcgatgcatcccagtactaagatcttgaacacagttgagagataccttgaaaaagaatggtgccaattatcatcatgggaggattttaaaaataatatacataagcaaagcgttgaggttccacgacagaataatgagtatgactgtggcatcttcatgctttattatattgaacggtttataaaagaggctccagaaagattcacaattgataaac

SEQ ID NO: 273029 - DNA, 1375 bp, Zea mays
  unsure (1)..(1375): unsure at all n locations
cccacgcgttcgttatcctgctcagtgctcacttccacgcgggccccagcccgccacgagtccccgctcccacctgctcctcgccgccgttagcgcgccccgagccccgacagcctttctccttctagggtttctctctgtttcgtcctcatcgaatcggagtttcgcatggagtcatcgcggtctcggaagcggacgcgccaggcgcatgactgtgccgccgcgccgccaccagagcgagaagtggtagcgaggggtggcgcgtcgccaccatggagggaggatgaccgtgatggacacttcgtattcgaccttggcgagaacttgacccgccgatataaaatcttgagcaaaatgggagaaggtacatttgggcgtgttttggaatgctgggaccgtgaaacacgtgaatatgttgccataaaagttgttcgcagtatccgcaagtaccgtgatgctgcaatgattgagatagatgtgctcaatcgccttgcagaaaatgagaagtacagatctctttgtgttcaaatacagagatggtttgactatcgtaatcatatatgcattgtttttgagaagcttgggccaagcttgtatgattttctaaagagaaatagataccgacctttccctgtggaacttgtgcgggagtttggacggcaactgttggaatctgtagcatatatgcatgacttgaggcttatccacactgatctgaagccagaaaacatactacttgtgtcttctgagtatataaaagttccaagtacaaagaagaattcgcaaggtgaaatgcatttcaagtgcttgccgaagtccagtgccataaagctgatagattttggcagtaccgcctttgataatcggaaccataactcgattgtttctacgaggcattatagggcacctgaaataatattaggtttaggctggagttttccatgtgatatttggagtgttggctgtattcttgttgagctatgctctggggaagcattgtttcagacacacgagaatctggaacacctagcaatgatggagagggttttgggacctctaccagaggatatgatacggaaagcaagctcttcagctcagaaattttttaggagagcaacacgattaaattggcctgaaggtgctgtttcaagagaaagcatcagagctgtgaggaaactggatcgactaaaggacttggtatcgaggaacgctgaccattcaaaggtggcactggtggacttgctatacggtctcctacggttcgagcgctccganagcctgacagcagaagaagctctggaccatccattcttcaggaacccaacatgacttgttgagcaggcttgactcatgtaactctactgaaggtggtggt

SEQ ID NO: 273030 - DNA, 457 bp, Zea mays
cccacgcgtccgtgcacacccaacgttgtctgaagttctggatgaactcttcaaggctgccaaggttaacacagctggttcgcattctatgaatgagccagttgcggtgtagagaggagccatagttgaaacaatctatctgctgcagccccacaccccagttatattgcctttagtacttaactagcctgctactcagaaaactgattttgtagccatttgcggacattttcgttatgagattcaggattagtgccagcactatctatttcatgagaaaatagaaatccaatgatctgtcccatgtatggaaaaatgtaaattttgtagtccttgtagagtaaatgtagtgcctttacgtggcaaaactcgctcttatggatctatgattacttcaattcataaagatgggcttgtttggtcagcattaaaaaaaaaaaaaaaaaaaaaagggcgg

SEQ ID NO: 273031 - DNA, 690 bp, Zea mays
cgcttctctcgctagcgggttcggcagtagaaaccctaaaaaaaaagacaccgccctccccttcgctagcggaaccgccctcccctcgccggggtaggggtttcgggggtagacgcccgccatggacgcgttccggaaacagctggacgtgctcatgggcgccaaccgcaacggcgacgtcgaggaggtgagccgcaactactacgaccgcgacgtctgccgcctcttcctcgccggtctctgcccacacgacctctttcagctcacgaaaatggatctcggtccttgttctaagattcactctcttcaactgcggaaagattatgaagaagcgaaagcaaagggaacagaaaattttgatagagaactcgaggatatgatagaaaggctcattgtggagtgtgacaggaaaattcagagggccctaaaacggcttgcagatgatgatgccaatgctgctattgcgatatcggtctctgaggttactctgacggatgacatactgcagctgtcaaaacagataaaggagaaaatggcagaagttgatgcctttgattttgaagggagaactgatgataaaataaaggcccaggaagtagtggaagaactcagaactaaaagagctgatatgcaggctaccctcttgcttgatgcttttaacaaggacagagcttcattaactcagcctgg

SEQ ID NO: 273032 - DNA, 498 bp, Zea mays
cctctcctccccatccgcggagtgtaaatcgtctctcgctagcgcgttcagtagaaaccctaaaccccgcctcctcccctcgccggggtaggggctacgggtgtcaacgcccgccatggacgcattccggaagcaactggatgtgctcatgggcgctaaccgcaacggcgacgtcgaggaggtgagccgcaactactacgaccgcgacgtctgccggctcttcctcgccggcctttgcccccacgacctcttccagctcacgaaaatggatcttggtccttgttctaagattcactcgcttcaactgcggaaagattatgaagaagcgaaagcaaagggaacagagaattttgacagagaactcgaggatatgatagaaaggctcattgtggagtgcgacaggaaaattcagagggccctgaaacgacttgcggatgacgatgccaaggctgctattgcgatatccgtctcggagggtactctgacggatgacatact

SEQ ID NO: 273033 - DNA, 475 bp, Zea mays
cccacgcgtccgcccacgcgtccgcccacgcgtccgcccacgcgtacgcccacgcgtccgcgacgctggctaagatctacttcgtcatggagctcggccgcggcggcgagctcttctcccgcgtctccaagggccgactcagggaggacaccgcgcgccgctacttccagcagctcgtctccgccgtggggttctgccacgcccgcggcgtcttccaccgcgacctgaagcccgagaatctactcgtcgacgagcaggggaacctcaaggtatcggattttgggctctccggcggcgccgagcagttccgtcccgacggcctgctccacaccttctgggggacgccgggctatgtggcccccgaagtgctcggccggcgcgggtaccaccgcgccaaggcaaacgtgtgggcgtgcggtgtcattctctttgggctcaagggcggatatctcccttttcatgacaaaaacatcat

SEQ ID NO: 273034 - DNA, 1327 bp, Zea mays
cagacgcgtgggtgcgagctcgacctgccgtccgggggccacctcacccacgggtactacacggcgagtgaccagaagatttctgcaacctccatctacttccagagcctgccctataaggtgagctccgacaccgggtacgtcgactacgataagctggaggaaaaggccatggatttccgccccaagcttatcatctgtggcggtagtgcatgccctcgggagtgggattacgccaggttcagggccatcgcagacaagtgcggggccatgttgctctgtgacatggctcatatcagtggtctcgttgctgcgcaggaggctttgaatccttttgaattctctgatgtggttaccactacgacccacaaaagtcttcgagggccaaggtctggtatgattttctacaggaagggcccaaagcctccaaaaaaaggccagcctgagggtgctctgtatgactacgaggacaagatcaactttgctgtgttcccgtcactccagggggggcctcacaatcaccaaattgctgctctagctgtagccttgaaacaggccatgtcacctggattcatggcctatatccagcaggtcaagggaaacacagtttcccttggtaaccatttgatgagtaagggctacaagttggttactgatggaacagagaaccaccttgttctctgggatctgcgccctcttggcttgactggcaataaagttgagatgctatgtgacctatgcaacattacactgaacaaaaatgctgtctttggtgacagcagtgcattatcacctggtggtgtgcgcattggtacacctgctatgacctcaaggggtttggttgagaaggacttcgtgcagattgccgagtaccttcaccgagctgtgaccatctgcttgagcatccaggcggagcatggcaagattctcaaggacttcaagaagggcttggtgcaaaacaaggacatagagaacctgagggcggaggtcgagaagttcgccacttcatttgacatgcctggcttcagggtgtctgacatgaagtacacagactagactgctgctgacttgggtgcaaaccgttgctcctgttacagtaacactggcaggctggtgcaatgcaaaccgttcttctgttacggtaatattaacgcctctgaaatgtcacgtgaatggtggtaaacctgaatttcacacgactagagggatggtttactttctattcagtgctctgccattctgttggcctgctattccgtcggtctattttgttggaactgactaataatactgtttaaagaatcatcattgagaaagaaaatggcat

SEQ ID NO: 273035 - DNA, 892 bp, Zea mays
  unsure (1)..(892): unsure at all n locations
cccacgcgtccgcccacgcgtccgggagagcagcggcttagcctagcactgctgcagcttgcttgctttgctttgcttctccagtatgcttcttggccaggcctcagagcagagctttggcttggctagtcgtcgtccgcggatagtctccgctgcaccgtgtgcgtgcaagcaaggcaaggcaaccagccagccgcggcgacgaccgatcgtcaacaagctcgatcgccttggccggcggccgggcgggccaccgcaagccgcgagcgatggaggagcagctgggcccggtggcggtgacgcacctgctgcagcacacgctgcggagcctctgcaccggcgacgccccgcagtgggtctacgccgtcttctggcgcatcctgccccggaactacccgccccccaaatgggatctccctggcgccgcgtacgacaggacccgagggaacaggaggaactggatcctggcatgggaggacgggttctgcaacttcgcggcggccagcagctctgccgccgcgtccgcgtgcggccaggagggggcagcggcagctgcggcggttgcatatgccggggactgtgaggcagctgtgcaggatgcggtgaagcaccagcaccagcaggcgcagggcctgcagcctgagctgttcttcaagatgtcccatgacatctacaactacngcgaaggtctgatagggaaagtggcggcagaccacagccacaagtgggtgttcaaggagccccaggagcacgagacgagcagcctcatctgctgctggagcaaccctgcagactctcatccgaggacgtgggaggcgcagttccagtgcggcatccagaccatcgccctgatcgctgtcagggagggcgtcgtgcagctcggctccatgaa

SEQ ID NO: 273036 - DNA, 596 bp, Zea mays
  unsure (1)..(596): unsure at all n locations
cgcgcgtcgcagcgccagccactcgattagtggagtccaccaaccaagcacgcgtccctccccgtcccagatcccatcccgcggcagccggtcagtccgatccatctccagtacccagcccgtcacccgccttccccgttcgctctcgtcggcgcgcgatggagggtctcatcaaggggttggtccacgtggccatcgacgccgtggaggacgccgtgagggagagggaccacggccgcgccgacgacgacgaggtgccgaggaggagggcggcccaaagctccgatccagatgacgacggggaggaggaacgcgacgaacgatcgcggtcgacgtgggccgaggtcgtctccgagcagaagggcagcgatccggacgagcgccgggaccatcgaagctcggggcgggacaatcgccatgagaggagggatgacgagggttggaaaagggccgatggtcggaaccagcagcagcaccacgcaggccggcagaaccagtgcgacgtggaggaaaggtgggatggcagtggcagccggcggcgtcacgaacagcagcaggcacaaggatacgggaatcagcatcanngagaagatagg

SEQ ID NO: 273037 - DNA, 620 bp, Zea mays
ccacgcgtccgtggaaccgcgcgtccgtcgcccgcagcctgctgctggagtgcgagtgcgggaaccaccgccccggcgccggtgagaacacgctgctccgggccgggtacggcggctgggtgctctacgcggcggcggcggccggggacgccgcgttcgtgcgggagctgctggagagggacccgctgctcgtgttcggcgagggcgagtacggcgtcacggacatgttctacgcggcggccaggggcgggagcgcggacgtgttcaggctgctgctcgaccacgccatgtcgccggggtgctcgacgagttgccggaacggcgaagccagcgccaggcgcagctccgtgttccggcttgagatgatgagccgggccgtccacgccgcggcgaggggcgggagcgtggagatgctcagggagctgctcgacgagtccagcgtgtcgacgtatctcgacatccgtggatccaccgtgctgcatgccgccgctgggagagggcagctgcaggttgtcaagtaccttgtggcctctttcgacataatcaattcgactgataatcacgggaacacagcgctgcatgtagcggcctaccgagggcaccaacctgtcgtggaagcc

SEQ ID NO: 273038 - DNA, 579 bp, Zea mays
gcgagatcccggccaggacgcgggtgttggtgaacgccaaggccatcgggcaggaccccgacgcgtggggcgccgacgcggcgcggttcgtgccggagcggcacgaggagatcgcggacctcagcgaccacaagccgtggcacgacagcttctcgctggtgccgttcggggtcggccggaggagctgccccggcgtgcacttcgccacctccgtggtcgagctgctgctggccaacctgctgttttgcttcgactggcgcgcgccgcacggcggggtcgttgatctggagcaggagaccgggctcaccgtgcacaggaagcatcccctcgtgctcgtagctcgaagggtacgcgtgcaggcgccaagcgatgatgagctcgacggacgtctctccgccatgcattccgttcctagctagtttatttttaacgtaactaaaccggtggagtataatatacttgcatgtccatgtgatccaagtgacgtgtatatatatatgctactatctctgcgtttgtttgttctgttgtgaaatgaatatgttatcttcgattggacggaacgatcgatttgctaaa

SEQ ID NO: 273039 - DNA, 972 bp, Zea mays
atgccttatctcaccatgtatataatcttggtggagggaatgatgttcatcttataaggaagatcttagacccaaagtacttggatcgtgctgaagatacttacagagacatgcaacttaccatccaaaggcatggaacatgggcttctgcttgggtcagtgaaagtggcggtgtattcaacaatggtggtcaactggtgtcaaatacattcatcaacagtatctggtatctagatcagcttgggatggcatctaagtacaacacataagtgttctgcagacagactctcatcggtggcaactatggactgctcgacacgcaaacttttctgccaaatcctgattactacagcgctctactatggcatcggcttatgggcaatggagttctttcagttgatataaacgcaccgcgtcaaatacgcgcttatgctcattgtaggaaacaacagcaaggcatcacgattctgttgatcaacctgagcaacactactggatacaacgtcactctccagaacgacatcaacgtcagcttgggcaaaagacctgaccttgagaagcgcagctctttcacgcacaggctcaggaaagcagtctcatggctggggaggaaaccagcaagcaacaccaggaggcgggaggagtaccatctgaccgccaaggacggcgatctccagagcaaaacgatgctgctcaacggggccccgttggaacttggagacgccggcagcattccagctatggatccagtgctcgtcgccgttgattcgccggtgcagatagcaccaacatccatcgccttggtagtcctacccaagtttgaggccaaggcttgttcttgacacatgagctcttgaaataagttttttttttttttgctccagtgtgccttgaaatgttccataggcctatttcgtgaaagaaatcatacaacgtgggacaaaaacggcaaagcgttgttgtgtgagaacc

SEQ ID NO: 273040 - DNA, 330 bp, Zea mays
cctcccaccaaatttcaatgacgccgtcgaaaccccctggcaagcgccgccgttcggctccacctccgcgcttgccctcacccgctccacccgtggcgctctcgccgccgggcttcgtcgccgaccgcgccgaggccgcggcgcgcgtggagcgcctcctgcggtaccagttctgcgaccgcgcccttctagaggaggccctgacccaccaatccttctcggatggcgctctctcttaccagcggctcgagttcgtcggcgacgccgctctcggcctagccttctctaacttcctatacctcaccaaccccaccctcgggcccggcgcgc

SEQ ID NO: 273041 - DNA, 670 bp, Zea mays
gagccgcgaccccgggcaggtttccccacggacggggcatccgaccgcgacgacctcccgccgccgccgcgaccaatctctggccccccactaccgccgcgacgtccagctttgttctactccaaggtccagctctggcttgccgtcctccgcccgtactccacgctactggatctctagcttgctcgtacgggatctctgtactccacgctactggcttgagccatggcaaagaatgtttctagggcaccttggaacactgtgtatgagaaaggtctggttgatgtgctccttgaacataaggacatcccaaagttcaaaagtcaaaatggttggactgctgagggatggaacaatttcacaaactagttcaatgagaggtatcctctttgcccattactccaaacagcaaatgcaagacaaagataaggagcttaaatctcattacaaggcactaagagattcaaggaaagaaagtggggtgggctggaatgattccctatgtatgatagtggctgagccagaactttgggaaaagctcatacttgctcacccaaaggtagcgaagtaccaaaagaagccatttccattgtactactctttggaagcccttcacgaaggtagtgtggccacaggagatttgaaatttcacatacactcagcaaatgcc

SEQ ID NO: 273042 - DNA, 320 bp, Zea mays
tcgacgtcacagacaccaccgcggaaggcagcacagcacaaaagcaagaacctcagcagcaggagccgcggctccgcctccaaccatccacacatgggcatggcgatggcgttaacggacggcgaggtcggtgctctcatcaaggtctccgcggctgtttgggtggcgatgtcctacgcccgcctcgccgcggcgcgtctccgcccaggcgcgcttcgcctcctggcgctgcttgcccgtcgtcgcgctcctctgcgcgatccccttcgccttctcgacgtccacgttccgcggcacctcgggcttcttcctcgcctggc

SEQ ID NO: 273043 - DNA, 419 bp, Zea mays
  unsure (1)..(419): unsure at all n locations
cccacgcgtccgctctttacaggagcgctttttcactgaaagtggaacgtgttgcaagttcttttagtacactatttactatcactttgttgatttgctaggtgataacaaagttctgctctgaaagaattgccaagtatgcttttgagtatgcataccttaacaatcgaaagaaagtgacagcagtgcataaagccaacatcatgaagcttgctgatggtttgttcttggagtcttgccgtgaggttgcaaagaagtaccctggaattcaatataatgaaatcattgtggacaactgttgcatgcagcttgttgcaaagcctgaacaatttgatgttatggtcaccccaaatctttatggcaatctggtggctaatgtanctgcaagtattgctggaggcactggtgtcatgcctgga

SEQ ID NO: 273044 - DNA, 400 bp, Zea mays
ctcagaaaaggagtacttcaagaaccactctgcagccattaaatcatacatatcagagatggatatagatttgacagtggacatggttcctcccaaggatccttacattcaggttcgggtgctggaggacattggtgaagtatcgctcggtgaccattctgtgtcattgaccaagaactcactccatttcctaaggcgcacagacgctgaacagtttatatcacagggtcttatggaagaatttctggagtagggatcacatgtatgaatgtatgatggtacaataggatggtgcactgccctcgttctccccagcgctgctgcctgatgccctatttgcaacaatgaaaaggtacatcatgtcatgaaacgcgttctgaaccaaagagcttcttaacta

SEQ ID NO: 273045 - DNA, 863 bp, Zea mays
  unsure (1)..(863): unsure at all n locations
aatacatatatgttaaataaaccagagtgcatttttgattttgatatcgaagggaaagtgcgccctgttacttcagaaggtgaaacggcgaaatgcaaaaaggttgtctgtgatccttcttacttgcctagcaaggtaaggaagattggaaaagttgcacgtgcaatcgctattatgagccacccaattccaaacacaaatgagtcccactcgattcagattattttgccgcagaagcaacttgggcgcaagtcagacatgtatgttttctgttgctcatatacacataatgttgcgccaaaagggaagttcattgcatttgtgtctgcggaagctgagaccgataatccacagtccgaactaaagcctggaattgatctacttggtcaagtagatgaactgttttttgatatgtatgacagatacgaacctgtcaatgaaccatctcttgataattgctttgcttcaatgagttatgatgctactacacactttgagacaactgtgacagatgttctcagtatgtacacagcaattactggaaagaccgttgatctcagtgtggacctgagcgctgccagcgcagctgaagaatactagagattttcctattagagataccatactctaaagaagaacggtgttaacacaggccctgcctggtggcttgccaggtttagatctatgctgcagctgcagccaattaaacggacagaacatatcaccctatagcatttacatggcgtttaaacacaagaccgtttaggatgatggtggtggttcctttgttccttgcattattgatcggatggttaacttttaactgtgcccacgtttgctacaaaaaaaaaaaaanntattta

SEQ ID NO: 273046 - DNA, 493 bp, Zea mays
cgtcagtccgtcacccctcgcgcccgctccccccgtccccataccatgcccgacctccacccgccggagcaccaagtcgccggccaccgcgcctccgccagcaagctgggcccgctcatcgacggctccggcctcttctacaagccgctccaggccggcgaccgtggggagcacgaggtcgccttctatgaggcgttctccgcccacgccgccgtcccggcccgcatccgagacaccttcttcccccggttccacggcacgcgactcctccccaccgaggcgcagcccggggagccgcatcctcacctcgtcctcgacgacctcctcgcggggtttcaggcgccctgcgtcgcagacatcaagatcggcgccatcacgtggccaccgagttcgccggagccctacatcgccaagtgcctcgccaaggaccgcgggaccacgagcgttctgctcggattccgcgtctccggcgtccgagtcgtcggccccgaag

SEQ ID NO: 273047 - DNA, 569 bp, Zea mays
  unsure (1)..(569): unsure at all n locations
tcntacttgctcagctcagaggagaccttgggccggtccttgggagttccagtgcttctgaatttcggagggaatatgatggcgcctcccttcagatgaggatggcatattgccctgctgcccactttttcctttttcttgtgcagtggacagactgcaaccttgctggtgcacttgggctgttgaggattctaatttataaggtttacgctgatgggacaaccaccatgtgtactcatgaaagaaaagcaagcattagggaattttatgctgtcatatttccctccttgatgcaattacatgaaagaatcaatgaagtggaggatagaaaacagaaagcaatatgtctagagaggtacagaagacgggatgaggatccgaaaactgtggtatcagagattgatgataatatagaggaggaatgtggcatatgcatggaaataaatgtcaaagttgttcttccaacctgtagccacgctatgtgcattaaatgctatcgtgaatggaggtcaaggtcccagtcctgtccgttctgccgcgacagcctcaagagggtaaactctgctgac

SEQ ID NO: 273048 - DNA, 628 bp, Zea mays
cccacgcgtccgcccacgcgtccggaaagctagatgagggggcagagctttaaatggccgcgaactaaccaccgccactagagtctgcagcccgcccgcccgcccgcccgtgtgccgtttaccggagcacaacacaacgcggcccgctcacggcgtggagtggattgggccgacgccgatcgagagcagaggagaggagcgcggtcgggtagggtttgtctgggtgaggttttgagcgagagcgcagggcgagggaaggatgaggaggaggaggactggctcctggaggaggaggccggccggggcttggatggtcgcggagcgctcccgtaggtggtgtccatgggaaggtcgttcagggactcgctcaaggtgctcgaggccgacatccagcacgccaactccattgcttctgaatttcggagggaatatgatggcgccttccttcaaatgaggatggcatattgccctgctgcccactttttcctttttcttgtgcagtggacagactgcaaccttgctggtgcacttgggctgttgaggattctaatttataaggtttacgctgatgggacaaccaccatgtgtactcatgaaagcaaagcaagcattagggaattttatgctg

SEQ ID NO: 273049 - DNA, 538 bp, Zea mays
  unsure (1)..(538): unsure at all n locations
cccacgcgtccgaagagatcaagatccaggcttgggaggaccatcagaaagcccagatagaagctgagatgaggaaaatcgaggtcgaggtggagcggatgcgtgcccgcgcgcaagacaagctgatgaccaagctcgcgtcggcgaggcacagcgcagacgagaagcgtgccacggcggagctgaaacggaaccgcgcagccgcgaggaccgctgagcaggcagagcacatcaggaggaccggccgggtgccgccgtcgtttggctgctggaactggtgctcatgaagtgcccatggaagatgagtcgcccgttgagaatgagtcgcttgtaagctgttgtaactatatatatatatatataccacccgtatgtaaggtgtgagatccatgcgtcctgtgctgtggtggttactgtgtaagtgtcacagatgtaccgaattcaaggccgagcttggattcctagtgcacatatgtgataaccttccccccaaaaaaaaaaacaaaaaaaaaaaaaaaaaaaaaaaaaaaataaanaa

SEQ ID NO: 273050 - DNA, 467 bp, Zea mays
  unsure (1)..(467): unsure at all n locations
gccgcaacagcacctatcgaagccgcagcagcagggggaggcaggggaatcccaagcggaagggtctcctcgctctcctatctccgttatatcagctgcggcgggcggcgatgggggcgcggaggaggctgctggcggacacgccgccggagcatcgccataggcagggcgcgccggcgtcggactggagcgcggggtaccttaacgggtggctgtcgcagccgacgccgatcttcggcctccgcctctgggttctcgtcggcatcgccgtcggcgccgccatcgagctcgtgctcctgctcatcttcgtctgcctctcccaccgccgtcgacgccgcggcggtgacctgctcgccgccaacctctaccccgccgccgacaccaagctgctcaagcagcacctncagcaccaggccacgcccaccaaggacatccaggagattgttcgtcgccagcaggcggagacg

SEQ ID NO: 273051 - DNA, 875 bp, Zea mays
ccgggccggtattccttgttcttcccacgcgttcggtcactcgcccgcccacgcgtccggcttcacctcggttgctcagactcagtaggatgcaacaagaacatgcccaaccttcaatggttggtgcgaaggggtgtgagagatgcagggactggcaggagcactactactgggagcatatggatgcgagcaagatccgcttcttcaggcgcatgacaggagactttgctcatcgcattagcgtgccggagaagttcgcaaagaacttcaaggggcagatcaccgaagagtttcacctgaaatcacctagcggcgctgagacatggcacgtcggtgtagagaagcatggcgacaaactattcctcgtgtcagggtggggagaatttcgccagggctcatgagctggaggagaacgatctcctgctcttcgcttgctctggaaactcttcctttgaggtcctagtcttcggagcaagtggctgtgagaaagtgtcatccctgtttggcagtggacttggtccggacatgggcaaacaattcaatgatgtggtgcgtcgacatggtgtgcatcactctgtgactgtgagtgattctgaggataccgctgcgccgtcccagctggttcaatcccctcgtaacgccttgcctttgaaggaacccagtgggaaggctagaccaagtaaatatgaatcaccaaacgccagcaacttcatcgtcaggcatgtggcaactggcaaagagggcaccgatgatgagtatgctaactcaaactactactattcgttgtctgccaatcgactaggagacgaggaaaaggaagacataataggtttggctcccatccgaccgaacaatcctgtatttgtgacccttct

SEQ ID NO: 273052 - DNA, 411 bp, Zea mays
agcaccaccaaaccaaaccaaaccaataggcaattagctcgagcaaagaggcagcacaaacaagccaacaggcaacacccgcggcgacgcaagagggagaagcgagcgtgcagcggtcctcctctcgatccacatggccatggcggcagcggacggcaagagccggaggttcgcgctggcctgcggggtgctgagccagtacgtcaaggccgagcagcatcagcagcagcagatggcggccccgcgcgccccggccaccacgaccctgagcctgatgcccggcgcggacgttggcgccgacgagcagcaggagccggccgccgcgagggccgaggagatgcccgggcccgcccccgcccccgccgcggcgccgccgctcaccatcttctacggcggcagggtggtggtgtt

SEQ ID NO: 273053 - DNA, 607 bp, Zea mays
aacactttattttgcgatgagggggcacaacatctcagacctccagtcttcgagtcctcgttgtgcctctcttgatctcctcgcgtccatggctcctgtgcgaggtgccaagaagaggaagcggccggagaagcccgccccggcgcctactccagggttgccgctgccgccgctgccggacggtagcgattggtggggcgtcttctaccgaagggttgcaggacattccccttttccaagagaacaccagaacatggagtctgtcctgaagatgtcaagaagaaccttcgactacatctgctcacttgttaagaaggacctgacaacaaagacatacggtttcagaaacttcaggtttggtgacaagaaagtccttggggtggaggatcaggtggcggtggctctgatgaggctgactactggtgagtcgctgcagaacataggaatgtggtttggcatgaaccactctgccatctcgaacatcacatggcggttcatcgagtccgtggaggagcgtgccatctgccacctgaaatggccgagccctgaggagatggcgaccatcaagacaaggtttgacaaggtttacgggctcctaactgctgcg

SEQ ID NO: 273054 - DNA, 353 bp, Zea mays
catgtggctttcttttttttagcagaatgctatatacatatctattataatactggtcttatacagttatattttaagaatgcttaacagtcagtcctgaagatgtcaagaaggaccttcaacttacatctgcttacttgttaagaaggacctgacaacaaagacatacagtttcagaaacttcaggtttggtgactataaaatcctaactgtccaggtttgagaaggtttacgggctccctaacaagaaaatcctaacagatacaaggtctgagaaggtttacgggctccctaactgctgcggcgccattgacaccacccccatcgtcatgtgttcctcgtcgcagaccact

SEQ ID NO: 273055 - DNA, 257 bp, Zea mays
accgcaaccaccttcccaaatctcagtagtcgcctctcgtcgccttcgtctagcccggcccgttccaaaacctccgtagccgccgccgccaccccggcgaccgaagatgatctccccggacgcagcccgcaacgtagtcggcatcatcggcaatgtcatctccttcggcctcttcctgtccccagagctgacgttctggcggatctacaaggccaaggacgtggaggagttcaagtcggacccttacctggcgacgc

SEQ ID NO: 273056 - DNA, 391 bp, Zea mays
tacaaaggaatgcttcgaagtgccaccgaaagcaacccgtgtagtttctagagagaaaggcgtttccattgtcgttgatgcattcccatgattatgtttccaaaagggtagcattagttggagatgctgctcatactgtccaccccttagcccgccaaggtgtaaacttgggctttggtgatgctgctgctttagcaaaagttattgctgagggagtttcagtgggctcggatgttggggatctgactttgctacagcggtcatgagaaggagaggaaggctgcctatgtggcgatggcagcagtgctagatggttttcagaagatgtactctggtgatttggggccccttaatgtagtgagagctgctgcgtttcacggtgcccagttca

SEQ ID NO: 273057 - DNA, 771 bp, Zea mays
gcggcacactactacacttacaagcggccaaggcagtggttgtcttcagctggtcttggggctatgggatttggtttgccggctgctgctggtgcttctgtggcaaacccaggtgtcactgttgttgacatcgatggagatggtagctttctcatgaacgttcaggagctagctatgatccgaattgagaacctcccggtgaaggtctttgtgctaaacaaccagcacctggggatggtggtgcagtgggaggacaggttctataaggccaacagagcgcacacatacttgggaaacccagagaatgaaagtgagatatatccagatttcgtggcgatcgccaaagggttcaacattccagcagtccgtgtgacaaagaagagcgaagtccatgcagcaatcaagaagatgcttgaggctccagggccgtacctcttggatataatcgtcccgcaccaggagcatgtgttgcctatgatccctagtggtggggctttcaaggatatgatcctggatggtgatggcaggactgtgtattgatctaaagttcagcaagcactgcctacctgcctatctttgacatgcatgagctagtacaagtgtgatatgtttttatcaatgtgatggtactctgttatggtaatcttaagtagcatccaaccctgtgtgtagtatgttgttttcgtgttggcatatgtttcagaagccatcatgtaagtgccttttactacatataaataaggtaataagcattgttatgcaccggttctg

SEQ ID NO: 273058 - DNA, 417 bp, Zea mays
ctcgagactccagggccgtacctcttggatataatcgtcccacaccaggagcatgtgttgcctatgatccctagtggtggggctttcaaggatatgatcctggatggtgatggcaggactgtgtactgatctaaaatccagcaagcaactgatctaaaatccagcaagcaccgcctccctgctagtacaagggtgatatgtttttatctgtgtgatgttctcctgtattctatctttttttgtaggccgtcagctatctgttatggtaatcctatgtagcttccgaccttgtaattgtgtagtctgttgttttccttctggcatgtgtcataagagatcatttaagtgccttttgctacatataaataagataataagcactgctatgcagtggttctgaattggcttctgtaacac

SEQ ID NO: 273059 - DNA, 531 bp, Zea mays
tgaatgggtcaaaaaacacaaggccttgagccttccgttgtgctccgcgaggaaagcgaggaggcggccggctcggtgctgagtgctgagttgttgaccaacgggaagtccagtacccaagcggagccaccaaggaaaggaggaatggaagccaccggcgcagcctcgcagccctcggcgccgcagacaactcacccggcggtggcgccgctggccttcctactggggaagtggcgcggggaaggcgagggcagcttccccaccatatcctccttccggtacggcgaggagctcctcttctcgcatcatccctccaagccagtgatctcgtacacgccgaagacgtggaagacggcgtctggcgagccgatgcacgccgagagcgggtactggcggccctgccctgacggctccgtagacgtggtcatcgctcagagcactggcctcgccgaggtccagaagggttcatttgatgctgaaaagaaaacagtgacactccaaagcgaactcgtagggaatgcatcaaaggtg

SEQ ID NO: 273060 - DNA, 397 bp, Zea mays
cccacgcgtccgcttttctcgcactcgtactccctcctccgctccggctaggaggctgctccctccgccgctccgccttcgtcgcgcggccatcgtttccggctctgtccccggatatctcttcgccaccgcttcctgcgccgcggcgccgccacaaccgaaggcgacccagtcgcagtcgccttcaacactatggtgactcctcccactgtcgagcaggaggacgaggagatgctcgtgccccgccaggaggcggtcgacaccgacgcagcgcagcccatggaaggtactgtggtcgcacagactgaggtggtgagcacggcggagagccagcctgtggaagatccgcagacatcacggttcacttggacaattgagaacttcaccaggttcagtg

SEQ ID NO: 273061 - DNA, 890 bp, Zea mays
ttaattagagctcatttaccatccgcaggggctcccttccagacgcttccgctcttctctctctgcttccggcagaaatcaaggcagtattaggatggtgaccccgcgcctcttcgcgcgactctaccggcattgcgtcggcgcagcggctgcgtcatcagccgcggggcggcaccggggggccctggcagcggcggccgtggagcagttcgccggttcctccctgcctgtcggggttccaaattttttgaatcatcatttcagatactcaaccagcatttttcaaaagattggtttctcgtctgtttcaccacaacaaagtgatgatgatgttaatgagctgaaagaccacgaaagggccttagatggatcaagtgaagattgtccatctggaagtattgaaggccttgatctgtcgagagatgatttggtgaagctagttcgtgagaaggatgaattgttgaagtccaaagatggtgaaatcaaagatatgaaggataaggttttgcgcactatgcagaaatggaaaatatcattgctcggacaaaacgtgaatctgagaactccaaaaaatatgcagtacagaacttctctaagagcctgctagatgttgctgacaatttggctagggcatcatctgttgtcaaggaaagcttctcgaaaattgatacctcaaaagattctgctggagctgtcccactactgaaaaccctgctggagggtgtggacatgactgagaagcaacttgcagaggtcttcaagaagtttggagtcgaaaaatttgacccgctgaatgaggaatttgatcctaacaggcattgtgcagactttcacaattcctgatccttcagaaccaccgtggaccgttgcttctgtagtaaaggtgggct

SEQ ID NO: 273062 - DNA, 769 bp, Zea mays
gcatcccacgatcgaaacttcatgatccagctctccatcgtcttcttcataatgtgatgaagaaagtctttgctctattgttggccgagttacgaaagctgggggctaatgttatttttgcaaacttttctaagataatcatagatactggaaaagtagatttgtcatctgcacatgcatattgtgacagcttattaaggaccttgcagacgagggacctcttcgagtggatagaattggaaccattgcacttttggcattccttactgttcatggatcagtataactatggcggaattcaagctaaaacacaaaacgtagactcttcagatggtgataatgatattgatattgtctcaagctggaacatggcagaagatttgcccaaagatacacaggatcattttgtcttaatcgtatcagaattcctatatattccgtggaaattcatgaaggaacaagtagctgctcaagctaccataagggatgatacctcatgcactccatctgtaacaatcatggctgctgagaatcttgagggccaggtgatagaacacctccgtgacaagattagcaattactttgcagacaagcttctaagaactgtaagtgatatacttcaccatttcaaagggaaaagcaaacatgagtcagatgaacctgcaaaatctgatcctcacacgcataaaggcgatgctgcattggagttcattaagcatatctgtgcagttcttgctcttgatcaaaatgttcagcatgatattttgag

SEQ ID NO: 273063 - DNA, 464 bp, Zea mays
ctctgtgaacctctaatgcagataccttctatgtgggaaggacttcagaatatgcctcagatgaacttcaaccctggcgtggcagccgatagcggcaccaacaactctggctccatgaacatcgagcagtgagcttctgtatagctccggaactgttctgtgaatcatgaatcgtcgtaaagcgctcgcggggtggagtcttttttgtatagctggaggcctaaccattcatgccggtttccttctggtgcttccatactgtgcgacacattgtttatggtccggcacatgaggatcatgtacagctggagctgaaaaactgatgccactgtaaatttctgctgagttttggcctgaggaaattgggatggaaacctattaccatccatgaaatccaatggcagaagcttgttggaactagggaccaggtgctgaatgctgatgggccaacatactagaatgga

SEQ ID NO: 273064 - DNA, 563 bp, Zea mays
tagtcatgccgagcttctattttacccaccccttattaaattattcccatgacttgcgagtgtagaggcaactaagaatgagaggcgcagttttgaactgtggaaatagttttcgtccatcggttttgcaccatgaaaatctaaggccctcactcctatgctccataatagccatgtttatgattgagcaagccatatccacaactatcttgctacctttctcatagatagtttgtgcaacccatcatcccaaattaccaaaaatattgaataacaaaattcaatcaagaaaaaactttacatattcatccaatagagcggccttagtagcatgcatcacacctcactattgatgcatccaatcttcctgatgacatagtacactttaattgtatcaccacttaaacatatttatgcggacttgaataattgtgggttaacgggagagggcgttgagagataacgtgactcccaactttgaccttgtcattgtggctttttatatctttttaaatgtcaagatagtgaatcagaaaccttctactagtctagttcattcttga

SEQ ID NO: 273065 - DNA, 598 bp, Zea mays
tcgcgatctagtactagacacagactctttctctctcctcccctctctcgtcctttctctctcgtccgatctgcatctgcttttctccccccttgtctgtctccctcctgtccgtggcgtgcgcaaagatttgattttttttttctcggggaggagccggagtccgagcagcagtggcggctggagggaggagatcctgatctgttgtcgcagcggggaggggaggaccggaggaggaagatggctgcgcaggagcaggagcaggagaagcagcaggcgaagacgagcaccacgagctcgctgccctccagcagcgagcgctcctccagctccgctcgcaacaacctcacggaaggaggggcggagagcgacgaggagatacggcgggtgccggagatgggcggcgcgtcggcgtcggcctcgtcgggcgccggcgcggacgagcgtcccaagggggaggacggcaagcaggggcaggtggcggcgggggcgcagcctccggcgggcgggaagaagcgcgggcgcacggcgggggacaaggagcagaaccggctgaagcgggctgtgcggaaccgcgtgttcgcgcaacaagcgcggg

SEQ ID NO: 273066 - DNA, 794 bp, Zea mays
ttgttggaccgaactacagttgaagacatggacttggcggttcgagcaaccctaaagggctggaaatttgtatatgttggagacgttagggtcaagagtgaactgccgtccacttacaaggcctactgtcggcagcaattccggtggtctagtggtggtgcaaacttattccgtaagatggcaaaggatgttttgtttgccaaggatatatcactcgtcaagaagttctatatgctctatagcttcttctttgtgaggagagttgtagcgccgacggctgcctgtattctctacaatgtcatcatccccatctcagtcacaatcccggagctttacctaccagtgtggggtgttgcctatattcccatggtgcttaccgtggtcacagctataagacatccaaaaaatctacacatactgccattttggattttgtttgagagtgtgatgacattgcatcggatgagggctgcgatgactggactgctggagctagaaggattcaaccagtggattgtgacaaagaaggtggggaatgatctcgaggacactgaagttcctttgcttcagaaaaccccgaaaaggctgagagacagagtcaatctccccgaggttggattttcggtgtttctcttcctctgtgcatcatacaacctggtgttccatgggaaaacaagctactacttatatatgtaccttcaggggttagcatttctgttactagggtttaacttcactggcaattgttcttgctaccaatgatagcatgtcaaaactgtacgaattgctgattg

SEQ ID NO: 273067 - DNA, 547 bp, Zea mays
gatgttcagaagaagataacctacgacgagatcgaggttgtcaagatgaaagctaaaggcgacaagaaggctaagtactacaatgttccgatccccttgtatgatgagatcgcgtctctctccccggggaaacacgctactggagagttcagtgttattgaagcaccgtttgatcgctcaggaaggcaagaggatgatgccgttgggaatgtcaacctagatcaagagccagcagatctgaatggtgactcttctcaacacgatttcgacaccctcccacagtctgataggctgaacccagtaggctcgaagcgcaggcacgaggagaaggagaaggagaaggagaaggagaaggagaaggagaaggaatggaaatgggctaggcaaggcgtccccatcttcatgcaggccctgtcggaagctgtgagctttacccacggtggcacggacccatacgagggtatttacaaagccattgaggacatggatgagtatcctttgccggcacgccttgatctgctgacctatcttgctcagaatcgtcaca

SEQ ID NO: 273068 - DNA, 329 bp, Zea mays
ccacgcgtacgatcacatctatcaatatttgaaagtgcactataaattgtgtaaatcctttatgtgatacgtttgtgcggaagataacctaggagagtgaagtttaaaatataagatgtgaacggacaagccgtgaaagatagtcttacaatagccactgcgcacctgtagcaaatgagtaattgcattgagttgctgaggcaattacgtccttgctattattgccttacggagacatgtaatgagtatggcatatttgccatgacaaatttaatttgtaggatacttctcttgactttgaaaaaaaaaaaaaaaaaaaaggggccggc

SEQ ID NO: 273069 - DNA, 539 bp, Zea mays
cggacgcgtgggtagtgttctaggtgaaggagggttcggctctgtctataaaggatgggtcggggagaacacattatcaccttgcaggcctggcactggaattgctgttgctgtgaaaagactaaatcatgagggtttgcaagggcaccgagagtggtgggcggaagttaattacctaggtcagttctgtcatcccaaccttgtcaagctgattggatactgcttagaggatgagcaccgactgctagtgtacgagttcatgccccgcgggagcttggaaaaccatctgtttaggagaggctcatacttccaacctctgtcatggaaccttagaatgaaggttgcactgggagcagcaaaaggactagcttaccttcatagtgcagaggcaaaagttatttaccgagattttaagacttcgaacatcctccttgacacagattattctgcgaagctttctgattttggattggctaaggatggtcctgtcggtgagaagagccatgtgtccacaagagttatgggaacatatggttatg

SEQ ID NO: 273070 - DNA, 889 bp, Zea mays
tgccggctgctcggccgtcgacgcccccgtctccggcggcgaccgaggggcccgcaacgccaccctatccatcttcgctggcggcgacgccgccgttgttgctcgcctggcgccgctcttcaagctcatgggaaacgcgctgtacatgggcgggcccggcgcggggcagcgcgcgaagctgggcaaccaaatcgccatcgcatccaccatggtagggctcgtggagggcatggtgtacgcgcacaaggccgggctggacgtggccaagtggctggaggccatctccaccggcgcagcggtgtccaagtcgctggagctgtacgggaagcggatcctggagagggatatggcggctggcttctatgtccggcacttcgtgaaggacctcggcatctgcctgtcggaatgccaggccatggggctgtcgctgccggggctcgccctcgcgcaacagctgtacgtgtccctgatcgcgcacggcgagggcgggctcggtacacaggcgcttatactggccgtcgagcggctgaacaacaccagcctcgagaagaaggacgaatgaaaggccccaggctctagctttgatgaacttgtgggaagctttgcttggtgccttggtgcaagtatgcaagatcgaggtgactgttaagttgtctttcagaggtctacagctgttcacttttgtagtagtatatatgttatgcacttgtgcaacggttggatgattgcttagctctacctgtttacatccgccatgggttccaataagattttacaaacaatgtggcattccttgcatagttgtattggtttagctatggtggttgacataacagatttagacatatataaaaaaaaaaaaaaagggcgccgctcgcggacgcgtggg

SEQ ID NO: 273071 - DNA, 1449 bp, Zea mays
cgaagccctacgctacgcctaccctcgctgtactactagctgccttcctacccgcttcccctctcctcccgacgccgtctccctccctccctccgcctccgccgtcgccgccgggacacgcgaagcttccaggtcttgtctttgggtagaacatgtcgtgctttgcgtgctgtggtgatgaagatacccaagtaccagacaccagggctcaatacccaggacaccatccagcgagggccgatgcataccgcccttctgatcaacctcccaagggtcctcagcctgtgaaaatgcaaccaatcgcagtccctgctattcctgtggatgagattagggaggtgaccaagggttttggtgatgaagctttgattggtgagggatcctttggcagagtatacttgggtgttctaagaaatggtaggagtgccgcggtcaaaaagttggattctaacaagcagccagaccaagagttcttggcccaggtgtctatggtgtcaaggctgaagcatgaaaatgttgtcgagttgcttggttactgtgctgatgggacactccgtgtccttgcttatgagttcgctacaatgggttcccttcatgatatgcttcatggaaggaaaggggttaaaggggctcaacccggtccagtcttatcgtggtcgcaacgtgtgaagatagcggttggggcagcgaaaggcctcgagtatcttcatgagaaagcgcagccccatatcatacaccgagacatcaagtctagcaacgtccttcttttcgatgacgatgtagctaagatcgctgactttgatctgtcgaaccaagctcctgacatggcagctcggcttcactcaactagggttctcggaacattcggataccatgcgcctgagtatgcaatgaccgggcaactcagctccaagagtgatgtatatagttttggggttgttcttcttgagctgttgactgggaggaaacctgtcgaccatacattgccaaggggacagcagagtcttgtgacctgggctacaccaagacttagcgaagacaaggttagacagtgtgttgactcaagacttggaggggactatcctcctaaagctgttgcgaagtttgcagctgtcgccgccttgtgtgttcaatacgaagcggacttccggccgaacatgagcattgttgtcaaggcgctacaacccctgctgaatgcgcatgcgcgggcgactaaccctggagaacatgctgggtcataagctttgcgtttgcttctctccctcctcttgttcttgtatgataggtaaggtatatgactcgtcgatgtcgttgttgcggacatgtggctggcagcgtgtaatgtctgtgattattcttcccctgagctgtaaacaagattcttgtatccccacagtatttgattctttctattggttgcaagatgacctgccgttttcttcttaagac

SEQ ID NO: 273072 - DNA, 443 bp, Zea mays
gcagagtcttgtgacttgggctaccccaagacttagcgaagacaaggttagacaatgcgttgactcgaggcttggaggggactaccctcctaaagctgttgcgaagtttgcagctgttgccgcgctgtgtgttcagtacgaagcggacttccggccaaacatgagcattgttgtcaaggcgctacagcccctgctgaatgcgcatgcgcgggcgaccaacccttgagaaaaatgctagctcaaaagcttcgcattgctcctctccgccctcttgtatgatagataagtaagatacgagtcgccgatgtcgttcttgcggacacatggctggcagcgtgtgacatttgtgattatttgtcccctgaattgtaaacaagattcttgtatccccacaacacttgattctttctatcggttgcaagatgacctgccgttttcttctt

SEQ ID NO: 273073 - DNA, 409 bp, Zea mays
gaccaacaccacacggagaagacggaggacagtagagtcgtcgaagcagctgtacgccggaagcctacccccgctatactatctgccttcctactcgcttccctccccgagtccccgtcctcctcagctgccttccgccgccgtgcagcacccgcgcacctccactccggcgtcgtctccctccctcctccgccatcgccaccgggacacgcaaagcttccaggtcttgtctttgggtagaacatgtcgtgctttgcatgctgtggtgatgaagatacacaagtaccagacaccaggactcaatacccaggacatcatccagcaagagccgacgcataccgccctgctgatcaacctcccaagggttcccaacctgtgaaaatgcaaccgattgcagtccctgccattc

SEQ ID NO: 273074 - DNA, 352 bp, Zea mays
acacacgcgtccgcggacgcgtggcgtggacgaaattgttcccatgttcccggaacgaggaacgtggcggtttctaagtgcatgacatatgatatcggttacttaatggaattggttgcttgctttctaagtgatttcgtttcctttgttcgtttttctgaccaggtgctatattgctgccgcctctaataaaaatgtgtttgatttcagcttccaggtcttgtctttgggtagaacatgtcgtgctttgcgtgctgtggtgatgaagatacccaagtaccagacaccagggctcaatacccaggacaccatccagcgagggccgatgcataccgcccttctgatcaacctc

SEQ ID NO: 273075 - DNA, 334 bp, Zea mays
gattagggaggtgaccaagggttttggtgatgaagctttgattggtgagggatcctttggcagagtatacttgggtgttctaagaaatggtaggagtgccgcggtcaaaaagttggattctaacaagcagccagaccaagagttcttggcccaggtctgtctttccctgtttatgaaatgcagtgcatctattttatcccgtggtttgaagtcaacatgaaattcgtctacaggtgtctatggtgtcaaggctgaagcatgaaaatgttgtcgagttgcttggttactgtgctgatgggacactccgcgtccttgcttatgagttcgctacaat

SEQ ID NO: 273076 - DNA, 537 bp, Zea mays
gggacagccaaagaagacggacggacccagtgaggcgagcacgggcgctcaccggcgatggcgacgagggcatgggtggccgcggcggtggccttgaaccctcaactgctgcctctccgctcctgctcgcccacgaagtcggtctccccagcgcagcgctcggcgtcgatggggctccggctgcgcagcggccggccgtgcctggggaagttcgtgtgccgccgcgccaagaacgcgggatacgaggactacaagttcccggaccccatcccggagttcgccgagcaggagacgagcaagttcagggagcacatggcgtggcggctggagcagaagaaagaggactacttcggggaccatgtcgaggagatcgttgacgtctgcaccgagatcatggggacattcctggagaacgattaccgtggaccagggacgctcctggttcacccgttcctggacatgaagggcgagatcaaggagagggggctccccggcgcacctcaaggggcacgggcggcgatagcatgggccgaaaag

SEQ ID NO: 273077 - DNA, 529 bp, Zea mays
ggaactattgataactggacttgtttgaacttttcacgcatgcgccctgatgaggtacaaaggttctgtatggatctgactcatatgtgcaatgccactggaatggttgtcaatccacgcccatttattgaagtccggtctgctgctcctaaccatatagagaatgctttgagagatgtacacaagagagccacccaaatacttgcccaacaagcagtgggaaatcagctccagcttttgattgtaattcttcctgaagttagtggttcttatggtaaaattaaaagagtctgtgagactgacattggaattgtatctcaatgttgcttgccaaagcatgctagcaggccaaacaagcaatatttggaaaatgttgcactcaaaatcaatgtcaaggttggtgggcgtaacacggttcttgagcgagccttttcacacgatggtataccttttgtctctgaagtcccaacaatcatctttggcgcagatgtcacacaccctccaccaggagaggactctgcatcattca

SEQ ID NO: 273078 - DNA, 742 bp, Zea mays
ggacgcgtggcgaggggatctacaaggaggctgcttcggcggcgcccgggcgcggagaggcggctccggtcggaaatgacgagcagtggacgctgagtggggaccacgaggataaggatccctttgccgagtccgtgctcggggaggggatcgaggggattcaaggcgagtgtgatgggctagatgacctcggtgctggggaggaccccgaggttgagctgaagcggcagcggaacaaggagagggagaaggagttgatggagatactcaaaggtccaaatcgtgcttttggtgatctcattgaggcctctgggatcacagatggaatgattgatagtttgatcctcttaaaggatgtcagagacgttccagggttgcctcccctaagagaaatagaagatgaagctgtccagaatatgagtgtaacatcaagcagagctgaagttgagcgccaaaaccaagaggccattgctaaggcacgagtaagacaggttgatgagaaaggaagagcttatggaacagggaaaaggaaatgcagcattgctcgtgtttggattaagcctggtgatggtaaattcattgtcaatgaaaaggagcttgatgcttacttcccaatcctggaccatagagctgaacttcttcgtccatttaatgtgaccgatactttggggcgtttggatgtgacctgtacctgtgaaggtggtggcgtatcaagacaagttggagctatccgcttagggat

SEQ ID NO: 273079 - DNA, 413 bp, Zea mays
ctcaaggacaaagaagaaaaaaacagagcgcagcattggaggcgaggaagagctgtcggccggagatggacaagtactgggaggagacgcagcgctacctggagtacgaggagctcagcatctatttggaggcgcaggaggacgccatgtcttgctacgactccagctcgccggacggctccatctcccactcgtcgtcgtcggcggcggcgtgcggcaacaagaacatcctgatggagcgcgaccgccgccgcaagctcaacgacaagctctacgcgctccgcagcgtcgtgccgaacatcaccaagatggacaaggcgtcgatcatcaaggacgccatcgagtacatccagcatctgcacgcggaagatcggcacatgctgtaagagctgcgcgtgctcgacgacgacacc

SEQ ID NO: 273080 - DNA, 570 bp, Zea mays
attttgcaaagcagtttgatgcaatcaggagaaagtgctgtccagatgaactagactggatccgctccttaagtcgctgcaagcgatggagtgctcaaggtggcaagagtaatgtctactttgccaaaacactagatgacagatttgtgataaagcaagtgacccggacagaattagattcatttgaggattatgctgctgattatttcaaatatttgatagactctgtatcatctggaagcccaacttgcctcactaaagtccttggtctttatcagatcactgccaagaatttgagagatgggaaagagctgaagatggatgtaatggtcatggaaaacctatttttcaagagaaaggtatcaagaatatatgacctaaagggttctttgcgttcccgctacaaccctgatacttcagggaacaacaaggttctcttggatcttaatctgttagagacacttcacacaaagcccatttttcttggaagcaaagcaaaaagaaggctagaacgagctgtctggaatgatacttcttttctggcatcggtggatgtgatggactactctc

SEQ ID NO: 273081 - DNA, 358 bp, Zea mays
ccaaggtcaaggccatggtgaccagcctcaacgccaaccgcccggacgccaagttcatctacgtcgacaactacgccatgatctcccagatcctaagcaacccgtggtcctacgggttcagcgtggccgaccgcggctgctgcggcatcgggaggaaccggggcatgatcacctgcctgcccttcctgcgcccgtgcctcaaccgcaactcctacatcttctgggacgccttccacccgacggagaggtaacgtgctctcgcagggcgctcagtgcgcacgacgcgctaccatgacatcagactcgcgatgcagcggactatgcaagttcatcgtcgagcgtgttgacgtctatgtta

SEQ ID NO: 273082 - DNA, 408 bp, Zea mays
ctttacagaccacagttagggacaacattgttcaaatacaaaattgagatattgaagtctgagaaacaattagtgaaaattttattcacatagaaatttgaggtgttgaaggaaactgagaaggaattaggaattccaaagaaaactaaaaaggaagtagagaattcctcatgaagatttgcattaaagaacacatataatttctgtggaagctttccactgaagagaaaaggtttttgctgctggaataaaaggagggcttagacggccaatgttgaacaagttcatgatgttatcacaattaatatatacctattacctcttgtcttccttagtttcagtcccctcccttatgtaacgtaagtggaccaacgatataggacactcatttttttggaccccaaaatc

SEQ ID NO: 273083 - DNA, 622 bp, Zea mays
cccacgcgtccgcggacgcgtgggtgctgccggtcaatgcatttatttcttgagttaaaagtattcattcttttaagagctttagttctatgcccatcagacaattatgtgtgattagtaaagtatttccccgtgcaggaaatgaagcaccaatgcgatgaaaaaaaagaattgtatgaattcatggtaaacgcgcagaaagaaaagggaaggtctaagaatgctaaaggtgataatggagcatcagagcaattgaaacaagctcaggaagattatcaagaggaagcaactctttttctattccggttgaagtcattgaagcaaggacagttccgaagtctttttacacaagctgctcggcatcatgctgcacagctaaatttgttccgaaagggggtcaagtcccttgaggctgtagagccacatgttaggctcgctgctgagcagcaacacattgatcatcagtttagcgcacttgaggaagaggattatgttgttgaggatgagaatgatgacgagtacaacgacagtcatgatggagagttgtcttttgattatggagaagataaggaaactgagaaatctgtatcgctctagaatcatacaagattttttacagcac

SEQ ID NO: 273084 - DNA, 228 bp, Zea mays
cggaccgtgggtcggacgcgtgggcggcacatcggcagcaacctccacctccacccggtgtccatggcgtgaggttacttcccggagaacaagcaggaccccccgctctctggcaagtgctacgagggcggcatcatcaccagcatgcaccgcgtcacggaccgcaccatcatcgtgacgccggcgctggggcccggcgccttcgccgcgatggtgccgtgggagtcc

SEQ ID NO: 273085 - DNA, 887 bp, Zea mays
tctttgaataggaccgccgccgccgctttgtccctccgttcacaaccttgtcgcacgagtctcttattcgtgacgaggatggcatcaacatgtgcggcaagggtaccgtctctgcggtgggcgccacaacgtggctgggtgggttcgtgggtttcagtacgcccagcgaaatgcaggacatcgggaggacatgccgttgtgtgcgctgctgttagcttcagaccatgcattgacattcacaagggaaaagttaaacagattgttggctctactcttcgggatttagcaaatgatagcatggaacttgtgacaaactttgaatcagacaaatctcctgcagaatttgctaaattttataaagcagatgaacttctaggaggacatgttataatgcttggcgcaaatccttcaagccaggctgctgcactggaggcactacgtgcatatcctggtggtttgcaagttggaggtgggataaatttggagaatgcaatgtcttaccttaatgaaggggccagtcatgtgatagtgacctcttatgtgtttagcgatggcaagatgaacactgaaaggttaagaaaacttgtcgagctggttgggaaacagaggctcgtgctggacctcagttgtcgaaaaaaggatggccgatataccattgtaactgacaggtggcaaaagttcagtgatgtgtttgtggatgaaccaacattagaatatctcgctgcctttgcagatgagtttttggttcatggtgttgatgtggagggcaaaaggtgcagctatgttccttgttatcaagtactacatctgttctcgaatatttgccgcccgctagttcattttcaaactaaaccgcgacaaataaaaaagaatggagggattatttc

SEQ ID NO: 273086 - DNA, 501 bp, Zea mays
ctaattttctgtttggattgattatcactttgtattatctaattaatttccatattgatcgatgttaagtactataattcactgactcttgatttcttatcttctgaaaccacgttggttatcctgctcttgcaatgtgaaatttgctactgtcctgttaccctgattctattttaagctaggatgtgaattacaggttagggattgatgaggaacttgtggaactattggggcatcattcaccaatcccagtaacttatgctgggggtgtgtcaacaatggatgacctagagaggataaagaaggcaggcaaaagtcgagtagatgtaactggtgggagtgctctagatatatttggaggagatttaccctacaaagatgttgtcctttggcacaagaagcaaagtatggttggccaagtgtcaaggaacatgtggtagcgatcagtattgccagaatttattgtgtatcgctcgctaacagcatatttattttcattac

SEQ ID NO: 273087 - DNA, 408 bp, Zea mays
cccacgcgtctgctcttattcggttttggccataactacatgagacatcacaccacatgagccggaaagtcatcgaaaccctcttattaaaaaaaactgaagcaatgttgccaccaccgtcatgccattgccgccacagccagtccgtcgctcttgccctatcctgttagccgtcaacgacacctgtggtgtgacgaggatggcatcaacatgtgcggcaagggtaccgtctctgcggtgggcgccacaacgtggctcgggtgggttcgtgggtttcagtacgcccagcgaaatgctggacatcgggaggacatgccgttgtgtgcgctgctgttagcttcagaccatgcattgacattcacatgggaaaagttaaacagactgttggctctactcttcgggatttag

SEQ ID NO: 273088 - DNA, 646 bp, Zea mays
ccacgcgtccgcagtacattgagcccacgatactgctgaacccgccgctggactccgcgatcatgaccgaggagatattcgggcccctgctcccgatcatcacggtcaagaacatcgaggacagcatcgccttcgtgaaggccatgccgaagcctctcgccatctacgcgttcacccgggacgccgccctgcggcgcgaatcgtggacgagacgtcgtccgggagcgtcaccttcaacgacgcggtagtgcagtacgcgatagacgggctcccgttcggcggcgtcggccagagcgggttcgggcagtaccatgggaagtactcgttcgagatgttcagccacaagaaggcggtcatgaagcggggctaccttgtggagctgacactcaggtacccgccgtgggacgagagcaaggtcaccctcatgcgctacctctaccgcttcaactacttcgccttcgtcctctctttcctcgggctcaggcgatgaacttcactccagcatcaacgcaagggtcgcacagggattgggcccaataaaccggcattgacagtggatggaggaacatgccaatatagacaatatgcagtagttgtgttgtttgtgaggaacaagtgtcatgccgcacttcaaaaacagtaatgt

SEQ ID NO: 273089 - DNA, 1668 bp, Zea mays
cggacgcgtgggcggacgcgtgggcggacgcgtgggcggacgcgtgggctccactcttcttctgcggtcggatcccccggcgggtcggactgcggagcacgggctccggcgagccgctgacgagggcctgtgcggcgaccgagctcgtggcgggagaagatggacgaagcgagcacctccgcgtccggcgccgcgacgaggcgcggcttcgtgcctgcgagatcgggagttttctataggttcacccagcagaacctcccagcttggaagccagcaatgacacctggatgtataatagcaatgttcttgattatcggaataattttcatacctttcgggcttctttgtctccaaacttcaaatcatattgcagaaatcatctaccgctatgatgttgactgtgtgcctgatgcttacagaggaaataggcaagcttatattaaggacagctcgatttctaagaactgtactctggaagcgaaggttctggaatacatgagagcaccaatttatgtttattatgaacttgagaatttctatcagaatcaccgcaggtatgtcaaaagtagaagcgataaacagctgcgttttggggcaaaatacacggccgactcgtgcagtcctgttgagtgggataataatggttccccaattgttccctgcggcttgattgcctggagcttattcaatgatacatatggttttactcgtgggtccaaggaaataaaggtcaacaggaaaaacatttcatggaagagcgaccgggagcataagtttggcaaacatgtgtttccttccaactttcagaacggaaccttgattggaggggggaaactcgaccctactgtcccgctgagtgaacaggaagaccttattgtgtggatgaggacatacgctctccccaaatttcgaaagctctatggtgtgattgaagacgacctgcatgccgatgagaccataaatattttcgtaggaaacaattacaacacctacacttttggtggaaagaagagcatagtcctgtcgactgcgtcctggctaggcggcaagaacgacttccttggacacgcttatattgtcactggttcgttgagcatcatcatatcgattctctttgctctgatccatgtgaagtacccaaggccgcaaggtgaccccaattgcctatcctggaacaggaaaaacagcaatagctaaggggcccgcctgtacctaccatctatgtgggcgcctgtgtaccaacatgaatcagtattacacatctgtatctgaaacatgtcagacactgtgccgcaaggttaatcccagatgatgaaaagaaactgcgtacaccatgtccatcagaaatactagttccaattccgacacatgcgctgggcatcaaggtcaacaccgggagtttttattattattattccagaatgcgcacggtaatttgaaaatgaaattgtggtggaaactgtggaatccgctaatccggtgcggatctgcacagagaaactctggtggctgctgtgactaatgaaaagtggttattctggcttggccgttgtccatcgagggagatgtaatacctgatcagccctgaaatcttaaagggctcccttctttcctcatgctgggacaacatttatttacatcgggtgtgttcttggagttctctccctc

SEQ ID NO: 273090 - DNA, 721 bp, Zea mays
gctctaccgtccggattcccggtcgaccaaccttccgccggaacgcctgacccaatcctttatttccggggcaacggccaatttggcttccggttgccgttcttttccgccgccgcccggatccccttcctccccaagcccttcaactatccactcccgcgtccccggagaagcggcgagatgtacggcatcctgacctccccctgccctcgagccccgcttctccgcgctctcccgagcccatccgcccgcgcattccccagaacactagccttccccgcgaggcccctcccccgcggtctccgcctgacccctccgcacgccgccgcggaggcatcggcggcagccacggcgttgggcgggcttctggcgtcgccgctctcgactctggaggccgccctgcggggcctcaacctcgcgccccttcgcgcccccgtggcggcggcgatgtcggcggccgtgcggtggctgggagtgtaccgggaggtgctgctcgtcggcgtgctgctctcctggttccccaacatcccctgggaccgccagcccttctcggccctgcgcgacctctgcgaccccttcctcgccctgtgccgtgaggtcatgccccccgtgttcgggcgcaagctcgacctcagcccgcttgttccattcatggctattgacatcatcatcatgatcctgcgcccgcagccacgcatgtgatgactccctgcagcagtgg

SEQ ID NO: 273091 - DNA, 626 bp, Zea mays
cccacgcgtccggcgtctactcccacggccacggcctctcccgcgccggccccgctcggctccgcatcgtccgcctacacctccacctagtcttcccctccaccccttccccgaggctctcttcccgccgaatccccgcctcgcccgacccgccgctcgacgtcgccgccggagacgcgaccggcgaggtcgactggcccgcgcctaacgacgaccaggaccaggaacaggaggaccgcgacgagggcatcggcttccatatccaggtgtccaaggtcgggaagcggaaccggcgcctcgtgcgggctcgggttcgcgtccacgcgccgttcgaggccgtgtgggccacgctcaccgactacgaaggcctcgctgacttcatccctgggctctccgagtgccgactcctggaccggcacgatggcttcgcgcggctgtaccaggtcggggagcaggacctcgcgctgggcttcaagttcaacgccaagggcaccgtagactgctatgagggggacattgagctgctgcccgccgccggggcgcccaggagggagaccgccttcaacatgatccgacggtgatttcaagctcttccaggggaaatggtctgttgaagagctggtggg

SEQ ID NO: 273092 - DNA, 532 bp, Zea mays
ccttcaaccatctcaggcggaatggcggcttctggtgagggcgcgtcgctgccgtctccggcgggcggggaggatgcgcaccgccgccgcgtcagctatttctacgagccgtcgatcggagactactactacgggcaaggtcacccgatgaagccccaccgcatccgaatggcgcactcgctggtggtccactacggcctccaccgcctcctcgagctctcccgcccctacccggcctctgaggccgacatccgccgcttccactccgacgactacgtcgctttcctcgcgtccgccaccggaaacccgggtgtcctcgacccgcgcgccattaagcgctttaacgtcggtgaggactgccccgtgttcgacggtctcttccccttctgccaggcctccgctgggggaagcatcggcgccgccgtcaagcttaaccgcggggacgccgacatcaccgtcaactgggcgggcggccttcaccacgccaagaagagcgaggccttccggttctgctacgtcaacgacatcgttc

SEQ ID NO: 273093 - DNA, 795 bp, Zea mays
gatgtttcaatttgccaagagtgatacttctgttctcaagcaacattatgaaaagaagttaaccgacttggagcaagaaaagaaagctcttcagaaagaaatagagaatcttcgccatgcattaaccaacatatcttcttctatggatgataatgctcaaaaagtgaaagaaaactatcttcagaagctgaatgcacttgagtcccaggtccatgagctcaagaaaaagcaggaagctcaacaacagcttctaaggcagaaacagaggagtgatgaggcagcaaagcgcttacaagaagatattcagcgtataaaatctcagaaggttcaacttcaacaaaagatcaagcaagagtctgaacagtttaggtcttggaaggctgcccgtgaaaaggaagtacttcagctcaagaaggaagggagacgaaatgaatatgagatgcacaagctcttggccttaaatcagaggcagaagatggtcttacagaggaaaactgaggaagcagctgctgctacaaaaagattgaaggagttgctggaagcaaagaagtcatcacgggaaacatatggcagtgcaaatggttcggggatgcaggccttaatacgagctattgacgatgaactagaagtcactgtaagagcacacgaattacgctcatattacgagcgacaaatgcaagagagagcagcaatatccaaggaaatagcaaaactagaggaggaatcaaagcacaagatcagtgattgtcctcaagctatgtcacctagtgctagaagttctaggatatcagcatt

SEQ ID NO: 273094 - DNA, 505 bp, Zea mays
ccggattccgggaccagtaccacgccttcaccgccgagtcgcccatgccctggctgccgtcggctccggcgcctgggcacgctcacaccctcgtggagcagaaggcggtggatgaaatggtggacgggtttgggatcggaaggctgcaggagctcctcggcgctgctgcggggcaggcggccgagattgatgacatgtacgcagggatgctcagcaagctggagaagctcgccagggaggtggaaaagagcaatctccgtgtgctcgaccaggagaagaggaacctgctgctgaggtataaatatgctggaatggagtaggaccgaagtgcttctggtcttagcgatgtgtgtgtgtatcatgactgagttttatcggtgtgtcatgcagatttcgtgatgatctgaatgttcatcagtagttccaagtcgcactcatgttctcgataatattattttgtcaaaaaaacaaaaaaaaagggcgccggctcgcgatctagaactag

SEQ ID NO: 273095 - DNA, 583 bp, Zea mays
gctggttcctcgtcatcgtgcagactgttgcaaacggtgggtggaagggaagcctcaccgtcatcagcatcggcgccgacagtaacctccacgcagaaggtgtggcacagtctgcaggccttcggctacatcgggttagcctactccttctccaacatcctcatcgagatccaagacacgatcaaggcgccgccgccgtcggagtcgaaggtgatgcacaaggcgacgcggctgagcgtggcgacgacgaccatcttctacatgctgtgcgggtgcatggggtacgcggcgttcggcgacaaggcgccggacaacctgctgacggggttcggcttcttcgagccattctggctgatcgacgtggccaacgtggccatcgtggtgcacctggtgggcgcgtaccaggtgttctgccagcccatcttcgccttcgtggagcgccgcgccgccgcggcctggcccgacagcgccttcgtcgcgcgggagctccgcgtggggcccctcgccctcagcgtgttccgcctcacgtggcggtcggtgttcgtgtgcgccatcaccgtggtggccatgcttgtcccctttt

SEQ ID NO: 273096 - DNA, 1019 bp, Zea mays
gacagaactgggggctcatttgtcaagtgccgagctgtaaattgtttggtattctttcatgcttggtgtgcacatcagaggggtttgctgcaaagtgagcctgaaggcgagcacaatgaaaatattggcttttatgggcgatgcgtgtctcacgccattgttttttctagtcacgttaatcctaagaaagaatactttagaaacaacaattggacatgtgcacgtacagagggttttaaaggccgaaagggagaaggcttttctgatagtagccataaaaaatatgaagagtacagtggcgagttacggtcgttgccgcaggttcagagaaatgcttggttgcgcataaatggttcaaagccctgcggacgaggacagatggaggacatccattacaagcagttaaaagggtggaagcatttggttgtttacaaatatggcatacatggacttgggctctacacatcagtctttattccacgcggctctatggctgtagaatatgtgggtgaaattggtgggcaacgggttgctgacagaagagagatcgaataccagtccgggaaacggcaacaatataagagtgcatgttatttctttaagattgacagggagcatattattgatgccacccgcaaaggtgggattgcaagattcgtcaatcattcatgccagccaaactgcgttgcgaaaataatctcagtcaggaatgagaagaaggtaatgttctttgcagaacggcacataaacccaggggaggacattacgtacgattaccacttcaaccgggaagatgaaggccagaggatcctttgcttttgtagatcaagatactgcaggcggtacctcaattagtttccggtgggcgtaacatgtctatatataacttatatatctatatgtatatcttatatatttacaaattacaattgcgcattcatgcctgctgtatatgtaggaacttgcatctagaactgcctgtttatcttttgtgaagtcaaatgagttatcagctgttc

SEQ ID NO: 273097 - DNA, 441 bp, Zea mays
aaatcagcagtctgaatcttgctacctaaatctactacctgctagttggtcttgagataatgtcatcgagcaaccacaatcatgacgataatgtcaatgaatcgtagactcgtagtcacagcagggttttttatcatctgttattgactctgaagcagtaggaggaaatgcggaagtggaagagattgaagtttctgatgatgaagaccagaaagatggtgttggttcaaagagaaagttgacttcagctgtttggaaaggattcaagagggttaaagtagaggataaaattaaagcaaagtgcaactggtgcgcaaagaaacttggagagacaaaaaatggaaccaaacatctacacgatcatctcaagacatgtccataccgtaagagcaaaatgaccggacaaagcaagacatttagtcaaagctcattgaggtttgg

SEQ ID NO: 273098 - DNA, 435 bp, Zea mays
aaaaaaaggtttttgttttcattttgaggggaaagggtgaggagcccagcattggattggaggttggattttggctcccagcctcccaggtctccaacggacttgagtagtactactagtggtggttgcatggtgcaatcatttgcaggaatccaaatcattcgccctctagatcgtgctgccatgtctctgtccacccccatcaccttgtgttccgcgacgtcgcccctctctctctctctagttctgccgatatgttttttactaactcgctccaccgaatcagttccaataaagccatggagctagctaacccttgctgaactgtggaatggtttctgagcagagcgtggcggagctgaagcagaccctgctggcgaccacgctggagctggaggcggcgagggaggagctgaggcggaaggagcagagcat

SEQ ID NO: 273099 - DNA, 1498 bp, Zea mays
ggcggccacgcgcacgcacccataaaagtcctcgctccaccccctccaactcccgtcccctctccctccctccttccccgccgccgccgccgccatccaccaggtcagctccagcggacgacgtctcaacagtctcgcgccactgagatctcgccgagggagggagagcagcagggcagcagcagacatgtcgtcggggcggtacatggcctactcgccctcgccgtcgaccaccccgcactccccccgcatccacggcctccgcgccccgtctgccgccgtggccgaacaggagaagtaccttgccgaactgctcgcggagaggcagaagcttggcccgttcgtcccagtgatcccgcatagtgtacgcttgctgaatcaagaaattttacgtgtttccacactattggagaacgcatcccttttaaatcaaagtggccttgaacatggtagtccactaacaacaggaggattatattcaaatggagcagctactgacatgaatgtgtggacatcagcatttcaaccagaaagttcaccagcttatagctggcttggaggatcccagggcagctcctctggacttattgtcaagaaaacaatgaaggtcgatatcccagtagacaaatatccaacattcaatttcgttggccgcatccttggtccaagaggaaattccttgaagcgggtggaggcaaatacggattgccgcgtgctaataagaggtcgtggcagcatcaaagatccagcacgggaggaaatgatgcgagggaagccaggatatgagcatctgaatgaacctctccatatattggttgaggcagagctacctgttgacatcattgatgctcggctgatgcaagcccgcgagatccttcaagatctgctaaagcctgtggatgaatcccaggacttcttcaagaagcagcagctccgggagctcgcgatgcttaatggcaccctgcgtgaggaagggatgcagaggttcggttcagcgtcccctttccacaacagccttggaatgaagagagccaagacaagggggtgatgaagaaagtcgcaagcatcatgaagggagaacttaaatcatcatctattctgaggccaatcctgtgtacgaatggggggttgccttgctggctactggcccaatacggtctcgcgccaccagcatcgcggcgcgggcggccgtgcacgataaaacatatatctggagttgtgtctactgggggagttgagtttggttatgcgccatgggttgttacgctatatattgggctgtgcaggcttttgtagcaatgtggtttgtgtaaatgctcatttggagcgtttggaagctctcggcttgtatttctttcttatcgagatagtattcaaggacgctgtttgggatttgaagcaatgctctaacctgcgacaagcatggaggcttgatctgtttcattcgaatctcttgtttgacactatcaataaccagtgcatccaagtagtgatcggg

SEQ ID NO: 273100 - DNA, 501 bp, Zea mays
tggacgcgtgggcggacgcgtgggcggacgcgtgggcgccgccgtctaccagtacagctccagcggacgacgtctcgacagtcccgcgccgctgagatctcgccgcgggagggagagcagcagcggcagcagcagacatgtcgtcggggcggtacatggcctactcgccctcgccgtcgaccaccccccactccccccgcatccccggcctccgcgccccctctgccgccgtcgccgagcaggagaagtaccttgccgaactgctcgcggagaggcagaagcttggcccgttcgtcccagtgatcccgcatagtgtacgcttgctgaatcaagagttcaccagcttatagctggcttggaggatcccagggcagctcctctggacttattgtcaagaaaacaatgaaggtcgatatcccagtagacaaatatccaacattcaatttcgttggccgcatccttggtccaagaggaaattccttgaagcgggtggaggcaaat

SEQ ID NO: 273101 - DNA, 533 bp, Zea mays
  unsure (1)..(533): unsure at all n locations
ctanaatacacctatatgcaattactgttcatattcatccacacctactagaatagttttaatagttcataaagtaatggaagaaaaccaatcatgtcactattatattgtcatggaggatcagatgatagccaattgtctgtcaacacatgagaagtgccaagacctcgtatgcagctcgagatcaccatatctccaacatggaagacaacctcaccatcggatgtcgacggtctcccttgcagctccctccacttgtccaacttcgacattggccacgatcctcaaatttgtcaacttcctcacgtcccctgcagcttgccctagctctccgacttcgacgttggctgtgatccccaagtctgtcaacttactcttataggcttcgactttccctgcacgcgctcgacgtcacccgttggctgtgatacaaaatagtcaattatacattaagatcaatctcatccaacaacttcttctcaatgcacaaaattgccaaaccatataatcaatcttgagtcattgttgatctc

SEQ ID NO: 273102 - DNA, 590 bp, Zea mays
ctgagactatgttgtatagtgtatgggatgctaactcaaggatgtgtgactctatggttataaaaaggaactatgtacaacagctaaggcaagaggtcaaattgggaattgtcttgaaggagcaaatggattaccttgatcactgggcagcgctgcaaacagagcattcttcttctttatccagcgcaactgaagctcttaaagcaagcacattgcgtcttccagtttctggaggggctaaggccgatgtacttactgttaagaatgctgtcagttcagcagttgacattatgcaagcgatggggtcatcccgttgccatttgctatcaaagttacaggcttcacactctctggttacggaactttcagctgttgctgcttaggaaagtaccttactcaatgagtacagagaactcttggcaacagcagcagcactacaggtccaggagtccagcctaaggacacagctcatacaacagacagtgagcaggttaaggtcctgtatgtatttctgactaggaagattagaggtaaacaccattcattagtttcaactgctgaactgacagcattcttaacaggtagtacat

SEQ ID NO: 273103 - DNA, 580 bp, Zea mays
agctgctcgcacttgcagcgtcccgttcccgcacttctcttccttctcgtttcgtcctgcacagcgcacgcaactgccaccggccaccgcgcaaactccattgcgcgcagatcaagaccgccacacccaccaccagcgcttcagcgggagacgtgacgactgacgagacgaagcctctccccacggcgcctccccctccacatggcctgggctcgccttgcctcccgctcccgtctgcgccccgcggcctccgccgccggccgatcccgacacgcctcaacaccggctccgcctccgcctccgtccccacctaccacacgcacggtacctgcggccacctccgcgccaccgctccggcgtctcctcctgcttccgcggcaccggtttgctgacgccacgccctcagcatcgaccgcgtggctgctcggtgcccgctggcgccaggggcacggcaggaggtgctttgcgagcgccgcctacccggcgcaggcgacgccgggggaggcgtctgagctggtggatgtgccactggcgcagactggggaaggcatcgccgagtgcgagcttctgcgctggttcg

SEQ ID NO: 273104 - DNA, 766 bp, Zea mays
  unsure (1)..(766): unsure at all n locations
caagctgcagtacggccggaattcgggcgaccagcgccggtgttccctatcgagaagagtcagacggagtggtccgtgtatctggacgatccaggggagacaggtaaaggttgtggtggccttggcgcagatgcttcagatggagaatcggatgaaggaattgaggtgataactgaactgcctcagaaaagacctaaagttaggcctcgcaaagcccaatcagatgtagtaggaaagagaaccaagctgtcaacacatcccactttatgtaataagaggcagcagatcaagcaaggatcaaatccccactgtgcaactactactgctgaagcacaaggatcaaaatggaccaagtatttggacacgagccgttttggtgggaggaaatgcttcgatacctctggtctgcactggactgaacatgatgaatctgccactactgaggctactactgacgtagtggtggatgatgaggtgcaccctgatttcatctgatctcatgttggtttgaaatgccaaatgctttgtgttttggtagtgtgtagtttggtacccataaattgtgctgctggcaattcacattgtcaagacaaaggatgtgcagtacttggtacccgagggaagaagactgttgttcccaagatgttatccagtatgatgggcaattcatagtaaaagcaccgtgctagtcaaaatcagttcaagaccaccgggttgtttaaatacccctcaaaacacgagtatagtcaaaaaaaantaanaaaaa

SEQ ID NO: 273105 - DNA, 425 bp, Zea mays
  unsure (1)..(425): unsure at all n locations
ctgcagtacggccggaatccgggcgaccacggacgcacagcagacaaggcggaccggcgagcgcgagnaccgcggacgcgtgggaacaagcctcagtcatctcgtgaccacagtcggtcctgcactggttgagcggcaccggtttctcctgacgacactccttgttcttgccttcctgtgcactgtctatctgtactttgcagtaaccttgggggcatcagatgcttgcactggattgacaggagcagagaggattgagtgccaggcaagatcagtgctgcaacatggaaagttgaaattccgatgactttggagactcattgatgaagaccaaattattgagttttatttgcactctggtcacaggtcttattcttcataccatgaatctgtatattattggtggtggctggtttgtattcatg

SEQ ID NO: 273106 - DNA, 325 bp, Zea mays
cccacgcgtccgcgccgcctggccacgccttatccagatccaggattcaaagaaaccattacttcaccaccatggttcttgattcattgtcatctccgcacaggaggtcccaaaacatattcttcgtgtcatcatcaaaaaagcctcagtcatctcgtgatgacagttggtctgcactggttgagcggcaccggttcctcctgacaacacttcttgtgcttgccttcctatgcagtatctatctgtactttgcagtgaccttgggggcatcaaatgcgtgcagtggtttgacaggaggggcacaagagatcgagtgccaggcaag

SEQ ID NO: 273107 - DNA, 309 bp, Zea mays
cgagacctggacgatacgcgtgggatccactccggcccccgcctcgcagtgcctccccaccgccctccgcgcccggcaggcgacgtcccgttccagatccaggattcaaacaaaccagtacattaccaccatggttcttgattcattatcatcacctcacaggaggtcccaaaacacattcttcgtgtcatctgcaaaaaagcctcagtcatctcgtgacgacagttggtctgcactggttgagcgacaccggtttctcctgacgacactccttgttcttgccttcctgtgcactgtctatctgtactt

SEQ ID NO: 273108 - DNA, 281 bp, Zea mays
tttagtttatttgttttatgtttcctgtctgttgagttctagtcgagtcacccccacagcatagatgaacatatttgttattgatttgagctactgatggcttattcacctaagcaatctttcttgtgagtgtagagtttgagaatacttagctcgttaattcttgtcacttttttcggacaggattcaaagaaaccattacttcaccaccatggttcttgattcattgtcatctccgcacaggaggtcccaaaacatattcttcgtgtcatcatcaaaaa

SEQ ID NO: 273109 - DNA, 748 bp, Zea mays
  unsure (1)..(748): unsure at all n locations
agttatttccaaacatgcttgcatcaactttccaggacaaaatgaaggaagaggaagcattaaaaaggaaattgaaagcaaggatggagtatgcaaaatttttgcaagataccgcaaaagaaatggcaaaggaagttcaaacatctcgtagcggagaaacaaaacaaacagctgaagatctggacgaatttttgaataaggttaggagaggtggacgtgtctctaatgatgaaatcttgaattttgcaaagctattcaatgatgaacttactctggataacatgaacagaccacgcttccggtaaatatgtgcaaatatatgggtatccggccttttggtacagatcactacttgaggttcatgcttcgcaaaaaacttcaggacattaagaatgatgataaactgattcaagctgagggagttgaatctctctctgaagaagagctccggcaagcctgccgggaacgtggtcatctaggcctgctgtcaactgaagagatgtgccagcagctccgagactggttggacctatcacttaatcatgctgtgccatcttcacttctcatactttcaagagcctttactgtgtctgggagaatgaagccagaggaggctgttgtagcaacactatcttcattaccagacgaagttgtggatacagacggaacagtactgacatgtgcagatatagtttctgagaggaggagaaaacttgaatttcttgagatgcangaagaacttatcaag

SEQ ID NO: 273110 - DNA, 396 bp, Zea mays
gctaaaatcagtcaaggaagggagctttacatggctctagagaagggtggtgaaacgcttctatatgcatccacagctgtagagaaattcagcaacaggtactgtgagggagcattctctacagattagaagcaccagagggagatcttagcttttccatacattacctattatgtacatcctgtttttttcccagctgtatcgttgccccctattgttgagagactcggaccactctttgcgaagggaataaggagttcgtatcagttgtacagctgctctgctgtcgtgtgctatctgcaaaagaatagcctagtctgggaataacgcagagcgggatagagtttgtttgttcacttatgcccttccttaacgcagagcattgtgcgtgttttt

SEQ ID NO: 273111 - DNA, 654 bp, Zea mays
cggtctcgtggggacggagtttgacttctggggcttcatttttgtgacgcttgctgctgttatgtcaggattccggtggtccatgactcagattctgttgcaggctaatgggtttctttatttatgtgcatgtggatcttcatgtttcaagaaagacagttacggcctgaagaatccgattaccttgatgagccatgttacaccagtgatggccatcgccactatgatactatctctattactggatccttggagtgaatttcaaaagaattcatattttgatagcccttggcatgtcatgcgcagttgcctacttatgcttataggaggaactttagcttttttcatggtgttaacagagtatatacttatttcagcaacaagtgccataaccgtcacaatagctggagtagtaaaagaatctgtaaccattttgcttgcggtattttatttccatgatgaatttacttggttgaaaggggttggtcttttcaccattatggttggtgttagcttattcaattggtacaagtatgagaaattcaaaaggggtcagataaatgaggatgacgtcagctctccatttactggtgacgtcaagtacattattatagacgacttggaatatgagaatgaatttgaggaagatacata

SEQ ID NO: 273112 - DNA, 1032 bp, Zea mays
ctctcgtaggccagaagcccacaaccatcgccccgcggccggccagaacccgatgctgttcatgtcagcagttccttttccttccccatgaaggcgccgcgccggcgtgtggggcatcgatagccgcgccggtgatacggcgcaccgccctgctcgcccagcggattcggtgcggcagacgtacgcggacagccggtcccggacgcgatgcgaagtgcgaacccccaaaatattaccacttgtcttcccccctcgtcgacccacggaaccttcgactcctcgccactggagtggctggctacctccaattcagcacgtaaagaaagcaaaccgcccgcagttccgttccgcaagaccagatcgcccgcttttctcctccggtcctctcctccctccccttgagccctgatcgaatcgatccacggtgccggcggacgcctcgccccctccagttccatccaatccacgagtgaacagatggcgtcgcagtgggctgctccgccgccgggctacccggccgggcacgggcaggcgtacggcgaccagcagctggccacgccgccgcctcaggcagcgacggccgtggccgtgacggcggcgagcaacggcgtgggcaacccctacgtcgtcgtcacccccgcgtctgccgcaccgtccacctgccagaccgtcaggaaggcgctgggccgctacggcaagctgctcgaggacggaacccgcaaggccgccgacgccaccggcaacatctggcaccacctccggacggcgccgaacatggcggacgcggcggtggcgcggctgacgcaggggaccaaggtgtacgcggagggcggccacgacagggtgttctaccagacgttcggcgccatgcccggggagcagctccgcaaggcctacgcctgctacctctccacctcctcgggccccgtcatcggcacgctctacctctccacggcgcgcctcgccttctgcagcgacagcccgctctgctaccagggccctgccggccagccgcatgagtgcatgtactac

SEQ ID NO: 273113 - DNA, 435 bp, Zea mays
aaaatgcgacagttgtgagcatttcgagtattgaggaactgagggctataatttcaagaggctctgagaggaggcacactgccggaacgaatatgaatgatgagagttcaagggctcattcaattcttgcagtcattattgaaagtacaaatctgcaaacccaatcatatgcaagaggcaagctaagttctgcggaccttgctggttctgagagggtgaaaaaatctggttcagcaggaaagcaattgaaagaagcgcaaagtatagataaatcgcttgctgctttggctgatgttattggcgctttatcttctgatggacaacatataccgtaccgggaccataagtaaacaatgcttatgagtgattatctaatgtggattgtctgcaaaaaagctaagttttgtggactttgcggtcctaagagggtaaaaa

SEQ ID NO: 273114 - DNA, 591 bp, Zea mays
gcgcgtaccaaaggcggcaccaccaatccagagggcgccaacaatctcgtccgagagaaggacgcactcgactccgacgagggcgaagaccaactcagaggagcagaggtgcttgccgccggcagaggacgctgcggctaataataatgccactaatccgccgaaggcggtgaacgagaggccacagaagcagcacaaggtatctgttgggttcggccagctcgagacgagtgacttgaaggtggtgctgtatggcaaggacggcgttgcggtgaagatgagcgtccacaagaacacccttgctggaaacagcaccttctttgctgacaagctctccgggcagtctccggtgtcgagtatagaagtgcctgactgtgaggatgtggagatttatgtcgagactgttgggttgatgtactgcagtgatgtcaagcagaggcttatcaagcaaactgttcctcgtgttcttcgagtcttgaaggttgcagagctgctgggtttccctgcatgcgtcacgtcatgcttagactacctggaagcggtcccttgggtcggggaagaagaggagaatgtggtctcgtctgtccggaa

SEQ ID NO: 273115 - DNA, 585 bp, Zea mays
gataggtgtaaacacagctatatactcgccctcgggagcatcatctggtgttgggttttccattccggtcgacacagtcgggggcattgtggaccaactcataaggtttggcagggtgacaaggcctattctgggagtaaaatttgccccagatcaatccgtagagcagcttgggttaagtggagtgcttgtcttggatgctcctccaaacggaccagctggcaaagcgggtctgcaagcaaccaaacgagatccctatggccggcttatcctgggcgatataattacctctgtgaatgccacaaaggtgacaaacggaagcgacctgtaccggatactggatcagtgtaaagtcggggaaacggtgaccgtggaagtcctgcgtggcgatcataaggagaagatccccgtggtcctcgagccgaaggccgacgaatcatagcgaacccaggttcttctgtaccatagcctgatcagtttgtcactttgggacaagacaagaggcgggcgtcttaagcattttcgcctggtgtattttctgcagcagacgcgcaaatacacaagggcgcgtgtgctagcattttc

SEQ ID NO: 273116 - DNA, 489 bp, Zea mays
cggagatgcgcgccggactgcgcaggacggcggcagcaagatcaagatgatcgtctccttcgtcgacaacctccccacggggaacgaagagggcgtcttctacgccttggaccttggcggaacgaacttccgcgtgctgcgcgtgcagctggccgggaaggacaggcgtgtggccaagcgagagtccaaggaggtgtccatccctcctcacctcatgtcaggcaacgcatcggagctgtttggcttcatcgcctcggcgctagccaagtacgtcgccgcggcgggcgaaggggacggcaggcagagagagctcgggttcaccttctctttccccgtgcgccagacgtcgatcgcgtcaggcacgctcatcaagtggaccaaggcgttttcggtcgacgacgctgttggtgaggatgtcgtcgccgagctgcagacggccatggagaagcaaggcgtcgacatgcgtgtggcggcactgatcaacgatac

SEQ ID NO: 273117 - DNA, 541 bp, Zea mays
  unsure (1)..(541): unsure at all n locations
cccacgcgtccgcggacgcgtgttttggaattaggccgccggacgccgttgcgtgggagagagcaaagtgaaccaggccgaaaccgaagctaccgccacgcccaccacccccgcccactgcagcaacgccggaccctcgtctccctgtccccgactaccaggaggggatcccggcggcgaggatgagcggcggcggtgccggagggaagggggcggcggcgcccgtcccggccgggtcgaggaaactggtgcagggtctcaaggagatcgtgaaccgacccgaggcggagatctacgccgcactgcgcgagtgcggcatggaccccgacgagggcggtcagccgcctcctctgccaagatactttccaagaggtaaagagcaagcgcgacaagaagaaagagattnaagangttcctgagacaagatatcgatcggcaaatagttctactaatcgaagccttaaaagtgggtgcagatcggggggacgtagcaattctgtgcactccagctctactgataacatgacctcaggccaccagt

SEQ ID NO: 273118 - DNA, 433 bp, Zea mays
tggaattaggcatcggccgccgttgcgttggtgtgagcaagtgaaccaggccgaaaccgaagctaccgccaccaccaccccgccctcgtctccctgtccccgagtcccagtaggggatcccggcggtgaggatgagcggcggcggagctggagggaagggggcggcggcgcctgttccgcccgggtcgaggaagctggtgcagggccttaaggagatcgtgaaccgccccgaggcggagatctacgccgcactgcgcgagtgcggcatggaccccgacgaggcggtcagccgcctcctctcccaaggtatgtgctcgtgcgttgccacgaggagggggagtgtggggagcgatgcctaggctaccaatataatttttgtttatttcttctaaaaactaagatactttccaagaggtaaagagcaagcgcgaca

SEQ ID NO: 273119 - DNA, 443 bp, Zea mays
cggacgcgtggggtttgaggagcctgttgaggaaggcagcggaattaacagtcttgcgcttggcgcactggataacagtttcctcgttggagacaaaggcattgaggtcgtgaggaatttcgagcatgggatacacggcaagggcatgtccgtgaagttttctggagggagcacaaacttctcgacacccaaaaaggctcttctcatgcgggccgagactaacatgctcctgatgagcccagccactgatggaaagccgcacgccaagggggtgcatcagttggacatcgagacggggaaggtggtttcagaatggaagtttgagaaggatggagcggatattaacatgagggatatcaccaatgatagcaaaggtgcccagctggatccgtccgagtccaccttcttgggactggatgacaacaggttgtgccggtgggata

SEQ ID NO: 273120 - DNA, 513 bp, Zea mays
catgatctaattatagagctaattgtacaggtttagttctcctaattggcatccaaaacccagaccaaaccttagtcccggggatgatccaaacgcatgtggagctgggttttgggaccttccggtcaaccgatcagagaatgattgtctagcttagcaaatggagagttttgtttttgttaatgcttgttcagcattgtggggggaggttccatggtagagctgataattttcccccattgataagaggttttagggtttttcttcctcattttcccagaaggaatacaccaaatagaagccttgtctggtgtcggaggcacgtaggtgtgtgttgctctgaaagaagaataggttgcctttcttttcgtcgccatctttttttcttttgaaaaggaagggaaaaaataacgatcgagcttaacatggaaaaggtgcacaggaaataccttggtcttcaaaaaaaaaaaaaaaaaaaaaaaaaaaaaaaaaaaaaaacaaaaaaaaaaacaa

SEQ ID NO: 273121 - DNA, 1002 bp, Zea mays
gggtggcccaacatccagactttccatttgagggtcagctgttgaatccaattttccatggcaacccacttggtccaagcaacagcccacttcgctgtttctcggacatcgctcctgcaggcatacagggagccaggcatgctcaatttggtttacccctaacagactaccagcttaaccagctgcacctcggtttcaaccggcttggtgctatgactccgacgccccgtatatccaagggttttgtgatcagcagcgcaccagccagtgagagtgtctcttgcttgctgacaatcggcacaccacaggccacagagagatctgatgacataaagagaccccacataatgctgttcggaaagcctatccttactgagcagcagatggattctggaggatcgagggaaggcctatccctggaccgcaaggcttctgagcttgggctagaagacgggcactgcaaggtgtttatggaatcagaggatgttggccgcaccattgacctatctgtctttggttcgtacgaagagctgtacggccagttagcggacatgtttggaattgagaaggcggaaataatgaggcacctttgctaccgtgatgctgctggtgctgtcaggcatactggtgaagagccgttcaatgacttcatgaaagtagcacggaggctcaccattatagagggcacggaggggagactgcagaaacctctcgtggaatacatggtcgagcgggcttgattgcatggtggttcggacaaggcaatctgaaacttgtgcaagactgagcttagagcgaagtaactgctgtgtgttttcatttgtgtttgtctgccgccgaagcagaatcgcgatgcttgtctggtcgtgtggaaaaccttggtgtacgcttcgtgacttggtcgttagaactctgtcgtggtcagttgtgttttgcttggtcgaagttgatgaataacctctttgacgaattagcttggaataaagttcgagttgttgtgtt

SEQ ID NO: 273122 - DNA, 644 bp, Zea mays
aacacgtgggcccggcctcagattcagcgcattcatctggtaagcttgatattggtgagcttgtgcacatattatctgatcaagggaggcagaacatgatcactgcgctggatgtagcaatgcctgccccttctttgacagatagaacagatttgaggaacatacagaggagcttgcattctctgacacctgaaatcagcgacgaggatgaagatccttacgctgttgaatccatggtggttcatggagtcctagatgcaggcgggaaaagggcttccatatctcaggtgaaggaatccatctgttcagcactggaaggcagggcgacaaaacccaagttctcccacctctcggtatcgccgtgccccctcccaatcccactcccgttcccgtcaatcttcagcagcagcgtaggccagcagggcgagatcctcggcaccagccacgcagaaggagcccggccaaggggtccgcttgccgtcggctcggtgccgatggcagcgcgcctgaggtcgagcagcgccatagcgccattcatcgagaggaggtcggcgagcctccagaggctcggtgttgccaggggcacgctgggctcgcaagtcctctacgactggggcttcgggagggaggaggtcgaggacatg

SEQ ID NO: 273123 - DNA, 921 bp, Zea mays
  unsure (1)..(921): unsure at all n locations
cttacataagcatcggcgggagtaagtactgtctagttattgtggatgattattctcgcttcacttgggtctttttgtaggaaaaatctcaaaccctagagaccttaaagagattcttgagacgggctcaaaatgagtttggcttgaggatcaagaagattagaagcgacaatgggacggagttcaagaactcacaaattgaaggctttcttgaggaggagggcatcaagcatgagttctcttctccctacacacctcaacaaaatggtgtagtggagaggaagaatcgaactctattggacatggcaagaaccatgcttgatgagtacaagacaccggatcggttttgggccgaggcgattaacaccgcctgctactccatcaaccggttatatcttcaccgaatcctcaagaaaacatcatatgaactcctcaccggtaaaaagcccaatgtttcatattttagagtctttggtagcaaatgctttattcttgttaaaagaggtagaaaatctaaatttgctcctaaggctgtagaaggctttttacttggttatgactcaaacacaagggcatatagggtctttaacaagtccactggactagttgaagtctcatgtgacgttgtgtttgatgaaactaacggctctcaagtagagcaagttgatcttgatgagataggtgatgaagaggctccatgcatagcgctaaggaacatgtccattggggatgtgtgtcctaaggaatccgaagagcctccaagaacacaagatcaaccatcctcctccacgcaagcatctccaccaactcaggatgaggatcaagctcaagatgatgatgaagatcaagaggagccacctcaagaggacaatgatcaaggnggagatgctaatgatcaagataaggaatatgatgaggacc

SEQ ID NO: 273124 - DNA, 1057 bp, Zea mays
ccctgttaagggtcgcatacagctggtggtaagcaacccagagaagactccacttcatactttcttctgcaactatgacttgagtgacatgcctcctggaaccaagactttcgtgcggcaaaaggtcactctctccccctctgccttgccttctaatccagtggaagaaggaagcaagacttgtgcggttaattctggtcacaaatcttctcagtcagtttcatgtggaaatgaacctagcgaacggggagctcgttctgaatgctgcaacggtggacagaactgcaactcaaatgatgaatcagaaaaaggagatctgaaaacaagatgtcgatcattggatagtgattctaatgaatcaaataagtctagttctccaggaaataagaaagaccagtctgattctgatggttgctgctgtcaaatggataagtttggcatgggagaaaagaaatcatgctgctcaccttctaagatcaatgatagttcaggtggagctgtgcttcgttatgctttgcacctgcgatttctgtgcccctccaagaaaaaatcctcgaaatcaatgcttcgttgcaaatctgatctatcaacggcaccatatagcagcaatacgctacctgaggaagaacggaggttctatctctacaatgatcttagagttgtatttcctcaaaggcactcagatgcagatgaaggcgagctgcgagtggagcatgatttccccgccgatcccaagtactttgacataagcaactgatggttgcgctgctgcaccggacaataataatctgtaaatatgttatcaacttatcatgactaacttggtcaccagccgtttcatcttttcgccaacaaatgtacaggtcaatgttccaaataaaatgcaccatttagttgtgcctatatgttctttcctcctgatttcgaaaccgtcagagggctgttctgtcatgtttctgaacactagctgtcacctgttaaaactgatgctgatatgtctgtctcttccttgccatggggaaggaattttcctcatacacagctccacctaggcctc

SEQ ID NO: 273125 - DNA, 475 bp, Zea mays
ggtttagttaccgcactttctctgcaaaaaaatggaaaggacttgctccaaggatcagatgacctggatgttagattgatattgcttctggttgctacttctatggcgactgcgagtgtttattttctttatattctaagcactaaatttattggggtgtcatgttcgtactgtttgttctcagcatttctctcattcactctactcttcatcagagtaaaggacatcggttttgaacgtatccagaagttcgctggcattcagttagctgtagctgtcattatagctcttgctttgacaaactcatatagttctgctactactcaattgaaaggcacagatgatttcgtattagagccgtatgaaacagagatatcaaccgaatcatccccatttgccattgcactggctaaacatttgcactctataggtgctaagatgtatggagcattctggtgttctcattgcaatgaac

SEQ ID NO: 273126 - DNA, 495 bp, Zea mays
cttgggtgcaaaatcagtggcggcaaaatgcaggaccgaagcattgcagcgaaagggatctgtgtcagctgggcagcaacagttgtccagatctacgacactaacacagcatgcgcatacatgcttcatttaggattaataactaacctatgtcatcattgcataaattacgctagtcacatgcccttgaggtattcgactcacgtgcaagaggaactaagcactactgcgcggcagggtattaaaatcattgtagagacggcatgtcctggcgagtaagggaggatgccaaacgtggtcagcctctcttacgctttcccgagcccacatagtcgtcaataagggactgcggtggtctattgaatgaactcggtggagtattctcaccctatgaattctttagtgaagctccctccgttggagtcatgttctccgcaagccttttatcattccttgcttgcataaattgataatcatattcttcggacgcgtggg

SEQ ID NO: 273127 - DNA, 1513 bp, Zea mays
gctccctcgccgacaaacagggccgcaagagggcctgcgtcacctattgcatcagctgcgtcctcagctgcatcaccaagcactcccccgagtacagggtcctcatgatcggccgcatcctcgggggcatcgccacctcgctgctcttctccgccttcgagtcctggctcgtcgccgagcacaacaagagaggctttgacccgcagtggctgtccataacattctccaaagccatcttccttgggaacggcttaattgccattgtgtctgggctattcgcgaaccttcttgctgagaacttgggttttggtcccgtggctccatttgatgccgctgcgtgctttctggcgattggcatggctgtcataatgtcctcatggagtgagaactatggagacccatctgatagtaaggacctgatggcccagttcaaggttgcagctaaggcaattgcttcagatgaaaagattgcattactgggagccatacagtcattgtttgagggctccatgtacacatttgtcttcctatggactccagcattgagcccaaatgaagaagacattcctcatggttttatttttgctacattcatgctgtcatccatgttgggtagctccgttgcgtcacgtctattagcccgaaagctcaaggttgaaggttacatgcagattgtgttctcgatatcggctgtcacccttgtcctccctgttgtcaccaacatcctagtgcccacatcttctgtgaaaggaggcagcatatcgattggaggttctcttcagcttcttggtttctgcaccttcgaggcctgtgttggcatattctggccatcaatcatgaagatgaggtctcagtacattcctgaggaagcaagaagcacaatcatgaatttcttccgcatcccgctcaacttatttgtttgtgtggtgctttacaatgtgaacgcattccctatcactgtcatgtttgggatgtgttctatcttcctcttcatggcagcaatcttgcagagacggctgatggttgtctcggatctacacaaatcatcaactaaagcacaagaaatgatcggggaagatgagccactaaatccttagacgtcgacagaaccatacgtgcaaatcagatacgaaggcggcatacacagagcaattcatttccacccgtgcaataagatggaagtcagaaccatgtagttgttttcgtttgtaattttctttctatagtgtaagatttgacaaggctgttagtttgcacctcggatctgcttatatccacagggcaatcgatagttcagcaagtattgagctatacctatgtcccgagaagattagatgagttggcgtcttggcgatcgatgtgggcttttcccgttgttgttccttgcaatttattttcgaaaaaaaaagaaacatgttcgctttaagctttacgatacggtatatattattcttggaagtgttaaaaaaaaaaaccagctcccggacctgtgtgacccggattccgaccgtac

SEQ ID NO: 273128 - DNA, 558 bp, Zea mays
ctgggcagaaggacgacgccatggcagcagagagcgggtgcgggtgcgggtgcggccgtgcgtggtggagttccttgttggccttgcgaagcaatagaggaagatgatgaggaggacgacgacttcgatgatgacgaagcagtcaagatcttccgccggcagaaggtcgatcaagctgtaaaggaggctgtgtcaagggtgctgtccatggtagactctaccgaagcgaggatgcaataccggcgaatgcttgaggagtttcgccaggcaactgcagaattggaaggatcaaatgaagtgacatcaatatttgacagtgatttagagttattagggatcaacgacttcatgtaaggagcatttatgtctcgagatctgccagcccccatcaatgacataaattaagtatttagggaatgtgttccagttgctactaattggccgtctaattgtacagtgttagcgaaatcgaaagtagattatttctgccccgatgtattttcactttctgtatttaggtatattttgacaatggcagatcaattaagtatatttttt

SEQ ID NO: 273129 - DNA, 846 bp, Zea mays
actgcccacgcgtccgttatgataaagcagctgtttcaattcagaagaaatacaaaggttggtaaggtcgcaaacattttctcaacatgagaagaaatgcagttaaaatacaggctcatgtcagaggccatcaagtgagaaagaaatacagaacaattgtaagcactgtcagtgtgctagagaaagtaatacttcggtggcgccggaaaggtcatggcctacgtggcttccgagctgagcagcaaccaatggtcgaagcaatagagctagatgatgaggaagacgacgatttcgatgatgatgaagcagtcaaggtcttccgtcggcagaaggtcgatcaagctgtaaaagaggctgtgtcaagggtgctgtccatggtagactctaccgaagcgaggatgcaatatcgacgaatgcttgaggagtttcgccaggcaactgcagaattggaaggatcaaatgaagtgactcaatatttgacagtgacttagagttattagggatctccaatttcatgtaaagagcatttcggtttcaagatctgagcaatgacataaattaagtatctacggaatgggtttcacctgctactaactaggacctgataatggtcgtcagtttatacagtgtttacgaaatggaaagtagattattgctgctatgatgtattgccactctatatttaggtgtattttcccagtggcagttcaatgaacactacattgtggtgtttgtaacttgttataccccgtttggatgtagatattagagtacaaaattgaaaattaaaaaaaaaaaaaaaaaaaaagggcggctgctcgcgatctagaactacccacgcgtctg

SEQ ID NO: 273130 - DNA, 602 bp, Zea mays
aatttttactgtgccaacacatgcacacactggtggtgcctgcatctagctattcagatcaaagcctgacaggtaccatagggcaaagtgaagaagaaacagaagagttgagcaagatcacgctagagaataaggatattcagcttgatatcaatataagagaagaatcttggagctcttcacaacaagtgaacttttacacagaaagtaccagctccagtgaggcgtgtttgatggagccgaccctatggagctgcatgtttatgattttaaaggacctggtgtaaccttatcaatgtacaatagcgatgagtttattaggccttttgctaagtcctccatggatatggctctttcaaaaaagtcgtctcttcatctcagcaccaagaatacaatcatcaagaagtatgacgacaggcatggatcatctatgtttctacaagctcgcggtcacatttattaggccttttgctaagttcatggatatggctctttcaaaaaagtcgtctcttcatctcagcaccaagaatacaatcatcaagaagtatgacgacatgcatggatcatctatgtttctacaagctcgcggtgatcaacttgct

SEQ ID NO: 273131 - DNA, 476 bp, Zea mays
ggcaaagtgatgaagaaacggaagagctgagtaagatcacactagagaataaggatattcagcttgatatcaatataagagaagagaagcaccatgaatcttgtagctcttcacagcaagtgaactttgacacagaaggtacccgctctagtgaggcttccttgcttggaacggttggttctgaaaagaagcttgaggaactgaagcagaaatctggaagatgtgtgtctgctgtagaaaaggctaacgtggaactggagcatggtatagacggtggtcaagctccagacgaaaagtgtgatcatgcctcagcgaaagctgcaaaggctcctccaagcaagggcagggaggcagacgaaactgcggatacagataaggaagcttttggttctaggacagagaaaaccaggaggaggttacagccagctgctgctatgttgctcagggaattcactggcgctgacattgatgcggat

SEQ ID NO: 273132 - DNA, 614 bp, Zea mays
ccagacagccccccttgatctgggaacagacgatttttacaaatctagagagaacattgcagaatctcagttgaagaggatacgggacggaatggccgaagagatgctaatcagctcatgggagctacatcaggggacatcctgccagggtgttaactgggcccgttattcgttaactgatctacgggctgttgttgcatgcgttggtggccaccgtttggcatcgctcctccgccatctagccgttgattacaggagctggtcgagtggaatgcccgatctgctgctatggcgtttccttgatgaaagaggtggaggtgaggctaaacttgtggaggtcaaaggacccagggaccagctgtcagagcaacagcgtgcatggattcttgttctcatggattttggatttgacgtggaagtttgcaaagtaagcccggtcaccaaacggaaatagttcgcttgctaaatttattctgattattacgatgcaaaatgtatttggttgattagatagaagggcaaatctgtaacgcataagcaatggcattgttgtcgtgttgcactgaagtaacagtcaagctctacttgacatgctatctataactttgagaggg

SEQ ID NO: 273133 - DNA, 740 bp, Zea mays
  unsure (1)..(740): unsure at all n locations
gttaactcaaatggggatgtttgtgccattcagaaagctggtggagagggtgtcatgtcaagtgttatcatgcagtgtttaagaattgcttcggtaaaggctgctgatataacaagcaaaataaagaaagcagtagactcatacaccaccgagaaaagccctaaagaaagtaaaacgtttgccaacctcggttcctcagaaaattaatgtcactaatgtaactatggacggcaaaggtgatggtgaattggaaaagcaatctgtgcagatgcatagtgatgttcagcagataagcaaaggtgatgagaaccagcaaagtataaaaaggaattcacccttgactagggaccgaattgcaaaacacaaacaaacatccacattcattggtggcccatcaaattgggacccatattctaaaggagtttcattaagatccctcaaaatttctgatttgccggatccaccaactatggtcaaggccagcagccgtgaggatgcccaaccaatgactgaatcatctaatgctgaggtgaacacatcaagtgctgtggctgctggagagtctgagtcccatgaaattggatcgccgaagagtctaaaagatgctatcaaaccaaaacataaaagaaagaagaagaaaagtgacaggagttagtttagttgcaagcctgtaattttgtatgccccaggtgaggtgttatttgngctgntgttctgtatttttttgggcgttcttattg

SEQ ID NO: 273134 - DNA, 735 bp, Zea mays
cacaaacaaacatccacattcattggtggtccatcaaattggtagtgattggtctgatcgtttgtttcccaatttctagatatttagcataaacatttgctcgacacaagttttttttgccaactggtccttttttttttgccatgtagggacccatattctaaaggagttacattaagatccctcaaaatttctgatttgccggatccaccaactatggtcaaggccagcagccgtgaggatgcccaaccagtgactgaatcatctaatgctgaggtgaacacatcaagtgctgtggctgctggagagtctgagtcccatgaaattggatcgccgaagagtctaaaagatgctatcaaacccaaacataaaagaaagaagaagaaaagtgacaggagttagtttagttgcaagcctgtaattttgtatgccccagataaatcaaggacagtctacaacacctcaaactcctgattgatgaggtttcatccggggtgccatacatgggtttttttgtgttttcaatcgtgactggtgctagtagtgacaggcaaattttgtacaagctgtagaattgtattttaggaatggttcagttaagctttcagtcaactttgcagctagttctgtgatgcgtgatgtcccagcactcctacatttcattgtactgctcagcgttaatcttccattgtccaaacggtcgtaagaaccgccacatttgttccaacagtcttc

SEQ ID NO: 273135 - DNA, 844 bp, Zea mays
  unsure (1)..(844): unsure at all n locations
cggacgcgtggggaacaggggaagcagacagataactcaagctgtttagtgcagacaggcagctcaagcaggagtcggaattggatgatgaatcggattaaggagggagagatcaaaggaggggaagagatanggaggcgggggccggggagggagatgagagggtggtcaggaggattacctggtggtggtggtggccggtggcaattcgtgagggttggcggcgcgcaaccgctgacggtggcagcggcgcgtctagggttgctgtgctcgtgtgcgggagcgggagtcaccaagtatagcgaaggccatacaggtcaaggagtcgcagaaccatgcagcaccaaggacgatggatgcactctttgcacggatgaaggcgcaacgcatgaggaccgcaccacagcagcaggcaaatcctgcctctggacgtgatttcaaccagcagcgacgtgttcagcagcagcagaggcgaggtagagcatatggtggccgtgttgtcggcaaccaatgagcatatttggtgcatcgaagccccttctcttcactggtcttaaggaccttgagggctagtttgggaactctatgtttctctattttctcaagtgaaaatgagctaatttttcttgggaaaatgaggttttcaaactagccttgaatgaaaggacgccgggggaaaatctaacttgactttctttgttggatgaaaggatgtggacagaatatgaagcgaattttgtgtgactctagttgtctgcttctgttcagcatgtacactgacctacggaaattacttgctagattttgatgtcatgtttattgagttgatttggttcgtctcttc

SEQ ID NO: 273136 - DNA, 887 bp, Zea mays
gcgatgatatttcagaacaagtccgaacgaactgaaggagaggaggaggaggaggaatggcggacgcagccagaggcctcgggtcttcgtctctcccggtggctaacgtgcaggcgcttgcggagtcttgcaacgacaacggagccgatgcgccggtgcccgggaggtacctcatcaaggatcctagcgccgaggaggtcgtagccgccggcgacagcgcctgcacgattccggtcatcgatttccgcaagctgctcgatccggggtcgtccgaggaggagtgcgccaggctgggagccgcgtgccaccactggggattcttccagctcatcaaccatggcgttccggccgaggtgactgggaacctgatgaaggacgtagctgggttcttcaggcagccgctggaagccaagaaggagtgcgcgcagcaggccggcagcatcgaaggctacggccaggccttcgtcgtgtcggaggaccagaagctggactgggcggacatgctcttcctcatcgtgcggccgagggaggccagggacatgcgcttctggccgacgcgccctgagtccttcagggattccgtggacgcgtactccttggaagcttcgaagctagcgtaccgcctgctggagttcatggcaaggggcgtgggtgccgacccggcgtcgctgcagagcatgttccaagggcaggtgcagggcatgcgggtgaactactacccgccgtgccggcaggcggcggaccaggtgctgggcctgtcgccgcacagcgaccccaacgggctcaccctgctcctgcagatgagccacgacgtgcacgggcttcaggtcagcaaggacggcaggtggttccccgtgcaggctctccccggcgccttcttgtcaacg

SEQ ID NO: 273137 - DNA, 491 bp, Zea mays
gtttcatccttcgaccccggtcgtcccgtcctccgctgggcatcgaaagtcgaacgcctcccccgccctccctccctcccagttccgtcgtcggctcctgcagcagcagcaagcaatggcggcttcctggagagccgtggcgctggcggtggccgcagtgggctggcttcttgccggtgccgcgcgggcgttcccggccgaggacttggtcgcgcggctgccggggcagcctccggtcacgttcaggcagttcgccgggtacgtggacgtcgacgccaaggccggcaggagcctcttctactacttcgccgaggcgcgggaggacgccgccgccaagccgctcacgctgtggctgaatggaggtcctggctgttcttcggttggaggtggtgctttcaccgagctagggccattttatccgcgaggagacggccgaggcctcagatcgaacaagaagtcatggaacagagcgtccaatcttctgttcgtgg

SEQ ID NO: 273138 - DNA, 1261 bp, Zea mays
gaacaaattgcgtcatgtggtggaattaatacaatggcctccttgatcattaaacattttccctcatttgatttctccatggacagtaacaatcaaatgaaagaaagagtatcctctggtgatctgtcgtcttcccagaacagcaagtcactccaaatcaaaactaagcagttgcgggcctatgaacttgattttctggtcgccatattgggattgcttgtcaaccttgtggagaaggatagccttaatagggtacgacttgcgaatgcccgtgtttctgtcaatctatctcaaagtccagatactgaagaggtacagagggatgtcatacccctgctctgttcaatattcttagcgagtcaaggtaccggggaaactgctgaagctatatcaccggatgatgaagaatctctgttgcaaggagaacgcgaagctgaaatgatgattgtggaggcctatgcagctcttgtgctcgcctttctttcaacggaaaggttcatagtgccttatttcataatcttttcttaattagttataattttaatgtgagccccaccccactgccgtcagcttatgaactgatgtttgctgccacagtatgaaggttcgaggagccatttctagttgccttccggacaacaacttgaaagttcttgtaccagtgctagagaaatttgtgtcatttcatctgcagctcaacatgatgacaagggaaacgcattcagctgtgactgaagtcatcgaaagatgccggctatcatagaagtgggaagaggcgccctgtacagattagctgacctctttgcagccgaagcacacacaggtgttgctcatcacctggccagggcgtaacaaatggatgccagaggctggcctgcagtgggctttgggagctaacagtgattttattctttcttttgtccctagtttcttgttctccgcatcccccgaaatcacatgtttcattgtcgtaggaatagtccgtattatgaatgtacaataacagcataggccgtagggggaatgtagttgtgctgtttcagttcctgggctgtctgcctttcaggttgtatgctcgtgtcacatggaatcagtgaccgcatgcctaaatctgagttaagattgtatatcacataatagccgtgcaattcaactatgtagccctatgtacagaggcgccatatattgaagcatcttctggttgcaaaaaacatgaatgttgtataaatagtgtaactgaaggtatacaaatcttccaggc

SEQ ID NO: 273139 - DNA, 273 bp, Zea mays
gaagaggtacagagggatgtcatacccctgctctgttcaatattcttagcgagtcaaggtaccggggaaactgctgaagctatatcaccggatgacgaagaatctctgttgcaaggagaacgcgaacctgaaatgatgatcgtggaggcctacgcagctcttgtgctcgcctttctttcaacggaaagtatgaaggttcgaggagccatttccagctgccttccggacaacaacttgaaagatcttgtaccagtgctagagaaatttgtgtca

SEQ ID NO: 273140 - DNA, 620 bp, Zea mays
ccgagacgcagcgcgaggtgcggccccgtcccctcgccaccggaggagcaggacgacgaggtggcgccggcgcgaggtagtcgcgcgcctggaagagcggcggcatcagagtcgcaggcggaggcgaggaagtgaggggagagccctatagccaccgccgcggggcgtcctgctcgctgcacgcactcccaccattttgtccgaactcgaagcgcccgctcgtgctgtcgtgcacttcccctcccctagcatcccaagctcctccctgagaaaacaggagatgggaagagacggggaacagactaggcgccggagccgcaagagatcccgcgacgccttccccttctcgtcggattccgattccttcgactccccatcctctccgagcagtagccctgagcgacggatccgcagcagtaagcggaatagatcatcctcatcgcaccgccgcagccgcatgaaaagcgaccggtcgcggagatcccgcgacgaggaccgccggcggcggagaagacgggcccaggatagaaagcggcacggtggagatggtggcaggtcctctgactccaaatcgtctgaggaggataggtcggacgaggcgcgggagatcgtccgagata

SEQ ID NO: 273141 - DNA, 816 bp, Zea mays
ctgccttatgatgcagatatggaagttgctggtgcagctgattttctctcgagtgcttggcagtgcaagtgctcatatgaaacacaactgaacgcactgctcaaccaatatggcgtgcgcactgaagcagagcttgtgacagagcatatatggtcgcttcccaagtacagcagcagaaggcagggggacataaaggagaggttgaagaatgcatactatgctcttcacaaggagtttaggagcattttcgaaagcattgtgacagatcaaacagagatctctgatgatgagaaaagtcggttttacgagatgaaggcctccgcttggtaccaggtaacctaccatcctgaatgggtccagaagtcaagggaaatgttcaagtctgactgtgaggacatgccagcaaggcttagctttgcatggatcgcggttgagcacctggcacggattaagataaggtgccgtggagaagtgaaagtggacagcccaaggcctgttgagaggctcgcagcctacatatctgggagcatgtgagttgacgtgaagctccaagcaattgtgaagcaagaccactctgccctctttgccatgccatctgaactctgatgcatggctctgtctagtcacttctttttacgaattattacatagttgagacacagccactctataagcggctaaagcgtacgcacatttctacgaacgataatgcttttaagtctgaactgttcaatctctattactaccagaatgtttgtggacataaatattagttcgtggtgtctcaattccaaaacggttttcttggtggttgtg

SEQ ID NO: 273142 - DNA, 960 bp, Zea mays
caccggtccaccgcgcgtccccgttttcggcggtagggcagaacagaacaccggagggggagggggagcgcggcgcgtcggcggcgctgtgggggcacgcgcacctcccactgctggcgcgcgccgggtccaaggagtcggtcgagtacatcctgcaggcgctctggcgcacgcgccgcacgggcctcgacgccgccgaccgcaccgtcgcccgcgacgccctccagctctcctccgacgccgagctcgaccctctgctggtgtgcctgaggatactgatcagacggtgcgtcaacgaggacttcgccaaggacgacatccccaagctcttccccgaggaggtgccccccgagctgcagaagctgctcaccttgctgctgcagaagttccagccggagtggcaggcggatgccgccaaggatcaggaagccgcgctgcattccagcgcggcagagtgccaatcgaaccaaaatggagacacgtcagagcaccgagatgctgctaatgcagagcttcagaacggtgcagcacctgttaagggttctctagaatcaggacagaaagaagtgaagaagtctccgttagctaaggattctttggacaaaatgctgaaggacttgttctcaaccagggaccaaatggcaactgatggcaggaacaccggtcacgaactcacgatggggtagctggcagcacttagggcctgtatggctaatccattgctcatcagtaatttggcatatcaatgcttcgttggtttccttcgatctagatcactgacacccacgtcgcacggcagctgcattccgttgttgttagcgagaatgttaatgctaactacttcctccgttcttttttatttatcgtggtttagtttatttttatttgttgcggtttagttcattcaaaaatgaactagagagctacaaatatttgaaccgaggtagtatatcattgcct

SEQ ID NO: 273143 - DNA, 482 bp, Zea mays
atctaccggaggcaagatcataaaaaaactgagtgagttagatgagctgtcccggacaatctttttggtgtgtgaagaggaggcagaacttgcattggttgcagcaaaaagtggcatcaaaacattcagcagtgactggttcatgagctgtgtcatgaaacaggaacttgaccttgaggcccctcagtttattgtatctctatgatgtgcctacagttcaagtcctcctaactcctaatatatctctttctttggttgggatataaattgtttctcctggttcttcgtggatatacaaattttctcatttccttagttacaaaagctgaagtagtgtcaaactagttatcatcctgtgacgatgatgacctgtttaaatggaaaaggttgcggtggagctattccaatttctgtataggcccatttgattcccttcattttgagtaaatggaaactaactaatggagtaggttatttctttt

SEQ ID NO: 273144 - DNA, 414 bp, Zea mays
cgtccatcggagttgcacatccatgtgagttggcagaggtgtttgatgtgatgtgggcatttgtgttttatgtaatagatagtatcatcctcgctcgttgtgccgccttcgtccacacaagcgacggagctaaggttacgagaaccggcccagtggcaccatgttggtctaccaggatctgctatctgacgacgacctccagtaggactccctcccctacaggcaactcaggaacggcgtcacagacgtcgaggacaagtgcactatcaaatacgcgatctttgccgagtgcatataatcttgccgagagcaaaataaagcaaaaggctatcggtaaggaggcagtattctgagtgtcgtcctctcggcagagatagacacctggtaaccggtggtggcacacggtgtgatcgc

SEQ ID NO: 273145 - DNA, 699 bp, Zea mays
  unsure (1)..(699): unsure at all n locations
cccacgcgtccggtttgtctggtggtacaaatggacattcagacatgtgctacttctgtcccagatttaaaaaaacacagaaatctgctggtgtccttgaacagggaaatgttgctctggatgttgctcgcattcttctacgctgtaaagctgagttggctactacagacattactgattatgcattggatgctctacgtggcagcacgataaggaaggtatatttggttgggcgacggggtccagtacaggcagcttgcacagcaaaggagctgcgtgaaattttaggtttgaaaaatgtccgtatttgcatcaaggcagctgatctcgtgaccacacctgcggacgaggaggagatgaggaatagtagaatacaaagaagagtttatgaattgttgtcgaaaactgcgcatgggggcaacaattacaatggccaaaaggagcttcattttgtgtttttcaggaaacctatcaggttcatccctgcagaaaatggttctacggttggtgctgttcaacttgagaagacagtattaaaaggtgatgaagtaactgggaagcaggtcgctgctggaactggtgagtttgaagacctaaaatgtgggtaagtgctttggctggggcttatgcttttctgttggtttatgactgcttcaccattgattntaaagccgtctaatatgctaccttcttagtctg

SEQ ID NO: 273146 - DNA, 904 bp, Zea mays
tgcggacgaggaggagatgaggaatagtagaatacaaagaagagtttatgaattgttgtcgaaaactgcgcatgggggcaacaattacaatggccaaaaggagcttcattttgtgtttttcaggaaacctatcaggttcatccctgcagaaaatggttccacggttggtgctgttcaacttgagaagacagtattaaaaggtgatgaagtaactgggaagcaggtcgctgctggaactggtgagtttgaagacctaaaatgtggtctggtcttgaaaagtattggttacaaatccttgcctgtacaaggtttgcctttcgacaaaaacagaggagttgtgccaaatttaagaggaagagtcctgagcagcgaatcagagattgcgacagtagaaagaggcctgtatgtggtaggatggttaaagagaggaccaactgggattgttgcaacaaatctccactgtgctgaagaaacagtaggtggctagcatccttgaagatgataagaagggtgtattaaggcccccatctgattcgacgaagcatggaagggcaggactccttgagatcctagagcgaaagaatgtccgctttgtgccattcagtggctgggagaagattaattccgtggaaaagatggcaggggagctgagaaataaacctagagagaagatcacaacctgggatgggctccagaaagttgcacacgagtaaaaggacgggcctcggacctccacaagattttgtcaacgtattttttgtatcaaaagaatcacattaacgagagagaaccctgtacttagcaataaaagattatatcaacatatcttgctcatgttaaggggccgaattttttgtattttaatccttttttcgaaacaatttcacgtttaaaaaaaagcaaa

SEQ ID NO: 273147 - DNA, 614 bp, Zea mays
  unsure (1)..(614): unsure at all n locations
gatcattcggatgcccttgcatcacaccaaagtgttggaaacaagaatttttgccagagcgagacattgcaagatatgggcatggatcaatctggtcaacccactttattctgcgaagcatcaatggcaacactactgagaggacttgcaatagctcccattcagcttagcccgtgtaccaacttctttatttttctggccattgatacagcctgaaggggcagccagcgatgacattgcattgggtattgctgttggtagcacaggaagaggcaaccttcctggttctacatcagatattcgagcagcgcttcttttacttttgattggtaaatgcacagctgatcaggaggcactaaaggaggtagaaggcaatggggttcttcaggggccttctggatgacacagattcaagggtagcatatactattctgctgcttttcttttgaagagaatgatgacagaggaactagagatctaccaacggatgcttgaaagcctcatctcaaaagctcaacagatgctatgcgtgtgtttggttgcaggtcctgtggtagcctggcttactacatgccttcccgcatggagatggntgagcatacatgcatcgatgc

SEQ ID NO: 273148 - DNA, 501 bp, Zea mays
aactgtcgtgacatcgtttggacattttctaagaagcaaaagatgacccatagaactgaggcattttgatgccatgtttgatccttatgttaaatgtcggtctccaccaaagatacttgtcatcttgaatcctcgatctggacatggtagatctagcaaagtttttcatggaaaagtggaacccatatttaaggtatgtctagctgagtagaagcatgcatcttatctcaagattggatctgtgctgtcgcttctactacgaactttggtatgatctagtcatgcttcccaagatcatatttagtcgggtgtttcatacaacctaagatgtttataaatgagttgtagacaaatttataagctttctagaaattcttggatcacctcttttggatgcctaaatctccagttatggagttttgaagtgagtagtcgaattccgtccaaatttgacagcattatcatttaatactgattgaccttttaagtgtctaatctcat

SEQ ID NO: 273149 - DNA, 772 bp, Zea mays
ttgatccttatgttaaatgtcggtctccaccaaagatacttgtcatcttgaatcctcgatctggacatggtagatctagcaaagtttttcatggaaaagtggaacccatatttaagcttgcaggtttcaagatggaagtggtaaaaactacacatgctgggcatgcaaaatctcttgtatcaactattgattttagtacctgtcctgatggtattgtatgtgtgggtggtgatgggattgtaaatgaggtcctcaatggtcttctatgcagagatgatcaaaatatgtctgcctctgtaccaataggtataatacctgctgggtctgataactcacttatttggacagtcttgggtgtcaaggatccaatttctgcagcattgtcaattgtcaggggagggcttacacctattgatgttttttctgttgaatggattcaaagtgggactatgcattatggtacaaccgtatcatattttggttttgttagcgatgttcttgagctctcagagaagtatcagaagcattttggtcctttacgatactttgtagctggttttctcaaattcctgtgtttgccaaagtacagttttgaattggaatatcttccagtatcagatgttaatggcgccgagcataaaattttggtaggacaagaaaaggttgacgcgtctgatctatatgatgatgtaattcggagatcaagagcagaatgtttaccacgcgcctcaagttatctagcattgattcaataatgtctacaggcatcatg

SEQ ID NO: 273150 - DNA, 522 bp, Zea mays
cccacgcgtccgcttacacctattgatgttttttctgttgaatggattcaaagtgggacaatgcattatggtacaaccgtatcatattttggttttgttagcgatggtaaatattcaacatgtcagactttttacctgtcttggttctttaaattagcctttgagctagccttaggtaactttttagtttttctgcaatttaaaaagtgacggcccatcatctcttgcagttcttgagctctcagagaagtatcagcagcattttggtcctttacgatactttgtagctggttttctcaaattcctgtgtttgccaaagtacagttttgaattggaatatcttccagtatcagatgttaatggcgccgagcataaaattttggtaggacaagaaaaggttgacgcgtctgatctatatgatgatgtaattcggagatcaagagcagaatgtttaccacgcgcctcaagtttatctagcattgattcaataatgtctacaggcatcatgtctggggcagagct

SEQ ID NO: 273151 - DNA, 358 bp, Zea mays
cccacgcgtccggttggtgagttgggacttgggagccgacgctgtcggggtgatccagtcgccgccgacgccgccgaacgcgcccgcgcccgagcctccctctacgcggacgcgggaggacccttccactcccagagccgggcgtgtccgatcgtgagcccatggcggaatccatcgtctccggcgccgccgccccgccgccgggcgcgccctcgttctcctacctggccgtgttctccaactgcccgctcgtcgccgcggtgctcgccttcgccatcgcgcagtccatcaaggtcctcaccacctggtataaggagaaccggtgggacgcgaagcagctggtgggctccggcgggat

SEQ ID NO: 273152 - DNA, 682 bp, Zea mays
gcaccaggcgatgcaaaccagtcggttcacattgttgctgatgagggtttggaggcgtatctacctttggctgatatggttgacgtgtctgaagaggttaagcggctctccaagcgcctctccaagatgcagtcggagtatgatgctcttgttgcccgactcaattccccaagttttgttgaaaaggcccctgaagatattgttcgcggagttcgtgaaaaagcgtctgaggcagacgagaagatctctctaactaaaaatcgtctcacttttctgcaatcaaccattaccacttaaatacagtaatccacggggactctaccaggatgccattttgatcgatgacgcaggagaaaactgattgttaatagtttttggttgaaggatatgatagattggcaacgaagttaagacttgtccagcagaaacacacattctttctagttcatatctgttgtctcttgaaacttaaaacatacattcggctaggcatataatttatattcctgacttatggttttagagcctttcgggatgcccttagttgaggtaaattttgttctgcctctgaagttttgctgatgccattgttagtaatattcatattttgtaaggtgggcgcacgttattagatatgaatgatctgtaaggtcggtgcaaaaaaaaaaaaaaaaagggcggc

SEQ ID NO: 273153 - DNA, 697 bp, Zea mays
cattcccagaaaaaaaaaatgatggtgacccgttcgcgtcggctcgccccgccaccatgacccataagcgccacgccgccaccggcttgcgcacgggcggcaccatactgcacgcgctctccgccgcctcggccgcccacctgcacgcgcacgccctgaaggtcggcgtcctcttcacctgcctccacctctgctcgggcttgctcaagacctacgcgtcctccggccgcatcgccgccgcgcggcagctgttcgacgaagcgcctcgccggaacgtcccgctatggaacacgctggtgtccgcctacgcgcgctgcggccacccgcgcagcgcgctggccgccgcgtccgccatggcgcgcggcggcggcggcggcgcgggggcccggccgaacgtcgtcacggtggcgatcctgatgtcggcgtgcgcgaagctgaggaggccggcgcccgggcgggaggtccacgggtacgcggcccggaacgtggccgcgctcgacctccacgcgctcaacgcgctggtgcacatgtacggcaggtgcgggcggctcagggacgcgaggacggcgttcgccggcatcggggccggcgcgaggaacgccgtgtcgtggacggccatgatcgacgcgtgccgcgagaacgggcgccccgcggaggcgctgggggtgttcgaggagatgcgtcggctcgctggcgc

SEQ ID NO: 273154 - DNA, 627 bp, Zea mays
cggacgcgtgggtcccactatgcgtcccatgccacctcgcgtccatgatcgaagccggcaagcggctgctcggcagaagccgctgccccatgtccctcaccgtgctcatcacgcagatgaccatgtccgccaacctgatgtccgacgtcgacgacatcatgcgacgggaagccgactccggcctggacatccgcttcgtccacctccccgccgtggagctccccaccgtccaccacggcctcgaggacttcatgatgcgcttcatacagctccacgcgacgcacgtcaaggaggccgtctccggcatgtcgtccccggtcgccgcggtcgtggtggactacttctgcaccaccctgttcgacgtcgcgcgcgagctcgcgctgccggcgtacgcctacatgccgtccggcgcgtcgatggtcgcgctcatgctgcggttaccggcgctggacggggaggtgtccggggacttcgaggcgatggaaggaacggtcgatctaccagggatgccgccggtgccggctcgtctcatgccgtctccgctgatgaggaaagacccgaacttcgcgtggctggtgtaccatggcaaccgcttcatggaagcccgacggcgtcatcgtcaacacg

SEQ ID NO: 273155 - DNA, 1053 bp, Zea mays
ctctcctccctggctctcatccccccaccgagtcgtcgccccctcgctttcaccccacgcggaagcaagaattcgtcgtcaaattcccagcttgcgcgtgtttctgtggatttcttcccgcttccctgctcctgcctcctatgggcctttgatccggggcttcgtggatcttgggaagaggaggtgtggtgggcgcctcggcggcgatctggcggggaggatatggccagcgggaaggagccgatcgaggtcaggtttcgtctcttcgacggcacggatatcgggcctacgaagtacgatccctccaccacggtctcctcgctcaaggagttcatcctcgctcggtggccgcaagataaggatatagctccaaaaactgttaatgacttgaagcttatcaatgctggaaggatattggagaataatcggacacttgcagagtcccgtgttccagtaggagaggtcccaggaggtgtaattacaatgcatgtggtagtgcgacctccacaagctgacaaaaacagtgagaagcagcttgccaattcccccaagcagaacagatgtgggtgcaccattctctgataaggcgtctgcttggtgctgtacaatctgtgtgtacacataagattttgtatgtgctttgctgtgttcacacaagcatggattcgttttgatatccaattcttgaagccatacaaattccagaagtaagaacccacggaatacgaagatttctggatcgttttgttctagagtgtaggattggatgcttcctgctgtataaattgtgttgtcaaaactgaaaaaaaagtctctttcttttctgctatattgacttattatcgattctttctagctcggttgcttttgattcgtgtaacagaaatattgtactcatgtatatgtaacttgcaaaaggagtaatgtgtggtgttatggtaattggtaaagggggcaagatcctatcgaggaaaacgttaatattaaaaaaaaataaaaatatatatgatggaatccactccctagtttcgggccgcctctcttaaggatcca

SEQ ID NO: 273156 - DNA, 449 bp, Zea mays
aaaatttgtgcttgggcgtatccgtcaatacacgcaccgagaggaggaagcccactacgcccgtctctctctctctctcctccctggctctcgtcttcctctcctcccccaccgagttgccgccccctcgctttcaccccacgcggaagcaagaattcgtcgtcaaattcccaccttgcgcgtgtttctgtggatttccttttttttggccgcttccttgctcctatgggcctttgatccggggcttggatcttgggaaggggaggtgtggtgggccgccgccggcgatctggcggggaggatatggccggcgggaaggagccgatcgaggtcaggttccggctcttcgacggcacggacatcgggcccaccaagtacgatccctccaccacggtctcctcgctcaaggagttcatcctcgctcggtggccgcaagataaggatataac

SEQ ID NO: 273157 - DNA, 731 bp, Zea mays
cgcacctcgctccggatcagacgagaaggaaaaacacgcttgtggagtggttcatgaaattcttagcttaacggtggagaagcgcacgttggtggaccacctgacgcacttcagggaggagttcaggttctcgcagtccctgcgcggcatgatcattcgtcacccggacatgttttacgtatcgttcaaaggggatagggactcggtcttcctccgtgaggcgtacaaggactcgcagctggtcgagaagaaccagctggtgctacttaaggagaaaatgagggctcttgtggccgtaccacgcttccccagaagggccgcagttgggactggcgaggaggctgagggaatgaatggatcattgcagtcgcgggaccaagtgagtgacgaggaatacgacgatgaagatgaggggctctctgatatggaagatctgattagtgagctttctggtggcaaatcggatgctgactacgagtggggtgatggctggtttggtgagaacgatgactccccgccagactttggagacgacgaagtcaaggtcgccatgaaaattgctgatggttctgccaacggcagcgcacctgttcctgtatttcctgatggcagaccaagggaacggtggtaaattgaggtgtttttgaacttctgattgatagaatcgttaatctataatcttagttcttttatcatagtatctagttgcaaagccctttgtcttttgagtc

SEQ ID NO: 273158 - DNA, 496 bp, Zea mays
gctgctccttcccctcatcgccataccgctcatcgtcttcctcgtcctgtcccgccgaagggatgaccagcggcgcttcccaccggcgccgtgggcgctgccggtcatcggccacctgcaccacctcgccggcgcgccaccgcaccgtgccctgcgggaccttgcgaggcgccacggcccgctcatgacgctccgcttctgcgagctccgggtcgtggtcgcctcgtcgccggacgccgcgcgggagatcttgaggacccacgacgtggacttcgcgtcgcggcccatcgggccgatgctgcagctcgtgttccggggcgccgagggcctcatcttcgcgccctacggcgacgggtggcggcagctccgcaagatctgcaccctcgaactcctcagcgcccgccgcgtccactccttccggcccgtccgcgaggagattgtcggccgcctcctcggctcggtcgcgtccgccgcggcggcgagggttgcccgtgaa

SEQ ID NO: 273159 - DNA, 657 bp, Zea mays
  unsure (1)..(657): unsure at all n locations
attgtctatgtggccaacattactttagccanttaccttgctactatcaaccgtataggaaaatctagtggcctcaatagctttggcctgatgtggtgctatggtcttgtctgtggaccttcagtactgttcttgacttatattcagggtgacctaaagagggccatggaatttccgtaccttcattcccctgggtttcaggtctgtgctgctattttcgtgcatcctagcatttctactgaactacaccatcttctggaacacaatcctgaattctgcactcacacaatctatgtgtggcaacttgaaggatttcttcaccgttggaattggttgggtgctatttggtggtcttccttttgatcgtcttaatgttatcggacagggactaggctttctgggctctggattgtatgcctactgcaagatcaaaggaaagtagatgctgatgtctagcggtatcaactggtggtagacggtggtgtgacttggtgtttcattcatggccagtgtgcttaacaaaagtggcgttgtttatcctgtttgctcctacatatgggagagaaattttgtaggtttcctgtatgtattagacttcagccctaatgaacactgcaaaactgaaaaggaaatagagtataccgaatttttactggt

SEQ ID NO: 273160 - DNA, 355 bp, Zea mays
  unsure (1)..(355): unsure at all n locations
ttgaaggatttcttccccgttggaattggttgggtgctatttgggggtcttccttttgatcttcttaatgttatcggacagggactagcctttctgggatctggattgtatgcctcctgcaagatcagagggaagtagacggaaactccattcaggggccagtgtgcttaacaaagtagcgttgtttatgctatttgctccttggaagagaaattttgtaggtgtcctatatgtattgaacttcagccctcatggaccctccaaaactgccaaggaaatagagtatcccgaaattttgctgttgcttttnnnannnngnnnnngggttaataaanaaaaaaaaaaaaaaaanaaa

SEQ ID NO: 273161 - DNA, 435 bp, Zea mays
aattccggggcgacccactcgttcgtttcgtcgaactcgcccgtaggaagaaaccccaccgcttctggccgccgccggctggccggtgacggcatccaaatccatcgcctcccgccaggcgctccacatcttcacgccctcccggcgggcgatgcacatcctcacgtcgtcccgcggcatcgcctcgaccccgcacctctcgtacttcggctggtttgataagatcaagcccaccatcactggcaagaagcccgaggaggcctccgcggcatcctccttcacccttatccagttcgcaaacacgatggagaacgcgtgcaagctgtggacgtacaagaacttggttgccgggcgctccatgctgcccaccgtcgtgagcgtattagggaagcccccgctgtgctgcgctaccctcgtgccatcgaccccaccggc

SEQ ID NO: 273162 - DNA, 447 bp, Zea mays
cccccgcgtccggtcgtcggctatcgcaacagcagcgcctcttccctgtcgccctgacggcctgactcctccctagcagcagaaaaccggcggcaagtcttcggtggcggcgagggaaggccaaggctttgcctgagagaatgcaagacccaagggatgatgatttcttggcgccaaagttgcataagaagaaggttgtctaccggccgcagccatcaggccatctgaagggtgaacctgaactgttgcggagagagtttccgcaatcatcaggcatggtccaaaagccacccaaaagaagcttgaagggtgagcctcgcacgcccccttccgacagggggaccccggattccctgccggaatctggtcctaccgacgaataccgtgcgttaaggaggaagtacctgatgctggaggaagagaatttgcactggacaaagaactgag

SEQ ID NO: 273163 - DNA, 787 bp, Zea mays
gcatggtcaacaagttgttctggatgagtccttgaggaagcatatacaggttctggtgcaacaaggaatcgccggtgtgagtcatcacagcctcctattctctaaaactgcaaccctgcccactctgagtgagaatgatgcactggacagcaaacctcggggcatgcccatgatgccccagcaatattacaagggatcctcatctgactatgtcgccaacggggcatcttttgcgctgaagccaaaggatgaaagtttcactgttcgaaactacattccaagtaacagaagcgcagagagtcctgaagagataaaggcaagaatcaaccggctttcacagaccctctccaacgctgtgctgttgtcgaagctaccagatggtggtgagaagataaggaggcagataaatgagctggacgagaagctgacttctgctgagaaggggctgaaggatgggggccctgaagtgatttccttggatgactgatccaagacgtggagagtctgtgctcggcacaagtaaagtgttttgaatagctttagtcactgggttgtgactagcatcaatcaagtctgctctttttgctgcatctctgggctgggtctatcgtttatgcaatacaatgctttttctgatgatgattatatgaataatataatccccagacaaagcagcaaccattacagtcagacagagatgcagaatgcttggtgggtgtgcttgatcactctatagtccgtccgttcattgtataggcggctgaatcaaaatcagaggagaagggcg

SEQ ID NO: 273164 - DNA, 431 bp, Zea mays
ccacaacccgcctgctagcctagcgcaaccagcaagccgctcgccacgcgtgcgatgccgtgtttggccggttggcccccaacgccgttcggccgccttcctcgccgtcggtccgcgcgtactcttctttgctagactgctccccttctccatcgatcacttgcctccactacgcgcaagatgcaaccgtgcctacgacctgctagtacctagcttcctccccctctctatgcgcgccactccaggcgtcgagctcgcctctgcgggaccgtagcccccacccctcattggctctctgcgcgagcgtgatcgtgcctccgcatcccatgttcaatggatccctaaaggttgtgcttctacgaagatccaaaattccttggactaaaagcttcagcttccaatagtcgttaagggccttgtactacgaactc

SEQ ID NO: 273165 - DNA, 499 bp, Zea mays
ttttcagcaggtactggaaatggaatggcacgatctctactgcatgctgctggtgaaccattctatatatctaatgctgtgttcgcaatcatcagaggtcataaacgtgcccttgatgttacttctgttgtgcagggaaaggcgaggttctttagtgtcctgatgcttacatggggtctggtggctgatgttgatattgaatcagagaagtataggtggatgggaagtgctcgccttgatttttatcttctactccgcattctgaacctgcgacggtacaatgggcgtatcctttttgttccagcaccaggatacgaagaagttggtgatcctgtggaccaagctaccggttacgaaacaaacgggtttagcacgggatttcaagacgacggaagaaccggcagtaatggtgagacgtgtggctatgtgggcccatcgatcaaagaagcagaagctggtcttagatggagatcactgaatgggccattcgtttcagtct

SEQ ID NO: 273166 - DNA, 1130 bp, Zea mays
aacacgcgtcaagggagaataagctggatactttctggcaggaaagactgaatggtcaagacccactggtcatacttactgctaaggacaatattgatgcagcagctgatgaagttttagaacctctcgtcaggaaaatcagggatgaaaaatatggatggaaatatggctgtggagccaatggctgtacaaaactttttcatgctcctgaatttgtccacaagcatttgatgctcaaacatcgagaccttgtattgagttctacgtcaaaagttcgataggatctttatctccaaagctacatgagagaccctaatgcaccaggtggaaccccagtgatgcaactgtctgcaccagacagaggaagacggagacctagcatggacagtcgtctgaaatttgaccgtggcagtaacaaagaacatgataaagctgagagagatggaggcagatatggtagagacgatcactctccaagccgtgatgggcctgatgatcagatgtttgatggtttccgtggacggccctctaatgctccttttgttgctgaattcccccctccaccgatattgatgccagtacctggtgctggtcccctaggcccatttgttcctgcacctccagagatagcgatgcatatgctgagagagcaagggccacctcctccttttgaaccaaatggcgcaccacatggcaatgctggaatgcttgggccaatgatgggtggcccagcaccgattatagctatgcctccaaatttccgccatgatcctcgccgcctgagaagttataacgacctcgatgctcctgatgaggaagtcactgtccttgactacagaagcttgtagggtccagcacctccagatacccgtagtcaagtttcccgttcccccattggtgaattgggcttttttctctttatgaaggcaaaagatggaaggttatgttcaattaaaccaatttttgggtcacctgtagtctgttagattctgttgtaacttgaatactctgtggatgcactgcggttgctacagttcttgtccaacttttttttgacacagtgctgtaataaataggcgtctgtttggaacctgggtggggtggttgtagtgaaagatacgtacttcgcc

SEQ ID NO: 273167 - DNA, 1128 bp, Zea mays
gttactgttgtttaactcgagaggaccaaaatgtgtcttgtacaacatgaggaggatacccgttccttgacccagtcattacagtctaaacatgaattgttagtgcatatggagagcgaaatcaaatgtctacgtgatgatctgatgcgcactgacgagaatttgctgagagaaaagagacttaaggaggaacttgagtctgcccttgctagtcttacatcacagattggtgagaaggatcaaattctactttcttttgatgaacacaaaacggagttcattcatctgaagggccaacttttggacatgggaaaaacacatagtttaatgcaagattcactgtcacagagtgaacaaatccaaagggacctcaactgtaagaatcactctcttcagtcccagctttcaattctggaaaaccagttaggagcagttgttgagaccatgttttccagtgaaattgaagctagttatatgagaagtcaggtaagagaggctgttgtgcagcttaatatgttaagacatgagcttgagaaacttcaactcaaaagtaaagatgctaatgaatcattacgggcacacatgtccactgaagcagaattagctgatagaaatagcacacttgaagcagctatccattctcttgaaaccaaccttagcagtgttattcaagagaaggaaggtcttgaggagcttatgaaaggacatgacgaagcgtcaaatcaagttagtaacaagtctcgtgatatagcagtcaataacagtgatagagtattgaaggatcaagatgggattttacagcttagggtcttgcaggcagatcttgaagagcaagttgataatttgaaatctgcaaaagatgagactgaaattttaaacatgattcttaggtcaaaattggaggagcaacacactgtgatgtcattattgctccagaatcagaggcatgagttgataaattcaatagaagagaacaaggatctcactcaaaaacttgctgaacaaagtctgaaggcagaagagttcaaaaacttgtctatccatttgagagagctaaaagaaaaggctgaagctggaagaaaggagaaggaagggtcgctacataccatgcaagattctcttagaatt

SEQ ID NO: 273168 - DNA, 416 bp, Zea mays
ctgctgaaaaaggttaactttatctctggggctaagcttcaattcggcatctgcccattcttcagtcttaatgtcattgccgccgagtacaacagtgactcaccggtgcatgcacaccaaggatgtcatcactaccagcaccatcaacgactacaatagtgaagagttagtcttctactctacacgggagtaccacaccaaccaaaatggctcattgttgccaccaaacagaatgtatagcctattatgtctggcacttagggactcgatagctttaagggcaagttatgcactcaagtgactatcatagggaagggaggccttccaaggaaagaaggtgcttgttgtcggttgtgataacacctttccaacaataatgttcacacgtacattgtttgttttaaaaaaaacaaaaa

SEQ ID NO: 273169 - DNA, 369 bp, Zea mays
cacctcatgcccagaaatttccggaattcgtccacgtactcaatttctggaacctcccgtacgtcctcatcacctgcacaagccgacgcttgttctcatcctctagctgccgcccttgctttccatggcggcgcttcctgctgctggcaacagcaccgaccgccctccctgctcgccgttcctattctctggcgctcgcccctgccccagccatggacgccgtcgacctcgacttcctctggccgcggcatccgtcctgctccccgctccatccatttctccctcctatggcgcactccttcccctagtcgcccatggccgcgccctctgctcctccccctggcgtctccttctctggttacagctgtg

SEQ ID NO: 273170 - DNA, 1381 bp, Zea mays
ggcgtttcgaggaacttattcctcggagatcaatcataccacaggtcagtcaacttggtgctgtagtgcagaagtaccagtcttctgttcaaagttcagcatcactatcaagtcaggacttgcaaaacaattgtaactcgtttgtcgcatgtgctcgccagttggctaaggcactggaagtgccgttggtaaatgatttaggatacacgaaaagatatgtccgctgcctccagattgcagaggtggtcaattgtatgaaagatttgatcgatcacagcaggcagactgggtctggtcctacagagagcttgcataagttccctaggagggggaattcaggggttagttctgttcaagtccagcaggagtctgaggggcagaaacctgtcccacagaattctaaccagagtggccaaaattctgctcctgcaactggaatggaagcctctgcctccggcaatggtgatgctacgtcaaacaattcactcaattgtgcaccatgtacttccgcaccatcttcttcatctgttgttggtctcctccaaggctcagtaagttacagacaagaccatccaacaagcagtggcaatggtatctataatggcggaaacagtggtccagctgccaaggccaactcaacgaactccatgcaatcaaatggaccggcatcgtttcccttgccagcaccctcagcatcaaatggcaatatgatgcctgctcctcagcactcaagccaaatgaattcaccaaccatgtcatcaaacctacctcctatgcaaacacctgcaagccgacctcaggaacctgagccaattgagtctcaaagctcggtccagaggatattgcaagacttgatgatgcaatcccatattaatggtgttgggccagttggcagcgatatgaggagagcaaacacaattactcctggtctgaatggtgtcaactccttagttggtaaccccatgacaaataaccctggaatcaatgggatgggatttgcggccatgggtggccttggtcaacaaatgagaacggcgatggggaacaacgcattggcaatgaatggaaggaccgtgatgaatcacagtgcgcatgacctgacacagttggcccaccagcagcaacagcgcgatttaggaaaccaattgcttgggggccttagagctgcaaacagcttcaataaccttcaatacgactggaagcctgctcagtagagtgagcaggagtcagaacgctcgcaccgaatatttatacagttatcctagataggtcgggacatcaatgacaacacggaattttcccctaaccacaacctgcccttccttataagcggagagttcttactgatggtgcatgctaaatgtttcttcgaatatatgaa

SEQ ID NO: 273171 - DNA, 584 bp, Zea mays
cccacgcgtccgcccacgcgtccgcccacgcgtccgcccacgcgtccgcccacgcgtccgcgattctgacggcggcgatgacgaggaggaagaagaggtccgccccgggggtggggacgcgggcccggggttctcgctggccatcgagggcgtgctgggcgcgtacggcatggtggtctccgacgcgctcgagcccgacttccccatcatctacgtcaaccgcgggttcgagagctccactggatacagcgccgaggaggtgcttgggaggaactgccggttcctacaatgcagaggaccatttgctcagaggaggcatccccttgttgatgcagcagttgttactaggattcggagatgtttagatgaagggactgaatttcatggtgatctgttaaattttagaaaagattgttctccatacatggccaggctgcaattaacacccatatacggagacgatgaagtaataacacactatatgggcattcagtttttcaatgattctaatgttgacttggggccatcttctggctctgtgacaaaggaacttgcaagatctacatggattgcacctggcaaca

SEQ ID NO: 273172 - DNA, 896 bp, Zea mays
ttgttaccccgcttattggcatcctgttctggggggtttgtgtgaacctactgggctggatgagctttcaggagatcatcgccgtcgagaactacctctactgcttcggcatgatcctggagttcattgccttcatcaagctgcgggtgtaccatccgaacgcctctcggccctacaagatccctttgggcaccattggtgctatccttatgatcatcccacctggtctcttgatcattgtggtgatggcactcgcgtcctacaaggtgatggtggtgagcatcctagcgatggtcttcggattcgtgctgcagccgtgtttggtgtacgtggagaagaagcggtggttaaggttctccatcagtgcagacctgcccgatttgcctgatgtgcaggaaattgctgaagatgatgctgtcccactcgtggtctaatattcggccattgtgctctggaggtgttgttcccaatcgagacatcctaggatggaatgtgacacactgggattcacgaccttgtatctcctgaatgagttccaaagccagaggtcttagacatcttgtataaggacacattatgttttcaccgtgctattgaacatcatgatggcatcatgcatcaaacagaaatgtaagccccagacagtgttcatcaaaggagatcctccagattatcaaatacatgttgcatctgctgtcagctgtcgcttaacttgtctatatactagggtcgatccatgacatgacatgaggttactcatctgggatcgccttaaaatgggtgaacgttaactcttcataagaggcagtagaggttctcgacctgcagattgtaacctggtttccattgcataaactgttatcagtaattccatcttttgcgtacagttttgtgtt

SEQ ID NO: 273173 - DNA, 561 bp, Zea mays
aaggctgatgatggaaatgaattatataatgtcttatggagcagcagcaccttctgttaggttgcttagaaaatatggactacttgatattttgctgcctttccagtcagcatatttgtctgagcagatgaaaggtggttcaagtgacagacatctgatgcttatgaaattactgtctaatcttgataggttactctctgcggaccggccatgccatagctctttgtggctggcgttgttggcatttcacagtacattggttatatatccacaagacaccttggtaataagagcttttgctgcagtgttgtatttcggaacatgggaaacaacagtcaaatttctgagagaagaagttggagctgaagttccatttgccccagagacaatgggtccttctcggaccaaactggattgtcttaaggaacaaacgtcacatctagcatcactagtcaattcttcagtagatatattgacatgtcctcatgatctggagcaatcgctagccagattctcggaacctctgcaattttcaggagtggtagtcgcatctaacaatga

SEQ ID NO: 273174 - DNA, 850 bp, Zea mays
cccggcggcgcgctgacgaggaggtcgctgagaaggccgcgtcggcgaaggcggcggcggccaccgccgctctgcgcggcgtggtgagcgtgccgcagacgtgcgacctgtaccggggcagctgggtgtacgacgaggtgagcgcgcctgtgtacaaggagggcgagtgcgagttcctgacggagcaggtgacctgcatgcgcaacggccgccgcgacgactcgtaccagaagtggcggtggcagcccgatggatgcgacctgcccaggtacgatgctcggttgctgcttgagcggctgcgcaacaagcggctcatgttcgtgggtgactcgctgaaccgcaaccagtgggagtccatggtgtgcctggtgcagtctgtggtgccctggggccacaagacgctgcacaagttcgtcaacaacggatcgctcaacgtgttcacggcgcatgattacaacgccaccgtggagttctactgggcgcccttcctggtggagtccaactcggatgacccgcaggcgcacagcgtcatgaaccgtgtcatcgcctggcgcgccatcgccaagcacgccaagaactggaagggcgtggactacctcgtcttcaactcatacatctggtggctcaacacattcgagatgaaagtcattcgccgtcatcagcatcagcttgaaaaggaggaggagggggtgaggtggagcaagtacgcccttgtggaccggccggtggcgtaccgggaggtgctcaagacgtgggccaggtgggtggaccgccacatcgaccccaaccgaacaagagtcttcttcatgggcatgtcgcccaaccacgtcacgccgtgggcgtggggtaa

SEQ ID NO: 273175 - DNA, 624 bp, Zea mays
ctcacgcgtccgcttctctacaaatctctcttccgcatccgccgcaaaaccctaacctaagcggctcaaccctacgattaccgccgccgccgccccccgctcgcccacgcaagcttgggcgggcctccctcagctcggccaagagcccgaccccctgctccggcaccagcgccgccaccgccatggatatggaagtgtacgagcgcctcaccgccgaaaccagtcactaccgtggcacgcgtttcgatgcgctgatcgggctcgacgaggtggagcctagtgacgaggaagaggatgaggaggaagaagagcgagcggcgggtgccggggctggagacgagctgctctgcccgttctgcagcgaggagctggacgcggtggggctgtggtgccatatggacgacgagcaccatgctgaggtcaatgccggggtgtgtccaatttgcacagataaggttgatatgaacttgattgtccacatcagctcacagcatcgaggtttcttgaaggataagtggagaaatcagcaaggttcatctggggtgcgttattcaacacttgccttattgaagaaagatctacatgagaggataagtggatcatctcgtgctgccccagtcagca

SEQ ID NO: 273176 - DNA, 487 bp, Zea mays
tgattactgtggttcggtgcaagggggattctggaaatgacacccgcacgcctttagtcattgccaggagtatatggcttgctggaaaaaatgctcatcacgtgcagtcaatgcaccgttgtccagttgtcacagaagatatttcgtgcagtgctggtacaagatgggaattttgtatgaggtgagttgaaggagtaattgactctttatgataactgggtagcttcaacaggaacgccggggcttggtggcattttgttcgtctgttttcttctagaagagaaacaaggggaggcaagaaaacatttaggaaacaccttttcgttaatttgattttttatttccatttttagatttagctagtctgtacactgttgttgggaatgggtccgctgttgttggtcgatgcttgtggtggccaataatattacacccaactataccaggctctgcaatggcgaatcatggtgcacattatggtgctctg

SEQ ID NO: 273177 - DNA, 1400 bp, Zea mays
aatagattgaagggatcaattccaggaagcaatactgccagtttttctcctgcttcaaatattggatccacagctcacaatggactatgcccttcttcccgattatatgttgctgatttttcttacaactttcttgtcggaaaaattccatcctgcttgaaatatcttccaaggtcaagtttccaagggaactgcttccaggatgagtactctgtccaacaacgacctttgcaaatttgtacaagtggttctactggccagcaaggtgtcatatacggatccaaacatcctggccataaacatgaaaaaatggagcaaccaatttggcttcttgctttagaaatcgcaactggtgttcttctggttgtttttgtgattactggtatagttactgcttccagaagttgcaagctgaagccttctataagaatatcatcatggaatcgatcgaaaagttggagcgacgagataacagtgttgattgattctgatatgctgaaaagtctaccaaaattaagtcgccaggagcttgaagtggcctgtgaggattttagcaacatcattggctcaactccagagacggtagtctacaaaggaaccatgaaggatggacctgaagtttctgtgatatcgttgtgcgccttcgaaggtcattggactagccaccatgaactcttttaccaaaacaaggtcattgatctggcaagattgaatcatgagaacatagcaaagttcttagggtactgcagggagagtgatccattctctcggatgctagtcttcgagtacgcaccaaatgggacgttatttgagcatctacattatggagagggaggccaattttcttggctcaggcgaatgaagatagccattggaattgcccaggggttaagatacctgcacacggagctgcagcccccatttgctatatctgagctgaattcgaactccgtgtatgttacggaagattttactccaaagctggaggattttgaatgctggaaaatgatgttctcgagacactccatctcgagagacgagaaggctcgtgggcacttgaacagcaaatcctcttttcccggccacggggattctgcagcggatagacaagccgatgatatccaggccaacaccttcgctttcggagtgattttactggagatcatcagcgggcggcttccatactgcaaggataaaggctatttggtcgactgggcgagcaagtacctccagcaggcagaggagatcgggaagctggtggacccggagctgggcagcgtgcggagcgaggacctggcggtgctgtgcagcgtggtgagccggtgcatcgacccggacccgtcgaagcggccgtcgatgcagatcatcacgggcgtgctggagaacgggatcgacctgtc

SEQ ID NO: 273178 - DNA, 389 bp, Zea mays
atctggagcgcaaaggatacacacacctgagctgttgaccaagcgtgcaacagagtgtggaatagatgtcagcactatctcgacctacattgaagtcttcagctatggcgcgcctccgcatggtggtttcggggtgggtttggagagggtggtgatgctgttctgcgccctaaacaacatcaggaagacctcgatgttccctcgcgacccgcagaggcttgtgccgtaatttactgagtccaatgccctgagtttgcagcagagcgtactggttgttttgatgttctttgagcatcgaacatcgctaacttgcaatctcagctactgaagccacggttaccgtggttcagagttcctgttaaattcacaaagctacttgtatctattag

SEQ ID NO: 273179 - DNA, 371 bp, Zea mays
cttcgtcccagatctcaagcccgccgcagagaacgacaggacccaaaccccaattccacaatgaggccgtcgctgatgagatccacctcccagctcctccgccgccggagctactcctccgcatccgggcagcccgagcggaaggtggccatcctcggggcggcggggggcatcgggcagccgctgtcgctgctcatgaagctcaacccactcgtctcctccctctcgctctacgatatcgccggcaccccaggtgtcgcggccgacgtctcccacatcaactcccccgccctggtgaagggtttcatgggtgatgagcagcttggggaagcgctagagggctcggacgtggtgatcataccggccggcgt

SEQ ID NO: 273180 - DNA, 927 bp, Zea mays
attgatgatgagggtgatgaggtcatggtggacgtagaagaagctattgaaggacaacctgaagtcaatggagtttccaatcagttgatcaaaactctgaatatcactaaagatggctcaagcagaagcattgatgttctctctgattcaacagcacaagaatcatttttggaggcggtgaagcccagtggtcgtatcaatgcatgcttggccgtagggaaagatatgctctacttgtatggaggaatgatggaagtgaaagatagagaaattactcttgatgatctatattcacttaaccttagcaaacttgatgagtggaagtgtatcatatcggcctcagaatctgaatggttagaaatttctgaggaagaggatgatgatgatgatgatgatgagactgatgatgatgaaaatgaagagggggatgctagccagacagatgaagatgaagaagagtctgatgaagatgctgcaaagaacgtgtccagtgctgtgtctctgctgaagggtgaaagtaagaccatgcgtagaaaagagaagcgtgctcggatagaacagatcagggtcatccttggcctttctgattctcaaaggactccagtgcctggagaatcactgagagatttctacaagaggacaaatatgtactggcaaatggctgcctatgagcacactcaacacactggaaaggagctccgcaaagacggttttgatcttgccgaaactcgattcaaggaactgaaaccgatacttgacgagctggctgtgctggaggccgagcagaaagctgaggaagaggccagtgcgtcgactagttccaagagggacaccaagaaacccaagcagaagagcgcacgaaggtagctttggttctgaacgagtgtgtaagcggaagccagctttagatgaagttgctccaggaag

SEQ ID NO: 273181 - DNA, 273 bp, Zea mays
gttggacttcgttgtagccaatgccattggaacaagtcctctcagatcatgatagcgaagacgaggttgatgatgacattgccgactttgaggatagacggatgctcgacgattttgttgatgttacaaaagatgagaagcttattatgcatatgtggaattcatttgttcgaaagcaaagggtgctagccgatggtcatataccgtgggcatgcgaggcgttctccagatgccatggacaacagcttgtacaaaaccctgccctgctgtggt

SEQ ID NO: 273182 - DNA, 437 bp, Zea mays
actcgcgggccgacacacgcgtcaacgcatttcggccgtaccccaatctcctcccagcgatttgccttgccgaggtcgccttgccgctgttcccgagcccgacgccttgccgcccctgccctgctaggctgctacagaggaggagaacccccagattttcccacccccatggcaacgcgcgcgccgccgcagtcttcttcgaccggatccgtgacggtgacgatcgacccgtccccctcgtcgtcgtcctcctccgccccgcccgcgtcggcgccggccccggccccggctcctgagtcggtggtgctgcgcctgaagcgccgggctaagaagaaggtgtcgtggaaggaggggacggtggacaacgaagggctcggccgcaggagctcaaagaatgctgcatattccacaaggaggtccccttcgacgaggactgc

SEQ ID NO: 273183 - DNA, 685 bp, Zea mays
atgcctgcaacaatgcgtgcaatacatccgatttactttgccaaatgtttgacaaaggtaagcgataaataattatttgaagagtgcagacaccacaaaccagcagcacttggaatagtgaaaatggtcaagctgataaagatgctattaacgaaaggacagacccagtgggcagtggcccgttctggtggctcccacatgagtagggtctagacaaggaataaccaaggcaagctttactcctgcattttgcagagaggctgcattgaactaggacctttggctcagtgagaaggcttcgcaccactgcaccaggcttgcccttcaataaagatgctattaatgattcattgaattcagcttacatcatgcacgatttgaatgtgaaccttcaaatcatgcactttagattgcagtctccaaaccactcccggttgcccatatcaagttctgaaaaaaaaggcaaagatagaaaatcaagatggtctcatgttagcttcagaatatggtatctttcaagagggatagcaaatatcagttaaacaaaagaaagattggcaacatgttggtgtctttttcggaggattcctttttccatcaattagtaattgataaaaacttctgcttaaactagaatattttaagcttttgtgttttatgcccatccccacctttttaatttggt

SEQ ID NO: 273184 - DNA, 615 bp, Zea mays
gttctcctgcctccgctccgccgccgcaacaaccatttccttctctagccgccgcctccgatcccctcccgaggctacagaaccagttcatccaggcgcgaatggcggcggcgaggagcctgcttctgaggcacctccgcttggcggcggccccgtcagcggcgtccgtgaggccgacggcgtcgttgcatgaggccctgtgggggcagcggtggatgtcttcggaggatgccaagggctctttcctggacaagagcgaggtcactgaacgcatcatcaaggtcgtcaagagcttcccgaagatcgatgacccctccaaggtgacaccagatgcccatttcaagaatgatcttggcctagacagtttggatgcagtggaggttgtcatggccctggaagaggaattcagattcgagatacctgacaatgaagctgacaagattgactccgtcaaagttgcagttgacttcattgcctcacacccgcaagcgaaatgataaagatgcgttgcctggtatagcaaagctatatcgtcattaatctctgtttatgaagaaagttcagtttgaagatgtacactaccgtgcccatttgtatacttctactgatgctact

SEQ ID NO: 273185 - DNA, 353 bp, Zea mays
taccccttggagggggaggacgagaatggtatggttgtggccggaggcaaaagcactgatgtgctgagaccagagaggaggcgccgtcgtcgccgcaggaaccgtgggagattgtttttaggtgctaattgagaggacaggtggccaggtagggtttagccgccagaggagtacatacagaaatgcttccctggtgcctggcattcatcaattcctgtctcaatttacttgatcatgatcatgtaccaagtagttatcttaacatcagctcattgtcataaatttatggtatctcacattcttcgttgaaaaaggaaaacaccgcatccatctcttgcggtttgtgtagcatc

SEQ ID NO: 273186 - DNA, 538 bp, Zea mays
tggcggacgccttaaacccttctccttcctttggtccgcctcctccccgcccctccccactcgcagtgccgcagcatcgtcgccatggctctcctcaagaactccctcatgctcccggggcggttgcgccatgcggcggcggcgctcactgcgcggcgccacgcggcgacgttgacggaagagtacgcgcgccggaactacgccgataacaactccgagtacaacacggtcatcggatcgctcgtcgctcagcgcaagcccctaccttctgcgtgatgcttacgacgacatgatgcttgatggcgtgaagcctgagcgggaaacgttccacacactcatagtcggtaccatgaaaggcagccggctacaagatgcgctttacttccgtgatcagatgaaagaaatgggtttgaagcctgatgttaacctttacaacttcttgatctccacttgtggaaaatgcaagaactcagatgcagcaatcatgcttttagaagaaatgaaggcacatgatgttaagttgaaaggagaaacctac

SEQ ID NO: 273187 - DNA, 274 bp, Zea mays
tatcctacaggtgatttctgttgatcacagtcaatcattactcttgtagcacaggacatcaaacattggtattcagtcctatcaggagttcctgaatctggatccaaggaatcgtcccttagtggattgataacctcctcctgtgaccatttttcaaggccatgtgatttagttgcttcctcaaacttctgccttacataagctccatttctcatgtcagatgtatttacctctatcacattgaagccttgttctctggcgcatgcaaaaactg

SEQ ID NO: 273188 - DNA, 1615 bp, Zea mays
tccaaggccttcgcactctactcatccggctcccccgtgctccagctcaactccaacaacttcaaatcgaaggtgctgaactcgaacggcgtggtgctggttgagttcttcgcgccgtggtgcgggcactgcaagcagttggcccccacctgggagaaggctgccggtgtgctcaagggcgtcgccacgatcgcagcgctcgatgccgatgcgcaccaggcgctcgcgcaggaatacggaatcaaggggtttcccactattaaggtgttttcccctggtaaatctccagtcgattatcaaggagcaagagatgtaaagccaatcgtagagtttgctctgtcacaggtcaaggcccttcttagagataggttgagtggtaaggcatcagcagggtcaaatggcaagacatctggaggttcaagtgagaaaaatgaaccaagtgcatcagtagaattaaattcacgcaactttgacgagcttgttgtcaaaagcaaggacctttggattgtggaattctttgcgccatggtgtgggcactgcaagaaattggcacctgaatggaaaaaggctgcgaagaacttgaagggccaagtgaagctaggccatgttgattgtgatgctgaaaagtccttgatgagcaagtacaaggtggaaggttttccaactattttggtatttggtgctgataaggagagcccattcccctaccagggggctagagttgcatctgccattgaatcctttgcattggagcagttggaagccaattctggcccggctgaagtttctgagttgactggcccggatgtcatggaagagaagtgcgcttctgctgccatttgttttgtatcattccttccagacatccttgattcaaaggcagaaggaagaaacaagtaccttgagctcctgctctctgtagctgagaagtttaaaaagagtccatacagttttgtctggacagctgctggcaagcaagctaatctcgagaaccaggttggtgtgggcggctacggctatcccgccatggtagctctcaacgtgaagaaaggtgcatacgctccactccgtagtgccttccagcgcgacgaaatcatcgagttcgtgaaggaggcagggcgtggtggaaagggaaaccttcctctgaacgatgcacctacagtagtcgcgtccgagccgtgggacggcaaagatggagaggtcattgaggaggatgaattctccctcgacgagctcatgggcgacagctcctcagcaaacgatgagttgtgattctgatgattcttggactgatctgcgtgtcgattagccagactgtaaatctgaggaactctgttttgaaaaatcattccttgagtggcataattttccaggctatggatgctagaatggattaaggagaactgatgtgatagaccttttctttaacgtttttttttatccctgaagtaaagtcagtttggacgtaaaaaaagaacaagtggtctccgctttagaacatgctcttctgcttacactggaatattggatagacagacccaaacttccagtcctactcccagaggacagaagacgaaacatactggagtagtggagcactgcaggcttttggatg

SEQ ID NO: 273189 - DNA, 994 bp, Zea mays
ccttgcttccttccgtcgtttataagcgacggcaacacaggcgaagaagacggggggagaaaggggcgcacgaggcaatttatagggaggaagaggaggggccgggcctgagcagagcaggccggaccagccatctctcctctgaggcgtcgaggggaggcggcgcccgagatgggggactccggcggctccgtcgtgtcggtcgacgtcgagcgcatctcctttggcggcaaggaacaccatatacaaacgaatcatggacctgtatctgttgcagtgtatggtgaccatgacaagcctgcccttgttacttatcccgatattgctttaaactatatgtcctgcttccaaggactattgttctgtcccgaagccgcttcgctgctgcttcataatttttgcatttaccattattagccccccaggacatgagttaggagctgctccaatttcgccaaatgctcctataccgtctgttgacgatttggcagatcaggttgcggatgtcctcgatttctttggattaggctctgttatgtgcttcggtgtcactgcaggtgcctacattctaactctgttcgcggcaaagtatagggagcgggtactaggtcttatccttgtttcacctctgtgtaaaggccccacttggactgagtggttatacagtaaggtaacatccaatctgctgtattactatggcatgtgtgggttagtgaaggagtgcctacttcagccgtacttcagcaaggaagtgcgaggactctctgaactacccgaatcagacatagtgcaggcttgtaaaagcctgctagaccagcggcagagcatgaacgtgtggcgcttcgtacagacaatgaacgagagatacgacttgtctgagcatataaagcggctgcagtgcagaaccctgatttttgtgggcgacaattcccagttccacacggaggccgttcacttgacgtcgaagctcgacaggagatactgcgctctagtt

SEQ ID NO: 273190 - DNA, 600 bp, Zea mays
ctggaatgaacttaaagcaaaactagaaacagaaacagtatgtgtgagccagctcgtgacgggtgctcgactggtgtagcaagattgtgctgtccaaaggacctagaagtctatacagatgcattgaggaggaagtttcagcatctgcctgctaattgcctgtccagggcacatggtgtaattgagatgccagtcccttctccagagtcactaatatttgagccttttattgaaaccgatgaaattatcattgcaaataaattagaggatggtagtgcccgccatcttgtatggaaaggtgaaaatgactggcttgaaataaccgttggtgtagttggcaaacgtggagaaatgcactcattaaatccaagtatcacagtgaaagaaagtggtgatattttatctcttgaggagaaatttcaaggtaagtaacattcaaatttttctagtttgtactattttccttatatgatctcaggaatgaagttgtaccaggagttgctagtgtgagtccgtcttttgatatattttgtttaaatagttggtgggatggcatggaaatgcaatatgccattgaggtgaacattgacttgggatttt

SEQ ID NO: 273191 - DNA, 623 bp, Zea mays
tgagatgccagtcccttctccagagtcactaatatttgagccttttattgaaaccgatgaaattatcattcaaataaattagaggatggtagtgcccgccatcttgtatggaaaggtgaaaatgactggcttgaaataaccgttggtgtagttggcaaacgtggagaaatgcactcattaaatccaagtatcacagtgaaagaaagtggtgatattttatctcttgaggagaaatttcaaggtggcactggaatcaacttgacaccacctcctgcaacaattatgggcgaggatgctctgcagaggtgcaagaagagtatcgagaccatggcaaacgctctaggtttggaaggcttctcacgcattgatgcatttgtcaacgtgcgaacgtgggaggtgctgctgattgaagtcaacactgtacctgggatgactccatccaccgtgctgatccaccaagcactcgcagaggaaccgcccgtgtacccccacaggtttttccgcactcttctggatttggtgtttgcaagggcaaaatagctatctcacatttatttttctttttacggtgcgtcggtttgattctgtatcagtcgagtagtatttttatttatatttgtggg

SEQ ID NO: 273192 - DNA, 437 bp, Zea mays
gccttggagtgctagattctgtttccattgtccattctcagtcacctgagcagccgaacgttctcagtcacctgcagggcaggaaccaacgttgccgggcatccaccgctactccgccgagctgcgggtgctgctcaccatcattacccgcctcctgctgctggccacggcgtggccggcattgcccgccccagcgtcgctcgagccgtcgctgcttttcccggccgccggcgccacctcgcccacgcagacccagtcagccggggtcgcctccacaatcccggccttcccggagcagtcagaggccgccgcggctgctgccacctccgtctgccagctcaccccgtcgcctccgctccttaccgctgtcctagcatcgtgcaacgccaatgccggcgggagtggcgtgacgctcccgccgagcctaagatgctgcc

SEQ ID NO: 273193 - DNA, 590 bp, Zea mays
gtcaggatgacctgaggcttgaaattgaaagattgaggtttaaattgcgacggcgtcataagcttcacgaaggtgctctgcgtgagtcattagacaccacccaaaaactgcgtaaatcgggcgctcggcacattgaggatgaaatcaagctgaaagaaatccaactggcagaggacacggtaaggagactagtaagaaaacaggagatggaagaacgcgaagcagcgacagaagctgagttttatcaacgctccgatgaaatggaagcaaaacagagttatgatggtgcgcaagaagctggtgagaacgaaatgggaaagaagattgctggtcgcggttttggcgagtataataggtacacgtgggaggagattcaggcgtcgacgtcatcgttctctatctgctcttatgatcggtaagggatcgtatggcacagtttacaaggcgaacttcgtcatacagtagcagctgtcaaagtactgaactcccctgaaggctgtggaactcagcaactacagcaggagctcgaggtcctcggcaaaatccggcaccctcacctgctgatgatgctgggagcatgccctgaacac

SEQ ID NO: 273194 - DNA, 1673 bp, Zea mays
ctccacgccaggagtgggcgagtggcacaccgcacaccagccttcgtgttcctcgcggtttcatccactcccgtcgcccgttccacctgtgacctgccaaggcaccaagcctgaccgacttcgcttacggttcccggtgacccccgcccaccctcctcgcgatgtctgacgtcacctccgactcggcgcagagacgccgctcgccgccgccgccgtcgccgtcgccgtcgatgccgcgtttccagcagcagccgagcgggcgccagccgcccccgcccggcgccgaccccttcgtcttcggcgtcgtcgccttcatcgccatctgcttcgtcctggtttcactctcagtcccatcaagtgttctacatcaagttcctgaaggacatgttggggtatactggagaggaggtgctcttctgaagacaatcacccctccagggtttcatctgaagctccctttgatcacccagtacgagccaatacaggttacacttcaaacagaccaggtcagagatattccttgtggaacaaaaggtggtgttatgatcagctttgacaagatagaggtcgtgaaccgccttcgcaaagagtttgtgcatgaaaccctactcaactatggtgtgcactatgacaagacatggatatatgataaaatccatcatgagattaatcagttctgcagtgctcacagtttgcagcaagtttacattgacatgttcgatcagattgatgaaacaatgaaagaagctattcaaagagactgtacacgctatgctcctggaattgaaatcatcaagtgttcgggctacgaagccaaatatacctggtagtatcagaagaaactttgaacttatggaggaggagcgtacaaaggcactgatcgccatcgagaagcaaaaggtagcagagaaggaggcagaaacacagaagaagattgcgctatctgaagcagagaagaacgcgcatgtgagcaagatcctgatggagcataagctgatggagaaggacagttccaagagacaggagaagattgataatgaaatgtacctggcacgagagaaagcactagcagatgcaaactactacaggattttgaaggaagcagaggcaaataggctcaaactgacacctgagtatctggagctgaggttcattgaatcaattgccaacaactcaaagattttctttggtgaaaagattcctaacatgatcatggatcaaaggttgctcaagaattaccttgatgctgttcctaggaaggaccattatgaaatgtagccgcgggttccgtgggttggaagcagaagtctttcttttttgtgtgatcccacgcagtagataggattaccgtgtagccgtccagtatactagtaagccagaaaggagtcatcaggatcctcttgaagatgaaattagcagtcatgagatctttggcttgttttgtgtagtagcagcattagggcacctggagcattcgcatgtgaccgacagtgatgcaaccagtgcaaatcctgtagtcttcaaaactgatggtcaaggccgctggcctccaaacccaggtaatctcttgaaaaggatctgggttataatttttgactgatgggcagaacaatttgtagcactgctgatgccaagttttctcgatcataaatgtgcaagtttctccctgactt

SEQ ID NO: 273195 - DNA, 1192 bp, Zea mays
cgcccgcccattcgtccggttcgtaccacacctactgtcaaaaacatttttggaaggttatgttcaggggaacattgacccaagtgaggcagaatctatcgtagaagaaatcgaaaacactatatttactacgcccaattctttgttcaaatccatgtctccatcagaatatcttattaaaagggtcatcatgcttgaaaatgacttgaaatgctactaccaaactgagggattaaaccagaagaatgagaattcatcagttatccaatatattcaggtgcatcaagatgacgccattttgaatatcaaacttgagctgttctctctaatagcaaatcagccagccttcaaccagctacgaactggtgaacaacttgggtatataacaagtctttctctgagatccgactatggagtcctggcactccaggttgttatccagtccacagtaaaggatccttcgtatcttgatggtagagttgatgaattcttcaagatgtttgaaagcaaaatctatgaactctccgacaaggacttcaagagaaatgtgaaatcactaattgattctaaactggagaagtttaaaaacttatgggaggaatcagatttctactggggagagattcaggcaggaactctgaagtttgatagggtcgagtctgaggtcactatgctaagagagctcaagaaagaagaattcatagagtacttcgaccagtacataaaagtggacgcgcctcaaaggaggacactaagcgtgcaagtcttcggcggcaaccattcggcagaattcaagacggcgatcgccgaagccgatccgcccaaaatgtacagaattacagacatattcggcttcaaacgatcgaggccgctgtacagctcactcaagggaggtccgggcaggatcaccatggactgacagccatcacgcagctattccctagttttcatgtacgtacgtagtgtaacggcctgttcatacgcctgaattccatcctgaatcctgcatcagattcgattgcacgattgatgctattcttaactgatggtttgttatgttaaccaataatgcacgacagcgtgtcactttctgggcagatatagggggctgtataaataaagtcatgtatgttcgcatgtctgtatgcatttcttctgacagctatgcattatgtacagttacagttaaaaa

SEQ ID NO: 273196 - DNA, 490 bp, Zea mays
ctatgctaagagagctcaagaaagaagaattcatcgagtacttcaaccagtatataaaagtggacgcgcctcaaaggaggacactaagcgtgcaagtcttcggcggcaaccatttggtagagttcaagaaggcaatcaacgaagccgacccgcccaaaatgtacagaattacagacatattcggcttcaaacgatcgaggccgctgtacagctcactcaagggaggtccgggcaggatcaccatggactgacagccggcaatagcatgccttgtttttcatgtatgtagtgtaatggccagtgcatacgaatgatgaattcgattctgaatcctgctcctgcatcagattcggttgcatgattgatctatacttcactgttggtttcacgaccagcgtgtcactttctgggcaaaatctagggagctgtataaagtcatgtatgttcacatgtttgtttgcgtttcttctcacagctacgcagtttgtac

SEQ ID NO: 273197 - DNA, 681 bp, Zea mays
cacaaatccaacaaaatctaatatgtactcgcacaaaaacaattagccatatatattttttaatttaggtcatcaacactatgcactaaggaacactatgcaagcactgacggggctgggcgggaggaacctagcgaggcgccacccatcgtgtttcctctgaggctctacgatcgtcgttgtcttgttgcatgcactgaggctgaacgtgctgctgctgctcctctgcctgtgcgcgttccccgccccggcgcggtcccagaacgcgaccacggccacggccgcgccgcgcgtccgtcgaggggttcaactgctccgccaaccgcacgtacccatgccaggcgtacgcgctctaccgcgccggcttcgcgggcgtgccgctcaacctcgcagccatcggcgacctcttcgccgccagccgcttcatggtcgcgcacgccaacaacctctccaccgctgcagccccggccaccgggcagccgctgctcgtgccgctccagtgcggctgcccctccgggtcccccaactcgtacgcgccgatgcagtaccagatcgcgtcgggcgacacctactggatcatctccaccaccaagctgcagaaccttacgcagtaccaggccgtggagcgcgtcaaccccacgctggtgcccaccaacctcgacgtcggcaccatggtcacat

SEQ ID NO: 273198 - DNA, 371 bp, Zea mays
cccacgcgtccggcgcgctggagccccacgcgccgcgttcccgtcgagcagcgcgttcagcgccctcaccatcgggccccaccgtcatcttcaatccaacagcagcatcctgcagcccttgtcgcagcacatgatgtcgtgtgccggagcatcgctgtgtcgccatcgtttcgccatgagcgcagcattcctccagtcatcctcttcatctccaatgagcattttctcttctcttttctttctcagtttttcgttactgtgcatccttcggccttggcaagcgcccatgccccttgcggtcagcccacaacatggctccgtccaacccctagcagccccgtcgcaccctcgctgtcgtgcgattcgacact

SEQ ID NO: 273199 - DNA, 992 bp, Zea mays
  unsure (1)..(992): unsure at all n locations
nccacgcgtccgtcctgtacgccatcgccgtgctgtccaagatcgacccgtgctggggccgcaagtacatgccgcacgctactccatggtggccgacttcatgacgctgtcgcgcaacaaggccggcgccagcttcacccgcctgcggatgttcgacctctggaagctgcactcgtgggccggggggctgacggagttcgccgacgggcgcaaccaggagagcaccagcgaggccgtgaacgcctactactcggcggcgcttgtggggctcagctacggggacgcgcacctcgtctccgtgggctcgacgctcaccgcgctggagatgctggcggcgcagacgtggtggcacgtccgggaaggggagggcatctacgaggacgacttcagcgggaacaaccgcgtggtcggggtgctgtgggccaacaagcgcgacagcgggctgtggttcgcgccgcccgagtggaaggagtgccggctggggatccagctgctgcccgtgctgcccatcagcgaggcgctgttcccggacgtggcgttcgtcaaggacctggtggcgtggacgctgccggcgctggcgagggacggcgtgggcgaacggtggaaggggttcgtgtacgcgctggaggggatctacgacagggaggcagcgctgaccaagacccgcgccctcaaggggcatgatgatggcaactcgctgaccaacctgctgtggtggctccacagccgaggcagcgtcgtctgtgacggcgacgctgggttcggccgctgctgctggtaccgccagtactgccactgacgaaagtgtggtgaccagcacgagtgtggttgttcatgtctgcttgcggagcagagcacgtagatcagtgaagggatggagttgatacgttgcaaagtcattgtggttgttattcgttgatactacacacttctatacagttgaataaagtcagtcctttatgtgaagcttgatgatgctatctgatacatgg

SEQ ID NO: 273200 - DNA, 376 bp, Zea mays
caacaaggcaaccttcccgctctttgatgctttgggagagctttatgatggacacttggctgaagggacttggaattgcacttctcttgaggcaccgcaagaggaagaaccgaatgagcaacttcaggatgcagaagatggaccacaaggctttgatctgaatgttgttcatgatgtagatgatgaagttgatgatgcactcgctgaaaggaatgaagatatgcttcaaggaagggctaatactctgtcacgagatgaagaaagtggacagcgaagacctgctgcgtcaagaaacaagcaagaaaaggaaccaaagaagcctagaaagactgacagcatagaaaatatgatgaacaaatacctagaaatgaggagc

SEQ ID NO: 273201 - DNA, 625 bp, Zea mays
  unsure (1)..(625): unsure at all n locations
tattaattgaatcttgctgggccaatgaaccatggcgaagaccctcgtttgcaaatattatggacactttgaaaccattaataaataaggttccggcacagttgatccgttcagattcgtagcctgttctatacgggtacgggaagatgtattttactgagtggtcctgataacatcaacatgagtgtcctaatactgatctgctataattgaataatccttggatggtattactcattatgataatacaattctcataatctttcaaatgaagtgtgcctggcaatttctttccatggcttaaggtatgctgccattttcagagggctctgttcccatcaacattttcaagtatttatggattgttgaatgtgaagtttacttaaatatttgcaaggatgtttaagttcacttcaatacaaaatcaaacacatatcaacattttcaactatttatggattgttgactgaggtttacttcaatatttgctaacatgtttagttaaatacaaaatcaaatacatctacaatggacaggaagtaaagcaatgctgatgttaagcaaactatgttgatggacaagttaaacgaggctaaatatcaaacacngactgtgctagctgtag

SEQ ID NO: 273202 - DNA, 601 bp, Zea mays
gtcctgataacatcaacatgagtgtcctaatactgatctgctataattgtataatccttgcatgcgctcgctcactatgatcgtacacttctcataatctgtcaaatgaagtgcgcctggcaattcctttccatggcttaaggtcggcatggacatcaccaggaaatgtgtatgggttttgattgattactaattcagactttcgtttgggttcttatacgcaacacagaattgtcctctgtgatgtcgcgcacattgtattaaggctatttttgggttcaaactcatctagaggtccttttgtgtttgtacagtatattactgtaggcaaccatgaaaaccaaaggtttaggctgacctacgtttaggcctcatttctgatacggctccggagcgagcaaatgcagtgccgtagaaggtgatatcagtcgtatgcatgcctgtttcttcgtctcttgtactgtaacatgtcttaaatttacctagtgatggcgcatgtacttctgtcgatctgtaccattgttgctgttgaagacaaagtgcgccaaacaaacacgaaccttttccggtctccttccatgcttgtggggaaggttcaaaa

SEQ ID NO: 273203 - DNA, 727 bp, Zea mays
cccacgcgtccgcccacgcgtccgagcgcacggcaggctgccgtaaggagcggatctggttccgtctggctggctcggcccgtctagccggctgccggtaggagcggaggagacggcgtctcgccgctcgcttcgtttccgccttccccctcccgcaaagtcgccgccggctcgcattcgtggttccgcgtgggggtccggggaaacgcgacgagagaggcggaagcgatggcgaagtcgtgcaaggggttggccatggagctcgtcaagtgtctcagcgagacccactgcgtcaaggtgcagaaaaggccgtacaaggagtgcgctggggagaaggtgcccaacattaccagcgagtgcgttggcctgcgggagacctacttcaactgcaagaggggccaggttgacatgcgggcccgaatacgcgggaacaagggatactagtgatgtgcctgcaatatccacaatcagttttggtttctagccatgcttctgtgacattgaggtgtaatgataacatggtttagtttgcccgtgttctgtttttgataggtgaggggaactcacaacacacgtggcttcaatcgatgaggggagtgcattcatgtctacattctattacatttgatattccctctgttttaaatgtgttgacgttttgttactatgatctgtgcgtgtagcaaaagttaatctatggcccgtttggtttagccgtagattcctg

SEQ ID NO: 273204 - DNA, 874 bp, Zea mays
cccacgcgtccggttgcgaggtagcccaattctacagcaaaaatctacagcactagtctttttcgtctcggtcgccatgtccttcagcgatgacgaaccgatcatcccttctccaaactcagggccgaggccgacgccgatcgtgcccgggagggtgcagctggtgagcaagaacaacaacatggctccactggaggagaatacccagaaggtgctgcttgagctgaccggcggcgactccaccagcgaccggtcggggcttgacctggtggccgtgctggacgtgagcggcagcatgcagggcgagaagatcgagaagatgaagaccgccatgaagttcgtggtgaagaagctcagctccatcgaccgcctctccatcgtcaccttcctggacaccgccaacaggatctgcccgctgcggcaggtgaccgaggactcccagccgcagctgctgaagctcatcgacgccctccagcccggcggcaacaccaacatcagcgacggcctccagacggggctcaaggtcctcgccgaccgcaagctcagctccggtcgcgtcgttggcgtcatgctcatgtccgacggccagcagaaccggggcgagccagccgccaacgtcaagatcggcaacgtgccggtgtacaccttcgggttcggcgcggactacgaccccacggtgctgaaccgcggtggccaggaacagcatgggagggaccttctccgtcgtcaacgacgtgaacttgctgagcatggccttctcccagtgcctcgccggcctgctcaccgtggttgtgcaggacctcaccgtcacggtggcgcgcatcgaggatgagtccaccatacagaaggtggccgccgggaactacccgcagac

SEQ ID NO: 273205 - DNA, 550 bp, Zea mays
aaactagtgtgtgatgttgatctagcagcggaataataatgagtcaactggggccggttggtctagggatttgcaattgctttgagtgcctgtaccggtcaaacgttgctcccctcctacatacgggtgaacacatgaagcatgcaatgtagctgtttggagcattactgtgctctgagagaattgatctctgtaaatacatcattgatgcatacaaaaaattatgggtcgtgcgcggtgatgagctgagcctggagtgtgctggctcttatgctttgaaaggggatctagtgagatatggaaggcacacattgcctggactcattaaagatggcatgagtgctctttcaagatattatttgaataattttcatgacggagtgcggcaagatgctcttgaccttattagcggttattatacagtcagccaaggcagctcttctccttttaataatggtggtgattcttcttcgtatctgccggtggcttcagcaatcatagttggtgggattaccgcgacaactttcactctcagtcaagtgggacggaa

SEQ ID NO: 273206 - DNA, 336 bp, Zea mays
ggtggatttggtcagccactcggatcaagctggggaatcacttttgacaatgttctgggaccatcaagacgctgtcttgtgctgctctttcaaggaaaagcctgtgggtactttcggcaaccagatgggagttgacatgttagaaacgactttagtcgctctgcaagatctcacccttgacaagatctttgacgagcctggtagaaaggcactacatgcggaggtttcgaaactgatggaacagggctatgcatacctgccggctggggtgtgcctgtctgggatgggccgccatgtcttctacgagcaagctgttgcttggaaagttctcggtga

SEQ ID NO: 273207 - DNA, 1015 bp, Zea mays
ggcggctcttccggcgcctcgcatggcaccgcgccaggcagacagattctgcaactcaacgagccaattgaggtaaaaatttacgagtggaacaccggggggctactcacaagaattgaggtcggttgcagcattcgtgtgtgcattgcaaggctcgatgaagaaactaacgacctgataattagtgagaagaaagcatgggaaatgacttatcttaaagaaggaaccctcctacaagggactgtttgcaagatttttccgtatggtgcgcgggttaggattgctgggacaaacagaagtggcttacttcacatatcgaatattagtcgaggcaatgttgtgtccgtaagtgacatcctgaagatagatgatgaggtgaaagttatcgtgatcaagtcaaatgtcccagacaaaattgcactgagcatagcagacctcgagagtgcacctggtttgtttctgtcagacagagagaaagtgttctcggaagctgaggagatggcaaagagatacagggagcagcttccagttacccctcagaaccctatattagatgatggccttccaggagaaaagctaccatttgataacgaaactaaactgtatgcaaactggcaatggttcaaatttctgcatcatagctaagctgctgacaacagcgacagagacatatctggtacttgttgaccatgcaaaggtgaactgtcgctagagaacctgccaacctgttgaagtccaatactgaccactggtgggtagttctccacttccataacccagcatcagtcatggagaagtatgttggacaggaacaggcaacttcatcccgcagacaagatagggtacaaggtttccaggctgcagaacattggtgtttcgaattgcctcattcctagtgcccctggagtgaaatgttgtgatatcattttatctgtccggagaatgtagcttcattgcattcatgttatgtcaaaacgctagctctgtccatgaaatagattctgaaattttagcc

SEQ ID NO: 273208 - DNA, 478 bp, Zea mays
ctcagaagctcgaaaccatcactgctgcatttaaatttacgtcaatgttacaagctccattgcatggttttggattttggttcgatgttgagttcaatggaccagtacgccagaaatcgaagaagcaacctagtcaatcattggatgagaacacccaaaatgccagcccaagcaataggaagagaaaaccagatgtctctattgttctttcaactgcaccagaggatgcccctactcactggcagcagacccttttgtacttgtttgaacctatagaactaaacaaagatcagatcatagaaggctctgttactatctcccagagccagcaacatgctcgcttccttaacatctgcctgaaatactttactggcgaccaatggtatgtcaaagaatctgtgatgcgataatctgggggaaactgaaacatagtaaccttctttctgaataggctcaaatctgttttgtatgaaggaca

SEQ ID NO: 273209 - DNA, 1349 bp, Zea mays
ggaagaggtgaatgtttcctctgctgaaactttttctctgacatggctgatgctcctgcgccagaccaattgaaaaagatgagagacaaactgaataactggcagaagctattgcagctcctcctgtgccataggaggagaagaaagatgtcaagccagctgagcctgaagctgcagcaagcaacccaactgaggattcggcccctgctcctgctgaacctgctgatgttgctgctccagctgctgagcccaaatcagacgccaaacctgctgctgttgctgctccagtgcctgagaccaaatcagacgccgagcctgctgctgttgctgctccagcgcctgagaccaaatcagacgctgagcctgctgctgttgctgctccagctcctgagaccaaatcagtagccgagcctgctgctgttgctgctccagcgcctgagaccaaatcagatgccgagcctgctgctgttgctgctccagtgcctgagaccaaatcagatgccgagcctgctgctgttgctgctccagtgcctgaaacgaaatcagatgctgagcctgctgctgatgctgctccagttcctgagatgaaatcagagtccgagcctgctgctgttgctgctccagcgtctgaaaccaaatcagacgccgagcctgctgccgttgctgctccagcgcctgagaccaaatcagatgccgagcctgctgctgctgctgctccagtgcctggaaccaactcagatgctgctgctactgatccagcacctggaaccaaggccactgccgccgatccagcacctggagctccagcagagaactccaccgacaaagacggaagccaggagagccagcccgtgaacaatggacagctgccgcactcgacggtgaagtgcacctgaagccgcaacgccggaaaaacctgaaccccttccggcgccgtgtatctcatttaggaacaaacattcgcattcgcattcacattgttatcagttaaaaagtctatggaacggtaagcatgttaattagtcagtctgacgctgctgggtgacaggttggtaattaggctctgcatttagctgttttgtatggctgctgtcgccgccatacatgtatcatcttcttgtggttgtatggtacctaaccgcgtaaacatgttaaccttaggccatgtattaattactccgctctaatgtttgtatgtgtattgtcaaacttgcagaaccagttgcatgcatgaaaaataataagtgtctgggtatctatgggtgcggggtacccatctccgcaccagcgcacccagccagaaacagcagtttgtttggatctaatcagaacccgatgctatttgctgg

SEQ ID NO: 273210 - DNA, 358 bp, Zea mays
gtgcagcgagagacggcgaggagcatcgcgagcgtcctcccgtacgagagagggagttcgtggagcccggtcatctggggcaaggaacgggacctgctgaaacgcacgaggaaagggggtttgcacaggataagagtatctatctacatcaacaagaggtcacaggtgatactgaagctgaaatgcaagcaccttggaggcgcgctgtcaaagatcatcatgtgcgtggtttacggcgggcacagcgagcttccgacgtgggtctggtaaaggcttcgtagaggagacatgctggttctgacttaacaccgtgcaaggtttcgcggaggtggagtgccgtgggcgacaccagcaaacg

SEQ ID NO: 273211 - DNA, 774 bp, Zea mays
agaaatccagtacactcatccttagcgttaccagtagcactggatgcagttaatgagatattgagtaattataagaataatacctttttcacagaaggcaatcatttcccaagagggaacagagtatgctcaggttcagtccttgcaagcagggaacaacttccaataggaattgcaacagcagcttttgacggcatccactcctccaaatgggaagagcctgatggagccaaaggatgttggctgatttatacaatgcaagatggcaaaagttgcgagttggagtcatatgatttgatgtcagctaatgatgctccagagagggatccaatggactgggttcttgaagggagcgcagacggaggctccacctggaatatacttgatgctcggaattcagaaatgttcgagagccgtttcttgaggaaaacatttacagtggataagagatataaggcaaatgctttcaggtttaggtttctacgcgtaagagattctcattctaatccaaggtctcagataggatcaattgatctatatgggaaaaccatatgaactccccccggagctgtgtttcacttttcggctttctgaactgctcggtctcacgagcctgtggcgtatcataaattcataataccggaatgcgagcatttactgtggacgcaacgctctcttcagtatgaatagatactgaataattaagagcatgatatatattgtttgcgcgcgcgattgagttctgaaatataagtgaagtccctcgacatgatc

SEQ ID NO: 273212 - DNA, 731 bp, Zea mays
ctcagttcactctctggtctccagtctccaccgctccagcagcctgagctagtgagctgagccccgagctgctataccgtacaccaagtgcacaagcggatcggatcggatcggagcgagatggccgcggccgggctgggcgtgaaggcgacgccgttcacgtacgcggcgcacgcgctggccgcggtggcggcggcgctggtgctggtgtggtgcgtccacttccgcggcggcctcgcgctcgaggcacagaacaagaacctcatcttcaacgttcatcctgttcttatgctgatcggctacattatcctcggcagtgaagccattatgatctacaaggtgtttccgaacctgaaccacgacacggccaagctgacgcacctgatcctccacgccgtcgcgaccgtgctcggcgccttcggcatctactgcgcgttcaagtaccacaacgacagcggcatcgccaacctctacagcctgcactcctggctcgggatcgggaccatcgctctgtacgccattcagtgggtgttcgggttcgtgaccttcttcctccccggcgcggcgcccggcgtgaggcgcggcgcgctgccctggcacgcgctcttcggcctcttcgtctacgttctggcgctggcgaccgcggagctcgggttcctggagaagctgaccttcctggagagcggggggctcgacaagtacggcgccgaggcgttcctggtcaacttcac

SEQ ID NO: 273213 - DNA, 295 bp, Zea mays
ctccccggcgctccatcgctgggcacgcaggcgacggcgacggcgctcaggctcgtgctctcaggaacggcgtcagctgcttcctttctcgcctcttgccagtcgcctcgcgccctcgcctttggtcctccgcacggctgacatacgtagaccgatggcaacactgaaagatgcagcggcaaggaagtctatactggcaacaatccgtcttgttgtcccagccggtgcagcccgtcctgcacctccagttggtccagcacttgggttctaccggctcaatttgatggccttttgc

SEQ ID NO: 273214 - DNA, 815 bp, Zea mays
tggttctgggtccatgtatggaggagctcaagagggcacatggggccattactgaatttgcagtccccaggtatggggaaggcgcatgctggttcatcacagtcacagggtccgggcctgcatatggagaggaaccgatgcaatcataattattgtccatctcctctccaaccaattgcctcagctggtcagcactctgaaagcagcgctgcatacttttcttggcctacatctactctaatgcacgggtcagctgaaggccgtgctaattactttgggaacctacagaagggtgtactaccaggacatcttggtcgcttgccaaagggccagcaagctaccaccttacttgatttaatgattataagagcattccacagcaagatcctccgccggtttagtcttggtacagcaataggctttagaatcaggaaaggaacattgactgacacacctgccatccttgtgtttgttgctcgaaaggttcacaggaagtggctcagcgctactcaatgtcttccaactgcccttgagggaccttggggtgtgtggtgtgatgttgatgtctgttgaattttcttattatggcgcaccagccccaacaccaaaggaacaactttatgatgagcttgttgatggattgcgtggtagcgaccctattgtaggctcaggttcacaggtggctagtcttgagacctatgggactttgggtgccattgtgaagagtcaaactggcaataaacaagttgggttccttacaaacaggcatgttgcggttgatctggattatcccaaccagaagatgtttcatccgc

SEQ ID NO: 273215 - DNA, 506 bp, Zea mays
tcttacgcgtccgctgaaacccgctacacaacctaaagctgacgagcttcgcagaatgcaagacctggatggcatcatatctagtgagcaagctgaactagagaggctcacaaagtgttccagcaaacttaaagatcaggcttcggaacttcaacagaaagttgaaaatgctggagggaagaagctgaaggaccagaagacaaaagttggcaacatccaatctgaacttgacaaaacaagttcagaaatcaacagacacaaagtcaacgtaacttcaggtgagaagctggtgaaaaggttaaccaagggcattgaggagtccaagaaagatagagaaacactttctgctgaaacagagaagatgatgcctatgttcaaagagattgagacgaaagcgttcgatgctcaagaagagtataagaaaacacaggagatgatcgacaaccataaagttgagcttgacaaaactaaggaagaatacaccaaactaaagaaaggaatggatg

SEQ ID NO: 273216 - DNA, 616 bp, Zea mays
gctgacaggaggaagatactgaagttggatgaggaggcagctgatgatggggaaagttcttcaatgcagccagtgagtgatgatcaaaacaatcagatgaatgggactataaggagctcctgggttcaaaggaggtccaaggagtgtgacgttgatgtccgcatagtcgatgatgaaataaatatcaaattcacagagaagaagagagccaactctttgctttgtgctgcaaaggttctagaggagtttcatcttgagctcatccatgttgttgggggaatcattggagatcaccatatattcatgttcaatacaaagatacctaagggctcttctgtgtacgcatgcgcggtggccaagaagctcctcgaagctgtggagataaagaagcaggcttataatatcttcaactagacataccaatcataatgtttatccagacaacttaccatgctggtctgctctttagcatctaataaggtgcttgcttatcacttatcagagactgaccacattgataagacttctttgatgaatgctgcaaactttcttgatagcttcttcaaaaaaaaaaaaaaaaaaaaaaaaaaaaagaaaaaaaaaaaagataaatgaa

SEQ ID NO: 273217 - DNA, 581 bp, Zea mays
tgtcacgcgtccgcccacgcgtccggcgacgagcccaaccagtgagggggagagatggcccgtcgcgccgtcgccttgctcgtcgccgtcgcgctcgcgaccgtgctcctgcatacggcggaggttgcggcggggcagaagaagccggcgacggccgcgaggcgggaggacatcccctacatccggtgccaggtgtgcgagcggatcgcgcgcgagatctccgcgcaggtcgccaagaagcaccaggctctcccgccctccaagaaggtaccggagatcgagatcatcgaggtcgcggagaatgtctgcaacctaaagaagcaggaggcggattggatgcttcggatcgatatcgtcgagaaaggcgacaagctcgagcttgttgagcaagatgaggaagggcattgcaatgcagaatgcaagaccattgagcgtgcatgtcaggaggtgataggatatgctgatacccgatgtgctgagtttgtatacaaaaataacccctcgttcgatcagcttatgaaatttttttgaaagatctttcgaggcatgtgccaagacccaccgcaggtccaaagatcggt

SEQ ID NO: 273218 - DNA, 665 bp, Zea mays
gcctgctgagatggtgaattatggtgccactgaacctgttgtaattcttggttttggagagatgggacaggttcttgcatgatatttcttttcttgcgtcatttgagtgcataccataatttttcatgtttgtgcaggtgcttgctaaatttttatctgcaccattgtcatttggaattgagaaagacacagaaggatggccatatgttgcattcgatctgaatcctgttgttgtaaagtcagctagaaaatcaggatttcctgtgctattcggagatggttcacgccctgcagttctgcaatctgctggcataacgtttccaaaagctatcatggttatgtatactggaaaggaaaaaacaattgagtctgtaagcagattgcgtcaagctttcactgcggttccgatatacgctagagctcaagacctctcacatttgttagatcttaagaaagcaggcgcaacagacgttgtcctggaaaatgccgagaccagcttgcagctaggttcaatacttttgaaaggactgggcgtcatgtctgatgatgtatccttcttgagtaagcttgtgagggactcaatggagctacaagctcaggaagcactgaaagacattgcggaccaagaagttgatattatgaagcctcttcaggtaagagtgtca

SEQ ID NO: 273219 - DNA, 402 bp, Zea mays
cggacgcgtgggcggacgcgtgggttttttccctcttgtcacagcaccccccacccacacacacccaaggccccaactgcagtgcccatccggcagtcaggtcgatggcggcggaagcagcggcagcggggaaggagaagatgcggacgctagtcagcagcgacttcaagaagttcgatgtggaggagtctgtggcgagggaatcgctgattatcctgaacctgatggcggactgcgacgacagtgacatcccggtcttcaacgtcaacgccaagatcctcgacaaggtcatcgcgtactgcaggaagcacgcctcggcgccgcgcgccgatggcggtgatgcggagccaagtgctgtgagtaacaaggtctcagcggacgatctcaagtgctttgatgctg

SEQ ID NO: 273220 - DNA, 489 bp, Zea mays
ggctactaacctttctagcgcctcagttgatgatgttgctgttattaatgatcttttggcgaaactggaagaatatgccaaccgcccccccccgggggtccaaatgtaaacctatccaattttgagaaggatgatgatactaattttcacatggatttaatagctgggcttgcaaacatgcgcgcaaggaattacagcattcctgaggttgacaagttgaaggctaagttcatcgccggaaggatcatcccagccatcgcaacttcaacagccatggccacaggtctagtgtgcctggagctgtacaaggtcattgctggggagcaccccatggaggactaccgcaacacattcgccaacctagctatacctctgctgtctatggcggacccggttggggccaagctgatgaagcatcaagatatgaggtggaccgtatgggaccggtggactatcaggggcaacctgactgtggcggaactgctgcag

SEQ ID NO: 273221 - DNA, 1323 bp, Zea mays
gcagcgtcgtggctggcttggcaggcagctccaggctccagcgaagccgatggcaaaaaaggcgggactcgcgcaagcaagcgtggacgcgtacgttgagcagagctcgcggcgcaaggaacacgaggccgcgctaaaaactgctcctactccgggttgtagcgtgcttcacgcacgcacgttgctggataggtttgccgcgcgcgcttgcttgccccgtggtccacgcggccggcggcacccgcgcctcgcccgacgctctatttaaaagccacgcctcggcccccttctccctccgatctctctctctctcgttctgctcacatcgacgcggttcggttccagtttcactcccactgccgtctcggcaacctcccctgttccacgcttcgtcctcgcctgccaggctgccatggccgcgacgtcccccttcgactgcgtcctcctagacctcgacgacaccctgtacccgggcgacaccggcatcggcgcggccctgaggcgcaacatcgacgagttcctccaggccaagctcggcgtgtcggccgacgaggccgccgccacgcgcgccgagctcttccgcgcgcacggcagctccctcgccgggctcatcgcgctcggctacgacgtgcacccggacgagtaccacagctacgtgcacggcaggctaccgtacgacaggatcgcgcgcgacccgcagctggcgcggctgctgcagagcatcccgcagcgcaaagtgctgttcaccaactcggaccgcgcgcacatggagcgggcgctggagcggctgggcgtggacgaggccgccttcgacgccgtcgtgtgcttcgagaccatgaacccgcacctgttcggcgacgacggtgggcgaccggcgcccggccgtggggctcaaaccggcggtggacgcaatcgtcgccgggctgcgcgccgccggctccaacccacgccggacgctgttcctggacgacagccagaggaacatcgccgcggggaaagcgctcggcctccgcaccgccctggttggcaagagggcgaggagcaaggaagcggactacgcggtggagagcatcggcgcgctccggcgggccatcccggagatctggggcgaggccgctgaacgctcctccgacaagctgccggtgccggccgtgagcgtggtgaggtcgacgacgtccgacctggactccatcatcatccagcccacgtccatccacgcctaatatataacctcatcgtccctagctccccacccccaatcagaatcagcgggtgcgtgcgtgcgtgtgtgaatatctctctctctctctctctctctctctc

SEQ ID NO: 273222 - DNA, 306 bp, Zea mays
ctctctcgttctgctcacatcgacgcggttcggttccagtttcactcccactgccgtctcggcaacctcccctgttccacgcttcgtcctcgcgttcccaaccgagctcttccgcgcgcacggcagctccctcgccgggctcatcgcgctcggctacgacgtgcacccggacgagtaccacagctacgtgcacggcaggctaccgtacgacaggatcgtgcgcgacccgcagctggcgcgcctgctgcagagcatcccgcagcgcaaagtgctgttcaccaactcggaccgcgcgcacatggagcg

SEQ ID NO: 273223 - DNA, 234 bp, Zea mays
ctcacatcgacgcggttcggttccagtttcactcccactgccgtctcggcaacctcccctgttccacgcttcgtcctcgcgttcccaaccaagctctcccgcctgccatggccgcgacctcccccttcgactgcgtcctcctagacctcgacgacatcctgctaccctgtcgacattggtacccacatggccacgttgttcttgtgcgacgagttcctccaggccaagctctgc

SEQ ID NO: 273224 - DNA, 1377 bp, Zea mays
agaaggagtatcattagaggctcgcctcttgagcaggaaggaagcagcacttaaacagagggaggctgcgctaaaagctgcaagagaatcaaaggatggcagagatggggaagtaacaacactaaggcaagaacttgagtctgccaaagaagaggttgcatcagcaatggaccagctaaaggaggcagagtctgaaacgaaggctctccgatctatgactcagagaacggtcttaactcaagaagaaatggaggaggttgtcctaaaaagatgctggcttgcacgctattggggcttagcagttcaatatggtgtgtatcccgaaattgcggtatcaaagcatgaacattggtcatcattggctcctcttcctcttgaggttgttctttccgccggtcaaaaagctaaggaggaacctcgaaaacaaggtgacaatgttcaagggagaaataaacttgcacgagaaatgagtgatgtaatgggaagaaggcaatatagagagcatgctttcagttgaaatgggccttagagagctttcttcattgaaggtggaagatgctgttgtagttgcagttggccaacatcgcagacctagcatagttcgtcagttcacatcagatttcaaatcacctggtgaacctaaatacttggaggcatttgatcttagcccagatgaggctgaagatgctcgctctaagcaggcatggcttatatacttctggagaagagccaaaactcatggtgttgaggaagatattgctgatgaccggcttcagctttggattggtcgcaacgcacaagctccaaattctcatgacgctatcgatgtggagagaggtctaacagagctgaggaaattgggcatagagcagcaactgtgggagggctcgcgagcagatatagatcaagcttctttggcgatggagaatcagtaagaattttccacggctgtctatgcttcgtgtatcatcccagttttggagaaacgggaactccatttcccagcaggtctcggccctttgcatcatcaggtatcacagtcacaggattgtgctccgatcttggggtgtgaccgatggacttccgatgagtttgtgtagtgcatgtgcaagccattcatctgttgttattaaaatagctttgtgaaatgtgtaatagctctgctttggcaagagaaacgatggcaacgacgaccccacttccagcaattgtgaattttgtgattatcccaccttgtttgttctctgctgtcgagcccaacctctccgcaccagggaacgtgtgtgttcctgcaacggatgaacgaaatggtttttgtgtatctctgggtagtatgagttctgtgcaaatggttctggagttttctataagatcttc

SEQ ID NO: 273225 - DNA, 759 bp, Zea mays
cggacgctggggagcaaaggatccaaataagagggacatgacaatagatgagaagcgtaacttagtgagaacctccagaatttgccgccggtgaagcttgatgctgttgtgcaagtcattaagaacaagaacttatcagttaagcaacatgatgatgagatagaggttgaaattgatagcatggatgctgagacactttgggagcttgacaggtttgtgtcgaactacaagaagaacctgagcaagcaaaagagaaaggccgagcgagcgatgccttgccgaacaagatgcaaatttgcgtgcacagaacccaatacaacaaccacaaccaaccccattcccccaagaaccttttggtgaaaaatctccaaaacaagttgtgaaagattcgctggaaggcgagcaactgccagcatctgcaccagaacaaaatggtgagaatagacagaatgcgagtagttcaagcaattcaagcagctccagcagtggctcaggatcatcttctagtggctcagacagtgatagctcctcttcagatggatctgatgctggcaattcatcttgagatataggttcagaagttctgtcgagtaggcaataactgcctatttgacgcgacaatagcaccataagattgtacatgcttaccttgtctggcttagggaacccctgtagtttaagtaggttttgtatgtcgattcacccgctgatgaaggcagtaacttgtaggtttcgtggtgtacccgcctaataagacta

SEQ ID NO: 273226 - DNA, 470 bp, Zea mays
ctcaagtttggcaccaccaccttctcatcacctatccaggaccaggatcgacgacgaggaatcaagcagccagcagcgaccgatcgagacgcagccctgtggctgtgccgctgtgggttggatccggccgattcgacagcacgcggcacctacggatgccccacgcacccgtctcctgagagaactcgatcgattgcttcatggggagcggcaaggcgtcgtctccgccaggccccactgccggcgggcgcggctcgccgccaggtgccgccgtctgctgcatgtgcggcgaccgcggcctcctgcccgagctcttccgctgctccgcctgctccgtccgctcccagcacacatactgcacggatcggtacccgaaggtggagtcatacggcgtctgcaactggtgcctcagggcggacgggggcgtggcttctactttaactcgcgagatccgcggcaagcggttgtca

SEQ ID NO: 273227 - DNA, 381 bp, Zea mays
cccacgcgtccggccaaccaagcagctctgcagtcgagacatgaagcgagccgtctccgctctctgggccgccgcgccgtccgccaagcctacctctacacccccaccgccgccaccgccacctcgtcgtcgcctgagtttggggcgtccacatcagaggcgtgggacgggcgtttccggctccacaagccgcgcgggcagcacctgctcaccaacccgcgcgtcctcgacgccatcgcgcgccacgccgccatcagtccaggcgacgccgtcctcgaggtcgggcccggcacgggcaacctcaccgcgcgcctcctcgcgttccaagcggcgcgcgtcaccgccgtcgagatcgacccgcgcatggtcgaggccgtcacc

SEQ ID NO: 273228 - DNA, 582 bp, Zea mays
cccacgcgtccggtccgacgcgctccgttcccctttccctttccgaagcttctcgaccccccatcccctccctgacatggccgacaacgcgaaggccgcggcggcgcatgcgaggccggagtcgtcgcaggaggaggaggaggactggaaggaggccgagggggacgtcgccgaagtcgaccgcgccgccaccaatggcgccggcgaggggggcgtgcccacagacaggccgatccgggtctacgccgacggcatctacgacctcttccacttcggccacgccaagtcgctggagcaggccaagaagtcgtttccaaacacatatcttcttgttggatgctgcaatgatgagttgacacataaattcaaaggaagaactgttatgactgaggatgagcgatatgagtcacttcgtcattgcaagtgggttgatgaagtcattccagatgctccatgggtggtgacagaagagttcttggataagcataacattgattttggtgctcatgattctctgccgtatgctgatgctagtggagcctggtaccgatgtttattaacatgttaaaaaagcttggtaag

SEQ ID NO: 273229 - DNA, 383 bp, Zea mays
cccacgcgtccgaatcggtctaagtgagaagatcagtgttggcacttcagttgtaaacgataaagtgaagaaatggatcagaaataccaagtctctgagaagacaaagtcagcactggcagctgctgaacatagtgtctcgactgctggatctgctatcatgaagaacaggtatgtgctaaccggagctgcatgggtaactggtgctttcagcaaggtcaccagtgcagccaacgaggccggtgcaaaggctaaggaaaaaatagcagtcgagcaggagcacaagaatgctgagggtgggcctgcacaagcgaacatctcagagacccatgaagcgcacaggggtttggacggcggattctcaaggctacatgactctgaaac

SEQ ID NO: 273230 - DNA, 796 bp, Zea mays
cattgatgagaatcaccgcggaacttatgatttcatctaccttccaattgattctaagaatggatgtaacgtgggatatgcattcatcaatatgacggatccacagcagatagttccattttacaagacattcaacggcatgaaatgggagaagttcaatagtgagaaagtggcatcacttgcgtacgccagaatccagggaaggaacgctttgattgctcatttccagaattctagcctgatgaatgaagagaaatggtgccgccctatgcttttccacaaagatggcccgaacgcaggagaccaggaaccattccctgtgggtaacaatgttcgttctcggtccgggaggaacagaccacttagcagtggttcggagactaccaaagaggcaagtccatcaacctctcctaactgaagagaagccggctcccgatattccaactcaggacaggcaggcggtatttgctcactaactggaggctgaagggcatgtaataaatcatccccagttttgctgcttctttttcttttggtcctcgtcagcaaggtgacctgacttgctgagtgtgactagctaacgagaattctgcacgccctggccctgctgaagattcaccttaaagtaacgatgccttggttttgccataccattgacgtcaacggctacaggtaatggagaagacctggagtggtagagggaggtgtgtttcaggcgggtgaaaattcaagttgtacagttgaactcaccaggattggaaaatggtcatcaattcaaatttgagttgtttttctt

SEQ ID NO: 273231 - DNA, 888 bp, Zea mays
tctcgtcagtttggaccggattctagatgagagtggctcaaaacagaatggagaacattctcggtcaagtctgagtagtatggtgtcatttagtggagcatctgccacagaacccgttgttctagggagtgtcacatcggaaaattacgtggaagatcttacaggcgttagagatcgtgctgttgcaacactaaattctggggaagagctccaaaaggtctgtgatttactttatgagtttaaggatgaaatgttgggggccttcgcagcgaagtgtataaataagagcagcccgtcacttgaagccttgcttgctgaatcatctgattctgaagcgcaaatctctgatctggagggtactgacagtggtgctggcattggctcaggtcgactgtttagcacactctcatcttcagatgacgatgatgcttttgctgcggacgagcctttaggtgatgttgctgacctgactacgccaccagagcgatatacttcttgtccccagcgacgagcctctggttgacatagctgacctgacaaacccttcagggatagatgcttcttcagtgaatgagcctccggctgatgtggttgatctgctacatacttcaaacgagcctttggtcagtttggatggtctgccaaaccatccagagatgtgttttggtgggagcagtggagaacataccgacagtcttatttaaaggataaggccatgcggtactgatagttcagagatgagcggaacatataagtccatgcggctgatgtgaacgacagtctcatataagtgtgttccaagttatgcataagtttttgtacgtaaataagcctttgtgtctgcatcagtttatactaaatactatgaaagcagagtaactttggttt

SEQ ID NO: 273232 - DNA, 385 bp, Zea mays
gattctcacttcagggcttgtttggttattcctatcccatgtccttaaagctattgattatgtgcatgaattgagtatgaggtgccctggccaaagcgagtgttctactctacccaaaaactttaggtagttgtgttgtctttagtggttcagttcctctaagtaaatcattcgctcaaaaggtgtcatctgaagctagaaaggtgataacccaaagatatatgtgcttatgtttaggacttgatcttcttactcttatagaacctaagtatgaactcttatttcagaccggtattatggtttactcttatataacctaagatcatatgtcctaccaaagcgaaaatagtttatgaagcataataattttgccaatactaaattc

SEQ ID NO: 273233 - DNA, 595 bp, Zea mays
ctcacacctgctgcccctcccaaattcccttctccctcacgtctgtttctctccccaagccgccgcctccctgccgttccgtggagcaccaggccagtgccgttccgatggtcattccaagccagtgccgttctcctttggccgtccctgctccagccgtgagctcacccaggccacggcctcgtcgaaccgcacagcccctgcgctccttccccagccgcgcttagccctatcctccctgctcgatctccttcgagccgtaacggctccctggcgtgtccggctccctgcccctctccatggcgtcgcccagctctagctcgccccccctctgatctgtgcgcaggggtttcttccatggcgagctcccctgcaaacttcatctagccgccggccgagtttccttggtggtcgcttacccccagcatcggccagagcttgctgtcattccccaacaaacatgtggttgtaggtgagagatttcagaagtctgttggacgaagaaaagagaagtgaaatttgtgcagcgcccgtcaggtgttaggtttaatagatattgtgtctaccgtgtgagggaatcgcgccagcttccttt

SEQ ID NO: 273234 - DNA, 735 bp, Zea mays
  unsure (1)..(735): unsure at all n locations
cggacgcgtgggcgagcgtggattaataggaatgtatcatgactggtgtgaaggattttctacttatccaaggacatatacctcatacattctaatgatatcttcagcttgtaccaaaacaagtgccaatttgaagatagactcctggaaatggacagaatcttacgcccagagggtgcagtcataattcgtgacaaggttgatgttcttgtaaaagtggagaagatagccaatgccatgaggtggaagacaagattggctgatcatgagggtggccctcatgtacctgagaagatactcttcgcggtcaagcaatactggactgctgaaaaaacaagcagctaacgttgttcattttcatttttttctccagtcacagctaacttgccccctggctgtgtttattggaaaaatttctgtcgattatacagcccatgtttgttactgaaaatataaaacaacccccttgagggggagtaaattatgtgggatttagctgtgaacttgggatttgattattccactggtgccgagacgcagaagacatgccaaaaggatcaattggcattgtactagtgactcatatctgatcagacagatgcaactgcttatagttggaaccctgcagcagtccgtcaggaagttatgaactagcagtgaacttatagttntgtataggactcctttgcccctccactcactttntttttggtgtatctcagaatttcatcaact

SEQ ID NO: 273235 - DNA, 1042 bp, Zea mays
gatcaaaaacagggaagactgtggaatggacgtctaaagacctacttaatggattggaagaatttgtaccaatatatgagacgcgccccattaagaataacgtatatggaatgggctttgaccacagttttgggctttggtttatggctcgctggattaaaccggatttgatgattgagagtggtgctttcaaggggcactctacttgggttttgcggaaggccatgccaaatactaggattatatcactctctcctaggcaccctgagaaatatcttaagaaaggacctgcatatgttgatggaaactgcacttacctcgctgggaaggattttgttgattttggaagcattgattggggaaagctattgagaaatcatggcatttctgatcctgataaggtgcttgttttctttgatgaccaccaaagcgagttgaaaaggttaaagcaagcactaaaggctggattctggcatctcatatttgaggacaactatgatactggtacaggtgaccattattccttgaggcagatctgtgatcaattcatacatcagaggtggtggacatagctgcttttgggagagcgatgaggcaagactaaaattcgaacggaagaagttctgggagaaggctgtggagatagctgatctatgcggaaaggatgatgcatggtggggtgttaaaggttacatgagggacaatttcaaccatagcaatatggccatctctacaaagagcattttcagaacagcaggctcgtggaatctgtgttggatatgtattgggagcttcctcctgttgccggcccatccttaacacaccaaacaaggtatgacccagcacgtacagttgacccaatcatcgaagatggtcgctacggcttgttccgaaagaccggtctagcgaggttggacgccttggtgttcaatggttacactcagatggcatatgtgcagatatcaggttcaatgttgagcacggacgatgtttaaagatttttcgggggtgagcttgtttcgtttatggccaactgttgata

SEQ ID NO: 273236 - DNA, 1072 bp, Zea mays
ccctctcttccgcccacgcgtccggctagccatagcatggaaaacattggtacaagctctaagaggaagtggaacgctggggttgcagaaatacctgagagctcaaagggaaaaaggccgaaggtgaaaaattctggaaaacatatagattgcagcaaggaagaacaccgtggatctaaaaagttgaagttgtcagttattgatattgaagataagaaagcaactctaaatcatgaaactaccactaccttggtggatcagcaaaaagcagaggggaacaataaaaccgaattgaaatgtgaggcaaatgtggcagactacaatgctcaaagtgatacaaaaaagttggagagtagaagtgctcgtcgcaagaaaattaaaaggctgatgagacagagaggaaaattacaaacagataagaatgtgcatgaagattcactaatagctcctgattttccatcatcaagcaatcaagatggcttgcctgtcccatcaagcaatcaaaatggatcacatgttcatttttcaagcatcaaagcagatgaggaagaatctgatacatcggatgagattgtcccagttgtggttcggcctggtcacattcgctttgaaccagcaggtggagaacccgacaaatcgccagcaaaggagttacagggcacgttccaatggagtgcaacaatgagcaaaaagaagggccagaagtggggaatgaatagctcaaacaagaaaaatgctgatatcggctatcatgcaggaatagctggatgcagcacagaagttaacaatcatgtcatggacattaaggttactgaaaatggcttttgtgctgtcaataatcgaaggaacaatgaaggcagtaacattgagatgtccagtgtgcaaaatattgctaatgaagaaaagtctagcgaacctttcaattttgagagcttgtaccccctaacacgacttccaaaggagggagatctgattgcctaccgattggttgagctgtcttccatgttgtgtccggagctctctgcgtacgggggggaaaaatttcggatataggctcgcgtatcagtgcgta

SEQ ID NO: 273237 - DNA, 437 bp, Zea mays
caattatttttatggtgtcaaatctgaaattaaagagtcatcatgatcgtaactctgtaatttcagatttgacacaattattttatggtaccggagcacttcggtttgtgcaaattttcatacctatcgtagatatacacacaaaactcaatgagatttgagcagaccatggcccgtggaacaaatcaccaaaaacaaagcctaaatgaactatgaatattttattggccaactaacgtacaagccaccacgaagatctattttcagttgactccccgatccaggcattagaaggagcactttccttgttgaatattttggaggcatcgctgtagaccgctactacatttgatacaacagcaagaacaatcatgaagatcgccagaattttgtcccacttcttggtaataccttgtgaatcgcatgctcgagctgca

SEQ ID NO: 273238 - DNA, 469 bp, Zea mays
caaattcctcaaaatatggatcttttgcggataatgacattgtgtcagatggatacggggaaacaaatggtttttggcaccaaaatctggggaaagacttgcagctcatacattacatggtctggtccgttctggacatgtagcaagcagcttcggcactatcaagcttttttgtcgcaatggaaccacaatatctacccacacttttgtgctggtcttgtcagaggaacaaaaccgctatcttgcatacttggaagacatgtatgaagataagaagggacagaagaagatcaaagtgcgatggtttcatcaaaaccaggaaattgcttgcgctatacctcctccgcctcatccttgcgaagttttcatcactcctttcacacaagtaatcagtgtggaatgtgttgatgatattgcaactgttttaactcgtgatcattatgaaaaatgctcccatgcaatgtcaatt

SEQ ID NO: 273239 - DNA, 420 bp, Zea mays
gaaaacccgggccgacgcacgcgtccggagcgagccaccgccgccaacgttcccgccttctatcccttaaccctagccgccgccgccgccgcttaaaccctcgctgcggaaactacagcaacccccgccggcgatggtgaaggagaataagcggaagcagcctcctgccgacgcggcgccgcctccgggcgacgagggtgaggggaggagcgggcggaagggcaagaaggccaggaaggagaaggcggaggcgatactgccgtcgcagatcaagaacaaggacaagcgccgcgaggtgcacgccaagcttaagcgagagaagaaggcccagaagcgcgcgctcgcccgcgagcgcggccaggccgcccgccgcgccgaaaagctcggcgagcagccgccggagaggcaggtgccccgcac

SEQ ID NO: 273240 - DNA, 1408 bp, Zea mays
  unsure (1)..(1408): unsure at all n locations
tcgcctggaacaacgtgttcctcgtcccgagaagagtcgaggaaaaatctcgcattcgcaaaccaagcaaatggaggcatgagctccgccgcctccccgtctctcgccgatctcccccaaaccctagcctcgacctgaccgccagcgggcccgcaggccggagaaggagtcggagtcgcccccacccacccaccctctgccgcgggcggggagcgggcggcggacgagatgccgtcgcacggggatctggaccggcagatcgcgcagctgcgcgactgcaagtacctgcccgaggcggaggtcaaggtgctctgcgagcaggccaaggccatcctcatggaggagtggaacgtgcagcccgtgcgctgccccgtcaccgtctgcggcgacatccacggccagttctatgacctcatcgagctcttccgcatcggcggcgacgctcccgacaccaactacctcttcatgggcgactacgtcgaccgtggctactactcagtggagactgtgtctttgttagtggctctaaaagtacgttatagagacagaatcacaatattgagaggaaatcatgagagcagacaaataactcaagtgtatggcttctatgatgaatgcttgcggaaatatggaaatgcaaatgtgtggaagtactttacagacttgtttgattatttgcctctcacagctcttatagaaaatcagatcttctgcctacatggtggtctctctccatcactggatactttggataatgtccgctcccttgatcgcatacaagaggtcccgcatgaaggacctatgtgtgatcttttgtggtctgacccggatgaccgatgtgggtggggaatttcaccaaggggtgctggatacacatttggccaagatattgcacaacaattcaaccatacaaatgggctaagtcttatttcaagggctcatcaacttgtaatggaagggttcaattggtgccaggataagaacgttgtgacagtgttcagcgcgcctaactattgctaccgatgcgggaacatggctgcgatcctcgaaattggcgagaacatggatcagaacttcctccaattcgacccagctccgcggcagattgagccggacatgacgcgcaagaccccagactactttttgtaatcagcatgctggctttctttcaacttgtctactgcagcgccagcacctgtagatctccttagaaaatggtgtttcctctagccgccttgtacccccatcattcttttggtgtggagattttattgccgcttctcagaacattgaggttgttgaaagtacatggcattgggtcttcctttttttttgccgtcttgtatctccattttgtatgattctgagccaaaagagaagagaagctgcaatagaattgtctcgnaat

SEQ ID NO: 273241 - DNA, 577 bp, Zea mays
  unsure (1)..(577): unsure at all n locations
gaacaaaagatcgcgaagcgagagggaatgatggaggcataggcactagcacctcctcgcctccacctccgtcctcttcgatcccgtccaatcccccgcgccccggcgcccctctccgccggcggctttgctgggtcccgcgctcctcctcctcctaggctgttctggttggggctgcggcggagggaactaggtaagggggaaggaaaggggaggtttgagggagagcgcagcggcagcggcagcagcgatgccatcgcacgcggatctggaccgccagatctcgcagctgcgggattgcaagttcctgcctgaggcggaggtcaaaacgctatgcgagcaggccaaggcgatcctcatggaggagtggaacgtgcagcccgtgcgttgccccgtcactgtctgcggcgacatccacggccagttctacgacctcatcgagctctttcgcatcggtggcgacgcgcccgacaccaattacctctntatgggcgactacgtcgaccgtggctactactcagtggagactgtgtccttattgggtggctctaaagtacgttatagagacagaatcaca

SEQ ID NO: 273242 - DNA, 377 bp, Zea mays
  unsure (1)..(377): unsure at all n locations
cggctcgaggcgcctaactactgctaccgatgcggaaacatggctgccatcctcgaaattggcgagaacatggatcagaacttcctccaattcgacccagctccgaggcaaattgagccggacatgacgcgcaagacaccagactactttttgtagaaaaaacaggtgtggctaaaaaaaagagaagagacgaggggaagatgcaggaaatggacccgatgttctgttgtgtctgtattgtgatgccttgctaggtgagatctttcgtttctgttttgactcaacctggtcgttcaacctacgtcggctcatcgtcgaacgttgcccaggctgttaaagatgatttcacttcccatgtgtagacatcgttgtncact

SEQ ID NO: 273243 - DNA, 479 bp, Zea mays
cctaatttccggattgacccttttttacttcttcgcctgggcggacgcaaggggttaagcttgggttctcattcttccgccaccgcccttgcccgccgctagcggcggtgaggatgacgcggcgtgggtgcgcgccatctccgccgccaccaagtccacctcggcgcccaagaccctcaccctcgatggcaccgtcaagtcctccatgggcggcctcccctccgccgcgctcctcgagcgcttcgccacctccctagaggagctctccatcgcgggggtgcgcctctcctcgctcacgggcctgccacgcctcccggcgctccggtgcctctccctccctgacaaccgcctctcggggtccgccgccctcgccgccgtcgccgaggcatgcggtgccacgctgcgccacctcgacctagggaacaaccggttcgcagaggtccaggagctcgcgccgcttgccggggtccgggtcgagt

SEQ ID NO: 273244 - DNA, 443 bp, Zea mays
cccacgcgtccgccacgcgtccgcgcacgcacggacgcacggcacgcggacacggcgcgtgcgcggcgactccgggctggggtctccctcttcccttccctcagatccaactccgtttctccattccctccctagcccagccagggaaccagtctcagtgaatcccgcgcccggatcaatctcgcccaaggaagcagctcttcacgacttgcttccagatccatccatccatccatccatccatccgaggttgggccgtgggggtgtcggtgcggtgggaaatggggaaggggatcagcggcgacgcccgcctcgccgcggcgccttacgaccagtgggtgctgctgagccccgccgggggctcgccgcgcccgcccgcgcgctacaagcatgctgcccaagtggttcaagacaagctgtacgttgtcggagggagtcgcaac

SEQ ID NO: 273245 - DNA, 430 bp, Zea mays
gacaataagctttacatatttgccttcgcttcgaactaatctattttttcagatggtgacttccatgtgttcgattgtttgaggtgagggatgacgtgaagctgccaagctataagggtgaaaacatcaatgacaagatgttcgacgagaagaatcatatcttggacccataaaggatgctttaggagtacgcccaatccgctaccacgctcaacctactctgtgtcttctccactggcggctacaccgacattcagcgcgtcacgcagtggaaacttgatgtcaccgaacatagcaagcagggcgtcatgagaaataaaatcttccatgcactgagttgatttattctatatatttattgcctgaccacaacagccttaggatcttattgtctgaccacattttttcactatgaaagacgtggcgtact

SEQ ID NO: 273246 - DNA, 1005 bp, Zea mays
ctgacgcgtgggtggcgcgcaacgtggccgcgcacttccccgccgtgaacatcacggtcatcgccgtggggtccgaggtgctctcggcgcagccgagcgcggcgccgctgctcatgcccgccatgcgctacctccagaacgcgctggtggccgcggcgctggaccggtacatcaaggtctcgacgccgcactcgtcgtccatcatcctcgactcgttcccgccgtcccaggccttcttcaaccggtcgctggacggcgtgctggtgccgatgctcaggttcctgcagtccacggggtcgccgctcatgctcaacgtgtacccttactacgactacatgcgctccaacggcgtcatcccgctggactacgcgctgttccggccgctgccgcccaacaaggaggccgtggacgccaacaccctgctgcactacaccaacgtgttcgacgcggtggtggacgccgcctacttcgccatggcgtacctgaacgtcaccaacgtgccggtgatggtgacggagaccgggtggccgcacaagggcgactcctcctccgagcccgacgccacctctgacaacgccgacacgtacaacagcaacctcatccgccacgtgatgaacagcaccggcacgccgaagcaccccggggtggccgtgccgacctacgtctacgagctgtacgacgaggacacccgcccgggctccacgtcggagaagtactggggcctgttcgacatgaacggcgtccctgcctacaccctgcacctgacgggctccggcgtcctgctggccaacgacacgacgaaccagacctactgcgtggcgcgggagggcgcggaccccaagatgctgcaggcggcgctggactgggcgtgcggccccgggaaggtggactgctccgtgctgatgcagggccagccgtgctacgacccggacaccgtggacgcgcacgccacgtacgccttcaacgcctactaccacggcatgggaatgggctccgggacgtgct

SEQ ID NO: 273247 - DNA, 390 bp, Zea mays
gcctccactccacacagtacacacgacacgatgtctccagaactctcttgggtgatagcttccacagggcgacgacctccatgaaaaacggcgagtcttcattcccatcgtcgtctccgcgctcttggaccatacgaatctccggtcgaacctggtgtcgtccgcccgccctctctcccgctgctccccatcgctctttcgttgtgactcgctccctccctggctccccgcatcgctccccatcccatcttgtcctggacacctgggaagcctcctgttctttttagtttcattcttggccacagacttcacgtgcccacaaccccaaggaggagaaaccaggctatgaccaatagctatcagttccttcagtgttttacgcccctctct

SEQ ID NO: 273248 - DNA, 537 bp, Zea mays
gggaaagtggatctaggagacctgtacggcgcggcggcggggtgggtagaggcgcggaccagctgcccgcacatcggcaccatgccacccgctggtgctgacgacctcgcgcgcgtgccttcgcccgactctccgtgctccagatgtaatcaccctgctgaaaactggttatgcttcatatgcaaagatgtgctttgcagccgttttatcaacaaacatatgttgtgccatcatcaagaaactggtcactgtcttgctttgagcttcagtgatctgtcagtttggtgtttctcatgtgattcatacctagatgttcaagccattttagaattgcgcccagtgtatgaagttgcacatttgttgaaggttggacaacgtccaccatttcgatcacttgatgtacaggattctggcactggtgaaagtggaagtctgtcaagggcttagttatatgtattccagtaatgagtttcttttcatgatacttcaatcagattcagacagacagttgtctactatcctggcatttcttaagct

SEQ ID NO: 273249 - DNA, 448 bp, Zea mays
gttaacattaacctcaaatcagaaaaggttgtgaagtcatatgcagacatagtgaagaagaacacatttgtggaagttgggacaagagatgtggatgtggaacatgcaggctcaggtgatgaatcttctggtggtttcgatgaactggattgtcagtacacaccaacagagagggaggactacgctctatcagatagggtggttcaagtgcaacaacagtaccctgataaccaggcagaagtgcttagctttgatcgggttttacaagggcgcatcacttttcctggtcagcagtggcattctgatttttatgccaatactacccaaactgaggataacgatgcatatagctgcgagtatgcccaagaggtcaaatatgcaattctggatggcagctctaatttgccagaaaccttagattctgaagttgataaactgtccctggggc

SEQ ID NO: 273250 - DNA, 476 bp, Zea mays
cggacgcgtgggcggacgcgtgggccaggctccaccggagccgccgccgtttctgggtctctcgacggcgagcagcgactcgtccggtcgtccctcagcactgggcttggcggacgcaggacaagacacaggatgagggctgtggtgcagcgcgtcctctcggccagtgtcgaggtcgaggggcgaatagtgtctgcgatcggccctggactcctcgttctcgtcggcgtccacgaggcggacacggactccgacgccgactacatttgtcggaaggtcctgaacatgaggctgttttcaaatgacaagactggaaaagcatgggatcaaagtgttatgcagcgtaactttcaagcgctattgggcagtcagttcaccttatacggcatcctgaagggtaataagccagattttcacgtggctatgtcacctgcaaaagcgaaaccattctatgcttctctagttgagaaatttca

SEQ ID NO: 273251 - DNA, 696 bp, Zea mays
cccacgcgtccgcccacgcgtccggcggcggcggctgcggcgcgcgcggcgcggaagcagtcggagcggcggacgtacctcgtggcggccgtcatgtccagcctcgggatcacgtgcatggccgccgccgacgactactaccgcttcgcatggcaaatggagggcggcggcgcgatcccggtgacggagatggtcggcacgttcgcgctctcggtgggcgccgcggtggggatggagttctgggcgcggtgggcgcaccgggcgctgtggcacgcgtcgctgtggcacatgcaccagtcccaccaccggccccgcgacgggcccttcgagctcaacgacgtcttcgccatcgtcaacgccgtcccggccatgtccctcctcgcctacggcttcttcaaccggggcctcgtgccgggcctctgcttcggcgcggggctggggatcacgctgttcgggatggcctacatgttcgtgcacgacggcctcgtccaccgccgcttccccgtcgggcccatcgagaacgtgccctacttccgccgcgtcgccgccgcccatcagatacatcacatggacaagttccagggcgtgccctacggcctgttcctggggcccaaggagctgaaggaggtgggaggaactgaggagctggagaaggagatcaagaagaggatcaggaggagggaggccctagacgcc

SEQ ID NO: 273252 - DNA, 599 bp, Zea mays
  unsure (1)..(599): unsure at all n locations
acaaatgctgttcaggaattaatgcataagatacatgatataaaaacaaaggctgagcaaagtgaaacttagngttcaagaaatctgtcgcgacatcaaaaagttggattgcgctaagaggcacataacaactacaataaccgatcttcaccgtcttactatgcttgtttcggctgttgaacaacttcaggttatggcatcaaaacggcagtataaagaagcatctgcacagctggaggcagtgaaccatctatgcagtcattttgaagcctatagagatgtgcccaagataacagaattgagagagaaattcaagaacatcaagaaaatcctcaaatctcatgtattttcagatttttcaagcttaggaactgggaaggaaacagaagattccatgctattgcagcagctatctgatgcttgtttggtggttgatgcattggaaccatctgtaagggaagaactagtgaagaacttttgcagcaaggaactcacctcatataggcagatctttgaaggagcagaacttgccaagttagacaagaccgaaagaagatatgcatggataaaacgtcgactaaggtcaaatgaagacacct

SEQ ID NO: 273253 - DNA, 1194 bp, Zea mays
acatcgcaccaagccaccagtccgcagcacgaaagcttccccccctctcttctcctgctggttggctcatcaggcctgcccgaataatcctcctgcggattcccctcacggcaggccaaaacccgcacctttcccccgtcgacagattctcaaacccggcgaactccgggcagggctcacgtcgccgatcccgctcccggattctctttgccgccgcgaggagacggcgtccagtccaggccttcagcagctccgtctccgtgtgtatctgatcgggggattctttgcttgagaaactgctagcatgggcgcggtgcttggacggcatgacacgcacaagcggagttcccatggttcgaagctggaggtaaagatggtcgacgctatgcagcagagagcatcgcatggaacctcactgaaatcgttcgatagcattatcatgaagttccccaaaatagacgagagtttcagaaaatgcaagactatcttcgaacagtttgatgaagattcaaatggcgaaatagataaagaggaactgaaacattgttttcaaaagctggaaatctcattcacagaggaggagatatgtgatctctttgaagcttgcgatataaatgaagatatgggcatgaagttcaacgagttcattgtctttctgtgccttgtctatcttctcaatgaagcagctgtcttggaagcaaagataaagatgggactaggaaatcttgaggcaaccttcgagaccttggttgatgcgtttgtcttcttggataagaataaagatgggtatgtgagcaaggatgagatgatccaagcaataaacgagaccacgacaggagagcgctcttctgggcctatagccatgaaaagatttgaggaaatggactgggacaagaacggaatggtgacattcaaggagttcctgtttgccttcactcgctgggtaggaattgatgaaaatgagcatgaagatgccgatgaataaggactgtgaaggctggttattcttcaagggttagggccagatcagccttggaaaagctggaaatggatggcggataaaaacagttaacgtttattggttgcttgttgatcgtaatattcatgccattgctaatagaatgtctcgacattaaactcctagtagggtgacttgcatgtctgaacactggtatcaatgttacagttgctgtc

SEQ ID NO: 273254 - DNA, 474 bp, Zea mays
tggtcgcgtgggttccgcgccgccggttcgtgccaaaaccctactccctacaaaatgcagcggcgcctaagctgaaatcggtgaatcgtgcgccgcggcgaagagagaactcgaactcggcaggacttgtgcggaataggaggggagcggccgagcgggggtcagagagggagatagagttcatcaggtttgccatgtcctccagggctggcggcggcaagccgttgtggtctgcctccaccatcgtcgccaaagtcgcgagtgggtaccacatcctcaggatcgatggctactccaggaccatggagacccccacaggagagtccatcgcgtccctcccgttctcggtgggcggccgttgctggcgcattcgctactaccccaacggcgacaagttggagaataaagaatacatctcgctttatcttaatctccacgacagaagcgtcgaggcagagaatgcgcaattaatgt

SEQ ID NO: 273255 - DNA, 942 bp, Zea mays
cccacgcgtccgcccacgcgtccggccgccccctctaatccctcctccgcaaggcagacaggggccggcgttcactcgggcatccgcgggacggacggggagcaaagcctcagcggcgagtgcgggcgatgaggtcttcggaggcgtcgtcgcggctcgtgcaggagctcgtgctgtacgccgccagcgccgcgctcagctgcctcgtcctcttcgctggcctccgccacctcgaccccaaccgcgccgcttcccagaaggcgcagcaacagaagaaggagatcgccaagcgcctcggccggcccctcgtctccaccacgccctatgaggacgtgattgcgtgcgacgtcatcaaccccgacagcatcgacgtcgaattcgactccatcggcggcctggaccagatcaagcaggcgctctacgagctcgtcatcctgcccctgcgccgccccgagctcttcaccttcggcaagctcctcagcccccagaagggcgtcctcctctatggccccgccggcacaggcaagaccatgctcgccaaggccatcgccagggagtccggcgccgtcttcatcaatgtcaggatctccaatctcatgagcaagtggttcggggacgcgcagaagctcgtggctgctgtctttagtctcgctcacaagctccagcctgctattatcttcattgacgaggtcgacagtttcttggggcagcgacggacaactgaccatgaagccatgactaatatgaagacagagttcatgtccctctgggatggcttcaccaccgaccagaatgctcgtgtaatggtcctggctgctacaaacaggccttctgagctagatgaggccatcctaaggcgctttactcagatatttgagaattgaattcccgtccagagtgaaaggaacaagatacttcaggttgtgtttgagggagaaaatg

SEQ ID NO: 273256 - DNA, 512 bp, Zea mays
agacatagttgactgtcaccgtgttccctcggggtgggcgatggggtcgtcggagccgtcgtcgcgttccgtgcagaacctcgtgctgtacgccgccagcgccgcgctcagctgcctcgtcctcttggccggccttcgccacctcgatcccaaccgcgccgcctctcagaaggcgcagcagcagaagaaggagatcgccaagcgcctcggccggcccctcgtctccaccacgccctatgaggacgtgattgcgtgcgacgtcatcaaccccgacagcatcgacgtcgaattcgattccatcggcggcctcgacaaggtcaagcaagcgctctacgagctcgtcatcctgcccctgcgccgccctgagctcttcgcctccggcaagctcctcagcccccagaagggcgtccttctctatggcccgcccggcacaggaaagaccatgctcgccaaggccattgccagggagtccggtgccgtcttcatcaatgtcaggatctccaatctcatga

SEQ ID NO: 273257 - DNA, 521 bp, Zea mays
cccacgcgtccgggaccaggccaggctcggtaagccagtctccctcaacaaggcatgcacctacacacactagcttggctaggctacatacatacgcctgctgccgtgggtcgtctcgtcgccaccatggtcgtcgtcgtcgtgaactttgcccttcttcttgaacaacacacactctctttcagtctctctctcccttcgcttttctgcgtgcgtgcgtttgttggtcgcttgtcttgtacatagaaatttttagtttctggtgtacgtaggagagttttgagtgagatggaataagaatcaggcattttccctcatacggcgtttccgattgcgtgacatgccgtggagggcatgtaaaatgtcggtgaaattcaatgcgcctgtttggtgaaattcaatgcgctcgaagcagacgtaagattctggtgaaatacacctaaaaattcccggccgcgcatgtaataaagcttcttcaggtgaagtttggatttggacccggccgacagtcaccgaccgca

SEQ ID NO: 273258 - DNA, 1285 bp, Zea mays
cctagacacctcaaggcattatcttccagttgatgttattaagcaagtgatcgactctatgtcatttgctaagctgaacgttcttcattggcatatcatcgatgcgcatccctttccattggaggtgccaacatatccaaacctttggaaaggttcatactccaaatgggagcgctacaccgtggaagatgcacatgatattgtcaactacgctaagaaaagaggtatcaatgtgatggcagaaattgacgtgcctggtcatgcagaatcatggggaaatggatacccaaagctctggccttctcccatttgtacagagccattagatgtctctagtgatttcacatttgaagtaatttttggaattttgtctgatatgaggaaaatctttccattcgggctgtttcacttgggtggtgatgaagtatacacagggtgctggaacacaacgcctcacgtgcggcagtggatggacgagcgcaaaatgaccacgaaggacgcttacaaatacttcgttctgaaggcccaggagctggcgatcaagctgaactggactcccgtgaactgggaagaaaccttcaactcgttcgaagaaaacctcaatccactgacggttgtgcacaactggctgggccccggagtctgcccaaaggttgtggccaagggtttcagatgcataatgagcaaccaaggcgtctggtacctggaccacctcgacgtcccctgggaggacgtctacagcggcgagccgctcgccgggatcagcgacagagagcagcagaagctggtgctcggcggggaggtctgcatgtggggcgagacggccgacacgtccgacgtcctgcagacaatctggccccgagccgccgcagcggcagagcgtctgtggagccagctggaggccatatccgcccaggacgtcgagacgaccgtgctgtcacggctacaccgcttcaggtgcctgctgaaccaccgtggggtcgccgcggctcctgtcacgaactactacgctcggaggccgccggtcggcccgggttcgtgcttcgttcagtaaagcaagcagccaagcaggaaggtaccctcctacccacgccacgaggtgctctgccttcgtgtaccatatctgtgtgtaatccacggaaacaatctgtataatcatctgtctccgttttcgatttcccaaggtcgaaataaaaccgcaccgttcaaaccaaaaaaaaaaaactacaaaaaaaaataaaaaccacgctctcggaccttgttcgacccggaattccgaccgtac

SEQ ID NO: 273259 - DNA, 529 bp, Zea mays
  unsure (1)..(529): unsure at all n locations
gcccggaacggaatggccggctcatccacgcgtttggttgnggggaggggtaacgaactagtaccctggggggccgccggtcggccagcgtacgtgctttcaggagtgaacatggcagccactcaggaagggaccctcctacccacgccacgaggtgctctgccttcgtgtaccatatctgtgtgtaatccacggaaacaatctgtataataatctgtctccgttttcgatttcccaaagtcgaaataaaaccgcaccgttcaaacctccttcgagctcgggcagtactgcatttgttttctggcggcggggtgcgtcgctgtcggggaccggacgccatcttttcctcagtttggccttgacctgaaacccgctggtccaagctgcgcattaatggcgcgtgtaatttgcgaccacctgttgtgcttgggtggtttggagtgacgacaatgggtttggccccttgttctatacttccaatataaagagagaggtcactgtccttcccatgccacctttttcattgccc

SEQ ID NO: 273260 - DNA, 410 bp, Zea mays
ccgtgttccagatcgacgtcgcccgctccaagtggctggacctggccgtgctcttcagcatgatcgtcatctaccgcctgctcttcttcctcatgatcaaggccagcgaggacgtcaccccctggctgcgccgctacgtcgcgcggcgccgggtgcggaaccgtcgccaccgcaagccggacctgcccgcccggacgccgtcgctccgcgggtacgtcgtcgacgcggccagcctgccggacgaccacccgtgacgaaagagcgcgagagaaaacgtacgggcagggatgtcatttcatatcatatcacacagaggctaaaccggatcgagctgataataacacactcactcactagtactgcaataatatgatgttaagttggtatagcaaccgcttaagtgcccgttc

SEQ ID NO: 273261 - DNA, 320 bp, Zea mays
attgatctagctagctaccttgaatcttgatccgtccatacacttgttctttttcatggcgaattaattaaagaacttcggcacaaacatattctcatctccatgaatattcattggcaattctctggctttcttttccttctcttttgatatataacatctaacatgcttgtgtgcatatgtgtagcagcagcaaggtcagcagccgagggcgaatgggggagctgatgcaccgctgctgcccctgggtccggcggcagctacatcggcggctccggagcaaggtgggttgcctagaagctcatcaatggctaatgccg

SEQ ID NO: 273262 - DNA, 658 bp, Zea mays
  unsure (1)..(658): unsure at all n locations
ctttgttcctcgcgaagcctcaccgcgctgcagagcgcatcgccgagcccccgcctcacctcgaattcttctcgccgtagttcgttgccctcctccttccccttctctcctcgacaagtacacggcggcttggatctatacgaattcggcatctgtattttacctcatcggggatggaggtgcaggtgtttgatttgtcttccgactccgagggcgaggtgacggcgcactcgcccgatcacaagcgcccttctcgacagccgggtgcagaccctaatcgcgggggtggcgagacaggttccagcgccctggacagcctcttcgagcaagcgggcgcggcgaagccacagcgtcaccccagtgacgcgctgaagaaagggaaggagaaggccgtcgagggggagagcgcggtgcctccgaagcacaggggcgaattgctcggggctgctggccgcgtcctgggatctgggagtggtccgtggagcgcactgatgagcaagtgcaaggctggagacggtgggaacaatggagctgggtgtgcggtagtatgagaggtgaccgntcgatgatcacgctcactaactgaacccccatgccgcgtctagggccagacatgaaggctcttatgtcagacatataaagtgagataacaagctaa

SEQ ID NO: 273263 - DNA, 443 bp, Zea mays
catccacgagactagcagctagctctgtttccgctctgcgcggcgtcccggccgacgacgacacgatgcctctctcggcagcttcttccatcctcctcctcctccatgccctggtctccctcacccttctcctcggcgacatgacgagcacgacacctgccgccgctgtcccggccgcggtggacgtgaacacgacggcgttcaccatgcatgactctgctgcgtcggcgtctccccatggtgccgaaaaccttgagatgtactactgcttcctctgcacggagcgccacccgctgctgattcactactgccccatctactgggacgagtgccacctcaactgttgggatggtgacacgccgacctccatggacacggtgcagggcaaggagtgctacgtcatgaagctgtacatgtccggtcgctacgtcatcgtccaacgc

SEQ ID NO: 273264 - DNA, 388 bp, Zea mays
gcagacacaataatcaaaagtcatggctccaatgaatggcccaacacacggggatttgcaacgtgcaagggtgacatgaatatgagcactctaatgcaccacccttttggtaactgggctgatacagtgagtcgctatttcgcacgatcgtcctggccctattgggaacggagatgctcttaatgaagtaggaggaccgaccaatccaactagcaccagcaggcggggagtggatgctgcctgctagaagagtgctagctccgcgcatacgctcgctcgacaaatgtgtgttgttaactattgtgtatagtgttataattactgtcctttattcctgatgtttgttgtgtagttgaaactcacattgttttttcatttccatctcgat

SEQ ID NO: 273265 - DNA, 717 bp, Zea mays
ttttgatttgtcagtgtcagtccaaaaggggtcaagtttctctctactgctgataaaatagatggagcaccactggtatttcagctgactgcagagatgattgaactagaggagcacggtagttcacatcataaagaaggtggtttgaatcttgtgccaacattagaatctgaaaaattttctgaggatgaatcaaaactctatcaaaggctcctgaatgttaggatgaagattgctcaagatattggcactgctccgtatgctgtatgtggcgatcagacaataagaaactttgcaaagatgagaccttctactggagctagacttgctaatatcgatggtgtcaaccagcattttatttcacgtttcagtaacattttcatccaaaatattgcggaattgtcgaaggagttaaacctcccgttggataattcaccatttccaccaccaccaccaacaaatccagctgcagaaaatattgctggtataccaaaacctgtacaaaacaatcttcctgggatcttgggtgatgcaaagctgactgcatgggaattgtggcataagcaggagtactcattcctgaaaattgcttatttccgcagagcagtgccaataaaagagcaaacagttattgcgtacattcttgatgctgctcgagaaggatgtgagatggactggagtaggttttgcagggaagtagggctgacacctgatata

SEQ ID NO: 273266 - DNA, 608 bp, Zea mays
cccacgccgtccggcgaacaaccaaccaactccgatgtcctcgatccaacaaactgcgagcgaagcggacggacgactggggacgagacgaaggcacggaacggagggaggggagggaccgagggagccagtgagcgagccagactacccacctactaggtccagcggcaatgaggggcagcgagatgttgaccgcctcggggggcaccggcacggccccgtccacggcctcctcgtcgtcggcagcggcggcggacctggttgccggagccgggggcttgggcgccatcggcgtgggcgaaggaggcggcaacttccccctcgccgtcgctctcctcgccttcgcctgcgccaacttcatcaacctcctctccatctggttaaaagagaagaggtgggatgcaaggaaatttcttacttcagctggagtcatgtcatctctttctgcaactgtggggagcttggccgttgctgtgggtcaacgagaaggcgcagatagctctgcatttgccctcgcattggtttttgctgcagtttgaatgtatgatgcatcaggaattagatggcacacaggccgccaagctgcgttgttaaatcaaatagtctgt

SEQ ID NO: 273267 - DNA, 508 bp, Zea mays
aaattcacttctctctctctccgtcgagatgcttcgtggctccgccgccctcctccgccgcctcgcccctcgtatctcgggcggtggctgcggaaacacgactcaccggcgccttcttcctcccatcgcccccttcctccgcgcccgcttcttgtctgccccgactacctcttcaccgccttcttcgtcttcagctgcctgccacgaggaggatgcggaggacagagacctccccgagatctccaatggtgatgcaggtgcccggctcagcatctccgtcgaccgctccgggctctacaaccccacaggtgttgttgtgtcaaaatgccgcagagcactcgcacgagccgtcgtcggaatccgagctcgtcaagcacatcaagagcatcataaagtttcggagtgggccaatcagcatagctgaatacatggaggaggtgctgacgaacccacagtcaggattctacatcaaccgtgacgtgtttggggaatcaggggattcatcacc

SEQ ID NO: 273268 - DNA, 555 bp, Zea mays
gcaggcaaagtgctgaagaaaggaaaaaagaagcaggccaaggacgagctggaccgccagaagcaggcggagaagaagcggcgccgacttgagaaagcgctggcaaactcggctgccataatctcggagctggaaaagaagaagcagcagaagaaggaagaacagcaaaggctggacgaggaaggtgctgccatagcagaagcagtcgctcttcatgtcctcataggcgaggactccgatgaaccctgccatttgatgctgaacaagcaccatataaggtgcaaccattgggccccctcggctgcttttgaattcaccgtggacgcacagcccgccgaggtgtacccgtctgaggatggactggtatgcggcagccatgcgtatgctcccagagcccccaaggggaggcgggctgattgggggattggacaggcactgccatgctggggagaagtgagtgacctccaaggcccgtactaccaaggaacgttccgtcagtctgttacctgccctggcgttatagccgctcaggcatgggcatcgttgcagatcagg

SEQ ID NO: 273269 - DNA, 1942 bp, Zea mays
ctgacatacattgatggtgatgggaaaatgtatcgtgttagtaagggtgcacctgagcagattctccacttggctcacaataagtcagatatagagaggagagtacatgctatgattgataaatttgcagagcgtggacttagatcacttgctgtagcatatcaggaagtgcctgacgggaggaaagaaagtcctggtggtccatggcacttcgttggtctcatgccactttttgaccctccaagacatgacagtgctgaaacaattagaagggcactcaaccttggtgttaatgttaagatgatcacaggggatcagttggcaatcggaaaggaaacaggacgtcgcctaggcatgggtacaaatatgtacccctcttctgctttattaggacagaacaaggatgagtctattgctgctttaccagttgatgatctcattgagaaagccgatggttttgctggtgtattccctgaacataagtatgagatcgtgaaacgtctacaagcacggaagcatatctgtggaatgactggggatggagtaaatgatgctccagccctgaagaaagcggatatcggtattgctgttgccgatgcaactgatgcagccaggagtgcttcagatattgtcctcacagaacctggacttagtgtgatcattagtgctgtgcttactagtcgtgcaattttccagcgtatgaagaattacacgatctatgctgtctctatcaccattcgtattgtgcttggatttatgctccttgccctcatttggaaatttgatttccccccattcatggtcctaatcattgcaattctaaatgatggtaccataatgactatatccaaggatcgtgtaaagccatccccattacctgacagctggaagttggctgaaattttcacaactggagttgtccttggtggatatcaggcaatgatgactgtcatcttcttttgggctgcatacaagacaaactttttcccaaaaatatttcatgtggaaagccttgagaagacagctcaagatgatttccaaaagcttgcatctgctgtttacctgcaagttagcaccatcagccaggccctcatcttcgtgacaaggtcccggagctggtcatttgtcgagcgcccagggtttctattggtctttgctttcttggttgcgcagctgattgccacactgattgctgtgtacgccgactgggcgttcacttcgatcaaaggcattgggtggggctgggctggcattgtgtggctgtacaacatcatcttctacttccctctcgatatcatcaagttcctcatcagatatgctcttagtgggaaagcgtgggatcttgtcattgagcagaggattgcgttcacaaggaaaaaggactttggtacggaggagagggagctgaagtgggcacatgcacagaggaccctccatgggctacaggcacctgatgccaagatgttcccagagaaggctgggtacaatgagctgaaccagatggctgaagaggcgaagaggagggccgagattgcaaggctgcgggagcttcacacactcaaggggcatgtggagtctgttgtgaagctgaagggactcgacatcgagaccatccagcagtcctacacagtgtaactttgcctgcccttcccagaggaagtttcttgttctttttacccaccggcgtgtgaatttgatggtggctggcttctctttgttttatttatttatttaaccgagctgcaagcaccgacaagtagctgaaatgagacagacagacccctcgctgtaatccctgatttcttctgtcctctcctcacatggtatgccaaccagtttatgaactttgctcggctatataaataagtgcttgaagaggggagcagggttttgggcccaccaaaaaaaaaaaaaaaaaaaaaaaaaaaaggggggccccccc

SEQ ID NO: 273270 - DNA, 494 bp, Zea mays
cccacgcgtccgcaaaccctcgccgactcagatccagcttcctcgcaccgccgtcgccatgccgttcactccaggcccctactctggcgtcaggtcctcgcccttgtggcgagggcgtcggcctttggcgtcggtgtcgtctacgggagcatcaagctctcaatcctcaaggtaacaaaacctaaaaaggaggaagtgcatgatcatcactaaggacgacaaggctgctacattttaattcccacatatggaaggatgttataaattggcagtgcaccccttctccatacgtgcaatttcgtttatgatttgtggacctgtctgtaacatacctgctgttttttttttgtgttgtaataaattcttatacaatgacatgaaatcaggaagtggaaaagcaagtcgttcgacaaaaaaaaaaaaaaaaaaaaaaaaaaaaaatcaaatttcaagttgttagaaagaaaccaaagaaaatataaaaagaacctagg

SEQ ID NO: 273271 - DNA, 441 bp, Zea mays
cgccgactcagatccagcttcctcgcaccgccgtcgccatgccgttcactccaggcccctactctggcgtcactaccctcgcccttgtggcgagggcgtcggcctttggcgtcggtgtcgtctacgggagcatcaagctctcaatcctaaaggtaacaaaacctaaaaaggaggaagtgcatgatcatcactaaggatgacagggctgctacatgttataaaattggcagtgcaccccttctccatacgtgcaatttcgtttatgatttgtggacctgtctgtaacatacctgctgttttttttgtgttgtaataaattcttatacaatgacatgaaatcaggaagtggaaaaagagcaatattaataaaaaaaaaaaaaaaaaaaaaaaaaaggggggccccccgatttttgacctcttccacccgggatttatttccgg

SEQ ID NO: 273272 - DNA, 2379 bp, Zea mays
gccgccgtgtgtttgctgtgctcgttttctgtctgtcttgatcgttgtggattagttctttcgtttttttttttgttgaattgctcactctgcagcctgtttttcttgcagaaccttttgtagttctattgctaacgcggccaattgatctttcagatcaggagctggggattgccctgccactctgctgaaagttttggagaagttgtggtgtttccctgcctattagagtctgcgcttctgtgttcctgatcaactgctactacgcgattgttgtcttctcaatctgtctggccaagcatggctggccagacgtcaaaggcgaaggaagcaggaaaagatgacagagaagaacccggagctgaggcggcgaaagagaagttagtgccgtctcaccagcagcaagagtctccagcttctgtggtggacaaggattcttcaggtgtgtcttcagttcctggtgatgagtcaccggtcctagaaggggattctgttgagttgaaagtggaggaaaacttggatggtaatgggagtaaggaaaagaaaatgtctcagaagagcagtactagtgacggctttgcttctgctaaagtgagtgatgggacaagtagtttgaggaagaccagtggtagtgcgacgatgagtacacgggctgatttcactgagagtgggaagagtagcatgtgccgtgtgagcacggccagtgacattagcgacgagagctcgtgcagcagcatgagcagtgccaccacaaagccacacaaggggaatgattcaaggtgggaggcgatccatgttgtgaagtccagggataatgttcttggactgaatcattttaggctgcttaagaagttgggttctggtgatataggaagtgtgtatctctctgaattgagtggtacacggagttactttgcaatgaaggttatggataagacttctttggcgagtcggaagaagctgcttcgagcccagaccgagcgggagatcctacagtccctggaccatccatttctaccaaccctgtacactcattttgagacagacaagttttcatgcttagttatggaattctgccctggaggtgaccttcatactcttcgtcaaaggcaacctggaaaatatttctcagagcaagcagcaaagttctatgtagcagaggtactccttgcattggaatacctgcatatgcttgggattatataccgtgatcttaaaccagaaaatgtcctcgttcgggaagatggccacatcatgctgtcagactttgatctctctcttcgctgttcagtaagcccaacggtgatcaagtctgcaaatcctggcctagatgcaatgcagaggaacaatgcagcatactgtgcccagcctgcttgcattgaaccatcctgcattcagccctcttgtgtagctccaactacttgctttggcccccggttcttctccaaatctaaatcaaagtccaagtccaagtccaagaaggacaaatcaaagcctgatgctccaaaccaagagaacctcttcccggagctgattgctgagccaactgatgctcgctcgatgtcctttgttggcactcatgagtacttggccccagaaataataaaaggggagggccatggaagtgctgtggattggtggacctttggcatattcttgtacgagctgttgttcggcaagacccctttcaaaggttccggcaaccgggctacactcttcaacgtcgtgggccagcccttgaggttcccggagtccccaatagtgagcttctctgcgagggacatgataaggggattgctagtcaaggacccgcagcaccgacttgggtataagcgtggcgctaccgagataaagcagcatcctttcttcgagggcgtgaactgggctctgataaggtgtgcgagccctccagacataccaaagcctgttgagctcgagtgtcgcccaaagcaagtgccatcagcaaacggaaaggtcgcgccagcccctaaccaaaaggggccagataattatctagagtttgaattcttctagggatttttttggtgatttctgaactgaaagagtgcatctgggcagatgctgtgaaagaaagtgaaagatgatgagctactctaggcatgtgcttggctggatctttttttttttttctgccattagactgtacgctcgtttcaggatatccgagttgttttttcctgctgaactgcttaactctagggtgtactcaatccatcttgtatgttgcaattttcagaacttgcctatggtacttgaaatggacttcagggctacttgctccagctctctgtgtaattgctaatatacattgtaattgatgcttcatcttcggggttaaaaaaaaaaaaaaaaaaggaa

SEQ ID NO: 273273 - DNA, 490 bp, Zea mays
  unsure (1)..(490): unsure at all n locations
ctgggctctcataaggtgcgcgaccctccggacataccaaagctcctcgagctcgagtgtcgcccaaagcaagtgccatcagcaaacggaaaggtcgcgccggtcgctaaccanaaggggccagataattatctagagttcgaattcttctagtttttttttgttttttgtttttgtgatttctgaactgaaagagtgcgtctgggctgatcctgtgaaagaaagtgaaaaatgataccctcctctaggcatgcgcttggctggattttttttcttcttctgccattagactgtactacgctcgtttcaggatatccaagttattttttttttgtttcccggttgaactgcttaactttaaggtggactcaatccatcatgtatgttgcaattttcagaacctgcctatggtccttaaaatgtatttcagggctgtgtcctgtgttattgctaaaaaaaaaaaaaaaaaaaaaaaaaaaaaaaaaaaaaa

SEQ ID NO: 273274 - DNA, 412 bp, Zea mays
ccaagaccgtcgccgtcctcctcgccgcggtgctcctcgcgctggtcgcgtccgcggcagccagcaggaagctggaggaggacgcactcctgggaagcctggccccagcccccgcgccggccgttggcggtgccgcggggctgcctggcggcaagccgggggcgtgggccgtcgccgctctggtctctctcgtcgccttcctcgtgatctgagggcgtggggatcgtgctgcgcatcgcgggagatggagggacgaatcctgcgatctggatcgcagagagagaggagagggggatatttatgttcgttctgtttgttctagggtgcctctcttttgcctgtataagagaggatcatgattttttttatataataataccgtttatttcacattctttttataatatatgta

SEQ ID NO: 273275 - DNA, 517 bp, Zea mays
cggacgcgtgggattccccttggcagcacagaaaaatctgaacctctggtatccccaccaagtgtcgcatatggcgggaaacttcaaacttctccatcagaaaaagggaatcagctagacgtagttgaagtggataattgttctcatccttctaagactgtgaagccacttgatggtcctcagtcagattctattacagagaataatcagccttctccagaagctacccttaatatccagaacaaagtgcaaagtagttccaccagaagctgcaagaaggttcatcatatgttgcacctttttccttgctagtagtcattccttgatacataaatgcttactaggcccaaaccttcaattgaatacttctcaaagtatgctccaaagaagtttatgtactcttgatcccttttggcaacttgttttatgtatctagaagcaccggtccaataaaacctgctagttgtgtaacctactaacctttcatgctaataaattacttgagtttttcttgccc

SEQ ID NO: 273276 - DNA, 366 bp, Zea mays
atccttctaagactgtgaagccacttgatggtcctcagtcagattctattacagagaataatcagccttctccagaagctacccttaatatccagaacaaagtgcaaagtagttccaccagaagtcgcaagaaggttcataagcaaggtagtgccctcggcaggtcgattgatctaacaaagttcgcttgctatgatgagctgattgctgacctggatcagatgtttgacttcgatggtgagctgaagagtccatgcaaaagttggttagttgtctacactgacaatgaaggcgatataatgctggttggtgatgacccctggaatgaattctgcgatatggtccacaagatcttcatctacacga

SEQ ID NO: 273277 - DNA, 626 bp, Zea mays
aactttattcaatttttgttgtttaattgatcaaattcaattctttattatcattaagggagattccagcatcaagttaagaatttgaacaaaaaaatgtccatgcttttaagttttttgttggcacttatgactagtgcagttttttccttatgcttgtactccttttggatcatgtttttaactttttatttgatgaaatgctcttttaagatcatgttcccttcaacgctacttggaactggggaaaagtggacaatgatgaagacaataagtgttacggaatatttgaattatgaagcaggcaaattttccaagagtaaaggtattggagtctttggtaatgatgcaaaggatacaaatattcctcctgaagtatggcgatactatttgcttatgaatcgccctgaggcatcagatacactctttacttgggctgatttgcaagccaaattgaacagcgagttgctgaacaacttgggaaacttcattaatcgtgtgctaagttttgttgcaaaaccagctggagctggatatggttctgttgtacccgatgcacctaatgcgggcgcgcacacattgacaaaaacacttgcagaaaaaaccagtaaatgggttgaacaata

SEQ ID NO: 273278 - DNA, 370 bp, Zea mays
cttaaatggggtgttcctgtcccccatgagaagtataaagacaaggtgttctatgtttggtttgatgcacctatcggctacgtgtctattacggcatcctatacacctgagtgggagaagtggtggaagaatcctgataatgtagaattgtttcagtttatgggcaaagataatgtgccgtttcacacgatcatgttcccttcaacgctactcggaactggggaaaagtggacaatgatgaaaacgataagtgttactgaatatttgaattatgaagcaggcaaattttccaagagtaaaggtattggagtctttggtaatgatgcaaaggatacaaatattcctcctgaagtatggcgatactatttgc

SEQ ID NO: 273279 - DNA, 1285 bp, Zea mays
gcatagtaagaaatatcgtgagagattggggtgatgagggtcaaaaggaacgtgatgagtgctataagcccattcttgaggagcttaatcgcctttttcctaaccggagcgatcagaggcctccttcttgtcttgtccctggtgctgggcttgggagattggctcttgatatatcttctctgggttttgtaagccaagggaatgaattctcatattacatgctgatctgttcaaatttcatcctgaaccacactcaagaagctaatgagtggtccatatatccttggatacatagcaactgcaattctctttctgacaacgatcaacttcgtcctgtttcatttcctgacattcatccctcaagtgcaggtatcacagagggattttcaatgtgcgctggggactttgtagaggtctacagcgaggaaagccaagaatctgcatgggatgctgttgtaacttgctttttcctggatacggcacacaatatcgttgaatacatcgagatcatatcaaaagttctcaaggatggtggggtctggattaacttgggtccccttctgtatcactttgctgattcatatgggccagatgatgatatgtctattgaattaagtttggaagatgtgaaaaaggttgcttaccattatggatttacaatggaggtggagaaaatgatcgagactacttacactgcaaacatgaaagcaatgatgcagaatcggtaccgtgcagcattctggacaatgaggaaagatgcatctcggtcaaaagcttgtaagcctcgttgaagtgaagatcatccatggcggacgatcaatttgtgccatcattattcactgttgtattcaaactccacacaggccgtgccagactaagttagatagatatatcagatgagctgcctgattcacagaatataattggcttaacataggaaaggaggtgctgagccacgctagctagctcatccttttctcctatattacagatattcaaactgtactatggactctgtaagaatgagcaataaactaagcagacagaagttaaaaatagaagtaacagaaatttaaaagtggcgccgttgccggggatcccgggtcgcccgcgtgacaggcgggagtctcaccactgtaacgactgggatgcctagggtttagtggatgtattgttccacgactaatgtttagtattggaagtatgatatatagtgtaattataaaactaatcgtatgaaggaggaaagataaacgaattgatcaagtctaaaaacttaaaaaga

SEQ ID NO: 273280 - DNA, 381 bp, Zea mays
ctccatttatacggtattccattgcaaaatttctgcctatgatagtgcggggatacatgggctaagccatgggagacacagacaccatatatgaagttttctgcctatgatagtgcgcagatacatgggctaagccatgtggagacacaggcaccatatatgaacgttggtctttttgctgccaaccaatcatgaacaccaaattcagagttaggaatgaactataactattcatagtcttgttattaccttaagctcttgattttgcaacggacctgttgatgcgcagttgatctaacacatgagatgtggtttcatagacaatacaagtgtattctagttgtctttttcatagtgggtcagtgaaaaaaagtgttttga

SEQ ID NO: 273281 - DNA, 439 bp, Zea mays
gagaagtcgagatagagacaaccggcacccgccgatcgctcgctggtgggatgaagaaatgctccggcgtgctcttcatcctcacactcgccgtcgtgctcttcctcctctcgccgtcgccctcccccactccaccccccaacaccgcacccaatggcccgatcaccgacctcctccccaccctccccggcctttcggacctctaccctcccgctcccaactccactgcacatctctcctggggcctcctccgcccgctcctctgccgctccgacgcgctcccgggaacctctgcaggcgtcctcgaggcagccgaagcctggcggaatctcaccctggctgtcaccgccgcggcaagcgaggaggaggcgcgtctccaaggactccgctgctcatcggccgtgggaggggatctacgcacgggacgtgccacacttcc

SEQ ID NO: 273282 - DNA, 452 bp, Zea mays
cccacgcgtccgcccacgcgtccgcccacgcgtccgtgatctttatgtgagattgcactaatctggtggtatgagaagtatcataatgtggatatacataccagaaacctgatagtggtgcttctgtttctatgcctgaactggtaataggcttatagctgcctgaggatttcagttgaatgatactattacatcacactgtaaattgtgagccaagaatgtacatcttgcattcggtaagaccataagagaaaggttattgtgactcgttacttgtaaatacgtgcactggctgttcaaagaaactaagaaagacaaggcggaggtgctaccttcccaccacccaaaaaaaaaaaaaaaaaaaaaaaaataaaaaaaaaaaataaaaaaaaataataaaccaatttaaaaataaaaaaaaaaacaaaatatataaagtttactctaattat

SEQ ID NO: 273283 - DNA, 564 bp, Zea mays
cccacgcgtccgcccacgcgtccgcggttggtggttgcgtcgcgttgtgttgcgttgtgtcggaggttggagttgggcggctcgcgtgcgagaggatctgagcggagaaggccatggaggagagtaattagcggttgctgggtcgggaggaggtggtgtggttttgatcgtagtcgcgtttgccggggctcgatttcgatcagaaaactttttttaccggatattcttgggtgggtgtgttcttgggccgcaaattgttatcgccggtgttcggggctcgattttgaagaagaacccaatttattaggggggaaatttcctgcttttgttttcggggcaatggttttggactcccagacgcttcggattagagaatttttgccccaataacgagccattttttcagttgtgctactcgtcaatcaatccagtgattctgaactctgatagaaagaagaagctttcctaattttcgtgctcactgtgtccaaaagctttccgttggatctacttgtgaatcggttccttttttttttaatctgagatatccttgtcgctttaggt

SEQ ID NO: 273284 - DNA, 398 bp, Zea mays
cccacgcgtccgcccacgcgtccgcccacgcgtccgaaggaacaatgaagcaaaccaaaacccaatcagaatcagggtgggtaggcggaggaaggaaggggaaaggcgacgagctggtgacgacgaggagcaactagcgtcgcgaagccgccgagccccaggcgaagtcacaggccgccgcagcggtgccggcgcccacccgatccgccgccgccgccgacctcgtgctcgcgcctccggtcggaaggagggggtgtcaaacccatggagcagcctgccgctcccgatcggagcgattttcccgccggggagtgcgaatggcgggaggagctgcggcagcagcagtctcaggtggacgcgctgcgggagcggctcgtggaggcgaaggtcgggttgcg

SEQ ID NO: 273285 - DNA, 624 bp, Zea mays
aacggaaatagctcgcggtcgcggtttcttgcgccactccggctcagccgccgcccgccacccgccacagccgccgcagacgagatgggcatcaagggtttgacgaaactgctggcggacaatgcgcccaaggcgatgaaggagcagaagttcgagagctacttcggccgcaaaatcgccgtcgacgccagcatgagcatataccagttcctgattgtagttggaaggacaggcatggaaactctcacaaatgaagctggtgaagtcactagtcatttgcaaggaatgttcaaccggacaataagattactggaagcgggaatcaagccagtttatgtttttgatggcaagcctcctgatatgaagaaacaagagcttgctaaaagatactcaaaaagagatgatgcaaccaaagatctgactgaggcagtagaggtaggagataaagatgcgattgaaaaattgagcaagaggactgtaaaggtcacaaggcaacacaacgaagattgtaaacgactattaagacctatgggggttcctgttgtagaggcaccttctgaagcagaagccgaatgtgcagccctttgcataaacgataaggtgttcgctgttgcttcagaagat

SEQ ID NO: 273286 - DNA, 514 bp, Zea mays
agactctcaaaacttgttcggatgaggctggaaatgcaggcgccttatatatctaagtggcctcaagcactgagtattcagtctcaaccagcaaacgtctcaacaagcttgaagcagcgagctatcctggtggatgagatatggcatgctgctggagattctgggtcagatattgattggtatgtgaaacgtacagtgcttggtggtatctactcaacctcagaggtgtatatgttgacagacaattctccagagttccgtgatacttggacgtttgtgaaccgcagaataaaggatgctcttgatcttcagaaaaccttccaagaggccgcatacctcgctgaagccgtgggagcaggcatgggcggcaccgtgcagggtgttctcaacagggtcttccagaaccgtagtggatgaactctcttttcctcaaacacgtagtgtggatggactagttccgtcttgtgcacgctgcacaggataaagcacattttcccgttgaccaactggcgta

SEQ ID NO: 273287 - DNA, 923 bp, Zea mays
tgtaaatgggggagcaagtgccactttgctcatggagagagggagcttggaaagcccctgctgatggacaacccgatgggacctcctccaatggggccagggcccaacgggcacttcatgccaccgccaatgcctttcccagacatggttcctccctccacattcggtgcttccgccacagccaagatcagcgtcgatgcatcccttgctggtgccatcattgggaagggtggtaccaacacaaagcatatatcccgagtgactggggccaagttagccatccgggacaacgaggctgatcccaaccataaaaacatcgagctcgagggaacatttgaccagatcaagcacgctagcgcaatggtcacagagttgattgtccgcatcagtggtaagccgcctccacaagccaagaacaacccaggtagggggcctggttctcatgccgggggtcctggaagcaacttcaaaaccaaattgtgcgagaacttcaacaaaggctcctgcacctttggagacaggtgccacttcgcccatggcgaaggtgagctgcgcaaacctgctgctgcttgacaggcatgcttattgtggcctgtggtgattaatctgcctgtatggctgaataacaccatgaccaaggacagtggcgccagcgccatggtgaagtgtgctgagccacatgctgcctgagagagagcatttccctgtggctcgtatttgatcttaatgctgtaacaaactctcctcgatggagattaagcaatggccgtttatttaggatttgtaggattgccgtattggtcacccttttatctatcctgtttttgtaccgtttcttaggcactcttggctggcagatcattgtgagtctgttgaacttgagaatagttgctattgatgttatcggtttgtggattcttact

SEQ ID NO: 273288 - DNA, 476 bp, Zea mays
taaaaacatcgagctcgagggaacgtttgaccagatcaagcacgctagcgcaatggtcacagagttgatttccgcatcagtggtaaggtgcctccacaagcaaagaacaacccaggcagggggcctggttctcatgctgggggtcctgcaagcaacttcaagaccaagttgtgcgagaacttcaacaaaggctcctgcacctttggagacaggtgccactttgcccatggcgaaagtgagttgcgcaaacctgctgctgcttgatagatgtgtttagtgtggcttgcggtgattactctgcctgtgtggctgaataacaccacagtcgcctatggtgagatgtactgggccacgtgctgcctgagagagatcatttccatcgcttgcgtagagacaatggccgttttttaggatttgtaggattgccgtattgttctgttcgatttatatctaaccctgccagaatcctatttttg

SEQ ID NO: 273289 - DNA, 638 bp, Zea mays
cgctgatggggttgttgcgagcggaggaataatcaatatgatgggcacttatcagatagctcttgtggctcatacatggacaaacctgtttatgtggcagctgaaagctacaagtttgctcggctatatcccttggatcaaaaggacatgacgccagctcaccgaccaatagattttggagtcccaatacccattggtgtggaagtggagacatctgcaagagactacacacctccccaatatctcacactcctcctgaccgaccttggtgttctgacgccgtctgttgttagtgatgagctcatccaactgtatctatgatctttgcggcaggcgccgttgtttcattggcatgtaacatctacagttgagtccagggtttgccctatcagttttgactatgatgtatgcttgactttgtggtgctgatgcgatgtagaagaatttctcggaacgattatgctgagagaaatcaacagtttgtaagagcttaaagtacagtcatggttacgaatctgccccagaccattttcagcactaacctatttgtaggacatgctctgttaaaattatggttccctcaaacagtaagtgtaaatggatctccacaacagaatatgaatccattagtattgcct

SEQ ID NO: 273290 - DNA, 677 bp, Zea mays
cccacgcgtccgcccacgcgtccggtgttaatccacctgttatacatagagacttcaagagtagcaatattctcctggacaaggacttccatgcaagagtttcagactttggtctagccaaacttggatctgatagagctggtggccatgtctcaactcgagttttgggcacacaaggctatgttgcaccagaatacgcattgactgggcatttgactaccaaatcagatgtgtacagctacggtgttgtgcttttggaattacttactggcagagtaccagttgatatgaagaggcctcctggagaaggtgttttagtaaactgggcattgcctatgctcactgaccgagaaaaagttgtgcggatcttggatccagcattggaaggtcaatactccttgaaagatgctgtccaagtggctgctattgctgccatgtgtgttcaaccagaggctgactataggccattaatggctgatgttgtccaatcgctggttccacttgtcaagaaccgttataatcagaaatcttgcaatcccaatgtgcaaccatcgaagccacttgactaggagaaaagctagtgtttgatctgcagtttgtgctcgtccttctggaacccttctcgagttctcgtctataacgaactactgttgagacagattcacacgcttcctaac

SEQ ID NO: 273291 - DNA, 459 bp, Zea mays
ctatagatgagagcagtgctttggccttggcaattcttccgacaggtattgataactgaagagcaactacacagcaagatagtggatttgatccaacaggatgggaacttgctcttgttactacaagcagcaatgcgattccactgtctatggagagtaatttgggtggtggatttgacaagctcacattggacagcctatacgatgatggaacctacaggcagatgcagcaacaacagctatacggatcagcccctcccaatccattcatggcaagcgatcccttagccgtatcaaatcaagtggctcccccaccgtcagttcaaatggcggccatggctccacagccccagcatttgcccatgatgattgaaccaaatcccttcggaccaccacagcagcatcacgcgggcgtcgctcctgcagcaaaccccttactcgacgccgggttcggtgcgt

SEQ ID NO: 273292 - DNA, 406 bp, Zea mays
cggacgcgtgggcttgaaaacactgctccatggtggaacagtgttttcaagttggacgacttgctgttcgttctggctgaccggcttgggcgattaatcacgattagtcggatgacttggcgattaatcatgacttgtccaaaccgacttggaattaatcggatgacttgaaaacattgtcgtggagaaacaaaagggtcaagaaattaggcagaacaactgcagacagattacacaatggaattctcttatcatatacgctgcagagcatttttagtgataagaaattcaaaggttgtctcaactccctcatggatgctgatgcaacaacgagcaacattcaaagatttcttttcagagctgtgtcctatatggacatggaatctggattcctgtcggtagcaag

SEQ ID NO: 273293 - DNA, 771 bp, Zea mays
tgcggactagctcacaagacaatactatttattctagaagaattcgacctctttgctcagggtaaacagaggttgctttacagcttacttgatgcaatgcaatctctaacatcccaagctgttgtcattggtgtgagttgccgcttggatgcagatcaactcctagagaaaagggttagatcccgattctctcataggaaacttttatttatttcgccttcgttggatgatatacaacggttggtggagcatttgcttatactggccaaagactcaggtttaccatcaaagtatatcgccgattataactcaagacttacttccgatacgctgcagagcatttttagtgataagaaattcaaaggttgtctcaactccctcatggatgctgatgcaacaacgagcaacattcaaagatttctgtacgtttccagcagcttgttggttctttcttcataacatctataattaaacatcaatatgtgctcagctgaatatggacaagcaattttttttttcagtttcagagctgtgtcatatatggacatggaatctggattcctgtcggtagaaagcttcctaaaggccctttcttccatgcagaggcaacctaagatggacagcttacaagattagaaagtaaggagcaaacctcatacaacttcaccagcataatgaaagatccatacaagacgcctataagacttctgataaatatgcaagcaccgtttggtttagggcctttgagcacctttcggatcgtgagctgat

SEQ ID NO: 273294 - DNA, 294 bp, Zea mays
gagaaaagggttagatcccgattctctcataggaaacttttatttatttcgccttcgttggatgatatacaacggttggtggagacatttgcttatactggccaaagactcaggtttaccatcaaagtatatcgccgattataactcaagacttactgtatcctttctacgacctgactgttatggtgcatatctcatcttatttgagtacttagctattaatggcatataatcttgttaaatgaaacaaaatgtttgctttctgaaactaaaacatggtactctaacttgctt

SEQ ID NO: 273295 - DNA, 645 bp, Zea mays
cgaccaatctaatagcgccgcaacgcgaagcgtaaccgcgaacctcacctacagttccttcgcgcaccggcaccgcggcggcagttcagcatggtggcagcatccgtagccgagcgggcctatgaggcggcgacgcggtccgcgctggtggcgctggagcgcaacctcatcccggacgcggtgacccggcgcctgacgcggctcctgctcgcgcagcgcctccgccagggctacctcccctccgcgccgctccagctgcagcagctcctccagttcgtccactctcttgaagagatgcccattgccattgaaacagacaaagctaaagcccaacactatgagttgccaactacatttttcaagctagggctgggaaagaatttcaaatacagttcctgctatttccctggtgattcaagcaccctagaagatgctgaggttgcgatgatggatctgtattgtgagaggtcgaaactacaagatggccaaagtatcctagatgttggatgtggatggggatccctttcactgtacattgcaaagaaatataggaactgcagtgtaacagggatatgcaactctactacacagaaggcttttatagaagagcaatgtagggataacgagctgtcaaatattgagata

SEQ ID NO: 273296 - DNA, 796 bp, Zea mays
cccacgcgtccgcccacgcgtccgagcagcgcatgactttgtatctgcaactcgtttcgactagcctgcacgccgggagccctcgtctcgcccttctccacctccgaagatcctgcgagttcaacccgcgagtgagcatgtcgtcctactccccgccgccgccgccgccgcgggaccagtccatggacaccgaggcacccaacgcgcccatcaccagggagcggaggctcaaccccgatctgcaggagcagctccccaagccatatctcgcgagagctctcgaggcggtggacccgagccacccgcaggggaccaaggggcgcgacccccgcggcatgagcgtgcttcagcagcacgccgccttcttcgaccgcaatggcgacggcgtcatctacccctgggagacgtttcaaggactgcgagcgataggatgtggactcactgtatcattcgcgttctccatactgatcaacctcttcctcagttatcccactcagccgggatggttaccttctcctttgctgtccatccgtatagacaacatccacaagggtaagcacgggagtgattctgaaacttacgacactgaagggaggtttgatccatcaaagttcgatgctatattcagtaagtgcggtcgaacccatcctaatgctctaacaaaagacgagttgagctcaatgcttcaaggaaaccgcaatacgtacgatttccttggctggttggccgctgccggtgaatggctcttactctacagcttggcgaaagacaaggatgggctcttgcagcgcgaaac

SEQ ID NO: 273297 - DNA, 1080 bp, Zea mays
gaagcatctttcccttgctgaagtccttcaggttctgaatatcataattaacacaaaaaagtggtttgtgcctcattcttcaggttggcagccgttgtcgtttaacataatagtggctgatgctactactgccactggtggaaaggcttagcatcggtacattatctgcttgtaccaattgaacatgttgaggttctggtcgttggtgcaagctgcgtccgcaaaagctaagttctgttgaggtttcctagcacaatgctctgcattttgccaagtttggggttaagttgttttacacacagtatatgttagctggagtgaaacagtaagtagccttagactgctaaattttagtgggagtcaatctgtcaactattgggcatgttgaaagaactctgggcagccctggctgtggctactcctatgggtgataattgtggtggtaagatgcttatgcaatcaagcataaagcggttcagagggactatcgtcttttgttcaggcagtataccgatgcctgatgctggtggttatgatctgccctcattgtaccaagatggcttcaaaggcgtccatgaaatatgagttgacatggaggaaattttctgtagtattagactattggtatagctgcatagctgttgctattaagctactcgttgaagccttgagctacccacattatattcccagttcctacatgtactcattgcagcaagcatggatggacggaccctgtgagtgtgaagttcagtgtatccacttttgaagcatggcaacagagtctgacatgcaagcaaactgcattaaagacagtcatgctgctagctgcaaggttacctatcgtttggtggcctctattggctctgccgggaaaggtttggagttcatctaagcgccttccagcatctttgctcccacctttagatggcgggatgtttattgtaatgctggcaaactattatggtgcttcttgtaaatcttactggttgctgattctaccaagtgctcaggttgacatgttgcctgagagtaaattgtttgatgactctattaaatgcttcgatatgctgttgtctg

SEQ ID NO: 273298 - DNA, 554 bp, Zea mays
gtctcctctccccatcttctctcctggaagccgcctcggtcggacccggacaagatggccgccttcttcggtgctgcaccgccgccggctctcgcttcgttccgccacgaggaggaggaggagcagcatcaggacgccgccgaggaggtgtaccacgtggacgatgtcgacgagggcagcggtgacggccgtggccacggcggcgccggccaggggaagctgtgcgccaggggccactggcgccccgccgaggacgccaagctcaaggagctcgtcgcgcagttcgggccccagaactggaacctcatcgccgagaggctggacggcagatcagggaagagctgccgcctgcggtggttcaaccagctggacccgcggatcaaccggcgcgccttctcggaggaggaggaggagcggctcctggcggcgcaccgcgcgtacggcaacaagtgggctctcatcgcgcgcctcttcccgggccgcaccgacaacgccgtcaagaaccactggcacgttctcatggcgcgcaggcagcgggagcactcgggcgcgct

SEQ ID NO: 273299 - DNA, 1023 bp, Zea mays
  unsure (1)..(1023): unsure at all n locations
cacccaaccaaccaattcgcttctccgtcaacttcacttcctcgtcgacgcctccgtcccaccaaccatgccggcggccatggcggctgcggcggcgcagaggctcctcgcggcgagcacgaaaatcatcggcgttgggcgcaactacatagcccacgccaaggagctcggcaatccggtccccaaggagcccgtcctgttcctgaagccgacctcgtcgtttctccacgctggtgtggccaccgccgccgtcgagatcccggagccgctcgagtcgctacaccacgaggtcgagctcgccgtcgtcatctcccggcgtgggcgcgacgttcccgaggcgtccgccatggactttgttggaggttatgcacttgctttggacatgacagcaagggaccttcagtctgttgctaagtctgcaggccttccatggactttggctaaaggacaagacaccttcaccccaattagtgcagtagttccaaaatcagctgtcactaatcccgatgatctcgagctctggctgaaggtagatgatgaactaaggcagaaaggaccgacaagcgacatgctattcaagattccttttctgataagctatatcagttccatcatgacattaatggagggtgatgtgatactaacaggtactcctgagggtgtgggtcctgtccgagtaggtcagaagattacagctggtataactgacctaattgatgttgagttcgatgttcagaggcgcaatcggtcattttccacatgatgcaataagcaagaaagtaatggtgaatacaaagtggcagtactcgtcctcgaccttgaatcgcattactggacctggagccattgcagatagctcttgagccttaccttgatttaatttacctgggttttgagagactatctatgaatatgctaactcgttcgtaaagtatctttttgtcccaattttgattgatggagctttaagcttgcttttctgtatgcaataaaaaaacttatcacatttttcttaantagttc

SEQ ID NO: 273300 - DNA, 494 bp, Zea mays
cccacgcgtccgcccacgagtccgtcgacgaacaactgagaagagctgcgcctgcgcctgcgcctgcgggaaagggagaacatggtggggaagaagaggggtgttatctccccgctggaccatctcgctgggctgctggaggtgcgcgtggtgaggggagtggacctcgccatccgcgacctccgatccagcgacccctacgtcgtccttcgcatcggcaaggcgcagaaagtgaagacgcgagtggtcaagaagagcatcaatccggaatggaacgaaaaactcaccctctctattgaagaccctgccgttcctattagactggaagtatttgacaaggacactttcgttgatgatgcaatgggtaacgcggagctggacatccgcccgttagtcgagattgtgaagatgaagctccagggtgtcgctgacaaaacggtggtaaagaagctggtgcccaacagacagaactgcctagccgaggagagctccat

SEQ ID NO: 273301 - DNA, 354 bp, Zea mays
tggtcgcgcaaaacaactgagaagagctgctggaggtgcgcgtggtgaggggagtggacctcgccatctgcgacctccgatccagcgacccctacgtcgtccttcgcatcggcaaggcgctgaaagtgaagacgcgagtggtcaagaagagcatcaatccggaatggaacgaagacctcaccctctcccgtggatgtgcgtccttggttccattgaaattcttttcagcagacattgtcccatatgggtatcctaaatatgcttactggtatcgacacaagcttcactgtcacctctaaggccactgatgaagaagatcacggctgaggatattggatgcgtatgcccctaaag

SEQ ID NO: 273302 - DNA, 397 bp, Zea mays
ggtgtgggtcctgtgcgagtaggtcagaagatcaaaggctggtataactgaccctaattgatgtcgagttcgatgttcagaggcgcaaccggtcattttccacatgatacaataagcaagaaagtaacggccaaccgcttgaagattgctgctcgtgtcacgcgttcctcttgggtattcattcttccttgcgttgcagcgagattgcttcggcccatgagatgcgagtttagcctgtgcccccgcatggcttaagcaaaatacctgctggccaatgtcgtatacttgtactggtgatatattactgtgtaaaatagaaaacagttttgtttttcaggtttttataaaccgtatcaaataattccaggccacttgttagccgtctccctttacagcc

SEQ ID NO: 273303 - DNA, 365 bp, Zea mays
agcaaaagcaaccaactttcttctccgtcacctgactcacacctccactcacctccggtccaccaacctctgccggccatggcggctgcggcggcgcagaagctcctcgaggcgagcacgaagatcatcggcgtcgggcgcaactacatcgcccacgccgaggagctcggcaacccgatccccaaggagcccgtactattcctgaagccgacctcgtcgttcctccacgctggcgtggccaccgccgccgtcgagatcccggagccgggagcgctcgatcgctacacacgaggtgactcgcgtctcattccgcgtggcgtaatctgaggtcgcatgactctcgagtatcactgcttgactgcaca

SEQ ID NO: 273304 - DNA, 753 bp, Zea mays
cacactctcatcacttcgctccaagccagtgctagcccggccccttgtgtacgtgagagacggcatcgtaccgtagagcagcatccatggcggctcagggaagtggcagtgctcgtggcagcggcgccgccgccgcgcttgcgctggtcctcctctgcgtgctcctccacggcgagttggccgagtcggcggtgtacacggtcggcgaccgcggcgggtggagcttcaacaccgccaactggcccaagggcaagcggttccgcgccggcgacgtgctcgcgttcaggtacaacgccaaggcgcacaacgtggtgcccgtgagcgcggcggggtacaagtcgtgcagcgcgcccaagggcgtgagggcgctcaccaccgggaacgaccgcgtcacgctgaagcgcggcgccaactacttcatctgcagcttcccaggccactgccaggccggcatgaagatcgctgtcaccgccgcgtgatgcccccggccgatcagccgcgccggcgacgacgaccgccggacacacgggctcgatcggtggccagcttattattattgttatttccctctccaaagtaaaagcgtcgcgtccttaacctgcgtgttggtaggcggtgttaggtgtgtggagaccggccggcactatagagaactaaatcgaatgatggtgtactcagtacgtactgacgtgtatgagtttgtgttgatgtggacaacaataaaggcatgtgtacgcgtttgttaaaaaatat

SEQ ID NO: 273305 - DNA, 544 bp, Zea mays
tcgttcacgcgtccgcccacgcgtccgtagagcgccgccatggctcaggtaaggggcagtgctcgtggcactggcagtggcagcagcgccgccgcgctggcgctggtcctcctgtgcgcgctcctccgcggcgagttcgccgagtcggcggtgtacacggtcggcgaccgcggcgggtggagcttcaacaccgctagctggcccaacggcaagcgtttccgcgccggcgacgtcctcgtgttcaggtacgacgccagggcgcacaacgtggtgcccgtgagcgcggcggggtacagctcgtgcagcgcgcccgagggcgccagggcgctcgccaccgggaacgaccgcgtcacgctgaggcgcggcgccaactacttcatctgcagcttcccaggccactgccaggccggcatgaaggtcgccgtcaccgccgcgtgaaggcgttgtgaagccgtaacggaacgtgccgattggcccggacgggctatatatctggggctgctgcttctattattttcttctccaaagtaaagcgcatcgtcgt

SEQ ID NO: 273306 - DNA, 1143 bp, Zea mays
cccacgcgtccgagcagatgcagatcgatcccgagttccgctgactgcagaggagagagatctagagcgagggagggagggaaatgggccacgaggctgcggcgccggggtcgtcggtgctcggccgcgcggtggaggaggtgcgctcggccctcaacgagcacgccgacgtggttgccgacctcttcggtcgcgtctcctccgaagtgcgcaccggcttcgcgcccgccgtcgactccttcgttggcttcttccacgccgtcgactggaaggagccttggctgatcagcatactatctttccatgccattctgctactggttaccatcatctcgaggaggaatatcaatttccagctcatcttgtcagctctaacattttctggtgtattccttgctgagagattaaatacgttcctggcgcaaaactggaagagcttctctacccaaaactattttgatccccagggccttttcatttcggtcatctggtctggccctctcctcctgataacgatccttattctggtgaacactctcgtgacgctctgcacgctaatggtaaggtggaaaagggcaaagctcaggcatcgcgctcggcaagctcgtgacaagcaggactgatctgaaacctgcgtctatgtatcattcggtggcaagtagaaagtcgtgttcttgctacggttggtctaaccaagaatcacatccctggaaacggtgcccatttcattaggtagcagaatataacgttaagatggtcagattttgctcttgtggacccttttggtgcccggatagccatttactacgctgcaatattatcacgtcacacgatttctttgggcgaggacactaggcctgtgataatgatgtgtccatttgttcgatgctgaacctctgaacctcggaaccggttgatagttgttgttttcctagctgtgtcgggtcgggtgcagcatgctctaattgttgattacctcaagaataattcgttggactgctgaattttagccatctttacagatgttccgatctgaaactgtcgctcgaatttcactgcatctggggtcggtgtgcaagctattcctgatgtttgtgggcccttgaaaatgctctctggttgtactatgggctgaatgatgcc

SEQ ID NO: 273307 - DNA, 553 bp, Zea mays
tgtgtatgaagcaagaaattcttatagagatgtaagcaagatcgcagcagatgatgtgaaatgtagcgtatgtcaggaggaatacgttgatggtgaagagattggtacaatgcaatgtgaacatcagtaccatgtgcgctgcattcacgaatggcttaagcagaagaattggtgtccaatatgcaaagcttcagctataccttcagagatgaccaagggagacgcatgaatcttggcccaaacttgtaaatagcgtggatttattattagacattgtagatgctgacgcagttcaccccaatatgtggatacgatagtctctcccgaacggtcgaacgcctggaaccttttgttactgcatcttttatcttcttagcacacccttgctgcttgacagcagtacgggtcagaaactcgaaaagaaccgtggttctcaagaaacctttccagattctaaaaaaaaaaaaaaaaaaaaaaaaaaaaaaaaaaaaaaaaaaaaaaaaaaaaaaaaaaaaaaaaaaaaaaaggaagacaaaaaaaaaaaaacaaaaat

SEQ ID NO: 273308 - DNA, 372 bp, Zea mays
tctttgctatgacgccatccatgaagggccatcgaatggctggatcgaggaagaagactactagtataggtgctaatgtgcctcgccctcgcgttgtcttcacaggtgtgagctagttaattctacggccggctttaggagtatgctgctgaggttatgctaacgttggtagagtcggttctgcggtctgtcattggatcagtattttcgttaactgttgcattcatgccctgtatctgtttctgacgaaacatcttaccatggacttgattgcctttgagcctgaattatccaggatcgatctttcgttgcctgctatagagaaactgcaataacaaatggccatgatgaaatctttaagaaagacaaatc

SEQ ID NO: 273309 - DNA, 556 bp, Zea mays
gggctaaattagtcactaactctttgttactgaactaaggttgctgatgtgtggtcatgcggagtgatgccatacgtgatgctgacgatcaccatccctgagataagaaaccatccatggttcttgaaaaacctcctagctgaccaaatggatgacaatacgatgagtaagcagtacgaggagcctgaacaaccgatgcagagcatgaatgagttcatgcagatcctggttgaggcgaccattccagcagttggttcacgtggactcaatcagtttctgaatgatgacattgacctcgacgatgacatggaggacctagactcagatgccggtcttgacctggaaagcagtggggagatcgtgtatgctatttgacaacattgaatactttgttgtgtcgtaggttaccaagataattagagacaaggggcaggttgttgtgcttgcaagtatctgttgcagctgttgttcatgcctgatgttgatgcctcttttcatactgttgtgtttggatggtgtaccaccagtgttttacaacagtttggcccttggaatt

SEQ ID NO: 273310 - DNA, 508 bp, Zea mays
gcagcatcaggtgggggcttttcaggaccaactgcttctgcaggtggtggttgtgctgctgctgctactggtggaggttttgctgctcttgcttccaaaagtggaggttttgttggtgcagcttcatctggtggtggttttggaggtgcctcccagggaggtggctttggcagtggtggtggtggattcggatcctttggtggtaatcaaggagctgggttctcggcatttggagcaagtggggctggaagaccggcagctgatttcttgacgcagatgagaaggtaggctccaggcaaatccccagacaggtttacgcattagctatagcatacacatgaggcgagttacttttatgttccactcttaagcgttgtttcggcacaggagctgtagcataaacatgaccgcagtataccctggactggatgagccctcgcttcgctccatctattgatgacggaggggggcttccatttgggagccttattgctttctcttcttttac

SEQ ID NO: 273311 - DNA, 437 bp, Zea mays
gtaccatcaggttgtgacggagatctgcatttctacagaagatgggcacttgctgttgaaaaatggtgatgagccctgagttcgctatgatatgccctgtgaaggtccaccaaggtcgaatcgtctctgatgcgtagaatagggtcattcggagtttgggatttggccggtgagaatgagtattgatcaggcagttcaagatagctacagcaaactgttctaggtggctttgtcagccatttttggctcagcagtttttgctgggtgctaattgagcggtgtttttcggttagtcgtctttatttgtgtccattgaatccttgctggtctagcttggcgtaattcagttagggatgttattttgtcttttaagtgctgatattgtctgccttaagtaaagtaaagtggaaaccatgaaccaataaactaattaaaaa

SEQ ID NO: 273312 - DNA, 1210 bp, Zea mays
gttgcaagtaacaactactcttctccggactctcggggtttcccgacgtccaccacccatcctcgcttctctcgagtcctcaatccatcctccggctgttccctcccagcgacgaaaccctagcccgtcacctcgacgcctagcccgccaccttgccgcccgtcgctgcaggtttatggcgcctgtgtgatcggatcagcagtccgctccgtctccctcggcccacgcatctgatgttcctctcccgcatcgtactccgcgacctggattccatcgactctccggcctccatggcgtcctcgaagaaggttgtgacccgtgacgagtgggagctgaagctccgcgacgtcaagatccgcaaggaggacatgaaccgcctcgtcatgaacttcctcgtcaccgagggcttcgtcgacgccgccgacaagtttcgcatcgagtccggcacccagccggagattgacctagcgaccatcactgatcgaatggaggttaagagagcagtacagtcgggtaatgttcaggaggcgatcgagaaaatcaacgaccttaaccccacgattttggacacgaatccccaactatactttcatctccagcaacagaaactaatagagttgattcgcgtgggaaaaataaatgaagctttggagttcgctcaagaagaacttgcaccgagaggcgaagaaaatcaaacatttctcgaggaaatagaaaaaactgtagcactactggtttttgaagatgtaaaaaattgcccttatggggaactattggatgtttctcaacgtttgaagactgcaagtgaagttaatgctgctattcttacaagccaaagccatgagaaagatccgaagcttccaagcttgttaaagatgttgaaatggacccaaaatcaactggacgaaaaggcggcttatcctcgaatcaacgatttcaccactgccgcgctggaagatccatcgatatgaatctgctgtgaaggaactgagggtatgcaccaagcctgcctggtgcctacacgtggttgccccggatctgtcaatagatcatcgtctgcagcgattgagttcaccccttgcactagtgtttaagatcaatgcaagcaattgatccgaaaacatcacctgtgttctacctgtacatgatgtagaagacatgtttgaaacctttttaagttagtgaaatgttggatttttttcatggacat

SEQ ID NO: 273313 - DNA, 566 bp, Zea mays
ttgtttacgcgtccgattcgatgcatgattggtcacctatgtcctggattactcctaatttttagcaattgccacttgactctgtactctgtagttacacagtttccctgcgttgctcagattgtagcttgccttcatggctgctacttctaacaacagattcagtggcaaaattgatatatctaaaacagtaataccaggggcactagctagttatgtactacttcgacttcctcattaaccattgtaattggcttcatgtacaatctcctgcttgggtgccctctccttagttcttaattagtcactatgtttgtctttgtgccaaatgacgctctcaagggatcaggagctgtcagagaaatgtccatcacaagagtgtgcaacgggttcaaaagactcagaagtctcagcttatactaattaaagcaattgacgatgaggaggatgattgggaggctattgcagatagtggtgcccttgatgacacactagtgcgctctcttgagcaaggagctagagtatcttcttgcagctcccccgaaaaaagtagcaccccatcttca

SEQ ID NO: 273314 - DNA, 1158 bp, Zea mays
atgcttggaaagataagtcaaacaatgggtctccttggctcaagttctcatacagccaagcagcaatacttgaccttgcatttcaggatagctttggtcgggtgggtgaaaaaaataaagaagcactcaagatgtcaaagcatataactaaacttttcccaaataaagtgacaattgaatcacctgaggatgaaacggaactctcccagtggaaacagctattgggtcgtgacattgaaattcttaaggcaaaggctaattttttgaaaatacaatcttttctaacccgccatggtatggaatgtactgatttagaatcagtggtttgtgtcaaagatcgtaatctgacaagcgaatgtgttgataaaatagttggttatgcttcgagttatcaactcaaggatcaccctattcaaactcctggaaaggatgcgagagttgtcctttctggtgtaagccttaagtatggaattgatttgttggaaagtatccaaagtggccctaagaagaagagcacaaagaagtcactcaaggatgttgtcacagagaatgaatttgaaaaacgtcttcttccagatgtcatccctccagatgagattggtgttacctttgaggatattggagcattagaaaatgtcaaggaaactttgcaggagttagttatgcttcctttgcaaaggcctgagttgttctccaaaggacaacttatgaagccatgtaaagggatattgctttttggtccacctggcaccggtaagaccatgcttgccaaagctgttgcaacagaggctggtgctaattttatcaacatatcaatgtcaagcattgcttcaaagtggtttggagagggagaaaaatatgtgaaagctgttttttcacttgcaagcaaaatttctcctagtgttattttcgtggatgaggttgatggcatgctgggtagacgtgagaatccaggggaacatgaggccatgcgcaagatgaaaaatgagtttatggtgaactgggatggtcttaggacaaaagacaaagaacgtgttctggtacttgctgccactaataggccatttgatcttgacgaggctgttgtcaagaggctccccaggaagttgatggttaacttgccagatgcacccaacagaaagaagattcttagcgtga

SEQ ID NO: 273315 - DNA, 523 bp, Zea mays
aatgttacataagccgtagcccaaaaaatgtatatagttatgtccttccaatttttattttttttttttttttttttttttttttttttttttttttttttttttttcaataataatgatcattcatggatcctcacatcatactattgggacacttcaacagataatagcacataaaggtcacattgtttatgcagtcaaaatgagaagaaagcatctgcataagcattgtttgcactttttggctacatagttcttataacgcttagataataccagctaacctggcatctcattttgcatcccaatccttcagcttcttacttccctttggtttagcaataggtgcattcatgcctgccatttttgcattatactttgctcgcagaggcccatttgttgaccatggtgcattccaatctgtagtgtcttcattaacaagatgcgtacatttcgtcctgccgctgcgcccgaaatgtttaacttgcatgaccttgggcaggatgctcttatccatcttatc

SEQ ID NO: 273316 - DNA, 1275 bp, Zea mays
  unsure (1)..(1275): unsure at all n locations
gtggcatggcacaggttttgaacacggctccagtagcaccagcaaatgtccctatgccaaatccagcaccggcaatttcatctgtggcgccttcagaacaatctgcacccagcaaggaggatgttgaattagcaatggctatcaatgcctccattcaatcagctattgcagagggagtatcagtgcccaatgttcaaccaaatgcatccacccccaacaacaatggctgggctgcccctccaagtaattctcacaacggtcggggaccaccacccactcctgcaccatcaaagacgagcggtcagtcccaggtccgggtagacgccccaagcagcagcacttacaatggatgggatgtgcccggaacaagctctagtcaaagttcatcgaaaccccaccaaacccaaaccaaccctccagtcttgattccacaggaagcacttctaggctctcccaaccccaaccgcgccgcccgctgctgaagaaaccttctacaacggtcctgttcactatccatccatagactctacgcctgtcgatgtaaccatgccggctaccactggaggcggtagtacaacagtcatcgcaacggcagcacctacagaacagttagaaaatgaagctgatgcaagtgacagcggcaaaactccctctggtacttgcgttatatgtctggatgcccctgtggaaggcgcctgcatcccgtgcggccacatggctggttgcatgtcctgtttgaaggacatagaatccaagaagtggggatgccctatctgccgtgccacgattaaccaggttgttcgcctctatgctgtttgaggagttgaaacggtgggttcagaaagttggcaatggattggagggttctcgcaacaaatgttgatgggaacgtctctatctcaaaattgtgcaattatgctattttgcacttcgtactgcactacaaatatgacttccgtgtaatgtatgtgggctgacgcctttatgtcctgtttgaaggacatagaatccaagaagtggggatgccctatctgcactatacaagacaattctataaaaatctgggtattgttggaagttgcaactcacgttcaaagttgcacgattgtggagcttttccaagaacctaagatagtggatcgccgggtgcttgtctcatcggttaaggatgtgtttggtttgagctcaaagtgggatgaggcggtggcgacacgtctctttgattttttggatcacgtatcactanaactactccggggtttatcttgcccctat

SEQ ID NO: 273317 - DNA, 283 bp, Zea mays
gccgttgtctgaggagttgaaacggtgggttcagaaagttggcaatggattggagggttgtcggaacaaatgttgatgggaacgtctctatctcaaaattgtgcaattatgctattttgcacttcgtactgcactacaaatatgacttccgtgtaatgtatgtgggctgacgcctttatgtacataggtagtactatacaagacaattttataaaaatctgggtattgttgcaagttgcaactcacgtagtcacgttcaaaaaaaaaaaaaaaaaacaaaaag

SEQ ID NO: 273318 - DNA, 1056 bp, Zea mays
cccacgcgtccgcccacgcgtccgcggacgcgtgggcgcgagagcttgtcggagggctctctgtctctgtgataaaccgatacgcagaggaagctgcggagaggtgtccctgctctgctggtgagctgcggccagcgggtgaagtgaagtggaccggacgtggacgaaggagagagagaagagagagagagaagaaagggcgccgcgggggccatggctggacacgcgccggcgagggacaagaccaccaccggcttcgccgctacgtgcagcctgctgagccagtttctcaaggagaagaagggcggcctgcagggcctcggcggcctcgccatggcgccggcgccggcagctggagcaggggctttccggccgccgaccaccatgaacttgctgtccgcgctcgacgcggccaaggccaccgtcggggagccagaaggccatggccaacgcaccggcgggaatccaagggaggcagctggggaggaggcgcacagctgaccatcttctacggcggaaaagtggtcgtcttcgacaggttcccctccgccaaggtcaaggacctgctgcagatcgtgagcccgccgggggccgacgccgtggtggacggtgccggtgccggtgccgctgtccctacgcagaacctgcctaggccttcacacgacagtctctctgccgatctgccgatcgcgaggcggaactcgctgcacaggttcctcgagaagagaaaggacaggataaccgcaaaggcgccgtaccaagtcaacagttccgtcggcgctgaggcgtccaaggcggagaaaccctggctgggtctgggccaggaacaggaaggaagcgacggtcgtcaagcaggagaggagatgtgatcgatcagtagagactagattcgttcgtgcgcgcgtcgtcgtagcttcaggttaagggaaagaataatccaaccgtcggttaattgctcggcttaattacactgctctactacgtagtactggcactgctaccaccaccaccaccaccagagtgaccaagttaagctagggattgttacataggccg

SEQ ID NO: 273319 - DNA, 683 bp, Zea mays
cccacgcgtccgggcactacttgactacacacggaaggccataaacaagcttactgagctgaagaagatgctggagaaatttaagaatgatgtggagaagcaacaagtggagcaaatgactgattggcaaacaaagcttgttatgatggactccaaggaacggcaatatatcctccaagtctcaaattataaggcaatgcttaatcgagtgggttatacgccagagatcaatcatggtgtgttgatggaaatggctgagcataagaaggatctcgagaggaagactaaacccatagctgacacattaaggagctaccaggatttacctccagataaagctttagctgcactagctatagaggacaaaaagaggcagtatgcagccgcagagaagtacctagaagatgtgttgcaatctgctctaaccacaagtggcctataatgtgcatagttttgtttggtgtgtcttatatgttgccatcgattgaaggtgaaatggtaattaacttccttgtaatttgtgacttggttaaataattgtgtaacatttctatcttcgccatagaaattaagttctgtcgcagtaatgattttagcgacaaccaagacactcgccatagatcttggcctgctgtgtatgtgtatgtgatgccttgatgtgattttggatgactagtttgtct

SEQ ID NO: 273320 - DNA, 895 bp, Zea mays
caatgtttacaaaaatggtgaaagaacaacattcaagtggatatattcatgaatactctttgagttagtttttcatggttcactaatataagcagatagtgcctacacttatcaatttgctaatgacaggttaaaccaaactgcgttgtactgatcacatgggacgacacatgctaaaatcaatataacagtaacttgatgggactaacagtgcctaatcactagaaatgttatagttctgtcacttcaaacattttttgttgtaattttacatggtaattcagaactctgtttatggcacatgttgctcaaacataatgatcgagtccctcttcatggtcggagaaattgggggcaatgactacaacctacctctcgtctccagagtgccgattgaaaagatctgctcattcacaccatgtatcattgccaaagtttttttaacaaacaccgtgaacgtctacgtcattttatatgttgttgctgctgttgagctgacatattatatagatagtaatgtaactgattggtgtttgccggaattgattacgttaggagccaagactctggtagttcctgggaacctcccaactaggtgtgccaaaatatatgttgatattcaagagtgatgacagagaagattatgagccggaaacagactgcctcatgtggatgaacgaattttcagagtactacaacaagcttctcttggaggaactagataaactgctcaagatgaatcctgcagtgactattatctatgctgactattatggagctgcaatggaaattttccatttctttgaaccatttggtgctcgttgctgatgtagtattttttattatcaatatccatgtgtggtgaacatgttttgtttagtaatttagtttcttt

SEQ ID NO: 273321 - DNA, 577 bp, Zea mays
gtttacttcatgattgagattcagctggcattttccatgaagttttgtaggaagtgtatcttgtaccatattgagtttagctgtcagataaagctttgctgacggcaatgcaacaccacttaattggggattgaaggtgatgtggttcatctaagaccaagatttctgattttctgtttcaagttcaaaatacatgatagctgctggattatgctgccatgctggtacttagacataatgatcgagtccctcttcatggtccgagaaattgggggcaatgactacaacctacctcttgtttccaaagtgccgattgaaaaaatttgctcattcacaccaagtgtcattgtcaaagtttcttcaacaaacaccgtgaatgtctacgtcattttatatgttgttgctgctgctgagctgacatattatatagatagtaatgtaactgattggagtttgcaggaattgattaggctaggagccaagactctggtagttcctgggggttaacctcccaactgggtgtgttccaaaatacatgtttaaattcaagagtgatgccaaaaaagactatgagccg

SEQ ID NO: 273322 - DNA, 406 bp, Zea mays
cccacgcgtacgccgtagcatatgcatatgagcatatcctaaccacgagtcggggggcaagcgaacggacacgatggtggccttgaccgcggggatttccgtagccaccggcgtcgtgttcagccccgccggccgccggcgaggccgcggacacgccgcctttcgctgctcgtcgtcctctgccggagagaggcaggctctcttcagccgcatcgcccccgtctacgatcatctgaacgacgtgctcagcctgggacagcaccggacgtggaagcgcatatgcgtctcttggtcgagagcgaagatgggggatcgagttcttgatctctgctgcgggagcggtgatttggcgttcctgctgtctcagaaggtcggcttagatggagaggtgatggctgtcgatttt

SEQ ID NO: 273323 - DNA, 677 bp, Zea mays
cgacgccatcgtcaaggagaccatgcgactgcacccggtggcaccgctgctggtaccccgcctcgcgcgcgaggacacgaccgtggccggctacgacatccccgccggcacgcgcgtgctcgtcagcgtgtggtccatcggccgcgaccccgcgctgtgggacgcgccggaagaattcatgcccgagcgattcctcggcagcaagctggacgtgaaggggcaggactacgagctgctgccgttcgggtccggccgccggatgtgccccgggtacagcctcggcctcaaggtcatccaggtgagcctagctaacctgctgcacggcttcgcgtggagcctccccgacggcgtgaccaaggaggagttcagcatggaggagatcttcggcctgtccacgccgcgcaagttcccgctcgaggccgtcgtcgagcccaagctgccggctcacctctacgccgagccttgatcgatgcgcgcgtgattctacagcatagttacctcttttgcgtcggttgtttgtccagagtgcgtacacttattgctcctgttgttgccgttactttaaactcctattagcttgcgtagtgccgtcgtgcgctgccttgtgacggaataatggtgtccccggttttacactgaagatagtccttaaacaccccatcaatatatatactcct

SEQ ID NO: 273324 - DNA, 717 bp, Zea mays
gggggatgaacacggtttctgtagtaccaagaagcaccctacccaccactacaaagattactcacaatgtacagccccgacgtttcgaataaacaagaatttgtacttagaaatcagtatcaaaagtgaaaacaggaagaagaagaaaaaaagaggagagagagcaaagcccagataaactatcaccggtccttctcgtagctaacgtcgctgccccgcccgttctgcgacgccgcgctgtcgtccaccggcacgacgccggcgtccttgcggctccggtacttgatcagaccgtacagcttcttgatctccctgatcggtgcgtccttggcgaaaccacccgcgctcccgctggcctcgtcgaagtgccccgaccatctcgacgtcagtctcggcggccgtgccgcggcgagggtccgctgcggctgcgcagctggcggcgctgacggcgccacgtgctgcagcgcgctgatgacggtgcggagcgcgcggctcggggacccgcggttggcgagcatgatctcgccgagctcggcgggcctgaggcgtgcgccggcctggaacccctcctccacgtgcgggtacagcttgtggtccttgagccgcaggtagctgctcgccagcgccttgaaggcctcgaagtcgcacatggtgaagtggatgtgcacgtcgagccgccccggcggcagcaccgccgggtccacgccgtgcgtcgag

SEQ ID NO: 273325 - DNA, 801 bp, Zea mays
aagaagagttgctatacgctggcctccattattggtgttgtaatcatcatggaagtaatcaaagttaggttcatacttctgcccaacttcatagtggagacacttgaagaccctcaccctgctctacaggtatgaaggtgtaatctgcgtgtccttttctcaattgtccgaataattttgtcctgccctcttctaagaaacattcctgaacttgtccgcaccctgctgtccgtgctgcctccagttgctgaatcaactactgttgacttcttcatatgaggctttgccagtgaaatcaaatggtcacattcttccttggagaggaagttgtggtacacgaacgcgcggggctcccacgacagcacctccgtccacggctcccccttctccccacgcgtctctagccccgagtcgaaggcggatctgcggaagcgcgagcgggggcgcgagagcgagagccccgcaccgcgtcccccggagccgtcggaggccccgggcagcgatagcgcgccgagggccaggagcaggagcagcgccgcgcacgccagcagcagcgccgccacgaccgccatcgacggcctcccgccccgcttcccgcccccgccacttccgcctagcagcggcctcccgcctcgccccgccagccggcccgccatgcccccgccgcctacgttgcagctcacgcgtggtggctccgctcgtctggcttcctgccggttctaggcttctagctcgctctccatctctgaccagagtcgcggggttttttatggcaagaaaggatgctgcagtgcgctggtc

SEQ ID NO: 273326 - DNA, 431 bp, Zea mays
gcagcagcaaatagtggttggcctgttggtactctatatcgtcccttccagtgtacccgtcctccagcccattatacattatacttgctccagataagaccaagagcgtcatggccaacgccttgcctctcatcgtcgcgctggtcgccgccgccgggtgcgcggcgctggcttcggccacgtcgtacaccgtcggcgactcgcagggctggacgacaaccggcgtcgactacagcagctgggccagccgcaacactttcgtcgtcggagacacactagtgttcaactacgtgagcaaggcgcacacggtgacggaggtgagcaaggccggctacgacgcctgctccggcgccaacgcgctcagcgacgacgacaccggctccaccaccatcacgctccagaccccgggcacgcactacttcatctgcaac

SEQ ID NO: 273327 - DNA, 600 bp, Zea mays
cctaaacccagaacccagcccgccgcaaccctagtcgccgccggcaccacaccaccgccatagtcacctccatggccgcggcgtcggaggacgcgttgcggcgctcgctcgcggagcgccaggccgccgtggacgcgcaggccgaggccgtgcgcgcgctcaaggccggcggcggcgcgtccaaggccgacgtggacgccgcggtcgaggcgctcaaggcgctcaaggtcgaggccggcgccgccgcgcgccggctgcagcaggcggtcggggcgggcgcgggtggcgccgcgagggaggagctgcgccaggcggtggtcaacacgctggagcggaagctgttttacataccctccttcaagatctaccgcggtgtcgcggggctctacgactacgggccgcccgggtgccgcgttaaggccaatgtgctttccttctggcgccacactttgttttggaagagaatatgttggaggttgactgcccctgtgtgacgcctgaggttgtcttgaaggcatcgggccatgtcgagaagtttactgacctcatggttaaggacgagaagacaggcacatgctaccgtgctgaccacttgttgaa

SEQ ID NO: 273328 - DNA, 886 bp, Zea mays
gtttccgcgcatgcaggctacccagtgaagatacaacacaacgctgcatgcgtggtagcaggcgatagagatgctctgcagccatccaatcacgtgccaagcgtgatcaacggaacgccgcgggccggagcgtagccaaccaatcaaccaatcacctgttagcctcccaatatgggcggttaagtggattccttcccctagatttgggaacatccgaggggtttatatgtggtctcttgttagcatcatacgaggctgccagcctcattgcccaaagactttcctccggtgaccaagatacggtggcacccattgtggcacaccatcttaggttcagtaaagctgtcgcaaggaattcttcgcctgcttggaatgcccttatgatcctgaattcagcatcaggttcttcactgaggattagatcttcaaaaacaattcttttctcactaggaatgccggcatcctcagatatcattctcatgctgaggactagcagtgactcaattgcagtattgtacagttcatgctcctcgtaggcacaaaacgtgtaccaaagtgttgatggatcaggttggatttttgatcgatgtatacactccaaaatatattcaaggacatgaatttgacttctagcatatgcacgtaagagtactgtgttgaaagtctgtatgccaggctgaagtccttcaatcttgcatatatcaagcagatccagagccccttcaaaattatcattttctaatacaaccttcaggagtgatgtaaaagtcacaaccgtaggattgaaaccatctcgaagcatcaaagacagcaaagcactagctgacttccagcatggcagccatttgcagcactcaatcatggtattataaatcggacgcgtggg

SEQ ID NO: 273329 - DNA, 379 bp, Zea mays
accgaatccccagaccaaatcgccgtcgccgtcgccgtcgcatcgcagcagcgggagtccgagggtcccggaccgaatccatttgcagacacccaaggccaagatccatcgctcgttccaaccagccttcttcttcttctgcttggtcgtctgatctcgttttccattcgtgtccaatccgatccagccaaccgctgtgaatgatggcgctcaacctgtcccaccagaccggcgcggccgtggcggccgcaccggcggcgccacgcgcggacgtcgtcgcggcggcggacacggcgccacgctcggccgttgtcgccgaggcgggcaccgtggcgccgacgcccgcgtcggcgcccgccaccgctccggcgctccagct

SEQ ID NO: 273330 - DNA, 423 bp, Zea mays
acgacggggacagagattcgttgatagcccaaagccatacaacagaaggaaagcgcgcggtatgcaaacaaggatggattcgagtgaccacggcgaccgccaaggtccgagagcctgtgaagaattgccaggcaagatggataacgaccgtgccgatcgtcaacgcttgaaagcctgcgaattcccagccaagatggacaacaaccatgccgatcgtcaagtttcgaaagcctgcgaatcgaaaggcaatgcctgtgaattgccaggcaagatggataatgaccaccccgtccgtcaaggtttgaaagcccgtggactactgcaacctaagtcggatgctagtgaagatggcgtatgcgaaggtttgaaagcttgtggattgacagccaacaagatggatgctactgaccaatgcgagcacaa

SEQ ID NO: 273331 - DNA, 962 bp, Zea mays
cgcgtctgcgatgttccatgatcagctgtactatgtgtgccaggagctcacggtcgaggattttctttatgatgatgattacaagatagatctttctgggtctaatctggatgtcattaataacctagaagggattgttcagctggaatatccagatcacaatttgccgcaagggttagcccctaatgcataccttgacatgaatagttgtgggcagagtgccggggctgttttcctgcacatgccagatttgctcacaacaatgacttcagcaccttctgcattcctgaagccaaaatgcgctctctgggactgccccaggcctgctattggatcagaaagatggcataattattgcagcatgtatcatgctgatttggctgtgcaggaagagggccctccgggcacaatgcctgtgatccgtccaagaggcattgatctgaaagatggccccctgtttgctgctctccgtgcaaaagtccaaggaaaaaatgttggggtccctatctgtgaaggagctgccactgcaaagtctccatggaatgcacctgaacttttcgtcctgtacatctttgagggtgagtctatcagagaatggttgttttttgacaaaccaaggagggcatttgttagtggaaatcggaagcagcggtccttgccagattacggcggccgtggttggcatgaatctaggaagcaggcgatgaaggactttgggggtctgaagaggtcctattacatggatccacaaccatccaacagctacgaatggcacctctacgaatatgagatcaatgagtgcgatgcttttgccttatatcggcttgagttcaagtctttagatgcaaagaagattgtgaaatccaaattagcctgtaatccactgaatgaaattcagcagcaaatggttagactcagtgcagacagtcctgtagacaacaaacggacggcccggggcaggc

SEQ ID NO: 273332 - DNA, 365 bp, Zea mays
acccacgcgtccggttaaaaaagaacatacacaatcatatcaccaggccagggcacgcacaagcgagctgatctgcagcattatttggctgattttttaatcgttgacggcgggcgaacatatggcggatgactcgttcgacctccccagcgctagcgaggaggaggtgatgggaggcctggatgaggacgaggccatgaaggacctcgagaccgggatggacgatgaggactatttgccaccgacgatgaaggttggggaggagaaggagattcgggaacgaggggctcaagaagaagcttgtcaaggagggcgaggggtgggatcgccccgagcttggagacgaggtggaagtgcattacact

SEQ ID NO: 273333 - DNA, 718 bp, Zea mays
caaaccgtcccttgtccctctcttcctcgaaacgcagctatggggactcggccgcggggggtcgtcctcgcgccatgggcggtggtgctggtgctcgcgcttcgtctggctggcgcgtcgcatgtgatccaccgcagcctggaggccgaggcgccgccgtcggtcccggcctccattgtcagccccctgctcaggacggggtaccatttccagccgccaatgaactggatcaacgaccccaacgctccgctgtactacaaaggatggtatcacctgttctaccagtacaaccccaagggcgcggtatggggcaacatcgtgtgggcgcactcggtgtcgcgcggcctgatcaactgggtggcgctggagcccgccatctaccccagcatcccgtccgacaagtacggctgctggtcgggctcggcgacgatcctggaggacggcacgccggcgatcctgtacacggggatcgaccgggcggacatcaactaccaggtgcaggtgctggcgctccccaaggacgcgtccgacccgctgctccgcgagtgggagaagccggaggagtacaacccggtggcgacgccggcggccggcggcatcaacgcgacgcagttccgcgacccgacgacggcgtggcggcacgcgagggcactggcggatgctggtgggcagcgtgcgcggcgcgcgcgggatggcgctggtgtaccggagccgggac

SEQ ID NO: 273334 - DNA, 521 bp, Zea mays
agctagttctagatcgcgatctagaactaagcccacgcgtccgcccacgcgtccgaacttatgtgaccaataagatcaagctccagctcaaccgaaggtgtagctcgagccatggctaagatcaccacaatggccgcggcggcggcgatcgcgcttgttcttctacccgtcggccgcggcgaggagatgcccaccgcagcgcacccgcacgggctctcctccgagagcccgctcgctctgtcgccggctgcttacgacttcttccaccccagcgcgcgcgcccgacgagctcacggcgtcgcgccggtgccggcgctcgcgcctcgcggacaggagcagctgaggcctgagggagtccgcggtcagaagaacatcggcgagcgtagcgaaggccgacctggacgaagaggccgtggcgcccgtggagacgcaccggcgcctcaaccacaaggtgacatgcgtgttcgtcggcgccgcaacagccgcgctagtggctatcggcgtggcgtacgccgtggtgc

SEQ ID NO: 273335 - DNA, 357 bp, Zea mays
caaaaccatcatttggaagctgggctgtcggtgagggacaatgaaggatttgttgaaaataggttggatgctgctgttcttgatttagttgatgatgaagcttctggtatgcaagcgcagaaaactcgatatcactggatgaaggtggacaattggagctatgtcagctacagttattgatctgtgttcacttttgaaatactaaaataggaaagtaactatacaatgctgctaacttgacaatcattgcatgaaagcatcatatgctagtgctccgtgtttattgctgccctagccatccggatagtccatcgcccgtcgtgggcctcgtggcacatcctagatgttttgccccgc

SEQ ID NO: 273336 - DNA, 508 bp, Zea mays
gagcctggaggggcggtacgacgtggtggtgtgcctggacgtgctcatccactacccgcgggaggaggcgcgcgccatgatccgccacctcgcgtcgctggcggacaagcggctgctcatcagcttcgcgcccaggacgctctacttcgacttcctcaagcgcgtgggcgagctgttcccgggcccgtcaaaggccacgcgcgcctacctgcacgccgaggccgacatcgaggacgcgctccgccaggccggctggcgcgtcgctaaccgcggcttcatctccacgcagttctacttcgccaagctcttcgacgccgtgcccgtcggctcctcgacgtagccgtgtaggccgcccgccgtgtgcttgtgtgtttgtttgcctcacgcgactgtttatagagctccagacggtcgccgcagcgcgcgcggcggcgtagcctgtttgtacttgcaagctcactcagttccattccgtaaaaaaaaaaaaaaaaaaagcccacaaagtccg

SEQ ID NO: 273337 - DNA, 792 bp, Zea mays
cgtacattacgtacaggtggctgatttcgcgtcccttgagctttctcctgtggatggaagaaccatgaccgatttcatgcatacaaggggacttaatatgtcctctttaggtcgtgtggtagagctagcagagaagctccccctctttccagtctatatgcattcatgaaatggttattagatcctttaagcacattcgtccgagctgttattgctgctgttgatgacatgcaaaatatttctgcagctatagctgaaactctaaacatattacttggatctcccagacttgaaaatggtgctgacacagatgcccatattgacaataatttgcgtttgaaatgggtagagagcttcctttcaaaaagattctgctggaaactgaaagatgaatttgcacacttacggaaatttatcattctgagaggtctctgcagtaaggttggactggagctagttgcaagagattatgatatgaatagccctaacccatttgacaaatctgacattgtcagcattggtcctgtatgcaagcatgtggtctactcatctattgatggtcgaaacttactggaatcatcgaagatggcattggataaaggaaaattagatgatgctgtgagctatggaacaaaggcattgtccaaaattatagctgtttgtggtccataccatcgactgacggctaatgcatacagccttcttgctgtggtgctttatcatactggagattttaatcaggcaactgtatatcaacagaaggcacttgatatcaatgaaagggagcttggt

SEQ ID NO: 273338 - DNA, 434 bp, Zea mays
cgtcatgtaactaaaaaacagaaggaccctgcgagagcgagagagggggagaaaggggaaaaaagaataataagaaggtgggaagagcgagggagctgcgtgcataacccagagccagagggaggttgtcttctgcgagaaatgcagcacccagcagtgtcccctgagcgaagcaaatgggcaacttttgtttgaaacaaaacaaaagtaccaggcttttttttgggggaggggcggttagatttcgctcttcttattttttttcttctttcttttgtaattttaacccttcctttcatcttttttttcctggtgtaaagtaagcgtggactttgtcggtttatggacgctagctatctttatgtaggatgatgccttggcatgtactgcttgcagcttcagacttcatatatataactgtatgtatttattat

SEQ ID NO: 273339 - DNA, 935 bp, Zea mays
gtttctttttcattttcccctactgctgatgctatgtctgaaacaaaggttgcacctatcacccagggaaatctacatgggtgaatctgacatcccaagacacaaagcggcatgatcttgcaaatgcatgtgtagcagtcacaggaggcagaggtctaagaagtgctgaaaattctaagttgttggagcagcttgcggagaaatttggtgcagcagcgggcgcgactagggctgctgttgaagcaggttatgttccaaatgaccttcagagttgcaggagaaggctgcagcagcttgaatctcagctaatggaagcgaacagaatcaaagaggaaggcaacactggaagtatccgatggaaggagaacatattagaccaagagaatgaattacagaacataaaacatgagaacgacgacctgcagacaaaggaatcagcggcttctgagaagattaaggaactctcttcccagcttactaatgcaaaagatggcacgataaatagtaacaccaaggatggagataatgagacggggggcactgaagaggatgatgaacctgttgtagtagttgccaaaatatgggagaacagcaagtttgttgactatgattcatctaaggagaaggagaatgatggtgactcacaggttgatttggaatcaaacaagggggatgcaggtcttgatagcaacgggttgcactcaactaaggagaacagtggcagggcatcaccaactaaacaacaccagcagtataagaagaagtctctgctgaagagattcggtggtctgctaaaaaagaaaagcgaaaattagcataaaactgtctgatgatattctttgttctatcatttgacatattttttgtaaaccctctcagagatgctgaaagccaacttactattgagagtactatgaaacctctcgcgcagtgtg

SEQ ID NO: 273340 - DNA, 441 bp, Zea mays
gtccacccgcccgtccggaagcctagagcagccaagaaaagcacatacccgagtcgccgaaacaacaacaatcccaatcccccctcgtcactcaaaactcgaccaacaatgtcgctgattcgccgtggaagcgcattcgaccccttctcccttgacctctgggaccccttccagggctttcccttcggctctggaagcagcagcagcagcagcctgttcccctcgttcggaggcaccaccagctctgagacggccgccttcgccggcgctcgcgtcgactggaaggagacgccggaggcgcacgtgttcaagaccgacgtgccggggctgaagaaggaggaggtgaaggtggagctggaggacggcaacgtgctccagatcagcggcgagcgcatcaaggagcacgaggagaaaacggacacctggcaccgcgtggagcgc

SEQ ID NO: 273341 - DNA, 397 bp, Zea mays
tccacgcgtccgcccacgcgtccgcccaggacgagtcgcagcagccggccagccgcacagagtggtggagcctaggaacagaggaggcgccgagccatctccgcagcctgcgaccggggaacgggcgggaacggacttctaacttagagagagcgcgggcgagagaggtcaaccgcagccggaggcgatggaggtggtggcgctggtgagcggcggcaaggacagctgcttcgccatgatgcgatgcatggactacggccacaaggttgtcgcttgggctaatcttatccccctcgacgacaccgtcgatgagctcgacagctacatgtaccaaactgtggggcaccagattgtcggtgagctacgcgaaatgcatgggcttgcctcttttccggag

SEQ ID NO: 273342 - DNA, 725 bp, Zea mays
cttagatagttcaacggaaaatggaaaagaaagggtccggctgaaacttgaaacaccggtgggcattgcagatcgattgttaacttcgtgtcaaaggctggtgaaactagaatatgaaaaggctgttgaagacttagcatccatcaaggatcttgtttatggtgcaaacaattatgccatcaaacttaagtctgatagcagttcctggcagaaccagatttcgtctctcattgagagagcaaaaggtcgagcagttacactcatggaatctacacttcagctgtcaaatattgaccttatttttgcatacacgatcaaaggaaaaacaggcagttccatgagagccacatcatttgttcagaatgatattctgagtccaacccttgatgatgctgtgaatttactaggtgactactcgacatggttgagttctagcaatacccgcgaagcaaatgtatatttggagtgtttctgtgaaagatgggatgcactggttgctccggaagaaagggctctgttagatccaaatgggcttgttaatgaaggggagaaactcaccataaaggcactggaaggcttcaatgccagtgctgccgccaaagattttgaagaggaaattcgagaattggcttttggaacatttggagggctaggtattgctggactgtcagcttctctgttgacatctgttttgtcaagtacccttgaagatcttcttgcccttg

SEQ ID NO: 273343 - DNA, 577 bp, Zea mays
agctactccgatccgtccggttcccagcacctgagcagctacgtatacctactagctacaacgggcctgccgcagatgcatgccagctaggcactagctcggcctccgggcggtcggccggcccacaatattgtccttgtccatctccgattctccataaatcctcgctcgcctgccaccagaaacgaccttctgcacgtacgcacggtggctgcaggccggccatgagacgacctcacgccgccgctaccgctctcgctgccctcctcctcgtcctgtgcctcgccgccgcgttgacccgccacggcagcggaatctgccagcaggcggggaggacgccgacgaggaagatgctgctggccatgacaagcttcgacgacgacgacgctgccgcctcgccctcggcatccggtcatcaccgccatcctcaccagcaccaccagcaccaccaccaccaccaccaccacgcgggcaggcggcgatggaaccggcggcaggggaccattccaccaccgtcagatgctggcgaggccgaggcggtcgacccgcgctacggtctgcacaagcggcctggttc

SEQ ID NO: 273344 - DNA, 964 bp, Zea mays
cgacctcgtccgcgacgccctggccacccctggccccttctccaacaagcttgctgagattgtcaatcatggaaaactggtgtctgatgagatcatcataaatctgctgtcaagacgtctggtagagggagaggaaaagggtgaattggggttcatccttgatggctttcctcgaaccataggacaagcggagatacttgaaggagtcacagacattgatttggtgatcaatctcaaactccgagaagaagctctgcttgcgaaatgccttggcaggaggatgtgcagccagtgtggagggaacttcaatgtggcctccattgatattgagggtgaagacggcgggcctcgaatgtacatgcccccactgttgcctcctccacagtgtgaatcgaagctgatcgctagagcagacgatactgaagaagtggtaaaagagcggctgcgtgtgtaccatgatttgactgaaccagtggaggagttctacagagcacgtggaaaactgctggagttcaatctgcctggtgggatacccgaatcatggccgaagttactgcaggccctgaacatagaagaccccgacaataagcgatctgcagcagcatgattcttgttttgttataggaatgcacattctaaattgaacatctgtagactatgtcaaagctagtcaaattggtgggcattccttacatctttgggaagcctactccattctggatccagattattgtggcatggcactcaactgtacagtagattgatcatcgattggcaaggtcgatcgatggatgtgctgactgtgatcctcgaacgtaaggtgtgtaaaaaggcaagaaaataattgttgggcgtcgagacattcacttgtaggtcgtaccatgcatatgcttgttgaaagaggggagcatgccagaaacgtctgatctttatcatgatcttttattgggaaggctcgctggct

SEQ ID NO: 273345 - DNA, 346 bp, Zea mays
aggcatgttgtctgttctaatgcctgttctctgcgaactatctttgtctgtttcggtggaggctgccggcgtgaagcactggccaccgggtgctgcacgtcaacggccaacagggggcaccgtgcaggtgggcagaagcagccagcgacaacagtagggcacagggatgtatatggaccttccacatacactagacttttgcaagcaaccaaagatactctcagataagaagttcaatgaatcaaaaggaaaactggtgtctgatgagatcatcataaatctgctgtcaagacgcctggaagagggagaagaaaagggtgaattggggttcatccttgatggcttt

SEQ ID NO: 273346 - DNA, 464 bp, Zea mays
gttagattcatggcaagggagatacagatattaagaagacttgatcatccaaatgtcatgaaactggaaggtttgattacttcccgactatcatgcagcctttatctagtatttgaatacatggagcacgatcttgctggactttgctcctccccggacatcagattcactgaagcacagctcaagtgctacatgaaccagttactgtcaggactggagcattgtcattcacgccgtgtggttcatcgtgatatgaagggcgctaatctcctcgtgaataacgaaggggttctaaagatagctgattttggacttgcaaatttctttgatcccaacaaaaaccatcctctgaccagccgtgttgttactctgtggtaccgaccacctgaactgctactaggttcaactcactatgacgcagctgtcgatttgtggagtcttgggtgtgtatttgccgagatgta

SEQ ID NO: 273347 - DNA, 837 bp, Zea mays
ggaaccggccgagaatcccggggccaaccaagcctccgaggaaccgcaagcagctcggcaggcaggcctccaccgctccaccacctccactcggtctacgtgctccgtcaccaaacccacccgggccaacgccgaagcaaccccccctccgtcctccccagatccggcgccgcctccgccctcacttacactagcacgcacggcggacacgtcgcctcccccgcgcgatctgatgcaggcgcacgcggtggccagcggcgatgcggtggaagcttaactcctccgtctacaagcgcgtgccgtccagggaaaccgccatggaacccgacgtcgagacgccaatgagaatgacggacggcggcggcagcggcgcggggccgtcgtggcgcatgtcgttgccgcatgtctgtgtcgccacgctcacctcgttcctctttggataccactccggggtggtgaacgagcccttggaggtcatctccgctgaccttggcttcgccggcaacactcttgctgaagggctcgtggtgagtatctgtttgggaggagcttttgttgggtgcctcttcagcggctccatcgcagatggtattgggcgacgccgtgcgttccagctcagtgcgctgcctatgattattggtgctgccataagtgctctctccaatagtttggagggtatgctccttggaagatttttggtaggaacagggatgggattgggtccaccagtagcttcactttatataacggaggtttctccttctacagtgaggggtacatatggtagctttgttcagattgcagcctgccttggaattatagtatcactactcattg

SEQ ID NO: 273348 - DNA, 707 bp, Zea mays
  unsure (1)..(707): unsure at all n locations
gggcccgcccaggcttcggcagcatccctcaaaaccgacccggattctccaaccccgattttccccagcagaagcaaacccgagcaaattgagcgcttgaagcttcacccggcgaaccagaatcgaatcggagccgcacgccacgccgcgatggggatcctcctccggtccctcctcgtcgcctcgctcgtcctcagttcgctcgtcttgcacgtcgcagcggctaaaactatagatccttacaaggttctaggagttgacaagaatgctagccaacgggatattcagaaagcctttcacaaactttctctaaaataccaccctgacaagaataaaggaaagggcgcacaggaaaaatttgaagaaataaacaatgcatatgagatcctatctgatgaagagaagaggaaaaactatgacctctacggggatgagaagggtaaccctgaatttggtggtggaaattttggaaatcatgggggttctacatacttcactggtggtggccctaagtccagtcaattcacatctggtaatggatggcagacgatgggtggtcaaggaaatacaaaaacgttttcattttcatttggtggtaaacctggggccagtggtggaaacccgtttggtggtggttttgatcttggngatgttttctcgaacctttttggtggtggaccaatgggtgatagccatattggtggatc

SEQ ID NO: 273349 - DNA, 443 bp, Zea mays
agtgaggacacaaggactgcgaccaagcttagtgacgacgacgcgacaatcaagtccgtagctccggcggtagactctgatatggctttagctcgtctgtgcctcaacagggccatcgctggccgcgcgcaggccctggcgaggccggcgctcgccgcagccccggcgacagatcccaaacttcactcgcttctctcaacctcggcagccgactctgccgcctcaggcgaggcaaaccgccgagatgtcgccgtgtcggagcgctccgcccccaatcgccgctgggcatggcgagacctccgcgacttcaccccgttcagcctcgtggacggtctcgggagcgcgctgtcgcaggtggcggagaccctgggccgcccgctggagcgcctggcgccgtcgcggctgctgtcccggaaggtgcccgaggacaaggcccggtcccg

SEQ ID NO: 273350 - DNA, 412 bp, Zea mays
cagaggaacaccgtggcggtgcctgtcaacggttgggcggtcatccagttcgtcgccgacaaccctggtgtgtggctcatgcattgccatctggacgtgcacatcacctggggcctggcaatggctttcctagtggaggacggctatggcgaactgcagtcgctggagccgcccccagttgatcttcccatgtgctagtggaggacggatatttgtgttgaggaagaaagcctggtcacgttgtatgttaattgttactcttttttggtggaggggggcgtgttcgtgatcttaaattcttaggggacttaattttccagcttgttggtttgaagtttcttctgtaaatctatgtaattttcaatgacattcagcatattatttgagaataaattatttctttgtccaaccc

SEQ ID NO: 273351 - DNA, 527 bp, Zea mays
acagatccaaccattgggggtctttcatcatgctgaaccagaacatcagaaatttgaactgaagcgtaaaccgttcctcttgcaattgattgggaatttgccggaggaggagctcctgacatcaacactagctgcaaaactgaatgcatatgccgctgagctctgccctgtgaatacccaaaagagaattaactccaagattgatgaggtcacaaagaaaggatggcccattttaagggacatttaactctttctagcttttggactgaaaccgatcgatgcaatgtagacacagaagaggtgcatgattttgcatagaagatttttaggaatatttcagctgttcgccactgccatgatgacctcaatcatccattcttcattttgctcacaaagattatatagttggtcataacatgtcgttgtgttactatatttgtaacgcatattcatggttcgaagcttactcaacagacaactttttttcgtattgtttgtttttcatttatgagaatatagatgttttg

SEQ ID NO: 273352 - DNA, 507 bp, Zea mays
gtttttatgtgttgctttgctagtatattttttctttgttccttttgtattttttttttgcaagaagcatggatttactgaaatggggataattacacaaagtgaacttcatgtcaccatcacacatacgctttccatttcagcggaggcgatctagcacgatgcgcattgcctagtacagtacaaccagggagggtttcttctgaccgaaggaggggaagaccattccagcgagaatcgatggatatctcagccaaaaaaggttaaaagacgagggggggaggaggaagtgaaacgaaatgggaaattctgccgttggcgtacgtgaagatgaagggaggaacaaataagctccctttctcgtgtcgcataataacagagagagtgtgttttcctttttcccttttgccgtttctctcttctcttctcctctcttcactgctgctgggtcggcgtttcttggggcgccgtcactgcgccgcgacggtgcgggagcggacgcgtggg

SEQ ID NO: 273353 - DNA, 1647 bp, Zea mays
cacgcgtctacacacatgcatttttggcacaccagaacagaagaagaagaaaaaacaggcactgagctgagatggcgaagcacttggctgccatgtgcaggtgcagcctcctagttctggtactgctctgcttgggctcccagctggcccaatcccaggtcctcttccaggggttcaactgggagtcgtggaagaagcaaggtgggtggtacaactacctcctggggcgggtggacgacatcgccgcgacgggggccacgcacgtctggctcccgccgccgtcgcactcggtggcgccgcaggggtacatgcccggccggctctacgacctggacgcgtccaagtacggcacccacgcggagctcaagtcgctcaccgcggcgttccacggcaagggcgtgcaggtcgtcgccgacatcgtcatcaaccaccgctgcgccgactacaaggacggccgcggcatctactgcatcttcgagggcggcacgcccgacagccgcctcgactggggcccccacatgatctgcagcgacgacacgctgtactccgacgggcgcgggcaccgcgacacgggggccgacttcgccgccgcgcccgacatcgaccacctcaacccgcgcgtgcagcaggagctctcggactggctcaactggctcaagtccgacctcggcttcgacggctggcgcctcgacttcgccaagggctactccgccgccgtcgccaaggtgtacgtcgacagcaccgcccccaccttcgtcgtcgccgagatatggagctccctccactacgacggcaacggcgagccgtccagcaaccaggacgccgacaggcaggagctggtcaactgggcgcaggcggtgggcggccccgccgcggcgttcgacttcaccaccaagggcgtgctgcaggcggccgtccagggcgagctgtggcgcatgaaggacggcaacggcaaggcgcccgggatgatcggctggctgccggagaaggccgtcacgttcgtcgacaaccacgacaccggctccacgcagaactcgtggccattcccctccgacaaggtcatgcagggctacgcctatatcctcacgcacccaggaacaccatgcatcttctacgaccacgttttcgactggaacctgaagcaggagatcagcgcgctgtctgcagtgaggtcaaggaacgggatccatccggggagcgagctgaacatcctcgccgccgacggggatctctacgtcgccaagattgacgacaaggtcatcgtgaagatcgggtcacggtacgacgtcgggaacctgatcccctcagacttccacgccgttgcccatggcaacaactactgcgtttgggagaagcacggtctgagagttccagcggggcggcaccactagactagacccatattccgcccaacccctacagataattctcttttcaggtccattttgaacctggaaaagaaatttaagagaggctaaataaccggaatacgattgtgtactgagcttctttcagctaattattgaaagaagattataatgtttggatgtactattaattatgttggcatggggatttttgtaacctcttaaaacgaggaaataaagattgttcttattaacaaaaaaaaaaaaaaaagggcggccg

SEQ ID NO: 273354 - DNA, 652 bp, Zea mays
gcatgcacgctcacgaattcaactcgagggtcgctaagtcgcctatgcgctcaccggccgatgacaagctccggcggcggcggccggccggccggttattaatgcactgtgcgaaagcaacgcctcgaggccaagcacatccgggcgtgcgatgctcgtctcatacattacccggcccgtctgcaccggccagtttcatccagccatcgattctcctccagttcataggcacagcagcagaaagcgccaggagcttaagaacatggcgaacaggggcttgcatctggctctgttcctcgtccttctcgggctgtcgtccaatttggcagccgggcagatcctgttccagggcttcaactgggagtcgtggaagcagaacgggggatggtacaacttcctgatgggcaaggtggacgacatcgccgaggccggcatcacgcacgtctggctccctccggcgtcacactctctcgccgagcaaggctacctgccggggcgcctgtacgaccttgacgcgtccaagtacggcaacgaggcgcagctcaagtccctgatcgaggcgttccacagcaagggcgtgaaggtcatcgccgacatcgtcatcaaccaccgcacggcggagcaccaggacgggcgcggcatctactgcatc

SEQ ID NO: 273355 - DNA, 1128 bp, Zea mays
ggcatctactgcatcttcgagggcggtacgcccgacggccgcctggactggggcccccagatgatctgccgcgacgacaccatatactcggacggcacggccaacctcgacaccggcgccgacttcgccgcggcgcccgacatcgaccacctcaacgaccgcgtccagcgggagctcaccgactggctgctctggctcaagtcgtccgacctgggcttcgacgcctggcgcctcgacttcgccaagggctactcccccgaggtcgccaaggtctacgtcgacgccacggccccgaccttcgccgtcgccgaggtatggaacagcatggcgtacgacggggacaacaagcccgagtacgaccaggacccgcaccggcaggcgctggtggactgggtcgacagggtgggcggggcggcgtcgcggccaccgtcttcgacttcaccaccaagggcatcctcaacgccgccgtcgaaggcgagctgtggcggctcatcgacccgcaggggaaggcgccgggagtcatcggctggtggcctgccaaggccgtcacctttgtcgacaaccacgacaccggctccacgcaggccatgtggccgttcccctccgacaaggtcatgcagggctacgcctacatcctcacgcaccccggcaacccgtgcattttctacgaccacttcttcgactgggggtttaaggacgaaatcgccgccctggtgtccatcagggaccgccacgggatccaggcggacagtgagctgcgcatcatcgaggccgacgccgacctctacctcgctgagatcgacggcaaggtcatcgtgaagattggatcaagatacgactgcgggcacctcatcccagaaggcttccaggtcgtggcgcacggagatggctatgccgtctgggagaaaaactgagccaaatctgtgcctgatccgtccgtccggtccggcacgacgagttttagcggatttgacctgcattttccttagcttattattactccaaatacgggatatatatagcgacaacctgtattcgagattcatccgtaaacaggttaggttaggatgaggggtatagtatccagtatacaactatctgtctttcaggaataataagaatcactgg

SEQ ID NO: 273356 - DNA, 385 bp, Zea mays
gacagggcgtactccgacggcacggggaaccccgacaccggcgccgacttcggcggcgcgccggacatcgaccacctgaacccgcgcgtccagcaggagctcaccggctggctcaactggctcaagacggacgtcggcttcgacgcgtggcgcctcgacttcgccaagggctactccgccgacgtcgccaaggtctacatcgacggcacccagccctgcttcgccgtcgccgagatatggacctcgctggcctacggcggcgacggcaagcccttctacgaccagaacgcgcaccggcaggagctggtgagctggctggaccgcgtcggcggcaaggccagcccggccaccacgttcgacttcaccaccaagggcatcctcaacg

SEQ ID NO: 273357 - DNA, 410 bp, Zea mays
  unsure (1)..(410): unsure at all n locations
ctcacttgcatttttggcacaccagaacacgatgaacgaagcatcagcaggcactgagctgagacggcgatgcacttggctgccatgtccaggtgcagcctcctagtgcttgtaccgctctgcgtgggctcccagctggcccaatcccaggtcctcttccaggtacctgcgcagcgtcctcgtctcttcccggccgatcgctcaacacatactcatcaatcacgcgtgctacaaagcacaagtctggatttagttttgatgctgatacatatatgctgcgtgtctgcgtgcacggtttcaactgggagtcgtggaagaagcagcgtgggtggtacaactacctcctgnggcgggtggacgacatcgccgcgacgggggccacgcacgtctggctcccgccgccgtcgcac

SEQ ID NO: 273358 - DNA, 557 bp, Zea mays
gcctacatcctcacgcaccccggcaacccgtgcattttctacgaccacttcttcgactgggggttcaaggacgaaatcgccgccctggtggcggtgcgcaacgcaatggcatcacgccgacgagcgagctcaccatcctcgagcacgacggtgactcctacgtggcggagattgacggcaaggtcattgtaaagatcgggtccaggtacgacgtcggccatctcatcccggcgggttttgaggtcgccgcccacggcaacgactacgccgtctgggagaaagccggcgccgaacaagtgactcgagcataatagagtgctcgagataccgatttgattctcagtacaatgtacacgggactgcattgataaaataagtggtttctcctctaataagtaagggagcgtaaaagggcaattggagccatgcatatgtaaccttaaaatattgctgagtaaaatataaaggtgatccctaaattctccttttcaaaaaaaaaaaaaaaaaaaaaaaaaaaaaaaaaaaaaaagaaaaaaaaaacaaaacaaaaaaaaata

SEQ ID NO: 273359 - DNA, 376 bp, Zea mays
tacctgcagtacggtccgaattccgggtcaccacgcgtcgggacgtggtctcattctcagtgtagagaggggaagaggaacaggagcaggaacagagagagagagagagcaatggggaacaggcacctctgctgcctgtgcttgctccttctcctgggactggcgtccggccaggtcctgttccaggcgttcaactgggagtcgtggaagcagagcggcggatggtataacctcctgatggggaaggtcgacgacatcgcctccgccggcgtcacgcacgtctggctcccgccgccgtcgcactccgtctccacccaaggttacatgcctggccgtctgtacgacctggacgcgtccaagtacgggacggcagcgg

SEQ ID NO: 273360 - DNA, 456 bp, Zea mays
ccacgcatccgcacacgcgtccgggctcatccttgcttaattaccaaggtacctttgcagctgcaggtaggtaggtagctagccgccatagcaagctaggccgaagcagaggagtgatggccaaggtccaccccaacgccgcggagtccgtcgtcgccccagcagtagcaccagtaggctccgcccaggcagaggccgagggagagctgcccacggtgctgacggtgtggcgcaagtcgctgctcttcaactgcgacggcttcaccgtctacgacgcccgcggcgacctggccttccgcgtggactgctacgccggctcgttccgccgccggcgccgcgccgacgtcgtgctcatggacgccacggggaagccgctgctcaccgtgcgccgcaagacgcggctcggcttagcggagcgctgggtcatctacgacggcgacgccgacgccgacgacg

SEQ ID NO: 273361 - DNA, 446 bp, Zea mays
acgcccgggccgatgcacgactcaatcgagactcataggctcatccttgcttaattaccaaggtacctttgcaggtaggtaggtagctagccgccatagcaagctaggccgaagcagaggagtgatggccaaggtccaccccaacgccgcggagtccgtccaggcagaggccgagggagagctgcccacggtgctgacggtgtggcgcaagtcgctgctcttcaactgcgacggcttcaccgtctacgacgcccgcggcgacctggccttccgcgtggactgctacgccggctcgttccgccgccggcgccgcgccgacgtcgtgctcatggacgccacggggaagccgctgctcaccgtgcgccgcaagacgcggttcggcttagcggagcgctgggtcatctacgacggcgacgccgacgacggcacgacggccgggggccacc

SEQ ID NO: 273362 - DNA, 413 bp, Zea mays
acgcaacgtccccgctcctttgccggcgtcgcgcccaggcgcgggccctcccagcaagtcgcctccctccgcctacccgcgtcgccgtgcagccccccgccgcgccggtcgcgacgcgcatcggctcctttgacaaggtgctggaggcgctgatcggcgggaccgacttctccgaggaggatgcggaggcgacgctgaagctgctgctggacgagaaggacgaggcgcgcatctccgccttcctcgtcctcctcagggccaagggcgagaccttcgaagagatcgtggggcttgcgaaggcgatgttgagctgctgcatccgagtcgatggtctggatgacgccgtcgacattgtcgggacaggcggcgacggcgcagacaccgtcaacatctccagcgggtccacatcctcg

SEQ ID NO: 273363 - DNA, 810 bp, Zea mays
ggtcgaggccgcgtccaggacgagcatcgagagcgagccgccattgcctagaggactcggcgagagctccattcgattcgagactcgagagcatagccgtgcactgggaagaggaggtctaggagcagatgagcgggctggagctggagctgggcctgagcctaggcgtcctcatcgacgtcgtcgacgagcagtggatgcgcgacaccctccccgccgatgacatccccgtgccgccggccatggcagtcaaaactgaggacgccgaggatccagcgcccgccaatcaggaaagccaaccagcacaaggggatgtatggcgtgattttgccttggaaaatctctgattctttatgctctacattctacaagtgcctctagagatggagattctatgctaagggtttaggagctgcatggtggatggtacattgtgctttctgcgccgtgcttcctgaaagtctatctgaagttagttcaaaatatggtttatgcaagtgttccagatatttcccacgatggattcgaggcttgtgctgaacttgtgctagcctagcctgttataagatctatggtaacgatgactgcaatttatctatgcaagtgatccagactgttggcacatgctggcacgccttgtgataacctactgctgaatgtcccccataaccttttgaggctcgtgcttgaccgcaagtgtttctcgacctagcgtgaagagaatgtttcggtacttgaattctagcctgtggctgctaaacttgttctactcctgtcttgtcctgcgcaatcacatgcttaattggtact

SEQ ID NO: 273364 - DNA, 441 bp, Zea mays
cccacgcgtccgatcagcagtttatattgtgttttgtacgtattaaaaatgcaagaatcatgagcaaaacgagcaaaatttgaatccatcagctgtttatattgtaataaagtatgacaagctctctgaaaaaaaaatcagttgcgtaatctgtccaatgttgcatttgagctattgcgctagttaatccttttattttcggtatgacttgcagtgcctctagagatggagattctatgctaagggtttaggagctgcattggtggatggtacattgtgctttctgcgccgtgcttcctgaaagtctatctgaaggtagtttaaaggatggtttatgcaagtgttcccgatatttcccacgatggattcgagccttgtgctgaacttgtgctagcctagcctgttataagatctatggtaacgatgactgcaatttatcta

SEQ ID NO: 273365 - DNA, 627 bp, Zea mays
gtcgacacacgcctctagactgagtcgtattaggtcgccgcgcggaggcaggcttccgcgcggagggaggtagccatgcgccgggcgcgggaggcccggcgggactacgagctcatccccaccgctcgcggcgagacgctcttgacgcagtgctggtggccgcgcccgtcctccaccgttaaaccaagggcgctagttgttgtcatgcacgggctacacgagcacagtgggaggtacgatcatttagcgaggcggttgaatgatatcggcatcaaggtgtacgggatggactggactggtcatggtggaagtgatggtctacatggatatgtgcaatctcttgaccacgctgtcaatgacttgaaaatgtacctcaagaaagtatcagccgagaaccctggtcttccatgcttctgcttcggccattcgacgggtgggggtatcattctgaaggctgcacttgatccagacgtagaaacgctcatcagcggtgttgtcctgacatcaccagctgtccgtgttcagcctgcccacccaatcatagcggccatggcaccgatttttgccctcatcgcgccgaggtatcagttcactgcgtcccacaggaacggcccgccggtgtcgcgc

SEQ ID NO: 273366 - DNA, 764 bp, Zea mays
agctgattgttggtggatcaacttttggaaatgtagctattgcagatcaaacctcagggcagaagttaggtgttctaaaatcagatcatggaccattggcaataagatccttatcttcctgcacaaattcacacatgatatttgctggttcgtcagctggttatgcacattgctgggacttaaggactttgaggcctctctgggaaaaaagagtcagcccaaatgtcatctacagcacacgtcatttgcccggtgacacggcaacgctggcagttggaggcattgacggcgtgctccgcgttatatgccaaaggactggtgacatcattcgcagtcttgtcgttgacgcagatctcccagcagaagccacatctagatcccggcagcaaatagagaagaaacgtgttcgaaggattgaccctgatgcacagttggacggtatcccgaggcgtttgcgccctcagattaccagcctatcggttgggatgaagaagattgtgaccacgcatggtgaaaactacattagggtttggaagtttcgcatgaaaagttcgtaaaaagggcgagatgatggtaatctagttatctggtgtaacctgtactgtagtctactgaataagatggcgtggtaccgtggtgtgtcacctgcgcttgtaataatagcctgaaacatagttcatttgtacacttgtagtcctctttaggatactattagcaattaaaaaaatgtttgtgctaaaaaaaaaaaaaaaaaaataaaatct

SEQ ID NO: 273367 - DNA, 897 bp, Zea mays
gccaataccaagcagccaggaaagcaagcgagaagtcgtcgcgctactcttcgctgcctatatactccgcctccgactccggtggttggttggttggtccctctaccatcgccagatcgcctgccttccctgctctccccgtcggctcaccgcgcgccccagatctccccgtccaaaggggacccaagcatcgcatcggatccgtcctgcgctttgccgccggcaactgcagaagcgaccagccatggcggcagccttcgatgcttacaccgacaagaacgccgtcttccgccgtctcaaggccaagcccgagaacaagatgtgcttcgactgcaacgccaagaaccccacctgggcctccgtcacctacggcatcttcctctgcctcgactgctccgccgcccaccgcagcctcggggtccacatcaccttcgtcaggtcaacgaacctcgactcatggactccagaccagctgaagatgatggcattcggaggcaacaaccgggcacatgctttcttcaagcagcatggatggaccgatggcgggaaggtcgaggcaaaatacacatcaagagccgctgaactttacaggcagatgcttaccaaggaggtcgctaagagcgccacgaccgataatgccctgccatcgtcacctgtcgcatctgaggcttccaagccgccatccgatgacttccctgaattcaaactcccagatgtgccagcaccaccggcagaggatctgaatgggaagcatgagcccaagtcccccaaagctgctcctcgttcaccaaaggccgctactcatcccacctttgccgcttctgtgaagaagcccatttgcgcaaagaaggttggaggcaagacttgagggcttggtgttcgaaagcttactacaaa

SEQ ID NO: 273368 - DNA, 451 bp, Zea mays
tccacgcgtccgcccacgcgtccgcggatacagtccaacaagaggaggggagaactcgtcgcgccgcctccgcctccgcctccggtggttagttcctctctcctcgtcagctcaccgcccgccccacagaactctgccccgtgctttgccaccggtgactgcagaagcagctagccatggcggcggcggcggcggcggcggccttcgatgcctacaccgacaagaacgccatcttccgccgcctcaaggccaagcccgagaacaagatgtgcttcgactgcaacgccaagaaccccacctgggcctccgtcacctacggcatcttcctctgcctcgactgctcggccgtccaccgcagccttggggtccacatcaccttcgtcaggtcaacgaacctcgactcatggactccagatcagctgaaaatgatggcgttcggaggcaacaaccg

SEQ ID NO: 273369 - DNA, 628 bp, Zea mays
atgctttttaaggcggtggaaggggcgggacctgggcccggtgccatcgggatggttgggaagctcggtcctaggatttgcaagttgctcggtgggcagggcgtgcaagccaaggcgggattactaggcatcatgggaagtttggcgcaggtgggagcaatcagttcccagaatatgcagcagactctgcaaagtatccgcgactgccttgagaacagcgattgggctactagaaaagcagctgctgatacattatctgtctttgctacccattctggtcacttgataggtgacggaacagctccaaccattgctgctctcgaagcttgccgttttgataaggtaaggcctgtcagagatagcatgattgatgcagtacagttgtggaaaaagctgactggagaagatgcaactgacggtagaaataaggatctaggtgatggtgaagggaaactggactcaagacggtcaatgcaaagtggtggaaaatcagaatgctttgatgattgctctccagattcacctagtaacatgaagggaagtagcatagctgaaaaggcagcagttcttttgaagaaaagaccagcattaactgacagggaactgaaccctgagttcttcaaaaagc

SEQ ID NO: 273370 - DNA, 815 bp, Zea mays
cggacgcgtggcgtgacgcgtgggttcggttctccgtagcgactgcgctgcaatcaggtcgtcgtagtacgtaggtgttagccacatacgcatcaggaagctaacgagaagatcagatcggaggtaacggcaatggcaatggccaaggccagcatcctcgccaccttcgcggccgtggcagctctggcggcggtgcagctcgccgcggcggcggaccaccccgtgggaggcgacggctcctgggacgccagcggcaccaccggctacgacgcctggtccgccaagcagacgttcaagcagggcgacaccttgtgtaagttggctctctcttctgtcttcttctccagcgcaacaaacatgctgtcagtcacaactcacaacaaacaagcagtagagagaactgacgacgccgctgccgcttctcttgtgatgcacgctggatctctgccgccgcagcgttcaagttcgcgccgtcgcacgacgtgacggaggtgagcaaggccggctacgacgcctgctccggcagcaaccccgtgaagtcctacaccggcggcacgcctccgtgaagctgtcggccccagggaagcgctacttcatctgcagcgtgcccggccactgcgccgcgggtatgaagctggaggtcaccgtcgccgccgccgcggtcaccgccgcgccggcccccgccaagacgaccaagccccggcaccagaggagcgtctccccgaccccggcccctgccgcggctccggctgcgccgtccaccgacgagatgcccaccgtgtcctcgcccaccgcagcgccggcgcccaagtcct

SEQ ID NO: 273371 - DNA, 415 bp, Zea mays
  unsure (1)..(415): unsure at all n locations
acccacgcgtccacccacgcgtccgcggatgcgtgggccgcgaccacccggcctgcgtcgcgcagccagacctcgccgccgccgccgccgcgtcctgccgcctcgcgctcgccctcaagggcctcccgcccgtcttccacgaactggagtgggacctcgtcatggtcgacgcgcccacggggtggacgccgcaggcgcccggacggatggccgccatctacaccgccggcatggcggcgcgcgcgcgcaggcccggggacggacccaccgacgtcttcgtgcacgacgtcgaccgacccgtcgaggacaacttctccaaggcgttcctgtgcgagggatacctcgccgagcaagtcggccggatcaggcacttcgtcatcccgtcncaccgctagaatgaccgcacaccattctg

SEQ ID NO: 273372 - DNA, 558 bp, Zea mays
gattatttcaatgcgtcagatgcaaacgctgatggtttccttgataaaaccgagttcaatgatttccttaatccaagtgattcggataatcccaaaatcatcaatttgctctgcaaacaagaaataaggcagagggataaagatggtgatggaaagttaaactttgaagaatactttactgggctacatgaccatatacatggttatgatgacgagaatgcagatatttcccaaattgggaacataacagttgcgaaggatcggtttttcaaacttgacaaagataatgatgggtttatttcggagcatgaactagagcctgttcttgataagctctatctttctgaacgctattattctagacagcaagccatccatgctatttcagaggcagacaaagatcatgatgggaggctgactctggaagagatggctgagaacccttatgcattttatggcagtgtttatctcagcagcgacgacgacgacgaggactactttcacgacgaatttcgctgagaccaatattgttactatcctgacacacgcaaggaacac

SEQ ID NO: 273373 - DNA, 528 bp, Zea mays
cccacgaaacctcagacactctacatatatcctctgcgcgtgtatctcgtcgtacagagccgaaagctggagcttccaatggcgggagacaacgacctgaaggtgctcggcgtgtggacgagcccgttcgtgatccgggtccgcatcgtgctcaacctgaagggcctggcgtacgagtacgtggaggaggacctcagcaacaagagcgcgctcctcctggggtccaacccggtgcacaagagcgtgccggtgcttctccacgccgggcgcgccataaacgagtcccaggtcatcctgcagtacatcgacgaggtgtgggcggggacggggccggacgtgctgccggccgacccctacgagcgcgcggtggcgcggttctggggcgcgtacatcgacgacaaggtggagtcggcgtggctggggatgctgttcaggtgcgcgaacgatgaggagagggcggcggctgtggcgcgcgcccgcgaggcgctcgacgcgctggaaggcgcgttccgggactgctccagcggg

SEQ ID NO: 273374 - DNA, 511 bp, Zea mays
aggaagcccgcagtaaatttgatgtggaaacagagccgcctaatgcagttgagattgaaccagcgaacggttttctaaactcggaagggctggcatcactgaagttcagaaggatatcatcatccttgtcaatgggaaggataaactgcaaggtttactactgtaaagaagatgaagtttgtctctaccaatcgattgcttttgatgtcaaattccgtgaagaggcggaaccgaacccagcacaaattacgctatcctatactgtttcgccaagagataattcaggtagcacacaactactggctgctagaaagaatgccaaggtgtagtcagactcacggtgatttttttacttgcatcattgtattgattgtcaatttggccccaggcccacaatggcaagtgtttcaagattgacttctcctgtatgttgtatagcgacatgttgcctgtataccagcttcattgtctcccctcagcacaacagtattaatggagtaatttattgtca

SEQ ID NO: 273375 - DNA, 843 bp, Zea mays
gacgtacttttaaaaacacacccgaccatttctccacaagcccaaacacacacgaacacaggagcctatccactatccaccgacctagctcatcgcgaccaaagaaaaggacacagcaactcagcaagacccccatcttccatagctctagctactagctactagtttcaggcctgcggctcgtgaacacctcatctttttagccacttttgccaccagcgacgacgaccgatcgatcagctagcagctaggccatctcgcgtcacgaggaacccacggccggcgtcgccattgttgtcgctgtaacttgcaagctttccctagcatcggcccttttccccttccttttccctcgctcgtcctcgtgctctcgctgtgtataaaagcgcgtcgctagcgcgctcatggagcagcagcagcatcaggaggtgaggaggaacaggaaaggcgtgctgcaggtgcaggacggctctgagatccgggctctcgtggagaacaaggcggagttcgctaggttcgtcgacgacaggttccggaagctcgacgccgatggcgacgggaggctgtcggtgaaagagctccagccggccgtcgctgacatcggtgccgccatcgggctgccggccagagggtcgtcgccgcaggcggaccacatctacgcggaggtcctaaacgagttcactcgcgggaagcaagagtcggtgggcaaggccgagttccagcgcgtgctgtccgacatcctcctcgggatggcggccgggctgaagagggacccgatcgtcatcctcaggataaacggggaggacctgagcgagttcgtggagagcccgaggtacgagcctg

SEQ ID NO: 273376 - DNA, 460 bp, Zea mays
cccacgcgttcgcccacgcgtccggcttgtctttcctttctccctccccttcgagccaccaacccgggatgcagcccactacgcgggaaatgcaggccatggccgccgccggccagcacatctccctcgacgacctccgcgcggcagcaggcggcgtgcacgacgacttcctgcaccagatgcgcggaggcctgccgccgtcggcatggccggagctgtcgtccgcggcgggagggaaggcgccggatggcggcgcgcaggcggagcacatgcagcaccagccgcagcacttgggtgggggtgcggtgcctgtaccacgactccgccttgctggcctcgcggctccggcagcaccaaatcagctggccgccgctggcgggggaggccgtgaagcagaatggtgctgcagccgcgggccgatctgaggcacgaacaccatgtgttgcttcagggcaagggg

SEQ ID NO: 273377 - DNA, 1721 bp, Zea mays
ccttctcgtccgcccacgcgtccgcggacgcgtcggctccgctcctctcctctcctctcctctcgccggcgcatcgcccgactgtcagtcagcctcagccatggccgcggaggaggagcagggcttccgcccgctggacgaggcgtccctgctcgcctacatcaaggccacgccggcgctcgcctcccgcctcggcggcggtggcagtctagactccatcgagatcaaggaggtcggcgacggcaacctcaacttcgtctacatcgtgcagtccgaggccggcgccatcgtcgtcaagcaggcgctcccgtacgtgcgctgcgtgggggactcgtggcccatgacgcgggagcgcgcctacttcgaggcctccacgctgcgggagcacggccgcctgtgcccggagcacacccccgaggtgtaccacttcgaccggaccttgtcgctgatggggatgcgctacatcgagcccccgcacatcatcctccggaagggcctcgtcgccggtgtcgagtacccgctgctcgccgaccacatgtccgattacatggccaagacgctcttcttcacctccctcctctataacaataccacggatcataagaacggagttgctaagtactctgcgaacgtggagatgtgtaggctcacggagcaagttgtgttctcggacccataccgtgtttccaaatttaatcggtggacctcgccttatctcgacaaagatgctgaggcagttcgcgaggatgatgagctcaagttggaagtagctgggctgaaatcgatgtttatcgagagagctcaagctctgattcatggagatctccacactggttctatcatggtgaccgaaggttcaactcaagtcattgatccagaatttgggttctatgggccaatgggttttgacattggagccttccttggaaacctgattttggcatactatgcacagaatgggcatgctgatcaagcgaatgatcgtaaggcttacaagaaatggatcttgaagacaattgaagagtcgtggaatttgttccagaaaaagtttgttgaactatggaataaacacaaagaaagcaatggggaggcatacctgcctgatatatacaacaagccaaagcttttgagcgttgttcagaagaagtacatgacaaacctatttcatgatagccttgggtttggttcagccaaaatgatcaggagaatagtcggaatcgctcacgtagaggatctcgagtcaatcaaggatgccagcaagagagcagagtgcgagcgtgctgccctcaactgtgcgaagacgatcctcaagggaagacaccagtttgagacgatcgagcaagtcgtcgagcatattcagtcattcgatcaggactgagaagacgacagtctatttgtgcgctgaagcctgaaggagccatactctcgtcaattaacccacgcatgcccgagtatcgatgaatcgtctgttttgtagtgatgaagcgcccggttgtttgtgatctctgtattggttgctaggtgagaaaagtatgtggtctcctggcttgaactgtgtgtacactattattccgggccggcatagcgagcagctgaataatgaaatgtacgggtcctcagtgaccatctcagtgcatataaacacgtgtgttaccaataaattttgttatggtgctggtggttctatggcaagtactgcatcgccctgttgtttggttgcc

SEQ ID NO: 273378 - DNA, 670 bp, Zea mays
cccacgcgtccgcccactttcattgagagacgaacacgcgagtagagaatttctcctgcctgctcacgaccgccctctcgccggtcgccggtcgccgctcgcaacgcaagtcggaagaggaatctctccaagctccaatcctccgatcctgccccaacccaagtcccctccaccaggccgcacacctccgccgcccggcgcgaccttgcatccaccagcctgccctctccttcgcgtgaggcggccccggcgaccgcgtcggcagtgcaagaccagaccgaggcttctcccgttggaaggttccagccatggcgagcgccgatctgctgcggaaggaggaggagttctactcctccctctttgattccgcaaaaggcgacggcgtcaagtcgcgctcgcaggtgattgagaggaagattgaatccctcgaggacatggccaccaaggtcagcaaccggagatcaagaagatggttgaacgaccgcttgctgattgagcttgtcccacgccttcatgttgaagaaatcaaaggcctctttgctcctccaccatggggtgaggagctgcccttgtcagcattctgcaggacaagtgttagtgactgggaggccttcaggagcatcgacatggatgctgaggcaagattgatgcaacacatgaaacgatcatc

SEQ ID NO: 273379 - DNA, 661 bp, Zea mays
acccacgcgtccgcccacgcgtccgcccacgcgtccgtgaagaacaaggttttctccattgatctcgtttcagatgaaccttcagtgattgcttgtgatatggctcatactccattggagccatcctctatagatgttgcaatattttgtctttctttgatgggaatcaactatccaagttatttagaggaagcaaatagggttctcaaaccaagtggttggcttgttattgctgaagtgcgaagtaggctagacccgagcaacggaggtgctgatcctgaaaagttttctaaagccattatccagcttggcttttcgcttgtttcaaaggatgtgaaaaacagaatgttcattctgttctacttcaggaaaaaggaaaaaagtaaggtggcgaagagcatcgattggccacagctgaaaccgtgcttgtacaaacggcgatgagccgcttgtctcgtatccaccagtaatactgtagttgttgtagtagagctcttcaaaagtttcgtcaaaactgaaagtctagatttaggtccctccgtacctgtatggctgcatctgtgtgccacgctattccattattttccacattagctgcgtctttcatttgttggccctcacaagaaaagatcacatagggaacgatgcattgtttggaagc

SEQ ID NO: 273380 - DNA, 627 bp, Zea mays
cccacgcgtacgcgccactccccaaccgtcccaggacccaggctcagcactagcagccatgccgcacctcgtcctgcttctcttcctcggcctcggcgggctcctgcccgcggcgtcggccgccgacgagcagttcgtgttcgacggcttcaagggcgcgaacctcagcctcgacgggatggccacggtcacgccggacgggctgctcatgctcaccaacggcaccagccagctcaagggccacgccttctacccggcgccgctgcggttccacggggcgcccgacggcacggcggcagcgatggagtccttctccacggccttcgtcatcggcatcatcggcgcgttcgaggacctcagcagccacggcatggcgttcgtggtcgccaagagcaccaacttcacctccgcgcttccgggccagttcatgggcctcgtcagctccgccaccaacggcaacgccaccaaccacctgttcgccgtcgagttcgacaccatcctcaactccgagttcgacgacatgagcggcaaccacgtcgggatcgacgtagacgggcttaactccctcgacgccgacaacgccggttactacgacgacgccacgttaagaacatgagcctggtgagc

SEQ ID NO: 273381 - DNA, 875 bp, Zea mays
ggcccacgcgtccgcccacgcgtccgcccgtttcgagccagggcatcctcgcgtctcgctctcacccctcctcggcgcctccccgaccacagtgtaaagcccctgtcccttcctcccccccgactcgcccctcatggcgaggaggcgctgctgatgcctcgcggcgtcggatcggacgcggcggccacgacacctagccgcttgcggtggcgctcgcctacgcgcccaatccgccgacgctgctcctcggaccccccgagagattcaggccccgtctcgcctcgtcctgcctagtgcctaggtgaggctctggccttcaatcgacttccccaagtgcccgacccctacaaggtagtgcgcgtgcgtcgccccaaccccttgcatgcgctgacgctaaccctatctaggagacggagtggcgcgccagcggccacgccggcgaagagaggacgacagcgtgcaagaagagaaggcctgtgtcaggggcagctataggtggcaggtgcaaagataggcaacaagtgttcaacaacacgactgtggatcaattgacctgcatttcagcttttcagttgaggattaaagtggagctttaagaagcttgaaaattgacattatctcaataatacattgaagtgcaagatgccaaaaataaagaatctctctaatgcatgcaaagtatcattttcttcggaaggtcccatatctgaagaggtgcttgagagagtccgtgcactgttagatgagataagacctctagatgttggcctagataatgaagcacaaattgcacgcaattggagtagtactacgcgtccatcaaatgggagacgcggacgtaatggggctaaccagttcactgctccaatcaaata

SEQ ID NO: 273382 - DNA, 474 bp, Zea mays
gtacgagacaaattgtattaatcgtatggtataatatttatacatgtgcaagatgagctatgcattagacagtagaaaaacccgaccacagtgtaaagcccctgtcgcttcctcccccccgactcgcccctcatggcgaggaggcgctgctgatgcctcgcggcgtcggatcggacgcggcgggcacgacacctagtccgcttgcggtggcgctcgcctacgcgcccaatccgccgaacgctgctcctcgggtccccccagagattcaggccccgtctcgcctcgtcctgcctagtgcctaggtgaggctctggcctcaaaggtgcgtgggtgggatctgctgcctcggtttgcgttatctccaagtgccctgcccatactccaacagcggtccagtcgactttcccaagtgctcgacccctacaaggcagtgcgcgtgcgtcacctcaaccccttgcatgcgctggcgcttac

SEQ ID NO: 273383 - DNA, 735 bp, Zea mays
agcttctagacgccatatgcgagcgcctggtatcgtccttgagcacagagggcacatacattgtccgagaaggcgacccagtgaccgagatgctgttcatcatccgcggcaagctggaaagctccacgacagacggtggccggacaggtttcttcaactcgatcaccctgaagcccggcgacttctgtggcgaggagctcctcggatgggcgctcgtccccaagcccaccgtcaacctgccactgtccacccggacggtgaaggcggttctcgaggtcgaggcgttcgctctccaggccgacgacctgaggttcgtcgccagccagttcaggcgcctccacagtaggaagctgcagcacacgttccggtactactcccaccactggaggacctgggccgcgtgcttcatccagcacgcctggcgccgcctgaggaggaggaagatggccaaggacctgagtctgagggagtcggtctcgtccacgggaccgtacgaaggcgatggcgacgacgcctcctcccctgaacagagtatcacacttaggagaggagccggcagcatcatcagggagctgcctaagttcaggaagccatcggagccggatttctcggcggacatgacgactgactgactggcggaggactgagtggctgatacattgtttgttaaggcaaaagattggtgcttctgatcggttgttcatactgtacatacatatgtagtggtgcttgtca

SEQ ID NO: 273384 - DNA, 292 bp, Zea mays
gtaaggtgtgccatggcttgtggcaagctatcgtccattctcgaccctgctgctgggcattggcctatggaggtggccggaaggctagcggaactgggcctgaggtgcagtgaggacagaagccgggatcgcccagacctgactgctgagactgtacgagagctggaacagctacacttgaccagggaggaggaacaagcaccctcctctttcctgtgcccgattatgcaggagataatgcatgatcctcatgtctgcacagctgatggggtgaccaactactggctggcga

SEQ ID NO: 273385 - DNA, 436 bp, Zea mays
tgcgtccagatccttgtccctacgaccagcgacacgcactctgcacccagcgcgagaaaaaactacatcgatcatcaccagcgagccagccggccgagcgagcagcaccgatggcggcgtacatgcgcgtgacgcaccgcgacgaggaaggcaagaaggtgacggagaagatgccggtcccggagacgcggcgcccggacacggccaagcacttcgagcgcaagctggaggagcagggcctccaccgcttcgagcggcacccggcgaacgcgccccggggcgtgggcatcggcgccccgccgcccaagtccgggcgcggcggcaagtacacctgggagggccccggcggcctcgtcgaggaccagctcgacccggcgccgcccgccatcgaccccaacgaccccaactacaaagaggcggaagatggaggggcggc

SEQ ID NO: 273386 - DNA, 413 bp, Zea mays
cggccaaggcgtcggcccacgcgtccgcccacgcgtccgatccttacagagagactctcccagcgcgcgaggtatctacatcgctcatcatcaccagcgagccagccggccgaactagcagcaccgatggcggcgtacatgcgcgtgacgcaccgcgacgaggaaggcaagaaggtgacggagaagatgccggtcccggagacgcggcgcccggacacggccaagcacttcgagcgcaactctggaggagcagggcctccaccgcttcgagcggcacccggcgaacgcgccccggggcgtgggcatcggcgccccgccgcccaagtccgggcgcggcggcaagtacacctgggagggccccggcagcgtcgtcgagggacagctcaacccgcgccgcccgccatcgaccccaa

SEQ ID NO: 273387 - DNA, 512 bp, Zea mays
cgcagatgcagcgtggcaattccgtcgtcgtgatgtcgcggtttgacatggactctgtgatggccgcggtgcagcggcaccgtgtcactcacctcttctgcgtgccgccggtcatgatagcgctcgccaagctcgggagcgttgcgatcttggcccgcggctcgctcaggttcatcggctctggcgcagcaccgctcggcaaggacgtgatggagggagtggccaagaattttccagaagctgtgattgcccagggttacggaatgactgaaacttgtgggatcatatctttagagtacccagaaaaaggacaaattcgtcaatttggttcaactggagcacttgtctcaggagttgaagcaaaaattgttgatgtagaaacattgatatgtctgccaccaaatcaactaggagaaatttgtgttcgaggaccgaacataatgcaagggtatttcaacaatgtgcaagctactgaatttacaatcaagcaagggtggttgcatactggtgat

SEQ ID NO: 273388 - DNA, 1715 bp, Zea mays
cctcccaacagtgaatcgtattaacgcgtgggcactcacacactgcaacagccaagtgcaagtgatcgagctcccccctcctcatcagtcgctaggcacagcgcacttgcaggatggcgcaggtctctaagacgcttctccttgtggccctggtgttcgtgtcgtcggcggcggtggagctgtgccgcgcgatcgacttcgacgagcgggacctggcgtcggacgaggcgctgtgggacctgtacgagcggtggcagacgcaccaccgggtgcaccggcaccacggcgagaagggccggcggttcgggacgttcaaggagaacgtgcgcttcatccacgcgcacaacaagcgcggcgaccggccctaccgcctccgcctgaaccggttcggcgacatggggcgggaggagttccggtccacgttcgccgactcccgcatcaacgacctccggcgggagcaccccgcggcgccggccgtgccggggttcatgtacgactccgccgccgacccgccgcggtccgtggactggcggcagaagggcgcggtgacggccgtcaaggaccagggccgctgcggcagctgctgggccttctcgacggtggtggccgtggagggcatcaacgccatccggacgggcagcctggcgtcgctgtcggagcaggagctgatcgactgcgacacggacgagaacgggtgccagggcgggctgatggagaacgccttcgagttcatcaagtccttcggcggcatcaccaccgaggccgcgtacccgtaccacgcctccaacggcacctgcgacggcgcgcgggcccggcgcgggcgggtcgtggcgatcgacggccaccaggctgtgccggccggcagcgaggacgcgctggccaaggcggtggcgcaccaaccggtgtccgtggccatcgacgcggggggccaggcgctgcagttctactcggagggcgtgttcacgggcgactgcggtacggacctggaccacggcgtggcggcggtcggctacggcgtcggcgacgacggcacgccctactggatcgtcaagaactcctggggcacctcctggggcgagggtggctacatccggatgcagcgcggcgccggcaacggcggcctctgcggcatcgccatggaggcgtccttccccatcaagacctcgcccaaccctgcagacccgccgcgcaagccccgccgcgcgctcatcgccagggacacctcttcttcccagtgacacacacgaccacaactggcacgtaagtacacgttgccaggaatgacatgctatgctactagtgtttgcttgaactattatcgattgggtttgtactagtgatgacagtttcatcgattgcgcggtcgatctccatcagagacagagacgatataatcagaataaagtatagcagcgcgtgtgcgcaacagggtaagattaggcgtgtgatttgatttcaaagctgtgcttgtaacgtaatgtaatacggtgtggcatatgcaccgggatatggtatgtgtattgggaagacgctatgcgtagcgtaagctagcagttgttgcattgcatttgcatgcttggatcggatatgcatgtgttcttctgcctgcgacatcggtagcgcgtgaggctgtgactctgtgagctgcgatttccgcagttgaatcggtagtgtaagcggaaatgtcggaatttaaatctggctggatttcgttc

SEQ ID NO: 273389 - DNA, 457 bp, Zea mays
cgcgggtcgcacctcgagtcacgccatcagctcacactccggcagccgagcgatcgagctccccggtcgctagcacagccggccactgcacacgacggtgctggtaggttgcaagcacttgcaggatggcgcaggtcgctaagacgcttctccttgtggccctggtggtcgtgtcggcggtggagctgtgccgcgccatcgagttcgacgagcgggacctggcatcggacgaggcgctgtgggacctgtacgagcggtggcagacgcaccaccgggtgcaccggcaccacggcgagaagggccgccggttcgggaccttcaaggagaacgcgcgcttcatccacgcgcacaacaagcgcggcgaccgaccctaccgcctccgcctgaaccgcttcggcgacatgggccgtgaggaattccgttccgggttcgccgactcccgcatcaacgacctccg

SEQ ID NO: 273390 - DNA, 807 bp, Zea mays
agcggcacggacctggaccacggcgtggcggcggtcggctacggcgtcagcgacgacggcacgccctactggatcgtcaagaactcgtggggcccttcctggggagagggcggctacatccggatgcagcgcggcaccggcaacggcggcctctgcggcatcgccatggaggcgtcctttcccatcaagacctcgcccaacccgtcgcgcaagccccgccgcgcgctcatcaccagggacgcctcttcccagtgacaggctgatccatctcggcgtcgaactcgtactactggcacgtaagtaggagtacgttgacaggatgacatcctgctgctgctgtttgcttgtactattttcgattgtgtttgtaggtttgattgtgccagtctcgatcagagacgatatactcatgctagaataaagtatagcagcgcgtgtgcgcaccagggtaagactaggcgtgtgatttgatttcaaagctgtgcttgtaacgtaatgtaatacggtgtggcatatgcaccgggatatggtatgtgtattgggaaaaaaaaaaaaatcaaacataaacacaaaaacaaaaataaaaataaataaaaacaaacaacaaaaaagaaaacaaaaaaataaataaaaaacaaaaaaagggggggccccccaaagggtctaaattttacttacccttgctagaaacataaatattcttcgaagtcgtccccaaatttcaatcaagatggcggtctttttaaaagtctataacgggaaaaacctcggctgtacccaatttaaccccctggacaaaaagccccc

SEQ ID NO: 273391 - DNA, 293 bp, Zea mays
cgagcggctcgagcggggggccaggcgttccagttctactcggagggcgtgttcacgggcgactgcggtacggacctggaccacggcgtggcggcggtcggctacggcgtcggcgacgacggcacgccctactggatcgtcaagaactcctgggacacctcttcttcccagtgacacacacgaccacaactggcacgtaagtacacgttgccaggaatgacatgctatgctactagtgtttgcttgaactattatcgattgggtttgtactagtgatgacagtttcatcgatt

SEQ ID NO: 273392 - DNA, 728 bp, Zea mays
cggctcgtgggcgacacggcgtgcccccacgaactccgccaaattcccccaaacccacctagcaggtcggaccccgcaaatcgccccccaaaccaaccgggccggccgacacaagcagcatcccgtcggcggcgatggacctggcgtcgagcgacctcgcggcgctgggcgcggcggagctgatccgcgtctcggcgtcgatcccgcgcgcggctccgcgcaccttcgcgctgctcaccgcctgcctcgtcttcccgctctccttcgccgtgctcgcgcactccctcttcacccaccccatcctgctccgcatccggggcgccgcccactcggggttcgcgccgtggctcggcctcttcgcgtaccagttcatctacctcatcgtcctcttcaccttctccctcctctccaccgccgccgccgtcttcaccgtcgcctcgctctacgccaacaagcccgcgtccatctcctcctcgctcaccgcgctgccccccatcctgccccgcctcctccgcaccttcctctgggtctcccttctcatgctcgcctaccacctcgtcttcgcgctcaccgtcctcctgctcatcgtcgtcttcatccccaacgcgtccgagtccgagtccgcgccgccctccctcgccttcgtactcttcctcgtcgtcgtcgtcttcgtcttcctcgggatccacgtctacatctccgcgctgtggcacctcgccagcgtcatc

SEQ ID NO: 273393 - DNA, 383 bp, Zea mays
atgatgtgccgccgtcgccgccgatgatgctgaacggacgtgccgcgtccccatccagaaccatccctgctcaacaccttctccgttgctcaccatggcgtcgtagttgttgccgggcccattgccaccagatagtcacggcctcttcgtaacttcactccgtccaggttcgtcgccgctcgtgccaccctcccgcggctgtaactccctctcccttcctcctctcagcgcatgcctcatcacgccctcatcacccatcgttgctggttctgcccgctgttgctggagatcgtgaccatggaactcacgtcgtcgtcctagcgctcctcgcgatgttgctgctccagggcgtcatcctcatgtcaacggtggaaggccttgtg

SEQ ID NO: 273394 - DNA, 455 bp, Zea mays
aaaaacttgtttcgtaaccatcctattttttctctcgaattctttcttgtgattaaggcctggctaatttctattcttcaggtttgcagatcggcgcagttttggtcgcaaaggcgtggtcgttctcctcgagcatcgatttagggttcttcggctttctatgatcaggaggagttgctggattattttatcagggaacagaatggtgtgattcgttgattggattacagcctgcatctctcttgcatcaaatggttgagcaaggcaaaccacgaagcatcccgacgaaggcgaagaaatcgccgttcgtggaagtagaggttgactagattggccacgctagtgcggtggtgtttgcaaaggaatcaccgctggcgcctaatatcgaccaatgatgcaccgttagccatagtcatggcgacgacgaaacacaagaatcggatgggtgcgtgcaa

SEQ ID NO: 273395 - DNA, 389 bp, Zea mays
cccaaagcaaacgcaccggctcgagccaatccaccacccagccatgcctcccaagcgcaagtccccggcgacgattgcccctgccgcggggtccccgaggaagacgcggagcatggttgctgctgctgctgcagggaagcgggcaacggagcctgctccggcgaaggcagtgccggccaagaaggaagacgaggcggcggttgccgagttgaaagggaggaagaggggcaagaaggaagccgaggcggtgacggtggccaccgagccgaaagggaggaagagggacaagaaggaagccgaggcggtgacggtggccaccgagccgaaagggaggaagaggggcaagaaggaagccgaggcggtggcaccagcggcagaggaggaggatg

SEQ ID NO: 273396 - DNA, 967 bp, Zea mays
cccacgcgtccgcccacgcgtccgcccacgcgtccggagcgagagagaacccaaacggagagagacaatcgagagagatggcaaactgttttggtgacgtcgtggacaattacaagctagacacaatgccaagatatatcggcaaaaagaagactcgagaagaccgggcacgagaggcctcctatctcagtaatgagaatgagaagtacaagaaagctaaagactatgtgaacatgctgaaggactggtacggcaatggagcgtcgacgctgtgcgtgatctacaaccagacgggcggaaccctgcggtacgtcgacgacaaggactggctgggctacccggggccgacgccctacccgacggagatcggcaacgggcagtgggcgtccttcctccacgtccacaagaccggcgcctcgtcggggtccatggccgctgtcgtctaccgcggcaaggacggcggcggcagcgagcgcgacttcgccatggcctggagcaccccctggggcgcctccaagaacagggcctactgcgagatcggcaacgtcggctccttccagtcgcagtgggacaatctctacaaaaaactcaacaaggccggatacactaccaacgcaagtggtaccagctcgtctatttccgccgcaactgccaagggcagctcccccgacttcaaagcatatgtgaagatcccttacagcgcatgatgtcaaatcggatccgtcatccacatcgtatcgcgtcgttctgcttgtactctgcttcttcctctatgtattaataatcccagcagcttgaaataataacaatgcatgcatgcatccatgatggaaattagaaataatgtttatgtccccaaccacgcctacttatgctctcgagttacttatttgctgctgtctctcaactgcatgcctatgtaatatatatacaataaaagattctagctaaaaaaaaaaaaagaaaa

SEQ ID NO: 273397 - DNA, 670 bp, Zea mays
caagaacgcggaggcaacacaatcaacattgacacctgatggatggctcaagactggggatctctgctacatagatgaggatggttatctcttcgttgtggatcgtctgaaggagttgatcaaatacaaagggtaccaggtgcctccggcagagttggaagctcttttgctaacacatccagaaatcgaagatgtcgccgttataccgtttcccgaccgtgaggtcggccagttcccaatggcctacgtagtgaggaagaaagggagcaatttgtcagagcgcgaggtgatggagttcgttgcgaaacaggtagcgccttacaagaaggttaggaaggtggcgtttgtggcggagattcccaagaacgcctccggcaagattctgaggaaggatctcatcaagctcgccacatccaaatccaaactatgaaaattgtttttcgtgtttacagtgctggaatacgcttgtcgtccacgagcggcgagccattctctacgctgccccggtagtttggttgtagaatgcttgtataactgaagatcccgtcggctatgtgcttgcttgtgtacagtgctctgttctcgtacaatacaatattgggagggaatactaggcgtctgtacgtaggcttggatggaaataatatccggtaatttcagtgttggtatc

SEQ ID NO: 273398 - DNA, 805 bp, Zea mays
cggaccgtggcggacgcgtgggcagacaaccatggggcaccagcaggcgcacacggcacggacgacaccgaggagctgcttgcagcccaccggcagctgtggtgccatgccctgggctacgtcaagtccatggcgctcaagtgcgccctggacctgcgcatccccgacaccatcgaccgctgcggcgggagcgccaccctgggcgagctgctcgccgccagcgagatcccggcgtccaaccacgactacctccggcgggtcatgcgcacgctgacagccatgcgcatcttcgcggtcagccacgacgaccccgccaaggccgacgacgcggccgccatctcttaccagctcaccccggcgtcccggctgctcgtcagcagcagcagcagcagcgtcgacgccgccgccgccggcgccggcgcctcgaaggagaacactactaccccgagcatcctccccaacatcgcccacctggtccgccccaacaccatctccctgctgttcagcatgggcgagtggatgaaggacgagagcgcggcgtccgtgtcgctgtacgagacggtgcaccggcaggggatgtgggcgtgcgtggaggacgacgcggccaacagggccagcttctacgagagcatggacgccgacacccggctcgtgatgcaggccgtggtccgccggtgcccgcacgtgttcgacggcatcaagtcgctcgtcgacgtcggcggcggccgcggcaccgccgccgccgccgtcgtcgccgccttcccgcacatccagaggtgcaccgtcatggacctcccccacgtcg

SEQ ID NO: 273399 - DNA, 541 bp, Zea mays
ccgacgcgtccgcggacgcgtgcatccatctccatccccatcccgtgacccgtgcacgccgccgcttcaagtcctaacaagccgcatcgcatcgcatgcgtgtgctgtccgaccgccatctccgcagccggctggcctagctacctcacctcacctcacgcaggcacactgcacacacacccatggtggtggcggcgatgcggcggccgtgcgctgtgccagcgctgctggtggcggcggcgacggcgacgctagtgcttctgctgctgctgtcaccgtcgagcgcgcagccggtgccgtccccggcggcggcgccgggccccgcgggcgggaccgggatcgactcggcgtgcctgaactcgctgctcaacatgtcggactgcctcccgtacgtgagccaggggagcacggcgcggcgccccgacgcgccctgctgcccggagctggcgggcctcgtcggctccaaccccgtctgcctctgcgagctcctctccggcgccgccgactcctacggcatcgccgtcgactactgccgcgcgct

SEQ ID NO: 273400 - DNA, 517 bp, Zea mays
tccacgcgtccgcccacgcgtccgcccacgcgtccgcggacgcgtggggccgcttccctgccgctccggcctcctccgtcgggaccgccgacgacgcgccgcgcggaagcctgcgggtgagcgtccagatccacccgcccccttcggcattccccgccgctccagcctcctccgccgggaccgccgccgacgcgccacggggaaggcctgcggggatattgggtaagcagttgtgatcctgttctcttgctcggatgccgggttactatgacatcgatgacatcctcatggaggatgagcctatttcagttgttttccaagtaactgcaaatggtgttggcctgctagatcctggtgctgaaagtaactgtgtagacaagggcgccaaggtggacctcccattttggcttgcgcatgggctgctgtctctggaacaagctgtgtcaataaaccccacctccatgcttcacacagaaaacttggaaggagattcaagctgatgcggcctgtgtggatt

SEQ ID NO: 273401 - DNA, 316 bp, Zea mays
ccccatccctatccagcggcttctggctcctccgccaggtcttgccgtccagcggcctcaccgccctcgagatttgctcggcacggtcgccttgtttgccgcctgcagcgttctcccactcggctacgggctacgcctgacgccaccgttaacggcgacatccgaacgggccccgacacccatctcgcgctcagaaaagggataagcagttgtgatcctgtcctcttggtcggatgcggggttactatgacatcgatgacatcctcatggaggatgagcctatttcagttgttttccaagtaactgcaaatggtgt

SEQ ID NO: 273402 - DNA, 432 bp, Zea mays
gtccggaatttaggaccacaacgaccgcatcgagaaaggcgacgagcccatccgatcgctctccgccgaacgccgtgcattttttgccctgtccgttgtaccgtgtgcaacgtaccccgcgccatctagatcggtctcgatcacacatgcatatgatgctatgcaggcattatataatgttagcagatgatgatctataatgttagctgatgatggccggttttccatctgcatgcatgcaggcagatgacgatcgagcggatcggatgggcagacgccaccaaccccgcccgcccgacgtgaaacacggtgtcgattagcagggccgggtgggtggttgttgtcccgttcgcggggcaaccaacagcagcgggcagcggcgcaaaggatcccatatcctatcctgacggacgccgcccatatatgtcatgt

SEQ ID NO: 273403 - DNA, 698 bp, Zea mays
tcggccggcgctttgtttgtaggctgccagcgtgtgaccggtgatgaggaggaggacggcgtcgatgacctggacaacgagttcaactggaacggccatgactcgcggtctgtggccgactccatgctctacggccgtggaggtgaccctaatggcgcgccacaacctttccagctcaaccccaatgttccactcctcaccaacgggcagatggtcgatgacatcccaccggagcagcacgcgctggtgccttctttcatgggcggtgggggaaagagaatccatcccctcccttatgcggatcccagcttacctgtgcaacccaggtctatggacccatccaaggatcttgctgcatatgggtatggtagtgttgcttggaaggagcgggtggagaattggaagcagaggcaggagaggatgcaccagacggggaatgatggtggtggtgatgatggtgacgatgctgatctaccactaatggatgaagcaagacaacaactgtccaggaaaattccacttccatcaagccagattaatccatataggatgattatcattattcggcttgtggttttggggttcttcttccactaccgagtgatgcatccggtgaatgatgcatttgctttgtggctcatatctgttatctgtgaaatctggtttgccatgtcttggattcttgatcaattcccaaa

SEQ ID NO: 273404 - DNA, 471 bp, Zea mays
aaagagctcgccgcagataggaaggggtggaagtgtgcaattcacgtgccagaaccctgatttatagtttcgcttttcctccttaatcgtttgaccttttcttgtgcccattttagatcttgctggttcttgtgggttttatctcttttatgtgtttccccgtttcgttgttttcggttctcctttgcctttgtttcccttttctgttctttgggggttgagctctgaggttttcatacggggtttcatctctagcctaccccaacgtgcttgggacaaaaaggctttgttgttgttgttgttgttgtattacaaaagacactgttgcatttgtgtttctagaatattaaggaaattttggtggacttgtattcaggaatagtgattacaaagatgcgctgatattaaaaacgttttgaattttttttcttccaaactaagctgatgctatttttcactgcttcacagatg

SEQ ID NO: 273405 - DNA, 638 bp, Zea mays
  unsure (1)..(638): unsure at all n locations
cctatcgcttccgcagaaccttgacttatagctccgcttttgctcttttttcgattgatcttttcttgtgcccacccagatcttgctggttcttgcgggttttatctcttttatgtgtttccccgtttcgccgtttttcgtttctcctttgcctttgtttccccttttttctttgggggttgagctctgaggctttcatacggggtttcatctctagcctaccccaacgtgcttgggacaaaaaggctttgttgcctgtcgctgccggtgcatgaaggaatattgcagcggactagaaaaatcaaaagagggaaactgggatgaagtgaccttattgttcctaagtcctaacacattataatatgttaaacaaagctaatatattagtctccttgtaggttacaacatgggttatcgctctcttgctttgataaatgatggcattttattgtttattacaaaaacagtatgcctcatctgtctttatctacaactgtgctggcagtctgttttgaccttttctaacaatcanagttctccagggctcaagaacagcaacttggacgcatgtgtacttggagctctcgagggtcttgccactggtgttacaatcacgttcttggacagagctggccgga

SEQ ID NO: 273406 - DNA, 440 bp, Zea mays
ggtccacccacgaatccggatcgccgtagctactctattagttgtggcgacttgcaaacctgaagaagagattacttgcgaacgagaacgttccactcacatgtacccagacagatcgtttcagcaggcaggatttcgagagcgacttcatcttcggtgttgcatcgtctgcttaccagatcgaccgcggcagaggtcgtggacttaacgtttgggatggcttcactcaccgatacccacagaagggtggagccgagttgggcaatggagagactacttgtgactcataccggacttggcagaaagatctagacgtgatggaagagcttggagttaaaggctacagattctcctttgcgtggtcaagaatccttccaagatgaaagaggagtaggggaatcaacgaagatggtattaagtactacagcgggctcatagat

SEQ ID NO: 273407 - DNA, 935 bp, Zea mays
cccacgcgtccgcccacgcgtccgagcagctgaacaaacatttgactgtatatcaagctgttcaaagacaagtagttcatgccgaggatgatgaagatcgattcggtggatctgatttacctgatgatggtaaccacttctgggatgatataaggggtgatgtgttcactataacgtatcagaaggctgataacacagcggagaaggggtctgttggaggttcagcttcagtgccaaaatcttccaaatcagattcttgcagaactttgtctgaaaaacagtgtacttctcttcttgatagtattttgcaaggagagcttccctgtgatttagagaaatcaaaccaaacctacaatatcttatcactattacatgtgttggagggtttgaatcagttatcacctcgtctgagactgcagtcagcctgtgatgattttgctgaaggaaaagttgctacattaaatgggctatacgatgttggagctaaggtaccctcaaaggagtttatcaacagtaagatgaccccaaaacttgctcggcaaattcaggatgttcttgcactgtgtagtggcagtttaccatcttggtgttatcagctgacgaaagcttgtccttttctgtttcctttcgaaacacgaaggcaatacttctattccacagcttttgggttgtctcgtgcacttcatcgtcttcagcaacaaccgggcaatgataataacactgcttttgaaagagaagtcaggattggtagattgcaacgccagaaagtccgtgtttctcgtaaccgtatcttggattctgcagctaaagttatggagatgttctctaatcaaaaggctgtcctagaagttgaatactttggtgaagttggaactggtcttggtccaactttggagttttatactctcttaagccgtgagctgcaaagggttgac

SEQ ID NO: 273408 - DNA, 764 bp, Zea mays
gtcggagaatatgaactggatactggctaattcaaagccttgtcccaaatgcaaacggcctattgaaaaaaatcagggatgcatgcacatcacatgcactccaccatgcaaatttgagttctgctggctatgtcttggtccatggtcagagcatggagagaggactggtggattttatgcttgtaaccgctatgagtcagcaaggcaagaaggagcgtatgatgaatctgaaaggagaagagaaatggcaaagaactcccttgagagatacacacattattatgaacgatgggcagccaatcagtcgtcgaggcaaaaggcactgggggaccttcaaagcctacagaatgacaagcttgaaaggttaagtgacatacaaagtcaacctgagtcacagctgaagttcattgtagaggcatggttacagattgttgaatgcagaagggtattgaagtggacttatgcctatggattttacctgccagagcatgagcatgccaaaagacagttctttgaatatctgcaaggtgaggcagaatcaggattggagcggctacatcaatgtgcagagaaagaacttcaaatataccttgatgcagaatctccctcgaaagacttcaatgatttccgtacaaagttggctggattaactagtgtgactcgcaattattttgaaaacctcgtccgggctctggaaactggattaaatgatgtaggcccttccactagccatggcacatgcagcaaaagcgcaacttccaagg

SEQ ID NO: 273409 - DNA, 417 bp, Zea mays
aaccttcattggaaattctgcttgctggatctgcagtggcgaaggagttttggaagtagatggaggcgttaactggactgatgttcatagatggatccgctttttcgggagattactttctatactctccatttcgattttgcgtcgggtcggtatcttcccttgttgattagttccgctgctttgcgcctccgtgctcgcagataccttgggctgtttcgcctctgcgcgacgacgtgaggcgggagcgtgacgagtttggtttggctgggctgttcggtttgcggtttagtcttcctgcgattctagttttcgtgtggatcctgtttcgtcctcgacttctcagtgtgtggattgcaggtttgggtacgatccggtattgggaattcgtcgtggcgtcgggtggcgaggagttgg

SEQ ID NO: 273410 - DNA, 733 bp, Zea mays
attgttttcaaaacattgtgtatgttgtatatattctaatatgtttttaacagtgtctgatgaacatgcaatatgtcaccgtatggtattggtatgtgggacatcaacctgccacatggctgtttcaaaggacagattgtttatacctggtgtctgggggccgttttggtctgcgatgatccctgagttttggctcacagaaggtggccaaagtgcaactggcgctctgctcgattacattattgaaaaccatgttgcttctcctcttctttctaaccatgctgcttctcaaagtatatccatatttgagctactgaacaagatgttgctttctatgtcacaagagcagaatagtccgtttctttctgcattaactcaagacacccatgtgcttccggattttcatggaaatcggtctcctgttcctgatccaaaatccaaaggagtgatttatggcttgacacttgatacaagtgagaagcatttagctcttctatacctagcaacaattcagggtattgcttatggtactcgtcatattgtggagcattgtaatgctcatggccacaagatagacacacttcttgcttgtgggggacttgcaaagaattctctgtatatccaagagcatgcagatattacaggatgtcctataatacttcctagagagagcgagtcagtgcttttgggtgccgctgttcttggcgcctgtgctggcaagaagtttccgggt

SEQ ID NO: 273411 - DNA, 421 bp, Zea mays
acgcagactgacatgatcgcgctctcaggtgggcacacgatcggggtgacgcactgcgacaagttcgtgcggcggctgtacccgttcaagggcgccgccgccggcccgccgatgaacctctacttcctgcggcagatgcggcggacgtgcccgctgaactacggcccgtcggcgttcgcgatgctggacgccgtgacgccccgcgcgttcgacaacggctactaccggacgctgcagcagatgaagggcctgctggcctccgaccaggtgctcttcgctgaccgccgctcccgcgccaccgtcaaccgcttcgccgccaaccagaccgccttcttcgacgccttcgccaacgccatggccaagctcggccgcgtcggcgtcaagaccgccgccgcggacggcgaggtccgccgggtatgca

SEQ ID NO: 273412 - DNA, 342 bp, Zea mays
ccacgcgtccgcccacgcgtccgccacgcgtccgcgaccgtgcgcagacggacatgatcgcgctctctggcgcgcacacgatcggggtgacgcactgcgacaagttcgtgcggcggatctacacgttcaagcagcggctggcgtggaacccgccgatgaacctggacttcctgcgctcgctgcggcgggtgtgccccctcagctacagccccacggcgttcgccatgctggacgtcaccacgcccagggtcttcgacaacgcctacttcaacaacctgcgctacaacaagggcctgctcgcctccgaccaggtgctcttcaccgaccgccgctcccgaccca

SEQ ID NO: 273413 - DNA, 446 bp, Zea mays
cgcgtccgcaacgcatcggccaacccttcggctttcaggaaggcctgataaaaggaacaaattccttgaaacaagggcccaaggaacttcaattgcggtcaaaaccaaaatgcggtcggcccggaaaatggccccccctggggtgcaatcccccccggacccacggcaaaaaatgcgcaacttcttgaggatgctcttcaatgcaaagtgagtcagaagcagcctgcaatcagatcatagataaattttgggtgcagttccagcctcgcgtagtttatggatgtcagtgataagtatacaggctgcccttatatagttccataggagatagaaccctagcttatagtagatcattatatgttttatgaattgtgtaattaggtatctgctttgcagtgagtggctatatggtttataacctgtcaaatgtagaggtgcttataacc

SEQ ID NO: 273414 - DNA, 677 bp, Zea mays
tcctattgtccagtcgacgtccggtaagaagctggtcttctttgggtcatcggccgccgaggcgtctttcaagctggaggacctgctgcgcgcgtcggctgaggtgctcggaaaaggaacgttcgggacgacgtacaaggcagtgctcgagtctggtgcaactttggccgtgaagcgcctcaaggacgtgactctgtctgaacctgagttccgtgaacgcatttctgagattggcgagcttcagcacgagttcattgtgccactccgtgcttactactacagcaaagatgagaagctacttgtttacgacttcatgcccatggggagcctgtctgcagtcctgcacggcaacgtaacttctggcaggacaccccttaactgggatttaaggtcaagcattgctctagctgcagcccgtggtgttgagtacatccactcaacgagctcaacggcttcccacggtaacatcaagtcatccaatgtcctcctgggcgaatcgtatcaagcacacgtatcagacaatggccttaccgctcttgttggtccatcgtcttcaccgtctcgcgccactggataccgtgcacccgaggttattgatccccggagggtttcccagaaggcagacgtgtacagcttcggtgttctgttgcttgagctggtcacaggcaaggccccca

SEQ ID NO: 273415 - DNA, 253 bp, Zea mays
gtgctcatttggagccacctgactaaattttagtcccgttagatcaaatgtttgaatactagttagaatttttaaatatagtataattacaaaattaattacgcagataaagactagagataaggactaaacggtaagatgagtcaattaggcctgattagtctattattcgtccatgtgatgctacaataaacatttgccaaccatggagtcattaggcttaatgaatttatctcgtcgtttagtcttcatc

SEQ ID NO: 273416 - DNA, 814 bp, Zea mays
ggtgtgccccagttcgctgcccgttccccagccgccgatccctcgatctccgctagcttcgttccttcgtacaggaacggtcgagcagaaactagcagccactcccgagtcccgactcccgatcgcgattacttgccgcggcaccagtactccagcggccaccatgagcagcgggaagcgatccttcttcgcgcccaagaagaaggccaccaacccgttcgattccgactccgacgacgacaaaccgcagcagcggccagcgcgggcgtcctccgtgcctcccccggacgagcagcggggctcctcctctctcttcggcgccggcgacagaggcgggctcttctcttccgcggccaaccatcactaccggaacgacttccgcgacgctggcggccttgagggccagtccgtgcaggagctggagggctacgcggcgtacaaggccgaggagaccacgcgccggacgcgggggtgcgtcaggatcgccgaggagatgagggacaccgcatccaagacgctcgtcaccgtccaccagcaggggcagcagatccaccgcacgcacatgatggccgtggacatcgaccagcatctctccaggagtgagaagctattgcgcgatcttgggggtatatttttcaaaagtggaagccaaagaagaatggccccatcacgggtcctatgctaactacaaatgattcctttataaggaaggggagtcatttggagcaaaagcagaaactacggctggcagatcatccaccttcattaaatgcgcgccaattcccttctgaacccttattaacacttgaaaaag

SEQ ID NO: 273417 - DNA, 691 bp, Zea mays
acgcgtccgtaaagttatcactgacggagctcattgaattagttccgcagctggggagcagatcatcgacatcggcagatgcacatcccggacaaagaagaaggcttttctcagtgcaagacttcttcagatatgcggaaattgaaggaaagcgattctttgaagagttggacagagatggtgatggccaagtcactctagaagatctcgaaattgcaacgaggaagaggcggttgccaacgaggtatgctcgagaattgttccgccgtacaagaagcaacttcttttcgaaatcaattgggtggaagcaatttttatccttgatggaacagaaggaagcaaccattctccgagcgtataccacgttgtgtttgagcaagtctggaacacttcacaaaagtcaaattttgacttctttgaaaggtgctggacttccagccaatgaagataatgccgctgccatgctacgttatctaaatgctgattcagaaggatcaatctcatatggccatttccgcaacttcatgcttctacttccttcggaacgtcttgaggatgatcctcggaacatttggtttgaagcagccaccgttgttgctgtccccccacctatagaaatatctgcaggaagtgttttgaagtctgctttagctggaggtcttgcaagtgcgctttctacctctctgctgca

SEQ ID NO: 273418 - DNA, 889 bp, Zea mays
ttcgccgggccacccacgcgacctcccttgctaggttcctcgtccgcctctctgtcctagtctcgtcagcaacagcacagtgttgttactgacgcgccttcactctgttgacctgcatctagccaagtttatttggagactccaacctttggtctcccaaacttggagctcccaaggggagaggttctgccaaaattttggcttctgagcatccattttcagggggaggttctgccaaaatctgctcctgtgaacatagatttctcaaggggaggttctgccaaaatttcctcctgtaaccaccagctttccagggggagattctgccaaaatttcctgcactgatcatcattcttctaaggggaggttctgccgaagttttcttgtgtgacgacgacgatcagtttccagggggagattctgccaaaattttctgcactgaccatcagtcttccaggggaggttctgccaaaattttcttctctcactatcacttctccaaggccaagccctgccaaaatttccttcatatatcacatgcatcgtagacatacagacaataaactctaatttgcaaaggtaacaaaaaaaaaaaaagagtgctttcctccttggccttgatggtaggctagtagagaaaaccgcgcgcagcatctgtttacatgttgttgctcgtcctgtccgagcacctcctttccagatttatggtcggttctgccctaacccgccttgtccagtccttctctgttgttttcctctactggttttatgtcttcttagtaagccgccagtagttggactcaccttttcaagttatctaggcatgtcctatatatttaccacatataaaaattatactaaagcaatttcctatgaagtgcctttatat

SEQ ID NO: 273419 - DNA, 965 bp, Zea mays
attcaagcttctgttcgtgtacctccactcccctgatcacccggatacccctgccttctgcggtggctgcctctgcgctgaacccgtcgcggcctttatagatgagaacttcgttgcctggggcggtagcatcagaaggactgaagggttcaagatgagcaacagcctgaatgcgtcgagatttccgttttgtgctgtggtcatggcttctacaaaccagagaatcgtgctattgcagcaggttgaagggcccaaatcacctgaagagatgataacagttcttcaacgtgttgttgaagaatgtgctacatcacttgttgctgctaggattgaagctgaagagagactaaacaaccagcgattgcgtgaggaacaagatgctgcttacagagctgcacttgaagctgatcaggccagggaacgtgaaaggttagaggaactggaaagacgtgaaagagaggctgcagaggctgagaaaaagcgtaaagaagaggaggaagctgtagcaagggcatcccaagaagcagctgagaaggaagctgctcttgcaaggaggaggcaagagaaggccatggctcttggagctgaacctgagaaaggaccaggtgttactcgggttctcataagattcccaactggagagcgcagagagcggagattctacagttctgcaaccgtcgcttccctctatgactatgtcgattctctagactgcatgaaagcggagaagtacaccctagtttcgaatttcccacgcgttacatatggtccagaaaagcaatccctgacgctggaggaagcaggcttgcatctgcaggcgagcttgtttatcgagatagaacaatgatgctgtaagctaaagaaaagccgaaactaaagtacagacgctcctttttcgaagttgttcagcgacagttaaggatttccagatggtaataccccacaggtgcatgcttcttgtgtac

SEQ ID NO: 273420 - DNA, 468 bp, Zea mays
cgcctgtgtcgcgtgtccctcgttcgcgcacgcccagcccgcctccacctcccatgccggagcaccaccgcatcgccggagatccgccgcactggtgatccccggagcaggagcagacgcaatggaccgcctcatgatgtcccgcccaccccttcccgccccgacccatgccgctgcgggcgccgacggtgacttcctcgagctcgacgtgctctggcccgcctccccttccgcggtaggtctcggcctcctacgccgcgctcccggaggatgagggcaagaagaagaagcgcgccgcggccggggtcggggtccgtggtcggcagcccccgcccgatccgccgcgcgccccgtcccggagaccgtcgcagcgtccgcgatggccaggtcggcgccggtgcggataccgttggatcccgcactgagggggaggtgggcccacgccggggcgggagctggcggcagcgc

SEQ ID NO: 273421 - DNA, 347 bp, Zea mays
ctcgagccgaatcggctcgagctccttcgacctccgccgctcgccgccgtttcccgtccgcggcggcgcctcctcccctcccactcctactcgttgtcgatctcgtctcgggtaccatggcaagatcactctccaccgccctcatgaggggacttatgagatcgtcccgtgcatcgacatcagctgctgtgtcacgaccagctatccagcagtttatgaactattcatcaggtcttagtggcactcctaatgcaaatggggactcagtgtcaacacgagtagctgctgatcacgacacccatcaagattttcagccaacaagtaaaagttcagatatgtctttcagt

SEQ ID NO: 273422 - DNA, 1556 bp, Zea mays
cacccaatgagcttacaccagatgaaatcaggcgttttgcaaggcttgatatcgaccctgagtccattacatggagacgggtgatggatgtcaatgatcgtttcctgagaaaaattactgttggacagggccctgaagaaaaaggtatggtgagagaaacaggctttgacatatcagtagctagtgagataatggctgtattagctcttacaacttcccttgctgacatgagagaaaggcttggaagaatggtgatagggaacagcaagtcaggtgagccgataactgctgatgatcttggtgttggaggtgcattgactgtcttaatgaaagatgctattcatcccaccctcatgcaaactcttgaaggcacaccagttttagtacatgctggaccatttgctaacattgctcatggaaactcttcaattgttgctgataagattgctttgaagttggttgggaagggtggctttgttgttactgaggcaggttttggtgctgatattggaactgagaagttcatggacatcaaatgtaggtatagtggattggtgccgcagtgtgctattatcgtggccacaattagagctcttaaaatgcatggaggggggcctgaagtggtggctggaaagcctctggatcatgcatatgtgagcgaaaatgtggcccttgttgaagctggatgtattaatcttgctaaacatatatcaaacacgaggagttatggagttaatgttgtagttgcaatcaacaaatttgcatcagatactgaggcagaaatgaaggcagtgcacagtgcagctatggctgctggtgcttttgacgctgttgtctgcacacaccatgcccatggtggtaaaggagcggttgagcttggacttgctgttcaacgagcatgcgaaagccaggcagaacctctgaagtttttgtatcccttggaatctagcataaaggagaagattgagtcaattgctaagttctatggtgctagtggcgttgaatattccgagcaggctgagaagcagattgagatgtacaccaagcaagggttctccagcctccccatttgcatggcgaagacccagtactcgttctcacatgtcccgtccatgaagggcgccccgaccggctttgttctgccgataagagacgtgagggccagcatcggcgctgggttcatctacccgctcgtgggcaccatgagcacgatgcctggccttcccaccagaccctgcttctaccagatcgacgtcgacactgccaccgggaaggtcatggggctgtcatgaattgaagtccctgatggtatcattcagagaacgtaaattcggggcattcctggatcgagttaaataagagccgttcctggcatcctgcaagttcagtggcgcttcctttttttacttgattttgtaaaccggagactgtaaatgtgcttgaaccgtgcttttagacccatgcctcaaatcctgcatccaataagtgtctttgaactgcctgaaaaaaaaaaaaaaaaaaaaaaaaaaaaaaaaaaaaaaaaaaaggacagacaa

SEQ ID NO: 273423 - DNA, 579 bp, Zea mays
  unsure (1)..(579): unsure at all n locations
aggcggagaatattcaaggcaacaaccacaatagaacttagcatttgatccaatcttctccttaaggcaaaattcaagggtgctattggcgttgaatattccgagcaggctgagaagcagattgagatgtacacaaagcaagggttctccagcctccccatttgcatggcgaagacgcagtactcgttctcacacgtcncgtccatgaagggcgccccgaccggctttgttctgccgataagagacgtgagggccagcatcggcgctgggttcatctacccgctcgtgggcaccatgagcacgatgcctggccttcccaccagaccctgcttctaccagatcgacgtcgacactgccaccgggaaggtcatggggctgtcatgaattgaagtccctgatggtatcattcaagacgaaattcgggcttctggacggtaaataagaccgttctggatctgcagttagtgggcttcttttttacttgatttgaaaccgagactgtaaatgtgcttgaaccgtgcttttagacccagctcttaaaaaacttccacataaggaactaacatctcccaattgatt

SEQ ID NO: 273424 - DNA, 628 bp, Zea mays
cccacgcgttcgaacaactaccaagacttcatcaccatcctgaccggtcacgtgaacagcgggctgatccctacaatgagcaggatcgacgacgccgtgactcggattctgcgcgtcaagttcaccatgggcctgttcgagaaccccatgccggaccccagcctcgcggaccagctggggaagcaggagcacagggacctggcgcgggaggcggtgcgcaagtcgctggtgctcctcaagaacggcaagccgggcgacgcgccgctgctgcccctgcccaagaaggccgccaggatcctggtcgcagggagccacgccgacaacctggggtaccagtgcggcgggtggacgatcgagtggcagggcgacacggggcgcaccaccgtcggcaccacggtcctggacgccgtgaaggcggccgtggacccgtcgacggaggtggtgttcgcggagagccccgacgccgagttcgtcaggagcggcggcttctcgtacgcgatcgtggccgtgggcgagcacccgtacacggagaccaagggcgacagcatgaacctgacgatcccggaccccgggccgagcaccgtccagacggtgtgcgccgccgtgccctgcgcgaccgtgctcatca

SEQ ID NO: 273425 - DNA, 404 bp, Zea mays
tctgccctcacgaacactacttgatcttatccgagcgcgccgtccggcagcaccgcggcggccggagtcgcctccccgtgcccgcgttgcccccgccggcctgcaagggttggtgggttggtggcgcggttcgtcggaaagaggcggcgcttgcgcccgcggtcgctgccggcgacgagcgatgacgactgcccgcggtcggagcgcgcgcgatgatggccgcgcgggttccccaaaaacactacaccaaatagttcgcgatggtcttttcctttgagatgttcttttttcgaaaaatttgaagtattctttattaaaaaaaggctttttatgtgtgtgtaatctctcttgccttctgtttgtgcttagtcgttctattactcgggttttattttgtatcacgc

SEQ ID NO: 273426 - DNA, 945 bp, Zea mays
  unsure (1)..(945): unsure at all n locations
gcggggaacgcgtccaacagcagcatgggccagctctgcatgtccggcagcctgatcccggagaaggtggccggcaagatcgtcctttgcgaccgcggcaccaatgccagggtccagaagggcttcgtcgtcaaagacgccggcggcgcccgcagtggttctcgccaacaccgccgccaacggcgcaggagctcgtcgccgacgcgcacgttctcccgggctccggcgtgggggagcaagccggcaacgccatgagggactacgccatgtcggatccgaaagcgacggccaccatcgtgttcgccgggacgaaggtcggcgtcaagccgtctcccgtcgtcgcggcattctcctcccggggccccaacactgtgacgtcgagcgtcctgaagccggacatcatcgcgcccggcgtgaacatcctggcggcgtggtcggggtccgtcggcccgtcggggctccccggcgacggccgccgcgtcggcttcaacatcatctccggcacgtccatgtcgtgcccgcacgtgagcgggctcgccgcgctgctccgcgcggcgcacccggagtggagcccggcagccatccggtcggcgctgatgacgacggcgtacaacgagtaccccggcggcggcaacggcatcctggacgtggccacggggcggccggccacgccgctggacgtgggcgccggccacgtcgaccccgcgaaggccgtcgacccggggctggtgtacgacatcgcggcggcggactacgtggacttcctctgcgccaacaactacgaggcggcgcagatcgcggcgctcaccaggcagcacgcgtccgaggggtgcagcgccaaccgcacctacgcggtgaccgcgctcaactacccgtccttctccgtggcgttcccggccgncggcggcacggcgaagcacacccgcacggtaaccaacgtcgggc

SEQ ID NO: 273427 - DNA, 1175 bp, Zea mays
ctgatgcccatgttagcgtcgtcgtatgcgtttcacttcgccacggtgcagttagtggataagtactcggaaatgaagaaaaccaacgatgaggaccttattgctgacgtgcatgttctttcgtctgggttgaaagcctacataacttcatatacagccaagtctataagcgtatgtagagaagcctgtggtggccatggctatgctgctgtaaatcgttttggagctctgcgcaatgaccatgatatattccaaacgtttgagggggacaatactgttcttctgcagcaggtcgctggagatctcctgaagcagtaccaggagaagtttaagggagggacactttcagtcacctggaattacttaagggactccatgggtacctacctgtcccagcctaatcctgtcactgcccgatgggagggcgaagatcatcttcgggatcctaatttccagctggatgcattcagataccgaacgtctcggttgctacacagtgtcgctgctcggctacagaaacacagcaagacgcttggaggtttcggtgcgtggaatagatgtctgaaccatctgcttacgcttgcggaatcacacatcgagtccgtcatccttgcaaagttcattgaatcggtgaaaagctgccctgacgaaaaatcacgggaagtattgaagctggtatgcgacctttatgcgctcgacaggatttggcaagatatctgaacgtatcggaatgtagactacgttgccccaaacaaagctaaggctattcataagctgacagactacctcagttaccaagtgaggcttgtggcgcgagaactcgtcgacgcatttgaccttccagatcttatcatccgtgccccaattggcatgcaatcggaggcctatgcacagtacacccagtatgttggcttctagtagagtatatacttacaataagtccgagaaatatattacgaagttgcaatatagagatagatcataggtgagcaaataagtttcagtagtacatgtaacctgtaaatgtaaagcagtggatccgtaatgcactggctccgtgtgaataaattgtcagattatttttttgtctgaattgttttcagcgaagccttttctcagtaagctaaaaacgcatataaaaaaaaaaaaaaaaaaaaaatataaaaaaagggcaa

SEQ ID NO: 273428 - DNA, 1474 bp, Zea mays
  unsure (1)..(1474): unsure at all n locations
cggcaaaaattgaaccttggccatggcaggtgccaagaaccaatccgaaaccaaaggtccataaaccagaataacatttggtaccaaaatggggtcaaaggtaaggtatccctaaaaatttggtaaggtttatgtaaaaaagataagggtttgtcactagcatctgtttccaatggacaaatgttctagattctaaaaggtcaaccaaaaaatattttaagattttttgataaatttagttataccaatttgatggaccattctacctttcacagcttccatctgtaaactataagagtcttctacaagaactagttcagaaggaaggctttcccttgcctatctataatacagcctcggatgtctcgaactattctgctgccttcgtatcaactgtggaaatccatggtgtaacttttcatggaaagccagggaacaccaaatagcaagcagagatgaatgctgcaaagtctgcttttgaacatttcataaacataaatcatgatgctggatcatctggctctgctaacccacttcctgttgccgctacaaaacagtctgttgatggaaacactctacgtgcaaagctggaagttaacaaatcacaccttgcagagccaagcacagaagttgaagcaatatattcatctacaggagttgacaaactgccacttccagggccaagcatggatatcgaagtaatggactcaactcttgaagttgacaaactgccccttccagagcgaacatggatgttaaagttgtgaattcgtctctgaaagttgacaaactgcactttgcagagccaatcacagaagctgaagtgatccactcatctctgcaagttgatgaaccgctcattccaaagccaggcatgagctcatctctagagaacacacctgctgtgaatggccactcagcccccatattccccaaccattactcctactctaataagcgtgccaacagcaaccatgcctgtcagcaatgacagatgcggttgctacatgtcaaccaacagaatccaagtctaccctcgccacactgatatggttatcccggaaggcgcggccgtgcttcccatcagcgataatcagtgggtagctgtcagcctaccttattccatggaacaaagggatttctgttgccgtaatccggactgccccttaggaagataaaagcagacaaaaggatggatgctttgtgatgattatatagcttgtgatgctgagcattgcccgtgatgtactaaaatctagtgtaacaagactgccttgcgctggactacgattagtgtccctaatgcggagacttgtgtgactcctattgtatctagattaagctgtacttgtttgactatgtgcggaagtcttgagttacactcctatagtacaggacttgaactctggatggaccctcctcttcataaatcccccccgggcttttttctggtaaaaaaatnaaaantaangaa

SEQ ID NO: 273429 - DNA, 467 bp, Zea mays
gacaaaaccatccataaataactaaatatcttatgcaaataatatctctgaaccccacgttataagtttactggatttgggtttcaaaataatatctctgggattgctcacaccgggaaaatgcagggatttctgttgccgtaatccggactgccacttagcaagataaaagcagacaaaaggatggatgctttgtgatgattatatagcttgtgatgctgagcattgcccgtgatggactataatctagtgtaacaagactcccctgcgctggactacgattagtgtccctaatgcggagccttgtgtgactcctaattgtatctagattaagctgtacttgtttgactatgtgcggaagtcttgagttccactcctatagtaaaggccttgaactgtgtgtggcctttccgcgacatttctccgtgtaaaagaagaaaaaaaaaaaaaaaaaaaaagggcggccg

SEQ ID NO: 273430 - DNA, 575 bp, Zea mays
gtgttgcgtccatggcctctcttctgcacccattcttcgatttcgatctcaccgaggccgacggagcagacgactaggagtccactattcccgagaagaatccaggagaggagaggagctaagcagcagctgctgtagctgcgtttggtggatcgaatcggtcgtcgtctggtgctgtgtttttgctactgaggagagggagggatctgagggaggggggtgatgtcgtcgtcctcttcctcgtcggtggtatacgaggggtggatgatccgttacggtcggcgcaagatcggtaggtccttcgtccacacccgctacttcgtgctggagccacggatgctgtcctactacaagcgcaagccgcagcacaaggccgacaaggtcgggggaaagctccccatcaagtcccttcacatcgatggcaactgcaaggtcgaggacagggggctcaagatgcaccatggacatatgctttatgtcttatgcgtctataacaaaagggagaagcacaaccgcatcacgattgcggcattcaacatacaagaagctctaatttggaaggagaaaattgagat

SEQ ID NO: 273431 - DNA, 709 bp, Zea mays
cggacgcgtgggcggacgcgtgggctcagattgggaaaggttcaagaggagatgttacgtatattgcctacacttgttgtgaacaaccggcaatatcgagggaagcttgagaggaaagctgtcctcaaagctatttgtgctggttttgaggaaactacagaaccaaatgtttgcctgagtgatgatatagagacaaatgagtgtctgaatgacaacgggggctgctggcaagacaaatctgctaatgtaacagcctgtagggacaccttccgtggtagagtgtgtgaatgccccactttcaatggcgtacaatttaaaggcgatggctacagcaattgtgaacctgctggaccaggaaaatgcttgataaaccatggaggatgttggcatgaaactcgcaacggaaaaacattctctgcttgccaggaatctggagatgggaaatgcctgtgcccagctggtttccgaggggacggcgttaaaaaatgtgaagacattgatgagtgcaaggagaaaaaagcttgtcagtgtcctgaatgcaactgcaaagatacatggggtggctatgactgcacttgcagtggtgaccttttgtacatcagagagcatgacacctgcataagcaagacagcagttcaggctaaagcagcatgggctgcagtgtggggtatcttgatagttgttgctgttgttgcaacggaaattattt

SEQ ID NO: 273432 - DNA, 618 bp, Zea mays
atttttcccagttcaagaagcagcctggctggaaacaattggtcctggcgcttttgagagggatatctgtatcaactccccaactggatctggcaaaactcttgcttatgccctacctattgtgcaaatgctctgcacacggaaagtaaggtgcttgcgagctttggttgtgcttcctacgcgggatctggccttgcaggttaaagaggtttttgatgctattgctcctgtggtgggcttgtcagtaggttcagccgttggtcaatcatcaatagcagatgaagtttctagtcttgtccagaagcccagactggagttttacccaactattgacaaagaatacgtccaaatggaaccacggactaaaattgatatattggtggcaacccctggaagactcatggatcacattaacatgacaaatggtttcagtctggagcatcttcagtacctggtcattgatgagacagatagaatgctaagagaggcttatcaatcctggttgccaacagtgatccaacttacacactcaattagccaaggggtgtggagcgtggatttaaaggtaaatgctatccaagattggggaagatagttttatctgctacatgactcaag

SEQ ID NO: 273433 - DNA, 491 bp, Zea mays
ggctcgtcgccgtcgcagtcgcagccatttttctgtcggtctgtcccccgcgcgtgccgcttctcacctgtgcacctcgccgactcctcggatttgtcatattcgcctgaggtgggctcagtcgctgagagtggccacggtgaggaaggacgaggaagacggggccgcggaccgcgtgccgcacctgccgtggatgcggtaccccgtcgatatcgacaccttctctggctgccccgtcacacagctcccccgcctcgacccgaggttagagaggtttttgatgatattgctcctatggtgggcttgtcagtaggttcagcagttggtcaatcatcaatagcagatgaagtttctagtcttgtcccgaagcccaaacaagagttttacccaactattgacgaagaatatgtccaaatggaaccacagactaaaattgatatattggtggcaacccctgaaagactaatggatcacattaacatgacaaatgg

SEQ ID NO: 273434 - DNA, 1399 bp, Zea mays
accactgaacaaactcaagggtaaagaacttgaacttcttctggctatactccccgacaacaatggtccgttatatggtgacatcaaacgtatttgtgaacactgatttgggattgatatcacaatgttgcttaaccaagcatgtctttaagatcagcaaacagtacttggcaaatgtctcactgaaaattaatgttaagatgggaggaagaaacactgtgctcctggacgcaataagttggagcattcctttggtcagtgacatcccaactattatatttggtgcagatgtaacacaccctgaaaccggggaggactcaagtccatcaatcgctgccgttgttgcttctcaagattggccagaagttacaaagtatgctggattggtttgtgctcaggcacaccggcaagagctcattcaggacctttataaaacatggcacgatcctcagagaggcactgtaacaggcggcatgatcagggagctgttaatatccttcaggaaggccactgggcagaagccattgagaataatattctacagggacggtgttagtgaaggccagttctatcaagttctcctttacgagttagatgccatccgtaaggcatgcgcatccctagaaccaaattaccagcctcctgtaacatttgtggtggttcaaaaacgtcatcatacgagactatttacaaacaatcacaaagacagaagtagcatggacaagagtggaaatattttgccaggaactgttgttgattctaagatatgccacccaacagagtttgatttctacctctgtagtcatgctggaatccagggaacaagtaggcccgctcactaccatgtcctctgggatgagaacaatttcacagcagacgaaatgcaaacactgacaaacaacctttgctacacttatgcccggtgcacacgctcggtttctgttgtccctcctgcatactacgcacacctggcagcattccgggcgcggttctacatggaaccagagatgtcggagaaccagacgtcgaagagctccaatggcacgaacggaggcttggtgaagcccctgcctgctgtgaaggagaaggtgaaaagggtgatgttctactgctgacgaggtgaccgctttaacaaccattcacatgctgtagctaacttggtagggttcagtaggggattagattagctttctccaggaacgaagaggaaacgggatgcgtatttggatcatgaacaatcaatctgttagcgatcgctgtaaaatactcggaaatgcctgtataatagttcttgttggttcagatgcatgcatccaatgttccagtgtactatgaaaagggggtgtagaagaaacccccccgtgttttctaggttgaccccagtcaattcattaacatc

SEQ ID NO: 273435 - DNA, 530 bp, Zea mays
ctcgcgggtcgatacaagcctctagagcaagtcatggaagcagcagctttgatcgggtggagtttcttgctcactgatcgtcgagttcctgttcgatcgaagttccaggtgcgcacgtacgcactgaagcctttggggtccgtgacgatgtcgaggagagccgcagcgttgttgctcgcgtgcctcgtcgccgtgacagcggcggcgctggcggacggcgcgctgctcccgtggttcggcggcggccggcgcgggctcgacgaggcagcggtgtccgacgtgggcctcgctggcggccgacccgttccggatcctggagcacgtcccgttcggcttcgaccgggacgacgtggccatggtctccatggcgcgcgtggactggcgcgagacccccgacgcgcacgagatcgtggtcgacgtgcccaggatagcgcacggaggacctcaggatcgaggattacgacaacatggtgctgcgcgttagcagctagcggccgagcgcttaagagcgcaagggcgaccaatggcac

SEQ ID NO: 273436 - DNA, 438 bp, Zea mays
ggaagagcgcagaaaaaggaagcagcagctttgatcgggtggagtttcttgctcacggatcgtcgagtgaagcctttgtggtccgtgacgatgtcgaggagagccgcagcgttgttgctcgcgtgcctcgtcgccgtgacagcggcggcgctggcggacggcgcgctgctcccgtggttcggcgacggccggcgcgggctcgacgaggcagcggtgaccgacgtgggcctcctggcggccgacccgttccggatcctggagcacgtccccttcggcttcgaccgggacgacgtggccatggtctccatggcgcgcgtggactggcgcgagacccccgacgcgcacgagatcgtggtcgacgtgcccgggatgcgcatggaggacctcaggatcgaggtcgaggacaacagggtgctgcgcgtcagcggcgagcggcgg

SEQ ID NO: 273437 - DNA, 373 bp, Zea mays
tacgcatctgtacaacttcgggaaaagccaacggctcgtcagctataattcaccggacatgtccggtgtgcaccggactgtccggtgtgactccagcgcaacggctatcccgcgccaaccgctaccttgcatacgcattaaatgcgccgcagcgcgcgcacatgtcaggtttgcccacactggcgcaccggacaatgaacaggagctgtccggtgcgccaccggacatcaagggtggcccacaagtcagaactccaacggtcagattccaacggcactgatgacgtggcacgggcaccggacatgtccggtgtgcaccggactgtccggtgcgccatcgagcagactggctccccaactgccacatttggtgg

SEQ ID NO: 273438 - DNA, 439 bp, Zea mays
agatcgatcggtgcttttaatctctgaccaagcgatcgtgctcaccatcggccaccgcgctcatgagtagcagccggccggacccgagcacgaccaggcggtggcatggggaggccgccgtgctgcgacaaggtgggagtgacgaaagggccgtggacccccgaggaggacctcatgctcgtctcctatgtccaggagcacggccccgggaactggcgcgccgtgccgaccaacaccgggctgatgcgctgcagcaagagctgcacgttgcggtggacaaactacctccggccgggaatcaagcgcggcaactttaccgaccaggaggagaagctcatcatccacctccaggctctccttggcaaccggtgggcggcgatagcgtcctactttgccgagaggacggacaacgatatcaagaactactggaacacgcacc

SEQ ID NO: 273439 - DNA, 458 bp, Zea mays
tcgttcgtgctgtgcgtgtgtgtatatataagcatcctgcccccactccttttatctctctactcgtctccacggaatcgatcgatcggtgctttgatctctgagcctgagcaagcggtcgagctcaccaaccgccacgctcaagacaggtcgagtagctagctagctgccggagcggaaaaggaggcggtgcagtggcatggggaggccgccgtgctgcgacaagatgggggtgaagaaaggcccgtggacccccgaggaggacctcatgctcgtctcctatgtccaggagcacggccccgggaactggcgcgccgtgccgaccaacaccggggtgtgatgaatcatctggtggtgcagggcttgatgacgcgcgccggcgattgaattggcctttaaagatccaagctccgagcttacttgatttttttttatggtgggtttgaacggcaccgggt

SEQ ID NO: 273440 - DNA, 601 bp, Zea mays
gtttcatggtgtttatttgattgtagggtggaggagaggtgaaagctgacagaagagagtgagcacacatggtgcctttcttgcatgatgtatgatcgagagagttcatgctcgaagctatgcgtgctcacttctctctctgtcagccattagaactcctctatctctcaatctcgatctccctctttctttgttgatctctcccatggtgatatttatttgcttcctacacgtgttgtgttctctttcttcagcacacacacaacctgttcatgttgccttagggttaagtttttgcactttgcgtgaacatggaaagacaaacagtagatgggtttttttgaaggtttgacagaagagagtgagcacacacggtggtttcttaccatgagtgccatgctaggagctgtgcgtgctcaccctctatctgtcagtcactcatcaagcccatctgtcttagcttgtttccggctttccgctgctaataaatattctagactcaagtttatttgacacagagatcgatcgctatcatgttcgatgcatttatatagaagtattacttacatgtgcggatctcgtgtagatcttcttcctaatt

SEQ ID NO: 273441 - DNA, 1584 bp, Zea mays
tgggaaaattttagataccctgccgcacgccgcgaccttcggccccgtctccggtctccgccttcccccacctattggggagcgctcctgattcgcgggagccagcgggcgagacaaagagaatcccccgctcctgcgccgccgcggatcagcgccgtcgccgatcggaggctctcgcttcccccggcgggcggcgcgcgccgggagatggacggcggcgcgggcgcgggcgccggccggaggaacgtctcatcgtcctccggatccaggaggagggtcctgcccgccgagaacgggcacggccatgacgccccgccgccctccgggcggtcctccgtctccctctcccgcggccactccacgtcactgaccggcgagaggaccgtgaaaaggctgaggctgtccaaggcgctgacgataccggatcacacgaccgtgcacgaggcttgtcggaggatggcgtcacgcagggttgatgccgtgttactgaccgactccaatgctttgctctgtgggatccttaccgacaaggacataacccacaagagtgattgctcgtgagttgaagatggaagagacactggtctccaaggtcatgactagaaaccctgtatttgttctcgcggacacgcttgccgttgaggcgttgcaaaagatggtgcaaggtaagttctcccatctgcctgccgcggagaagcgcgaggtcattgcaattctggacatagccaagtgcctatatgatgctattgcacggatggaaagggcggcggagaaaggaaaagcaattgccgctgccgtcgagggcgttgaaaagcattggggagcagctgtgcctggtcctaacaattttattgagacgcttcgagaacggatgtttaggccatcgctgtctaccattatctctgagaattcaaagaggtggtcactgttgtaccatcagacacggtgttgacagcatcaaagaagatgctggaactaaaaatgagttcagcagttgtagcaatcgaaagcaaacctgggggaattctgacatctagagatatcctgatgcgtgttatcgcccaaaatcttcctcctgagtccaccacggtcgagaaggtcatgactcagagtcctgaatgtgccacagtggacaccccaattcttgatgctcttcacacaatgcatgatgggaaatttttacatttgcctgtcctggacagggatggaaatgttgtgactgttgttgatgttcttcacataactcatgctgcaattgctacggttggaaacagcggggcagctggatccgaggcaacatctgccatgatgcagaggttctgggattcagcaatgtccattggacctattgatgatgacgatgactcgagaagtgaagggtcgactagagtggtatctgaggcaacagatataggaagaccagccttctttccagcttctggcttatcaaacacttttgggttcaagattcaggataagcaagggaggatgcacagatttaactgtgaaacaagcggcctggcagagctgataaccagcattcttcagagggtcggcgacgacattgacagaaaacacctgccg

SEQ ID NO: 273442 - DNA, 668 bp, Zea mays
caccagctcatcacatccatctcattctactactgcctcagagaccaagctgctgcaaccggagaaggagatctattctacaaagtgaagtacttagcttgggacatggaaaccgtcgtgggagacctcatggcgaccgagctgaggcttggcctgccgggcaccgtggacgactgcagccagcaccagcagcagacccagctgaaggtggccgcgccgccgtccaaccctactaggggcaagaagcgccccgccgccgaggaggaggaggcaaacaagcgcgacgcggaggcagcacccccggcggccaaggcgcccgtggtcggatggccaccggtgaggtcgtaccggaagagctgcttccagcaggcaaagcagcaggccgtcagcagcagcagcagcaaggcggccgacaaagaggatgctgcggcgccggcgcccagctgcacggcgtccgcagccgcctcaaacgccaccgccagcgccggggccggctcattcgtcaaggtgagcatggacggcgccccgtacctgcggaagctcgacctgaggatgtacaaggggtaccgggagctccgggaggccctggaggccatgttcgtctcctcccgcagcgctaacgccaacaacaacctgtccgagttcgccgtcacctaccaggacaagga

SEQ ID NO: 273443 - DNA, 676 bp, Zea mays
cggacgcgtgggcagctcatcatcacattcgcatacatctcttctagcacgcaaagatcgagctatagctagctctgcaaccagagagaaggggaggactacccttcgccggccggcctaaggaggagtacgtacagaacttgggacatggaaaccgtcgtgggcgacctcatggcgaccgagctgaggcttggcctgccgggcaccgtcgacgactgcagccagccccaactggtgaaggccacgccgccgtcgacgccaaggggcaagaggcgcgccaccgccgatgccgtggaggaagccgccggcgccgaggaggcaagcaagcgtgacgccgagacggcgcccccggcagccaaggcgcccgtggtgggttggccgccggtgaggtcgtaccggaagagctgcttccagcaggccagcagcaagcaggcggcagcggccaaacaggaggcggcggcggcggcgcccggctgcacggcatcgtcagcagccgccacaaacaccaccagcagcagcagcgccgccgtcgtcgtcggctccttcgtcaaagtgagcatggacggcgccccgtacctgaggaaggtggacctgaggatgtacaggggctacagggagctccgggaggccctggaggccatgttcgtctcctccagcagcgccaacaacctgtcgg

SEQ ID NO: 273444 - DNA, 634 bp, Zea mays
tgctccgattcgagggagaaagaaaagcagtcgagcagcggtagccggtaggcgagagagtcaggattcaggacgcggcgaggccaccatgagcactctcaagttctgccgggaatgcaacaacatgctgtacccgcgggaggacaaggagacgcgcaccctcctgtacgcgtgccaaacgtgcgagcatgaggagattgccactgatacttgtgtgtacaaaagggttatccgtaagcctggtggtgagcccaaagatgtcctgaaggatgcagcaactgatcctagcctgcctcgcaccagaagcgtcagatgttacaactgcaaccatccagaagctgccttttttcaggccccgactaagggagaacaagccatgacgctgtacttcatctgctgcaacccaagctgcgggcacaggtggagggactgagaaggatctggcttggtcttcgctgcaaacctgccgtattgttagcctaggtacaagttgtgccgtcaactgacgtttgctgcatgcttataggctactataacctcgtaacatatcgatggtttgcgctggagcccaacatctgttgttcctcatgataagaaacagaaacagctatgaactaccagtatcatctcgtct

SEQ ID NO: 273445 - DNA, 476 bp, Zea mays
cggacgcgtggggcctgcctgcactggactcaaaaacatgcctgccgtaggatcctctgatgtgtccattcgcgtgttgagtcggcggcttgtgaaggcatccgacccctccctccagccgcacgtcgtcaccttctcaaacctagatctctacccggacaacgtgcaggcctccatagtgtgcctctaccccaagctgtcaacaaagtccggcccgggcggcggcttcgacgccgtcgtctccaccttcgaggccgtcctgccgaccttgcttaaccacttctaccctctcgccggccgcattgtcgtcaacccaagctccggcgtccccgagctccactgccacaaccagggcgcggactcgtcgtgggagaggtcggcgtcgccctgggcagcctggactacggtctcgcctagagtcctgaagagatcagatgcgtacctgagacgtcagtctcggtgcactctgtcctcgc

SEQ ID NO: 273446 - DNA, 428 bp, Zea mays
gcaggcctccgcaatgcttcaacatgagacagcaactgcgagaacttgcaatgctaaattcgccactccgagaggagagtccacatccaggtggtgctcctcctagtcccttcagtaacggcggcatgaaaagagtgaaacaatgacaccgccgaggctcgttcctccatcttgactccccagcaaccccaatgcagtccataccttcacaccctatttttcaatgagcaagctttcatgacggtgttggtagtgtgtgacattcttcactgtactagcaggtgaattttgatctcccatcccatgttacattaaccttgagtgacagatgactatgcgtagtgtatcctctatggcagtataactagaacatttgatttatttgttactggtaatgctgagatatagtactgtgcagattctgagtt

SEQ ID NO: 273447 - DNA, 576 bp, Zea mays
  unsure (1)..(576): unsure at all n locations
cccacgcgtccgcggacgcgtggagccgttgaaaccagtggacgagtcacaaggctactgcacgagacagcaactgcgtgaacttgccatgttgaattcgccactccgagaggagagtccacgttcaggcggtgctcctacaagttccttcagtaagactgtctccggtaggcctaataaaacaggggacacagaattgtagatgacactgtttatcactggttgaagagagaagtttgaaatacgggatctactggagatagcctaacggcggcatgaaaagagtgaaacaatgacacccattcctccatcttgatcctccggcaaccccacttagtccatgccttcacatcctattttccatgagcaaagctttcatcatggtgttggtagtgtgtgacatccttttatgtactagcaggtgaattttgatcccccatcccatgtgacattaaccttgagtgacagatgactatgcgtagtgtatcctctatgactgtataattagaacatttgatttccctgttnctggtaaaaatgacaaatagtnctgtgcngnnaaaaaaaaaaaggnaa

SEQ ID NO: 273448 - DNA, 1249 bp, Zea mays
ttccacgcgtccgcccacgcgtccgcccacgcgtccgcaagctctaacctacgacctccgccgattccgcgcgcgtcggcctccgccctccgcccaaaacccaatccagggccaggccaggccaggccaaccaaaccctaggcactgcgccacgcctagcgcgcgtggtatccatgggctgaccgcgtcccggtggggagcccggatccggagctagggttccgtcctaggcggcaccaccatggagtgggacagcgagtccgacggcgccggcagcgtcgacgccggctatgaggagcaggaggaggaggaggaggagcggggaggcgagggtggaggtggcgacgccgggggcggcggtgggatgttcacgttcgcgattgaaggcatgctgcgctcctccgggccctgcgggctagtcgtcaccgacgcgctcgagcccgattgccccatcatttacgttaaccgcggcttcgaggaggccacgggctaccgcgccgaggaggtcctcggcaggaactgccgatttctgcagtgcagagggccattcgctcgaaggaggcaccccctagttgatgctgcactggtttcagagattcgaagatgcatagacaatggcattgagttccgtggtgatttactaaatttcagaaaagatggatctccagtgatgaacagattgcatctgacccctatttatggagatgatgaaaccataacccattatatgggcattcaattcttcactgatgctaatgttgatttgggaccattgccctgttcaatgacaaaggaaccagtgaggtcaacacggtttgctctagataacacatttcgacccatttctgcggggccagagcacagcaatttctgccggaaatattctagcctcttccagttaacggatgaagtgctttgccaaagtatactgtcaagattgtcaccaagagatatagcatctgtgagctctgtgtgcaggcgattgtatgatttgacaagaaatgaagatctctggagaatggtttgccagaacgcttggggtagtgagaccactcgagctcttgagacagtgcctgccgcaagaaggctgggttggggtcggctggcaagagaactgacaaccctggaagctgttgcctggaggaaattgacagttgggggtgcagtggaaccatctcgatgcaatttcagtgcctgtgctgtagggaatcgtgttgttctctttggtggggaaggtgttaacatgcaa

SEQ ID NO: 273449 - DNA, 408 bp, Zea mays
cttctcctgcatcaggatcatcatcaggttctccgttccactccatggccttccctgctgtgcccctcctcctcgccgctctgctcctggtcgccgccacgcggctgtgggactacgtcttcgtgcgcctcgtatggcggccgtacgccatcaccaaggggttcagagagcaagggatccatggaccctcctacaggttcttcaagggctgcaacgaggagatcaggagcatgaaggagtagaccgacggtctcgtgctggacgtcggcgaccacaagtacctcccgcggatcgcgccgcactacctcgaatggagggctcagtacggagaaccatttctatattggtacggggcacaagcccgaatttgcatatttgactacgaactagcaaggcaaatcctttcga

SEQ ID NO: 273450 - DNA, 916 bp, Zea mays
tcaggaatcttgagattttggtcggaaagcaaactgagaacatttcaactctacagcaagctaatgaagagttacagaagaacatctacactttgacggagcaatcacaacgagacaaggcggagatgcaggatgagttgaaggcaatacaagaagataaggatgcagtgctaacacaactgaagcagtcagagacttcagtacaaaatctagaggatgagttgacacgactgaaagaggagctttccgtccagctagaaaacaattccaccttggacaagcagtttgcagaagccaggagcaatctgcatgctgaaatttcagacctacatacagagaaggacacatctctacgggaattacagacgtctcaggcttgtgtcaggaatcttgagattgtggttgaaaagcaaactgagaacatttcaactctacagcaagctaatgatgaattacagaagaatgtctatactttgactgagcaatcacagcaagccaaggtggagatgcaggatgagttgaagtcaatacaagaagagaaggatgcagcgctaacacaactgaagctgtcagagacttcagtacaaaatcttgagaatgaggtgacacgactgaaatgggagttctccgtccagctagaaaacaattccaccttggacaagcagttggaggaggcaatgttgaaagtgtctagcctacatgagaatcttgacaacgcccaagctgaagcagcttgtcaacttgatggcatgagtacaaaaaccaaagatctagaggagccattcaatcaattgtcttctcaaaagactaagttggagaaggatctgaaaattatcattgaagcatgcacagataacatgtcatgtttggcaggatttgaagatagagttacacaaaaaatttcagatcaggaggc

SEQ ID NO: 273451 - DNA, 477 bp, Zea mays
cacccaccggcctagtagctctcgccatccacatcgcctgtagctgcatgcggtgatcgcggcggcggtgcaggccacagacgtacgcgcgcgggctggctgtcgggcgcgcggatgcgccgcgccgcggcgggcggtgacagaagagagtgagcacacggccgggcggaacggcaccggcggatggtgccgtcgcggacgcgtgctcactgctctatctgtcatccactctctcccccgctccgctccggtcgctttgccgccgatctgtcgaagcaccgcagctgactagccgccgtgatcaccgcgcgcaccggccggcgccgcgcttctggcactagtagctagctaggtggtgcaccgctccacacgcccatcttcttgttcgcgtcattgtatgccgcggaaccaccgcgcgctaggcgttggtgcccggcggtacgtcgtcgtcccgtctcccgtccgcaggaatttcta

SEQ ID NO: 273452 - DNA, 639 bp, Zea mays
gaactcccggataattataaaagggaggggaaaaggaaaacaacttgcaccggaatcaacaacgggggctccaatcatcggtctatccctccgtgtcaaccccctcctcagaagttctaattgcagttcagcccctggccggtccgccgggccaccggaaggagccgctcgccggaggaagccccccatctccttgccctgcggcgggtttatggggttctcgctgtaccccatgaagacgtccacgcggttgctctggagcactagcttcttccgccataagctcagctcctcctcctgcttcctctgagcccgccccacccgcgtcgatcacctcggcggcggcccgctgttgctgcgcggtcctagcacccgttcgagtgtgtgtgtttgtgttctttgagtttcaagattgggttttgttgcgttattggggagacgaagggactaaggcgcagtgagcggacaagaatcagcatggatccgagcgcggtcagtttcgactctggcggcgcgcggcggggcggcggcgcgcaaatgctgctcttcggcggcggaggcagcgccaacagcaacggcttcttccgaggtgttccgatggcggtcctgggcatggacgacgcgacgcgcgtgggcaag

SEQ ID NO: 273453 - DNA, 497 bp, Zea mays
ccacgcgtgcacccaaaaccaaaaaaaatcccaaattaaagaaaacgaggagaagaaaaacaactttcatcgccgtccgccaccggagctcccttcgtcggccttccttcagtgtcaacccccttctcaaaacttgtatttgcacctcagtccctgccggtctgcccggtcgccgcctcgccggaggaagcccctcgtctccttgccctgcggcgggttcatggggttctcgctgtaccccatgaagacgtccacgcggatgctctggagcactagcttcttccgccataagctcagctcctcctcctgcttcctctgaggacgccccacccgcctcgatcgcttcggcggcgggccgctgctgctgcgctgtcctagcatccgttcaagtgtgggtttgcgttcttgggtttcaagattggcttttgttgcgttcttggcgagacgaaaggactagggcgcggacaaagaatcagcatgcatccgagcgcggtcag

SEQ ID NO: 273454 - DNA, 344 bp, Zea mays
aattcacccaaaagaaactcctgataaatataaaaaggagggaaaaagaaaaacacttgcagcggcatccatcatcggtctatccctccgtgtcaaccccctcctcagaagttctaattgcagttcagccccgggccggtccgccgggccaccggaaggagccgctcgccggaggaagccccccatctccttgccctgcggcgggtttatggggttctcgctgtaccccatgaagacgtccacgcggttgctctggaagaccagcaactcgagaccggatatgaccgcttaaggctgctgacgaagcatcgcggacgacaaccaggctcctggccgacaacgat

SEQ ID NO: 273455 - DNA, 572 bp, Zea mays
  unsure (1)..(572): unsure at all n locations
acaatgactaccctcactaccctgcaggccggcactgcactgcactgcagtctacagaactcgtcagtcacagatcggtgcaggcggtctgcacctgcatcacctaaccaattcctcgattagtctgctgttgcgatttgcgaagcangtcagctgcaatctttttgcagcagccactaaacctgtaccaagtcttcttgcctgagggcagaggcaggctccgtcagtcacgccggcggcgtacagatcatggaggactttggcggctggaatatgcagtatgcagcagagctatgcctgccaagccgccgggacgacgacgacgacggcctcctcggtgacttcctaggcggcggcggtttggacatccgttctgaccatggcggcctcaacctgccctcgtcgcaccctgctgtccagaaccttgtgccctgccacggcggcgtgagtctttccgtttccgacgccttcatgggcctggacacggcggatatgctcgctagcgtcaccggcgcactggactgcagcctcctcgacacgtttgcttgcggttcggacgccgtcgtcgtcgc

SEQ ID NO: 273456 - DNA, 369 bp, Zea mays
ccgggccgacccacaagtcaaggaccatcctcgctaccctgcaggccggcactgcactgcactgcagtctacagaacgcgtcagtcacagatcggtgcaggcggtctgcacctgcatcacctaaccaattcctcgattagtctgctgttgcgatttgcgaggcaggtcaggtactgacgtattgcatttgcatgcttagctagctgatagatgatctttgtttcgtctctgctttgctctgtgtatgtgtttactgcaggacaatttgtaattgcaaatcgtctcacaaattggtactgactgaaagatgatcttgtgtttcttcattctgtttgcacgaagctgcaatctttttgcagcagccactaa

SEQ ID NO: 273457 - DNA, 625 bp, Zea mays
gaattacggcgttcggagcagctcgaactagctttagctactacgtgtgcaagtgcaagcagcccactcgttcgaccatggctgcgagagcggcgctcctccagctggctgtcagcctggttatccttgccgccgtggcgagcgcgagcgcgaccaactgcccaccgccaccgctgccgccggccccaaagccgccgacgcccggcggccaccacggccacgggtcgtgccccaggaacgcgctgaagctgggcgtgtgcgccaacgtgctgggcctggtgaaggccaaggtcggctcgccgccgtacgagccgtgctgctcgctgctggacgggctcgtcgacctggaggccgccgtctgcctctgcaccgccgtcaaggccaacatcctcggcatcaaccttaacctccccatcgacctcagcctcatcctcaacaactgcggcaagaactgccccaacgacttccactgcgcgtagatgatcagtcagtcagttattgatcgtcgtccatcgccggccggccgtggttcatcgtcattattccgttttgcttaattgttgatcgatcgtcttcttcctgtcagtcccagcagcttatttattttaaatttgtctctttatac

SEQ ID NO: 273458 - DNA, 425 bp, Zea mays
ggtcgacgacgcgtccgagctgtatccgttggcggggaccggcatccttggcccaggacccatgccgccgccgccgtcgccgggtctctggttcccgcagtcgccgtctgggctcctttctccatcaggcttcttgccgagccttagcccaaggtggagagatatatagcaagtctgtgttttccacagcagctgcccctcttgagcaaggcggccgtgtaacatttgacggtagggacgtagccacggtgaggtcggttgggtcgtccgccggatttggctggagaaacacacaggtgggttgtaactttggactcccatatttattgctgctacttactgcttctgtgctgtggttgattagtcggtatgtaaaaggagatttgttatatatttgtaattgtataactgtgaaatatttcaat

SEQ ID NO: 273459 - DNA, 1558 bp, Zea mays
ggccgacccacgcgaccagtccccactcgtcgcccatctgccgtgacgtcaccccattcttcatcggttcccttcctcgcctcggttcgcgggtacgcagagtcgctagacgcacctcgctcgcaacttgttggactcgaaggggcaatagacagcaggcagggccccgaactgcgggaggagattcccaaggatctcgtcggccgggtagaggaagggacggggacgggcgatggcgggggacggcggcggcggggtggactgggagagcctggcggaggccacctccggggcaatcggctcgctcgtcagcaccaccgtgctctacccgctcgacacctgcaagaccaagttccaggccgagctccagacgcaccagggcgcgcagaagtataggaacctttcagatgtcttttgggaagcgattcgtaaaaagcaatttttgtccctatatcagggcctgaacacgaagaacattcagtcttttgtctcctcgtttttttatttttatgggtatagctattttaaaagactctacttggagaagagtggagcaaagtctattggaacaacagccaacttgttagttgctgctgctgctggtgcttgtactgttatcgtgacacagccattagatacagcagcttctaggatgcagacaagtgtctttggaaagtctaaagggctgagagaaactcttgcagaaggtacttggatggaagcattcgatggcttaggcatttccattatattgacttgcaatccttctattcagtacactgcatttgatcagctcaagaaaaggataattcagaggcagcgacgcaaaaatgcagcatcggcggaggataattccggagtggctctttctgctttctcagcttttctgcttggcgccgtctcgaaaagtattgctacagtattgacttatccattaatcaggtgcaaggtgatgattcaggctgcagaccctgatgaggatgatgacgatgaacctggaaggccaagcaaatcaagaacaccaaaaacaatgctaggtgccttgcatgctatctggagcaaggaaggcattccaggcttcttcaaaggcttgaatgctcagatccttaaagcagttctgagctccgccttgctgctgatgataaaggagaagatctcgaagttcacttgggtctcgctgcttgccctgcggcggtatcttttcgtttctcagaagaggatcaagagtgtaactgtataaatactagctccaaacatagcgacatcgtgcttatggagatgttatgccaaggaattaatctgaggaataatgagcagaaatactgaagcaaaagagtgtgtgtaaagtgtgtatgtgtgatcgataccatcagatggctcttcaataagtttgttcattctttttttcccctctctgaatctctgatagctagtgacacagtgttgcacggatctgaaactggactgtacttttggctttggttgtctgtaatgtgtaaaatagcagccgtgttaatattccctttctcttaaaagaaaatgaatcgattggcagttt

SEQ ID NO: 273460 - DNA, 536 bp, Zea mays
gcctggaatgccttccttgcttcttcaaaggcttgaatgctcagatccttaaaacagttctgggctccgccttgctgctgatgattaaggagaagatctcgaagttcacttgggtctcactgcttgccctgcggcggtatcttttcgtttctcagaagaggatcaagagtgcaactgtataaatacgttagctccaaaacacaaactagcacacatagcgacatggtgcttctggagatgttatgccaaggaataaatctgaggaataatcagcagaaatacttaaccaagagagagagaataaggtgtgtatctggggtcgatagcatcagagggctcttcaataagtttgtccatttcttttttttctctctctctctgaatctcttgtagctagtgacgtagatgttgcgcggatctgaaactggactgtacttttagcgtttgttgcctgtaattaggggtgataatgggctctgaattttacagtataatatttaaggttcggattaaataaaaaaaaaaaaaagggatgt

SEQ ID NO: 273461 - DNA, 430 bp, Zea mays
cacgcgaacgcccaagcgtccgcccacgcgtccgggggcgacgacttcagagcgctggtgttcgagttcatgcccaactacagcctggacaggtggctgggcgtcaaccccaggtctgaagagccgaggatcgtgaagagcctgagcgtgatccagaggctcaacatcgccgtcgacatcgccgacgcgctctgcgatctctacacaccagctccgtaccgccgatcgtccactgcgacgtcaagcccagcaacgttctcctcggcgaggacatgagggcggtggtgggcgacttgggccttgcgaagctgctacatgagtccgggagccatgacacttgcaacgacacaagcacagttggcttgagaggcacggttgggtatatcccgccagagtacggcacgacagggaaggtgtccacgcacggcga

SEQ ID NO: 273462 - DNA, 1237 bp, Zea mays
tcgacacacgccaccgcgtcattctcttcctcttccggtgctcgtgctcgtgctcgtgctctccgccctccccctccgccacctcgcgcggaacggaacccaggccgccgccgacccagccaccgctaggcgtcagcgaccgcgcggcatggtggcgcttttacactacctatgctagtttgcctgatgctacatttccacgatggttaagctgactatgatagcgcgtgtcactgatggccttccattgtcggagggattagatgatagtcgggatctcaaagatgctgacttctacaagcagcaagcaaaactgttgttcaagaacttgtccagagggcagcatgaggcgtcaaggatgtcaattgagacaggaccgtaccttttccactacatcattgaaggccgtgtttgctatttgactttgtgtgaccgttcttatcccaagaaacttgcattccagtatctcgaagatctcaaaaatgaatttgagaaagtcaatggcagccaaattgaaactgctgcaaggccatatgcatttattaaatttgatgcattcatacagaagaccaagaaactgtatttggataccagaacacagaggaaccttgctaagctgaatgatgagctctatgaggtgcaccagatcatgactcgcaatgttaaagaagtctcggtgttggtgaaaaactagaccaggtgagtgagatgtcaagtaggttgacttcggatactagaatctatgcagagaaggcgaaagatctcaatcgccaggcattgattcgtaaatatgcccccgttgctattgtgattgggatagtggtgatgctcttctgggtgaagaacaagatatggtgactggtgccatcttgcgatttcacagttatcatgctggaaccagctgagttgtcttgtcttccctcgtgcaaccatatgtttgatcgtggtcccaaaaagaaaagaaagatggctcgatggtttatcccgcatctgccgattcaagcgactactttagctatcaaaagcaaaaccacggtagtagagatagccttggaactgcacatttctattaactggacatgtataaatagttctcgtgagcgcacaccatgtaatcgtcgaaattcatccatgtgttgtgacattttttgagcacagttgaacatgtggtggagcctggaagcaagtcaaaataaaaaaaatgtctgataatgctataagataataactgttaatt

SEQ ID NO: 273463 - DNA, 671 bp, Zea mays
gcagctgaaggtctatttcttttatgagaatcggcccatatttttctgctgaatggaatttcggtggtttcccagtttggttgcgcgatgtccctgggatagaattccgcactgacaatgaaccctacaaggctgaaatgcagatttttgtgacaaaaattgtagatatcatgaaagaggagaagctttattcttggcaaggtggtcccattatactgcagcagattgaaaatgaatacggtaacattcaaggccattatggtcaagcagggaagagatacatgctatgggcagctcagatggcacttgcacttgatactggtgttccttgggtaatgtgtaggcaaacagatgctccagaacaaattctcaatacttgcaatgccttttactgtgatgggttcaaaccaaattcctacaacaagccaacaatatggactgaggattgggatggatggtatgccgactggggcgaatcattgccacataggcctgctcaagacagtgcttttgctgttgctcgtttttatcaacgtggtggaagcttacaaaattattacatgtattttggtggaaccaattttgagcggacagctggtggtccacttcagataactagctatgattatgatgcaccaattgacgaatatggtatcttaagacaacctaag

SEQ ID NO: 273464 - DNA, 664 bp, Zea mays
accacgcgtccgcccacgcgtccgcccacgcgtccgcaaagagagagagaaacaatcaggggtccatccatttttgtcagccatgacgaacggctatctgttccgcgagtacatcggcgcgcagtccaccggcgtccagttctccgacgtgcccatcaacgccttcgttagcttccacttcatcctctccttcgccatcgactacacgcccgtggggcagcagccgaagccggtgccgaccaacggggtgttcagcccgttctgggacacgggcaacctgtcccccgccgccgtggccgctataaaggcctcgcaccctaacgtcgccgtcatggcggggctcggcggcgacagcgtgcaggacatcgtcaaggccgtcttcaccccgacctccgtcgacacgtgggtggccaacgccgtgacgtcgctcacgggcatcattaacaggtacgggctggacggcgtggacgtggactacgagcacttcgccgacggcgccgacgtgaatacgttcgtcgagtgcatcggccgcctcctgacacagctcaagcagacgatgcccaacatcgccacctccctgcgttcgagcgacgaggtagtggactagtactactaccatgcgctctggagccagtactccggcgtcatcgactacgtcaacttc

SEQ ID NO: 273465 - DNA, 467 bp, Zea mays
ctgacatctcagttgctgaacgcctgaaccgcaagtcatccatgacctcttctattccgaagctgcttctcctcctcttctttctcagccatcgctctcccattgctcgcgcaggcgatgatggcagctacaaggttctgtccatgggctctccgagaactgactccgtctgttcccagtccaaagcggttccttcgtcgtccgccggtgccgccacggtgcccttgcatcaccgtcacggcccatgctcgccgttgccgaccaagaagatgccgacgttggaggagacgctccaccgcgatcagctccgagctgcctacatccagcggaagttctcaggcggcggtggcgctggtggtgacgtccagcgatcggacgccaccgtgccgacggccctgggcacctccctgaacaagctggagtaactgattaacgtaagcctgggctccccgggcacgttccaaaac

SEQ ID NO: 273466 - DNA, 650 bp, Zea mays
cggacgcgtggataaaccagcaatcgcatattcgcttgcctttcttgccctacgccgccagcttcccacggagccaccaccctccacttctcaccactgccgtctccttcccaaacccggctgccgtctcctttgattccacggcctgccacgcagcagcagcaaaactcctagtcaacccttcaactcgcctactactcctactagccccttcttttcttcgatctccgcaatctacagctttgcttctcccggctcgagcggctagggtttcgggagtgcgcggtgagacggcatgacaacgcggggagctaagcgcgcggccacctccgaccccgccgcacccgatttaccaagtaagagagtaatggacggaccctcttttgatgttcacagggcggagtcttcccatcagcatgtgatggcaggacccgctagtttagatcctcggcgggcggaggctgctagcaaacatgtgagggcacttaatacccagtttgcaagctgggttcaattgcagctgcaaaatcatccagctgaactttgggaggacggccttaaggattacatatcacatgcttctgaaatcatggaaaaattcaaggatgttgtcaactggctaagggaaaatcaagcaggttcaatagttg

SEQ ID NO: 273467 - DNA, 1036 bp, Zea mays
agaatttctccaggactgctagagaacttgtaaaccgaatgcagaagattgatagcgattattatcctgagacactccaccaaatgtttgttgtgaacgctgggagtggatttaagtggatctggaacagcgtgaagggcttccttgacccaaagacttcatccaagattcatgtgcttggttcgaactaccagagcaggcttcttgaagtaatggattcgagtgagctgccagaattccttggcggttcatgcacatgtagtgacaagggtggttgtcttggatcgaacaaagggccgtggaatgatccttatatattgaagctgatccacaatttggaagctggatgcgtgagggaaatcaaacctgtttctgagggggaagaaagaaacagctcatcctttcggttggaacagatgaaatggcagggcttgctaagtgatacatcaaatgctgaatctggatctgatgttgatgattttggtgcatcatttgttcataaagtttctgactatggttgcttgactccagttcatgaggaagtaaagggcacagatcgtgtgacatacttcagctatgatgatcaaagccacccggatatggctcctgaatcttaccatggagcgcgacgagctactggaatggagcaccacaaaccaatggctgatttcagccaatattctgccaatagaaggcctggggacagtgctcttaatgtcaatggtacggccgctcaaagcggctgggaaaacgtggtgaagctagtggttacaactttggtcaagctcttctacttcatccggcttttcctctccacagccgagaggaggctcgagagcatccatcgccctgctccaccagcggccccagcagcggcagaggagccaagacctcgcgccatcagtgatgaagaggtgtgcgcctgcctgcagcgccttgacaatcctgagtcgatgtgcagtcacctcgccgccaaaccgccgcagatcccagagggccaaggactcattctgttgagctcggtccagcggattag

SEQ ID NO: 273468 - DNA, 740 bp, Zea mays
agtacttctagctctggagtatctacacatgttgggagtggtctatagagatctgaagcctgaaaatgttcttgtgcgcgatgatgggcacataatgctttcagactttgacctctcgctgagatgtgcagtctcacctacactcatcagaacatcagctttcgattctgatcccagaagagcaggtggttctttctgtgtacagcctgcttgcatcgaacctacttcagcttgtatccagcctgcgtgcttcctccccaaattcttcggtcagaagagcaagaagaagactcgaaaggcaaggtctgagctgggacataacgccggcaccctgcccgagcttgttgccgagccaacatcagctcggtcgatgtcatttgtcgggacccatgaatacttggcccctgaaatcatcaaaggcgaagggcacggaagcgctgtcgactggtggaccttcggcatcttcctgcatgagctgctgtacggcaagaccccgttcaaggggtcagggaaccgtgccaccctgttcaacgtggtaggccagcaactgaaatttccagagtcgccgtccacaagctactcgagcagagacctcatccgtgggctcttggtcaaggagccgcagagccgcctgggcgtgaagcggggagcgacagagataaagcagcatgccttcttcgagggtgtgaactgggctctcatccggtgcagcactcctcccgaggtcccgaggcctgttg

SEQ ID NO: 273469 - DNA, 1287 bp, Zea mays
cacaacacaacatctacgctgaaaagttatgttccattcgaatcatcaccgagaccggcgtcgacccgtcgaagctcccgtatctccgacggctcatgcgcgtgcttaccgtctccagcatcttggccaccacaggcacagacgagactgagactgagagcgacgacagtactgtttacaagctcactccggcgtcccgcctcctcgtaagcggcgcgggggcaccgacctcgtgcgacatatcgccgatgctggaccttctgatgcgccccactacgtcggtcgccacctacttcagcctggaagagtggttcaaggacgcgggcgccaccgccacgctcttcgaggtggcgcacggcatgtccccgtggagcttgacgaagaacgacgccctgtacaacaagaccttgaacgacgggtgcgcggcggacagcaacttcgccatggacacgctcctgagagagccccgggccgcgggtatattccgcgggctcggctcgctcgtcgacgtcggcggcggccacggcgccgctgcgatggccatcgctagggccttcccgcacatccggtgcagcgtgttggacctcgagcaggtggtcagcggggcacctgctgatggcacggtgaagttcatcgccggcgacatgttcgagtctatcccggctgcagattgtgtcttgcttaagtatgttctgcattgctgggacgacgaaagcagcgtcaagatactccggcagtgcaagagagcgatccctgcaagagacgccggagggaaagtggtgatcatgaacatggtggtcgggtacggttcgtcagataggtttgtcaaagagacgcaggtgatgtgcgacatgtggatgatgcggtacgttggggttgagcgggaggagcatgaatggaaaaggattttcctagaggctgggttcagcgattacagaatcacgccgacagcgctgggtttccaatcggtcatcgaggtcttcccctgaggaagaagcatatatatatatatatatatatatatatatatgatcacgctgtgtaggatgtgtcatgtgtgccctgtgcgtaaggaaaaatatataccattattaataagttattaataagacagacatgatgatgagcgtatgggcaaatatacaggagatgcataagaatgagaaagatttaacgttgtactactgccgtttggattttcacgattacccctgtttacaaggagtagttgtatggatgcaaacattatttaccagtatgcaataaagaatggaacattttcgctct

SEQ ID NO: 273470 - DNA, 435 bp, Zea mays
cccacgcgtccggccatttacaacgacaccaccatgtcgtctgtccaggaggagcttaataacacacaggacatgctccaaggttacgtggagctctacaattacagtctctcctacgtgaagaccatggcgatcgggtgcgcgatccagctaggcatccctagcgccatccaccgccgaggtggggcagcaacaatctcggacatcatcaccgagaccggcgtcgacccgtcgaagctcccgtatctccgacggctcatgcgcgtgcttaccgtctccagcatcttggccaccacaggcacagacgagactgagactgagagcgacgacagtactgtttacaagctcactccggcgtcccgcctcctcgtaagcggcgcgggggcaccgacctcgtgcgacatatcgccgatgctggaccttctgaagcgcccc

SEQ ID NO: 273471 - DNA, 458 bp, Zea mays
cgccggtccgaaactcacggggccatgcacgcgtccgaaccttctcggttacttgttcactaacaaggtcgggacggcatggcccttggagctgcgtaccatcactacctgcagctcgccggcgaccatggcaccgccacacacgcactgctcctcggcgtacttatcttcctcgtcatccgcctagtatccgcaaggcgaaccggcacaacctcagccaacaaacgtaagcagcaacagcggcttccgctcccgccttcgcccccgggcaagctgcccatcatcggccacctccacctcatcggcgccgagacccacatctcgatccgggacctggacgccaagcacgggcgcaacggcctgctgctcctccgcatcggcgccgtgcccaccctgttcgtgtcctcgcccagcgccgccgacgccgtcctgcgcacccaggaccacatcttcgcgtc

SEQ ID NO: 273472 - DNA, 641 bp, Zea mays
gcgaaacaaacactagtgcgtttgcgagagaaaccgagaaagagaagagctacagtctacagagtcactgaccgaccgccatggcatcgaggcagaacacgcgtgaggcgcgcgccgaggccgacgcgcggcgcgccgtggaggagctggctcgggcgcgggacgagcacctcgagaaggcggaggtgaacgcccgctcggccgcggacgagatcgcgcgctcccgcgccgaccgcggtgccgccggtggcggcggcatcctggagagcgtgcaggagggcgccaggtccttggccagcgccgtgggccgcaccttcggtggcgccaaggacgcgaccgtggacaagacctcgcagacggcgcacaccgcgggcgacaagctcggcgagtacagggactacaccgccgacaaggcccgggaggccaacgacagcgtctcgcgtaagacgggcgagacggcggaggccacccggaacaagctgggcgagtacaaggacagcgccgtggagaaggcgagggagaccaaggacgcggtggcgcagaagacgagcgagaccgcggaggcgaccaagaacaagctcggggagtacaaggacgcggcggccggcatagcgcgggaggccgcggactacaccgccggc

SEQ ID NO: 273473 - DNA, 731 bp, Zea mays
cggtccgtactatccgggggccacccacgcgtcggcacaagcgtccgcggacgcgtgggcggacccttggggagctgcactgcacgctcctcaaattcccacgccgcatcgccacccagtgccctgctcaccgccgaacggtttcaatggccgcaagcacagcggcgccatgctacgacgcgcccgagggcgtggacgtccgcgggcggtacgaccgggagttcgcgggcatcctcacccgcgacgcgctggacttcgtggccggcctgcagcgcgagttccgcgccgccgtccgctacgccatggagcagcggcgggaggcccagcgccggtacgacgccggcgagctgccgcggttcgacccggccacgacgctcgtgcgcgagggggactggacgtgcgcgcccgtgccgccggccgtggccgaccgcaccgtggagatcacgggccccgccgagccgcggaagatggtcatcaccgcgctcaactccggcgccaaggtcttcatggctgacttcgaggacgcgctgtcaccgacgtcggagaacctgatgcacgggcaggtgaacctgcgggacgccgtggatggcaccatcaacttccgcgacgcggctcgcgggcggacgtactagctcaacgaccgaaccgccaagctcgtcgtcgggccccgcggcaggcacctcgctgaggcgcagatcctcatcgaaggcgatccggccactggcggcctc

SEQ ID NO: 273474 - DNA, 507 bp, Zea mays
  unsure (1)..(507): unsure at all n locations
acgcaattcaccagtagtagtagttgtagcggcataactagctatggctaccaccatggcggctaacgacccgacgagcatccgcgtggttagccgccggctggtgaaggcctccgacgcttccatccagcctcatgtcatgtccctctccaacctcgacctctacgtctgcgactcacagctcggcacgctgtgcgtctaccccaacgccggcggcggcttcagcgcgcgcatccccagcctgttcgagtccctcttgccgtccttgctcaactacctctacccattcgccggccgcctcgtcaccaacccaagctccggcctccccgaactccactgccacaaccaaggcgcagagctcgtggtcggcgaggtcggcgtcgccctggggagcctcaactacggcgccaccaaggattccttcaagaagatggtgctcccgttccccagggacgtccttctgtcggtgcagctgctctccttcgcgtgcggnggcttctccgtcat

SEQ ID NO: 273475 - DNA, 520 bp, Zea mays
acgcctctaaagtcaaacgcagtattttttgatgaggtacattcattgacaacacaaacaggtaaagagggtgggtgggttgttgaacgtctcctaaatcagtttcctatcgaacgtgatggtgctggtcagcgtaaacgtgtctacatgataggagctacacacagaattgatatgatagatgatgctatgctacggcctggtagattcgggaagaaacattatgtacctatacctggtgctcgcgaaagggtttcaatattaaaggcactagccagacgcatacccgtttcatcaaccgttgatttggatgtgttggcacttcgagaagagtgcagcaatttcactggcgccgacctagcatcactggtggatgaggcagccatgttagctatggcagagagatggatgtacctcgatagcgggacatcaacgagtccatcttctctgattgaggcatcacactttgaagaagccttatcaaaggtgaagccatcaatatccaaaaagcaaaagagat

SEQ ID NO: 273476 - DNA, 862 bp, Zea mays
aacgcgtgggcggacgcgtgggccggcaccggccccccgcgacgctggtgccgcacatcgcgggcgacgcgttccagctgacggagtggtacacggtgcccaagggcgccatcgtgttcccgtccgtgtacgagtcgtcgttccaggggttcccggacgcggaggcgttcgacccggagcgcttcttctcggaggcgcggcgggaggacgtggcgtacaggcgcaacttcctggcattcggcgccgggccgcaccagtgcgtggggcagcggtacgcgctgaaccacctcgtcctgttcatggcgctgttcgtgtcggtggtggacttccggcgggagaggacgcccgggtgcgacgacccggtgtacatgcccaccatcgtgcccaaggacggctgctccgtgtacctcaagcagcgatgcgccaagttgccgtcgttctgagaatcctgagctgccttcttgtcctcttgcgctcctgcctctgtctctcggttccgctgccgcttcgtggttcttgcctgctccttcccacattttttttttcatttcgattccttggcgggggccatctccctcccgtggtgcttggtgttgttggtggtgtgatgatttatttgtaggttgtggtgttggcttgctcgtgcctcctccttctcaggccggccgggatggtccattcaattattttcttggcaaacaaaaacaaattgggtcgggttggactggccgctgatcggcgaggccaggcgataatagtaatattattattattattaattccttctagcatagtaccctgaatgaacagctgttgagtaaaaaaaaaaaaaagaaaaaaaaaaaaaagggcggccgctcta

SEQ ID NO: 273477 - DNA, 450 bp, Zea mays
gggtccgcccacgcgtccggagaaagacggagaacgaaaaggaggggggcaacgtcgccggcggtcggaggcaacggggatgattcggaaggaggcggacccggaaggacaggatgggtcttcttcgtcggccactgatgggggaggaggaagtggcagtggccgggagctggcagatgcgctggcgcggcgacgtttgtaccgggaggtgacgctggcgctgcactcagggttgcgcgacgccaaggcggacttctccttcctccgcgcgcgtgggctccgcagcctgctcggattccttcgctccaccgcctccgcggccgacgacgcgctgctgctccttttccgccactcccaatccatccccgatctccaagttattcctgttctctttcagaattcgttgcatcaaccaaagcaagatcctgttgtgacattggatcatatatt

SEQ ID NO: 273478 - DNA, 577 bp, Zea mays
aaacacttcgtcgctaaccggtgttggtttcctttgacgacactgtgtgtctactctcctcctcctccatccctaccgctaacaaccgggtaccaaaggccaggcaacctggttcccgtcggcaattgccctcggcgtcctcgcaccgctgctatggagtacaacgaatcgaaccgccaggtgctcgaggaattgcggctcatggaagcaaggctgtctgagaagttcgctggtcgttgcgacagcatagagcggcgcgtggaggagcggtgcgatgaactcaactcccacttcacgacgcgctgcgacaagatccaagatcaagtcgatgttgctgcactccgtggcgaggagcgtcttatcgccttggaggaaatgcgcaccgacatcgagcagtggcgccccgatctaatcaagcggatcgaggacgtggcgttggaggtggtgcgcgtcaacaagttcttcgagcgggaacgtcgagcggagcccgtcgacaagcccggcatcttcggcagctacacggcgccgcccctgcgtccacccgcaggcgcacctcccgctgctgggccgtacggcc

SEQ ID NO: 273479 - DNA, 560 bp, Zea mays
tatgttgaaagctgggacgccggcagggtaccgatctcggaattccagcgacgacctcacgcagtgcgtgcgcgactgggctgacctgatgagggtgggggaattgatgcgtaaccatctgggcgtcgacgagcctgcgtggaacccaatgccaagccagagagtgcttctttctccgccagactgctgctccgcgcgagaagagccaccacggagtctgcgtgactcgggacagtggagaaaatcagcggcacagcgtgggtctcgcgacctccagcgaacggtgagtcgagatccctaagtttcgatccactgtcccagtggatttgggactgcgatggaggagcagttcatcctccgcgtgccgccatccgtcgcagagcggatcgagcgcctcatgagtgaatcccccttctccatctacaagcatagatagggctcgctggacctcttcttctcagagggtggaagcatggcacatttatgatcggacatgagagctttcctgcatctcatttggatctacctgctgtggtggagtcatacaaaacatatgatga

SEQ ID NO: 273480 - DNA, 1139 bp, Zea mays
  unsure (1)..(1139): unsure at all n locations
ngcttgttacactaacaaggaacaactaggcccggctagcatttcaagcggcacgcacggttttaacctgcccagcgtgaaataatgctacctatttctctcgccggcgacgagcctccgcggaaaccagtgccaagccagaggtgcttctttctccgccagactgctgctccgcgcgagaagagccaccacggagtctgcgtgactcgggacagtggagaaaatcagcggcacagcgtgggtctcgcgacctccagcgaacgagatccctaagtttcgatccactgtcccagtggatttgggactgcgatggaggagcagttcatcctccgcgtgccgccatccgtcgcagagcggatcgagcgcctcatgaatgaatccgccgcctcctcctccaaccccgacgaggcctccctggacctctccttctcagaggatggaagaaatggcacatttatgatcggtaatgagagctttcctgcttctctcttggatctacctgctgtggtggagtcatacaaaacatatgatgattctgtactaattaaaactgctgatgttggtcagatgattatggtaagagaagaaaatgatcctgctccagaaggagtcgagtacaagcatgggcttactcctccaatgagggatgcacgcaggcgacgtttccgcagagaaccagacttgaacgcagagctggttaaccaagttgagaagcatcttatcagtatcatgcatggagtatctgtcaaccagaacgccagtgcgacaggaggcgaagaaggtggtgatcgtaagaaacctccagtagctcgtgcagccaagcagcctggtgttcaggagcccgccgcgaatggagaggaagctgatcctgagaggagcgacagtgatgattcagataactgaaatggaggacctggactgggtgcagcctcagtggtccaggcgagccatgccaaacttcgcaatttgaataaatcagaatgtatatatttgtttgtaacaaacaatgtgttcgttgttcgctgaagcatgtactatcacgttaaacatgatgtgacgctctcatgccaaccaagatgatgttactgcatctactagcaaaacagttataaataacaaaaaaaaaaaggcgaggccgt

SEQ ID NO: 273481 - DNA, 780 bp, Zea mays
agcagttccagtggtgagttcctcacatgatgaatctggtgcgagaagcctcattcctcctactcaagatcaccagcagaggacaggaagagatccttccatcacgtccacttcacaagaattgtggggttctctgtcgtcatacatgaggtcaaggcaacttggtccagtactagcaatggcactggtagctctcattatcctaatgcaggtgaccatcatagttctactaacaagacccccccaggtccaaatggatcctcatgggatctggacgggcagttcagggtacagcaaagaaagcatagagtgggtgcagaagcgcctcagcttactaagcgaggagatgcagctcgcggaggcacacatggagacgatgaggcgcgagtttgcctggctcaggtcttacctggagagactgcagaggacgcggggcagcacatgacggcggcgcgtgtacatggcacaggggcacgagttcgcgacgcgaattcggaggtgtatacaaataccatacaatacaacccggaggtggtgttcagtgtttcttctgttgttacagttggtacagatgcaaacagagagaggtggattgttgtttgcagaggtatttgccgtaaggcagaactgcaagatcccggtatagcgttcgatgtaaatagctggagcttccccattgcgctggggtgatgtacaatgtcagggacgagtcactgcgatcacgctacggcggctcacgcgttatgttatttataaatttctgactgaattttaacttct

SEQ ID NO: 273482 - DNA, 361 bp, Zea mays
cggtccgaatatccggggcccacccacgcgtccgcaaaagcgtccggttcacgcgtccatggagaacggcgtgctcaccgtcaccgtgcccaaggaggaggccaagaacccgcaggtcagggctgtcgagatctctggttgatcgatccgttcactgcatgcattacgagtgcccgagctgtactacaggtagtataacttttcgagattccctggtacgacatctgccatgcatatacaacctgtctatctgtccatcgttcgtgtatggcagtgttgtgcttttggtgtcaagtacgtctggccagtgttttgtgtctatgtgatgtgtaatgcatctgtgcttttctttgtgccgttg

SEQ ID NO: 273483 - DNA, 439 bp, Zea mays
  unsure (1)..(439): unsure at all n locations
cgagagtccaggtctcactcgcgaccgagagccacagagaaatgggggcccctgcccgtccctggcgccggcacgtcttcctcgtcgtgtcgctgcagctgctccttgtggcgccatggcaggacgagacggccgctcgagctctcaatttcaccaggcaggatttccccagggccttcgtctttggtgccggcacgtcagcttaccagtacgaaggggcaaccgatgaagacggaaggagcccaagcatatgggacaactttactcatgcaggtangatgccggacaagagcactggcgacctaagggcggacggctaccacaaatacaagggagacgtgcagctgatgagtgacactggcctggaggcctaccgcttctccatttcttggtccaggcttattccaagaggaagaggagccatcaacnccaagggcct

SEQ ID NO: 273484 - DNA, 966 bp, Zea mays
cagatcatgataattgactacaaattaacttacccaagtggtactgcaacagctgttcttataaatggattccacacaactcatggagatgcaacggcaaagcagcaagtgaatgggttcacaaaatactttgcaatcagcttcttttggagcttcttccagtggttttactcaggtggagacagctgtgggttttcacagtttcccacttttggacttagagcttggaaacaaacatttttcttcgatttcagtctaacatatgttggcgctgggatgatttgctctcacctcgttaatctatctctccttcttggtgcacttctctcatggggaataatgtggccactggtcagtgatttgaaaggggattggtatcctgcagatatgccagaaagcagcatgagaagcctgcaaggttacaaggccttcatctgcatagcgctcctcttgggcgatggtctttacaattttgttaaggttgttgcattcactgttaagagtctacttggcagatcaagactgaagaatgcaaagaaagaggaagacattccagtgcttgatgaaattcagcgcaatgagatttttacaagagacagtatccccacatggctagcctactctggatatcttgcactatcagctgttgctgtgtttgccattcccttgatgttccatgagatgaaatggtactatgttattatagcatacttattggccccggcattgggtttctgcaatgcctatggtgctggccttactgatatcaacatggcctacaattatggaaaggtcgcgctctttattcttgcggcctgggctgggaaggactctggtgttgtagctggcctagtgggttgtggtttggtgaaatcactggtgtcaatatccgctgatctgatgcatgacttcaagactggacatcttacattaacatcacctagatcaatgattattgctcaggct

SEQ ID NO: 273485 - DNA, 1050 bp, Zea mays
  unsure (1)..(1050): unsure at all n locations
cccacgcgtccgattccagctgctgatcttgatcctgcaccccgagccgtacacaagagctagtcggtagaacttgcaggagcggagcagaactaagtgcagagaacaggacatatggctacgccggcggtgaaggtttacgggtgggctatctcgccgttcgtatcgcgggctctgctggccctggaggaggccggcgtcgactacgagctcgtccccatgagccgccaggacggcgaccaccgccgcccggagcacctcgccaggaaccctttcgggaaggtgccggtgctcgaggatggcgacctcacgctcttcgaatcacgtgcgatcgcgaggcatgttctccggaagcacaagccggagctgctgggcggcggcaggctggagcagacggcgatggtggacgtgtggctggaggtggaggcccaccagctgagcccgccggcgatcgccatcgtggtggagtgcgtgttcgcgccgttcctgggccgcgagcgcaaccaggcggtggtggacgagaacgtggagaagctcaagaaggtgctggaggtgtacgaggcgcggctggccacgtgcacgtacctcgccggcgacttcctcagcctcgccgacctcagccccttcaccatcatgcactgcctcatggccaccgagtacgccgctctcgtccatgcgctcccgcacgtcagcgcctggtggcagggcctcgccgcgcgcccggcggccaacaaggtggcgcagttcatgccggtcggcgccggagcgcccaaggaacaggagtgacgatgaagcgatcgaagcgacttgtgttgttgtgcttgattagttaattggaaaccttctcactcatctagtccatcatggtgcctgcttttctttatactatttgtcttaattttgctgctttctccacggaataatagtagagatttggaaatgtaatgtattttatcaaaatatattggattttcaagcaatatagtatggttttagctgcaccctaccaaaaaaanaaannnnnnggggaaaaaaaaaaaaannnanaaa

SEQ ID NO: 273486 - DNA, 711 bp, Zea mays
gagacctcacgctcttcggtaagttgagttcatcatcatccatcgtcggcccgtgcccgtctattataattcggtttttgttttacaaattatatatattctctcgattttaaaattttcccttttgattctacgggttcttcatcttctaagcgcgtgatatgtaatgtaacattttcctagaatcacgtgcgatcgcgaggcatgttctccggaagcacaagccggagctgctgggcggcggcaggctggagcagacggcgatggtggacgtgtggctggaggtggaggcccaccagctgagcccgccggcgatcgccatcgtggtggagtgcgtgttcgcgcccggcggccaacaaggtggcgcagttcatgccggtcggcgccggagcgcccaaggaacaggagtgacgatgaagcgatcgaagcgacttgtgttgttgtgcttgattagttaattggaaaccttctcactcatctagtccatcatggtgcctgcttttccttatactatttgtcttaattttgctgctttctccacggaataatagtagagatttggaaatgtaatgtattttatcaaaatatattggattttcaaaaaaaaaaaaaaaaaaagagaaaaagaaaaaggaagaaaaaaaaaaagagaaaaggaaaaaaaaaggtgtaaaaaaaaaggggggggccgctctaaaggttccgggttta

SEQ ID NO: 273487 - DNA, 475 bp, Zea mays
aacgaacggaggctgcagagcagagcagagcagagcaagaagctttacagtgaacgagtgagtatgtgcggcatacttgctgtgctcgggtgcgccgacgaggccaagggcagcagcaagaggtcccgggtgctggagctgtcgcggcggctgaagcaccggggccccgactggagcggcctccggcaggtgggcgactgctacctctctcaccagcgcctcgccatcatcgacccggcctctggcgaccagcccctctacaacgaggaccagtcggtggtcgtcgccgtcaacggcgagatctacaaccacctggacctcaggagccgcctcgccggcgcaggccacagcttcaggaccggcagcgactgcgaggtcatcgcgcacctgtacgaggagcatggagaagagttcgtggacatgctggacggcgtcctctccttcgtgctgctggacactcgccatggcgaccgcg

SEQ ID NO: 273488 - DNA, 485 bp, Zea mays
cggacgcgtggcgatcagactagcgagccaagccaccgacggccgacgtcgagcctccgcggccgagcctccgcctagcaccaactccgtcgtcgatcgtcctatgcgaccacgcccccgtccgccttccgtctcctgcctccactgagtcgcgggcgcgacatcggggaacgccaaggctgagcttcgcccatacgcctaccgccctgttatgccccgaaccgccgtgctgaggtccgcccaggccgggccaggagcttctcccggcagacccacccccgcccaacggagctccatgcctccgcccagggccattgtgcgagctacgccccacgctcctgtccagtgccctggccacttagatggttctgctcagtcatggtattggaagtgtaggttctcttgtggtaattgctttaattgtggattagcgggcattgtgaatttctagggaagaatatcactagattttgaggagaatttac

SEQ ID NO: 273489 - DNA, 480 bp, Zea mays
cccacgcgtacgaaagaaagaaagaaaaaaaaactaggcattctgcttgcttgcttggggcgctctagtgctcgcgtgctgcgcctgcaccggtcgcgcacagcctgggaagaggcgagctgaggtctgaggaagccgagaagccgggctcagcgtgcgtacagggacagagacggcaagccggagcgtcgatccgttggtgcaagcaggaccggaggatcactcactccgagccatgctgcagcacggcgaggagaagaaggggaaggtgaagaaggggtggctggcggtgcgcgtcggggcggcggagggcgacggctgcggcagcggcggctcccagcagcgcttcgtcatccccatcgcgtacctgtaccacccgcagttccggcgcctgctggaggccgcgcgcgacgcctacggctacgactactccgcggggccgctgcgcctgccctgctccgccgacgagttcctccgcct

SEQ ID NO: 273490 - DNA, 1207 bp, Zea mays
cccggttcactcccttcctcctcctatagttggcttctcgccaccctctgctttcgatcagctccttctcccctccccgtttccctctccaactccaatccatggcctccacggatcgctccacgccggcggaggacgagcaacagcagaagcgcccgtctctcttctcgccgtaccagatgccccgcttccgcctcgcccaccgggtggtgctggcgccgatgaccaggtgcagggcgcccgacgcggtcccaggccccgcgctcgcggagtactacgcgcagcggtccacggagggcggcttgctcatctccgagggcaccatcatctcgcccgccggccctgggttcccttcgtgtccctgggatatacaatcaagagcagactgatgcatggagaaaggtggttgatgctgttcatgccaagggagccatctttttctgccaactatggcatgtaggccgagcttctcaccaagtatatcagccgggtgctgctgctccgatatcctcaactgataagccaatatcatcaagatggaggatactgatgcccgatggatcctatggcaagtatccaactccgaggcgcctagccacatccgagataccagaaattgttgagcaataccgtcaagcagccataaacgccatcaaagcaggtttcgatggcatcgagatccatggcgcccatggctacctcatcgatcagttcctcaagggcggtatcaacgaccggactgacgagtacggtggctcactctccaaccgctgccggttcctcctggaggtgacccgagccgtggtctccgcgataggggcagaccgggtggcggtccgggtgtcaccggccatcgaccacctcgacgcgtacgactccaacccgctgcagctcggcctggccgtagtggaccgcctcaacgctctccaggaggagacccggcggctggcctacctgcacgtgacgcagccacggtacacggcgtacgggcagacggagtccggccagcacgggagcgccgacgaggagagccggctgatgcgcgccctgcggggcgcctaccgcggcacgtgcatgtgcagcggtcggtacacgcgcgagctcggcgtggaggccgtccagtcgtgggacgccgacctggtgtcctacggccggctgttcatcgctaacccggacctggtggagcggttccggcgcgacgccccgc

SEQ ID NO: 273491 - DNA, 658 bp, Zea mays
  unsure (1)..(658): unsure at all n locations
ttcgctctaaatggccgtgttccgttgccggagggatccatgggagggccatgggattacaccaatgcggcgccactgattcggtacaccgcaaacaagggctaccgaatccatggatgggagcttggtaatgaactcagtggcactggagtcggagctcgagttggtgcggaacaatacggtgcagatgtgatcgccctaaaaacactagtcgacgacatatacgcaagccatccatcgaaaccattggtgcttgctcctggaggattctttgaccaagcctggtttgcccaacttattgtcaggaccaggccgaatctactggatgtgatcactcaccacatttacaatttagggccaggaagggacacacatctgattgacaagatcctcaatccatcagtcctcgacgggatgagaagcacattcagcagtcttcaggggctactgaaatccgcaggaacttcgactgtcgcatgggttggcgaagctggaggcgcttacaacagcggccggcacctagtcactgatgcatctgtgttcagcttctggtttttagatcagcttgggatgtcagcanagtatgacacgaagagctactgcagacagagtttgattggtggcaactacggcctgcctaaatacacaacgtttcaac

SEQ ID NO: 273492 - DNA, 1067 bp, Zea mays
ggacgtgggccactcttcctccccttctctccggctcccccgaggcccccgacagcgaactcgggactcgccaaccgagaaggaagaactagtcgcgaggtgaagaggagaacctgaggtggtcccgaatcagagacggaagaaggtgggttcaggagcaagccagcctgccgccgccatgaggcgcacctcgaagaaatcgtcgtcgtctacggcgaccgccagcgctggccctactaaagcagtttccaaggaagtagaacggattgatcaatttttctatacttacgctgataactcatctggcatgattgacccagaaggcattgaaacactctgttctcaccttgaagttccccacactgatgttaggattctaatgttagcatggaaaatgggctgtgataagcaaggttattttaccttggatgaatggagagctggtttgaaagctcttcgagcagacagcatcagtaaactgaagaaagcatttcctgaactggttcaagaggttacaaggccgtcaaatttccaggatttctacatatatgcatttcgttattgcctcacagaggataagaagaagtgtatagaaataccagttgcttgtgagttgctgaatctagtattaggcttgcagttccgccctcaggttgacaagcttagtaattacctcaagtaccaaaatgactacaaggtgataaacatggatcagtggatgggatttatgcggttctgtaatgagataaacttcccatcacttgccaattatgattcagaccttgcttggcctttgattctagacaattttgttgagtggctaagagaaaataaaagctagatcttctattcatgtggtggtgaagttgtcattcaaaatgtaatattcaagaatgtaggtgactatatatatcattgtttacatttgtaagaccattttttgcccacctacttgtatatactgtcagtaatgcaaacttaggctccaataaacctactatttcacctcttattttaatctccactctgtaaatagtgtacagtgcaaaacaatattttgtacgatc

SEQ ID NO: 273493 - DNA, 441 bp, Zea mays
atgggctgtgataagcaaggttattttaccttggtatgcattacatactgctatgcaagtgttcaatgaagaacctgctttagctctaatagtaaaaatttgctctatgctttcaagtgttgactaatacatgtttttatgttatcacgatgaatggagaactggcttgaaagctcttcgagctgacagtattagtaaactgaagaaagcatttccagaactggtccaagaggttacaaggccatccaatttccaggatttctacatatatgcatttcgttattgcctcacagaggataagaagaaatgtatagaaataccagttgcttgtgagttgctgaatctagtattaggcttgcagttccgccctcaggttgacaagcttaataattacctcatgtaccaaaatgactacaaggtgataacaatggaccagtggat

SEQ ID NO: 273494 - DNA, 1352 bp, Zea mays
gcgtccgcccacgcgtccgccgaatcctaaggccgccggccgccgccgcccccgcctgctcccgttggacacgagtttggagttaggaaaccaaccctgcatctggattctgtccgtctgtgctgcttcgaataagccttgcatcgcggtgactggggatataactatgccgaaggacaggagctcccgcgtttcctcttatgagagccgccgggctggtgcctccccatacttctcatcgtctcatggacagagcagttcttgtcgccggtccgaggagtcttgtggggcagcagcggcggcagcagcaaagcaagctgcagagtgggaggatgttcggtgcccggtgtgcatggaccacccgcacaacgccgtcctgctggtctgctcctcgcacgagaagggctgccgccccttcatgtgcgacaccagctcgcggcactcgaactgctatgaccagtaccggaaggcatccaaggattcaaggacagagtgcagcgagtgccagcagcaggttcagctctcgtgcccactgtgccgtgggccggtcagcgattgcatcaaggactacagcgcgcggaggttcatgaacaccaaggtccggtcgtgcaccacggagtcgtgcgagttcaggggcgcctaccaggagctgaggaagcatgctagggtggagcatccaacagcgaggccgatggaggtagaccctgaacggcagcgggactggcgccggatggagcagcagcgggaccttggagacttgatgagcatgctgcgttcagggttcaacgccaacgttgaggacaacagcggcgggcttggagacaccgaagaagggggagaggaagctgaaatgactccggcctccataaccatggtcttcatcatgccatctagaggctcaatcatgcagtacctatcggaacgcagcagaacgatcattctggtcagtcggaggcgagcaagcagcggcagcggtggcgacgctgaggccacagcaccagacagcgaggaaggtgatgaccctatgttgccatcggcagaggcgtctgctggttcgcagcgttcttccgaagaagaggctgacggtgaccacgcccaatgacagaagtcagctagcaggaggtgtgccatggcccatggcatcttcttggcctgaagatcccgacctgcttggtatgtgatgctgtatgctgggaagaaaacatggatgcaggtgccatcaagcaatggaaaggaaaaaaaaacaattgagtggttgcatctatcttgtctgaatggatttctttttccatgcgttgtaattctctctcatatattatcatatgaaatagattcggccgtatttgcactgc

SEQ ID NO: 273495 - DNA, 602 bp, Zea mays
  unsure (1)..(602): unsure at all n locations
cattgtccacacaacgtacgatgtcttgcncaancangcagnacctancggaacgcagcagaacgagcgttcnggacagtcggaggcgagcaagcagcagcagcggtggcgacgccgaagccacggctccagacagcgaggaaggtgatgaccctatgccatcggcagaggcatctgcgcgtgcacagcattcttccgaacaagaggaggctgacggtgaccctgcccaatgacgtaagtcagctggcaagaggtgtgccatggcatcttcttagcctgaagatcccgaccaacatggcaacatggtatgtggcgaagaaaaacatggatgcaggtgccaccaaggcgtagccaggacaatctgtctacgcaggaaaatcgaggggaatcagcatcgcgcgaaggcttcagaaacgtggtggcctctagtaccaattctaatgtttccgcggggttctgtggcaatggagagagagatacaattgggtggtagctatcttgtctgaatggatttcattttccttgcattgtaattctctaatacacattatcatatgaaatagattcggctgtatttgcacaaaaaataaaaaaaagaaaaa

SEQ ID NO: 273496 - DNA, 298 bp, Zea mays
ccgtatcgttcccatcctcctctcttttccccaccgccccctttcttggcgtctacccggcgcgaccaggaccgaatcctaaggccgccggccgccgccgccgccgcctactcccgttggacacgagtttggagtaaagaaaccaaccctgcatctgcatgctgtctgtctgtgctgctttgctttggattccagaacaaaattcgaataagccttgcatctcgctgacttgggatataactatgccgaaggacaggagctcccgcgtttcctcttacgagagccgccgggctggtgc

SEQ ID NO: 273497 - DNA, 337 bp, Zea mays
ggggccacgcacgcgtccgcacgggacacggagagaccgcgcagcagcagagctagttcgttcaggcagctttatttgagcagacatatataggagaagatccgaggagaaagatattagcttgctaagagatctcgccatggcgtccatgatgggaggagacttggtggaggcgtacgtgctcaagaacgcgtgcaaggagaagctccggcgcatggaggcggcggcggcggcggccgacgataagacgagcaagcagggccgcctcgcggagaagaaggtctcaggcagaggacgacgcctgcttgggctcctgaagaagaaggtgcacccaaaa

SEQ ID NO: 273498 - DNA, 567 bp, Zea mays
cccacttcggtgagagagagacagagagatcatcgatcgatcgatcgacgaccatggcgaggcaacgacaagttgcttccatgcttgcagctgctctgctcgttgcaacgacgttcgcgtccattcctacaaccgtgcactccatcggcgtctgctacggcacgctgggcaacaacctgccgtccagcagcgacgtggtgcagctctacaggtccaagggcatcaaaggcatgcgcatctactcccccgacgccaaagccctcgccgccctgcgcaactccggcatcgcgctcatcctcgacaccggcaacggcggcggcgtcctgggccagctcgccaggagcgcctcgttcgcggactcgtgggtgcagagcaacgtgcggccctactaccccgccgtcggcatcaagtacgtcgcggtgggcaacgaggtgcagggcgacgacacgcgcagcctcctcccggcgatgcgcaacctggacgccgccctggcgcgcgccggcttcccgggcatcaagtgctccacgtcggtgcgcttcgacgtggtcgccaactcgttcacgccct

SEQ ID NO: 273499 - DNA, 369 bp, Zea mays
aggacctaccgtcgtttgagtcaccataaaaaagcaatgtttagtattcaaattcaacgcgcgctggcgcgcgccattgactagtatttatatagtgggctctccgtaagtttctgtgagccgggtagctacacagtacgcacaccgagcccggctgcagcgcggttccagccactggtgccacgtggtttgtgctcttgtgggcacactggcctccacccatgctctctcacgtctccccatccgcagcagaggcacacagtacagattcggcccatcgttttagagccacaccatggctaggaagtgctcacactgtggcaactgcggccacaactccaggacctgcgggagagaaaccatgctctg

SEQ ID NO: 273500 - DNA, 536 bp, Zea mays
cgtccgcaccttacccctgactcgtgcgtctgtttctcctgcctgggtctggggttgtccagttgccattgccaccaccaaccgagcctagagggaaagaaatcttggaaaggtgtggtgtgacccctgctgctgctggtgccagatttgctcgcgttcgaggcctccttttgtttccgctagattctgccaagatcagcgattccctccgccagcagaatcgctcgctctctttccatcgagcgtgcattcttttctgctgctgagtcgggcaggatcggcgtaaccgctccaaaccccagacctttgtccagcagcctcgcgccctcgccgcgtcggtatggtttttccttgccccccgtcctagttgctctgttcgcttgatttcctggtcgaggttctcgtgcgctgttccaatttcgagctaatcgtcctgctcctgcctaggattaatccccttctgttcttggagttcacacacatcccgtgcgcgcggattgctggtgcagcagtcgtcggcggcgcgtgcattttgc

SEQ ID NO: 273501 - DNA, 599 bp, Zea mays
  unsure (1)..(599): unsure at all n locations
cccactttttccggctgttcgaagctttcagccgagcaccatcgtcacagtcagtagccaagcatatttctttctccgagtgatttgcgctgagcgatcagttcatccagagcgagcggagctgagctgagctgagcgagcttgcgttgcttgagagaccctgccatggcttcccaccaggacaaggctagctaccaggccggcgagaccaaggcccgcaccgaggagaagaccgggcaggcggtgggggcgaccaaggacacggcgcacacgccaaggaccgggcggcggacgcggcggggcacgcggcgggcaagggccaggacgccaaggaggccaccaagcagaaggcgtccgacaccggcagctacctgggcaagaagaccgacgaggccaagcacaaggccggcgagacgacggaggccaccaagcagaaggccggcgagacgacggaggccgccaagcagaaggccggcgagacgacggaggccgccaggcagaaggccgccgacacgacggaggccgtcaagcagaaggcagccgacgccatggaggccgncagcagaaggccgncgaggcccggcagtacgccaaggaca

SEQ ID NO: 273502 - DNA, 1043 bp, Zea mays
cccacgcgaccgcagacacgtgggtgccgcaagagatacaatagcggtatccaagcatatttctttctccgactccgagtgatttgcgctgaacgatcagtttccagagcgagcggagctgagcgagcttgcgttgcttgagagaccctgccatggcttcccaccaggacaaggctagctaccaggccggcgagaccaaggcccgcaccgaggagaagaccgggcaggcggtgggggcgaccaaggacacggcgcagcacgccaaggaccgggcggcggacgcggcggggcacgcggcgggcaagggccaggacgccaaggaggccaccaagcagaaggcgtccgacaccggcggctacctgggaaagaagaccgacgaggccaagcacaaggccggcgagacgacggaggccaccaagcagaaggccagcgagacgacggaggccgccaagcagaaggccggcgagacgacggaggccgccaggcagaaggcagccgacgccatggaggcagccaagcagaaggccgccgaggccgggcagtacgccaaggacaccgccgtctccggcaaggacaagtccagcggcgtcatccagcaggccactgagcaggtgaagagcgcggcggcgggcgccaaggacgcggtgatgagcacgctggggatgggcggggacgacaagcagggcgacgccaacaccaacaccaacaaggactcctctaccatcaccagggatcactagacgcgtgtatgcacacgcacttggtccgatcctgtcgtccgtgaccctgtttgcttgttcgcgagtccagtatgggtttgtgcatgttttcagtgtcatggtttccttttctacgaatttggcgttgtaagtttgattcgcaggtacgttgctgtgttttttctgcgtcatcaggtgtctgtaaacgagtcgggcgggtttgagtgtcctttgttgtgataataaagttggtaaatcgtaattaatatatatcatgcgactgtcatgctatggcctagtatgtgtttggtaattttcataaaa

SEQ ID NO: 273503 - DNA, 465 bp, Zea mays
caccccgctcgtctatatccgcctctaaaccctagctcttccattcttccccctccggcgccgcctcccccagacacttcgccgccggcaagatgggccgcgtgattcgcgctcagcgcaagggtgcggggtccgtgttcaagtcccatacccatcaccgcaagggccctgcccggttccggtccctcgacttcggcgagcgcaacgggtacctgaagggcgtggtcaccgacgtcatccacgacccgggccgcggcgcgccgctggccaaggtcaccttccgccatccattccggtacaagcaccagaaggagctgttcgtggctgctgagggcatgtacactggccagttcgtttactgcggacgccgtgctacactctccattggcaacgtcctgccgctcagggggatccctgagggtgccgttgtctgcaacgttgagcaccacgtcggggatcgcggtg

SEQ ID NO: 273504 - DNA, 462 bp, Zea mays
ggggccagcccgcgtccgcatcccattcccatctccgccgccgccgccccttcctcctccagagtcgcgcctcttcctcctcctctccagtcgcgcggtcgcgccgtcccattgcgccccttcctcctcgcagtcacggccgcgcggcacgtgctccgcttcgccgtcgccgtcgccgttgccgttgccgtcgccgccgccaagtaaagagagactgggaagcgcagtcgacgggggcgtggtgaggagggagttactcggaggaaggaaggaaggaagggggactgcggccggcggcggactaccatgtcgtctctgggaacttccaaggggatcctggagatcgccaagttcggcgtctacgtctccgtgcccgtcgcactcacctacctcgtcgccaccgactccaagaccctcaagaagctcatgggcctccgcccttacgtggtttacccgcctgaa

SEQ ID NO: 273505 - DNA, 487 bp, Zea mays
ccacgcgaccgcacacgcgtccgcccacgcgtccgcccacgcgtgtccgcccacgcgtccgggcgattgttagtgcatttggcccattggctgcataccgctttctttttaacaatgagctcggtggaccctgtgcatttcttgagtacgccgaccgctccgttacttctaaggcatgtgctggcctcaatgggatgatgcttggtggacgtgtactgactgctgtgcatgtgtttcctaatcctcatgtggaggctgctaatgaggcttccccattttatggtattcctgacaatgctaaattgcttctgaaagaaccaacaaaggtcctgcagctaaaaaatgtgtttgaacgagaagagtatatgctactttcaaaatctgagctggaagaaacattgggagatgtacgtgttgaatgttcggggtttggagcagtcaaatctgtaaatgtagttgagtatcctgctgctggtgtcagtgctgc

SEQ ID NO: 273506 - DNA, 386 bp, Zea mays
gcctttcgctcgacaagctcatcaaagccgccgccgccgccgccgtcgcctcagctcgctccggctgcctctgcctcccctgcctctgaggatttgcttggggagagacttattatgagattcgcgggttggtacctgaagatcgcggcggtaggggcctccattggcgccgccatggagctcttcatgatccacacgggcttctacgagaaggtaactgtcttggagtcagaaaaacgagcttgggaaagcagtccagaggcccaagcaatgatagaagctctcaatccatggcgcatgcatgatgaacacgaacaacagaagtagtcaagatttatgtgtcttgtcgagtgtctgtgcccccccatccgtagacccatgaatga

SEQ ID NO: 273507 - DNA, 710 bp, Zea mays
cggacacgtggcgagggtacatgacgcggttcttcctatcgcggcaggtgaccaggacctctatcccctccttgatggaggtcggggactgggatggaggccagggactcgacggcggtgggcctggaggtggcggcaaaggcctcggcgtcgacggccgcggcgaattgaagaaatcccaattattcttgaggaagataaaatccagttccgtcatctactgtgtggagattggagaaatagcacatggatcaaagccatcaagttttttggcagcattgtttgcttacttcatggaggatgccactgttcctaaatatcagtgtcctcaaaactttcaccatctagaaatcttcttgggactaatgctggcagccatatctcaacacttgatagattgtatttctgggagagcagctttatgatgaagccaaggccagcagtgccatctgcagcaagtacggtgggacatgtaggaagctaagacttcatgaatcaagaggggtgaatcaaattgataacgattttacccgtgcggcaagggaaagatgtcagtatcactgcatcctccaagatgatcggatatgctcttcaggacccatcaataagagagatggctgagcaaattgcaagtgaccctgtgttcaaccagatggttgaacagcttcagaaaagtgctcagagcatcttgggaatgcccttatgatcct

SEQ ID NO: 273508 - DNA, 324 bp, Zea mays
atcacgaaaggaccggatcttggtgagctcgagggtacatgacgcggttcttcctatcgcggcaggtgaccaggacctctatcccctccttgatggaggtcggggactgggatggaggccagggactcgacggcggtgggcctggaggtggcggcaaaggcctcggcgtcgacggccgcggcggtgcgcatttctcggctcgttcattcttgtgccctccttcgattacttcatttcgtcgcgtcccaaatcggtcgatggaaaatggaatctcgatggcttttgttaaatctggattgctatgcatgtctagcgatgcacttg

SEQ ID NO: 273509 - DNA, 256 bp, Zea mays
ggagagggagtgttttgttagagaagcgctagacagaaatcgtgtgaatttttttcatactattggtttcattccattgtgattactttttttactttagcttcttaatcttcactggacattcttcatgtggatgtagaattgaagaaatcccaattattcttgaggaagataaaatccagttccgtcatctactgtgtggagattggagaaataggttagatatcaagcaaatatctttttgttcatgactatt

SEQ ID NO: 273510 - DNA, 824 bp, Zea mays
cggaatttccggggggatccacccacggggcgcctcctatccttgcacgcacacgcaaacgcatcccatcctgtcctcgcgttactactagttagttagagagacagagaggatcgatctgctggcggcgtctaagctggagaaaggcggcgccaccgccgagggcgacgagataggcatcgacccagcggcggagactccggagcagcgcaacaagttcctggtcctccgcctgtacgaggcgctcaacgcccgggaccacgccgccgtgcagtcgctgctggcgcccgacctggagtggtggttccatggcccgcccaagcaccagcagcacatgatgcgcctcctgacaaccaccaccaccaccaccaccggcagcttccgcttcgtgccccgctccgtggacgccctcgccgcctcgtccggcaccgtgatcgccgagggccacgagaggggttgctactgggtgcacgcctggaccgtgggacccgatggggtgatcacccagctccgtgagtacttcaacaccgacctcaccgtcacccgcctcgccgccgccgtcgccgccaagtgcgtctggcagagccgccgccccgacagcgccaccaactccctgccgggactcctgctcgccctctgatcactctgagggataaattaaataccatctctatctatatactacgtatcatccttgtcgtcgtcagtcagtcagtgcaaccgtgtgcatgtatctatctatgtatctacgtattgtatttgtatcccatccatggccgtatgccactattatatatatacagtattacagtatatctttgacc

SEQ ID NO: 273511 - DNA, 864 bp, Zea mays
tgcaattgcagtcaactcctgaaagttttcagattaatctgctgaggctgagggctgtgcagagccaattccaacaggtgatcgtgatcgccacaagcatgctcgtcctgcgccaagttctgatgagcgagaactcgagggccactcctctggaactggaaaatgccatctcagaactcgtcaaggctctcgcggacattctgcacagctcacccgattccggcacggaagagattgtgcaggcgatggtcaatgcatcagcctcagttggctcaccatcagaggagaaggttcaggccaggatgcagatgatcacccgggtgttcctcaagagcctccagcctggtgacgtggtcttcaagaaggtatcccgtgcggtctactgcgccttccgtggcatcatcttaggtggcagtggtcccaagggccagaagctggcggacgcggcattgcgccgcatcggcgccaccaaggttgtcgacagggtgttgaaggctgctgaggtgctgatcaaggtggcaacggtatcagagaaggtccacggtccctggtacaaagctctgatagtctgatgtgagcgtgaatgtgaatggtttggcttttgtgaatacagacagtgaaagtgtaaattccttgttccactgggtgggatgggagatatggtgttgtacagcaatttatagttgttggtcagtaggcagttcaggatgtgaagaattctggtgagctgggcgaatatggatgctctttcaccaggatttagtcaggctcgatggatggatgctaaaacgcgtctggaaatgtaaattgtggcaccttgtttgattttcgaactgaaataatgtaaataattgattgcccgtt

SEQ ID NO: 273512 - DNA, 851 bp, Zea mays
cccacgcgtccgcccacgcgtccgcccacgcgtccgcccacgcgtccgcccacgcgtcacgtgactcatccccctgtgctctcctctcgtggccttgtttcctggcggcgacggctggtcgagcggcgccgcccttggctaggtcttcgctgggtccttccccggcgacgagcgtccatctggggtcgactgaactgagcaggcagtaggaagagacactatgttgttcttctcctacttcaaggagctggtggggaaggaggtgacagtggaactcaagaatgacttggcgatccgcgggacgctccactcggttgaccagtacctcaacatcaagctggaaaacacccgcgttgtcgaccaggacaagtatccccacatgctttcagtgcggaactgcttcatcaggggctcggtggtgcggtacgtgctgctcccgcaggacggcgtggacgtggacatcctgcacgacgccaccaggagggaggcgcgcggaggctgatcggcatcggcatcggcccccctcacctgtgctgcttctcccccggggaggagattgatctgccttgccctgatctcgtctggttgtacgaaacatatgctgatctgagtggccccaactcccccagcacacacttgatccaccacccacccagctccctgcctggtacttgcatgttccttgctgtgtgtgtgtgtgttcagcacacacttgatccaccacccacccagctccctgcctggtacttgcatgttccttgctgtgtgtgtgtgtgttcagcacacacttgatccaccacccacccagctccctgcctggtacttgcatgttccttggctgttgtgtgtgt

SEQ ID NO: 273513 - DNA, 522 bp, Zea mays
agcctttactctagcatgccgctggacccacaacggcttccaaaatcatctgtgtttgctgtgccaaactatgctgattccatgatgcatgctcgtaatcataacctgcttgcttcactgggtggtactactacacagcttcctgcaacatcccgcataggctcaatgatgcctgaaagatcgtattatgatccttccagcgttgatgggaatgaaaacgctggttcacctgcttactcaaaaaagtaccacagctcacccgatatgtctggaataatcgccgcaagtagagctgcactgttgaatgaagcaaagttgggtgctgccattggaccacagtcatacctcagcaggctggcggcagaaagatctcaatatgcaagctcaacagccaggcccgcggctccattagcatttgacgagctttcacctcctaagctccagagtgatatcttctcggcgcagtcaagcatgagaccaagtgctagatccctttgggctaagcaaccatttgagcaattg

SEQ ID NO: 273514 - DNA, 618 bp, Zea mays
  unsure (1)..(618): unsure at all n locations
ccacgatcgataaagctaattaagctgctactgctacgctagcctcgatcgatcaagcaagcagctcacagacccaccggcccacccacccacccacatggcggcgtcccgttccgctctgatcacgctgctcgtccttgtgagctccgtcgcggcggcctcggcgaccacgttcaccgtcggcgacagtagcggctggagtcgtagcgtcaactacgacaactgggccagtggcaagaccttcacggatggagatcagctagtgttcaacttcgccaccgggaaccaccacctcgtggacgtggacaagagcggatacgacggctgctccaccaccaacgccgccaacacaatccaaaaccgcccggccaccgtcaacctcacctccggcacccactactacatctgcggcttcaccggccactgcagcgccgggatgaagctcgctgtcaccgtcggctccggctccggctccgggtcncccacccccggcggcggctcgcccagcacacccacaccaaccaccccgagcgcccccacccccgacactccggccagcgcgtccgtgcgcctcacggccggcccagcgctcgccgtggccgccaccgtgctcgtcgc

SEQ ID NO: 273515 - DNA, 555 bp, Zea mays
caacccttgtgacgttattgcccgctcttcccttgccaacccaacccattgcatttgcaagcccttttacattgcagagcgccagagcctcgctcgctctcggaacagagctaggcagctaacagacgaagaagaagcaagccaagcagaattgagagagaggcgaggacgtggcgacgacggcagccgcgatggcgacgacgacggacctggggttcgaggcgacggagctccgcctgggcctgcccggcgggggaggtggaggggagccggcgctgggcggcgaggggaggagctcttcctccgcctccggcaagaggggcttcgccgagaccatcgacctgaagctgaagctggagccagcggccgtcgtggaggcggaggaggaggaggaggaccacggcgttgctgttgcccttgagaaggaggaggaggccgggaagatgaagcggtccccgagccagagcagcgtcgccgccgccgccgtcggcgtgctggctgaccccggcgagaagccgcgcgcccgcaaggctcaggtgggtgggatggccaccg

SEQ ID NO: 273516 - DNA, 821 bp, Zea mays
ttcctttcgtccgagttcgagcaagaggttgctatcctgtgtagagtgaggcaccctcaccttgtaactctgttgggagcttgctcagaggtgtctacacttgtatatgagttcttatcaaatggaagccttgaagactttctcatgtgtgcagaaaaaaggcagactctaccatggcaaattcgtgtgcggataatttctgagatctgttcagcactgacctttctacacaagaataaaccgcacccagttgttcatggagatctgaaacctgccaacatccttcttgatgtgaatttagtcagtaagcttagtgacttcggtatctctcgccacctgatccagtccagcagcaacaacaccaccatgtatcacaccatgcatcctatgggaacctttcagtacatggacccagaattttttgccactggagagctcacatgtcagtccgatatctattcttttgggattgtggtcttgcgccttttgacaggaaggcctcctgatggcataaagaagattgtggaggatgccatggagaaaggcgacctgaactcagtagttgataccttggcaggagactggcctgctttgcacgtccagcagttagcactccttgctcttagttgcacagagatgagccggaggcaccgtcctgatctttcagccgtggtgtgggcagtggatgaggcgatgaaggatgctacaacagtaccttcagcctcatcttctagaccagtgtcggatgaaaataacacaccgtcatatttcatttgccctatatctcatgatgtcatgagcgatccacgtatcgcagctga

SEQ ID NO: 273517 - DNA, 405 bp, Zea mays
agtgtcggtgtgcagtgtgttgtcatctccatctccagctccagcgccgccttgctctgtgtgcttccgcccgctctgtgttgctattgctaaactagtgtgttctgtcgctatgggctccctggccaccgcggacgggccgttgccgccgctcaagtaccctcaggctcgccgggacgaagacatcgtcgacgactaccacggcgtcctcgtgccggacccttacagatggatggagcaggtggattcgaaggaggtgaaggagttcgtggacgcgcaggcggccgtgaccagcgccgtgctgtccagctgcgaccaccgcgggcgcctgcgcgggcagctcaccgcgctcttcgaccacccgcgcttccgcgcgcccttcaaagcgccgggcagctacttcta

SEQ ID NO: 273518 - DNA, 415 bp, Zea mays
cccgtccgctggctctgcatatcccgcgcccgactcccgttgctgcgtgcggcggcccgactagtcgcgccgcgctgcgcttggcttgattgaaccggccgggatgggggtgttggaagacctcgtggcgagagcgggcgggtgcgcggtcatcgacggcggcttcgccacgcagctagaggcgctcggcgccgacatcaacgacccgctctggagcgccgcttgcctcatcaccaggccgcacctcgtcaaggaggttcatatgcagtatcttgaagctggtgcggacgtcatcatttcatcatcttaccaggcaacaatcccgggtttcatagctagaggaatgtctgtcgctgaggcagaagatttactgcgaacaagtgttaaactggccaatgaagctcgagatgaattt

SEQ ID NO: 273519 - DNA, 401 bp, Zea mays
agacgacgattcatccatcttaaagcaagcagagacatggagtcgtcgccgctgctgcagctgccggcggcacgcgtggaggctctgagcctcagcggcctctccgccatcccgcccgagtacgtccgccccgccgacgagcgagccggcctcggggatgccttcgacctggcgcgcacccatgccaacgaccacaccgcgccgaggatccccgtcgtcgacatctccccgttcctcgacagcagcagccagcagcagcagcgggacgaatgcgtggaggccgtgcgtgccgccgccgccgactggggcgtcatgcacatcgccggccacggcatccccgccgagctcatggaccgcctgcgcgccgcaggaaccgccttcttcggcctccccgttcagga

SEQ ID NO: 273520 - DNA, 536 bp, Zea mays
gcagatcgtcgatctgctcttataaaacgcggcggcaatcgagcaatcactttccaagttcaagcacctggctacacatatctcctagaaatcaagcagcgtcgagtttctccaggtccgaatcagtgatccgatcgcaagaagcaagcaacaatgtcgccggcgcgcaagcagcagcaacgtcttcgacccgctgtcgctggacttctgggcgtcgttcgccgacccgttcggcgtcgtccggccgctggcggagcagtgccccgtcctcaccaacgtgcgcgtcgactggaaggagacccccgaggcgcacgtgttcagggccgaccttccgggcgtcaggaaggaggctgccaaggtcgaggtggaggacggcaacgtgctcgtcatcagcggcgagcgcgccagggaggaggaggaggccggcaaggacgaggcgtggcgctggcgcctcgccgagcgcagcagcggcaggttcaagaggcggttccgcctgccgcgcggcgccaggctggaccaggttcacgcgtccatgg

SEQ ID NO: 273521 - DNA, 611 bp, Zea mays
cttcacgatctgtgactgtgatctatactataaggtgaacaagatctctttgtctactgtagttgcagcaccagcagcagcagcagaagagcagcgcctgagctccagcaataatggccgagaagggcgtgaaggtgttggggatgtgggcgagccccatggtgatcagggtggagtgggcgctgcggctgaagggcgtcgagtacgagtacgtcgacgaggacctcgccaacaagagcgccgacctgctccgccacaacccggtgaccaagaaggtgcccgtgctcgtccacgacggcaagccggtcgcggagtccaccatcatcgtggagtacatcgacgaggtctggaagggcggctaccccatcatgccgggcgacccctacgagcgcgcccaggcgaggttctgggccaggttcgcggaagacaagtgcaacgctgctctgtacccgatcttcaccgcgaccggcgaggcgcacgcaaggcggtgcacgaggcccagcagtgcctcaagaccctggagacggccttggaggggaagaagttcttcggcggcgacgccgtgggctactacgacatcgtcgtcgggtggttcggcactggctccccgt

SEQ ID NO: 273522 - DNA, 363 bp, Zea mays
acaagactggaccgatttggagaagagttagaagaatcaacataaaggatgtataaatatacctgggattgctgcctcgtatgataagatagcagcaggagcttagttgtattttgcctcattcataggttgggtctttcctttgcccgattgacatcagaaagaaaaaaagttattcgatgtcagttatgagccatgagcacgtcgtttgttgctgcaagcctgcagctgaaagaggttcattgtttccgatgctaacatgtaacacctgccatttagtacggagcagtacccagcttgttagttgattattgttttacacttttgaggaagatatcactgtctttgtcatctttcattcac

SEQ ID NO: 273523 - DNA, 441 bp, Zea mays
ggtcaggggtccacggatccgtcaagtctagatgtcctgatttagtgatttatactcatgaatatgtcagccaagctgtaagaaacctaagttctcagaggaacacggtgtatagaacttacaagtgtaatatgaatgagctcatgcatgagttttcttctgccagattaggaatcgaatattgcaagtcagcttggtcgacatttggtttgggctcatggtatcgtgtagaataatgccgttcatttctgaaataaagggtttatcgctcttttgaattttatttcagttctctcgagttatagtttgtattgccctgcattttaacaacgatcttgtttaccagttatgttctggttgttttttattacattgttattgatgtgtaggtttgatgggaagcctgaagatgttctaaatccaaagaaaaagcagctggac

SEQ ID NO: 273524 - DNA, 1246 bp, Zea mays
acaggccaatgggtttccgcggtggtttgaggccgcccgtgacgcgcgtctgcttcgtcctcctgtgcctgtgcgcctcgttgtccgaagccaagaggacgccgcagcctgcgcctactacgggcaagaagcagcagccaccggcagcgtcgtcgtcccagcagagcccagcggtctcgtatccggctctccccgtccgggcggtgtgcctcggcggttggctcgtcaccgagggctggattctgccctccctcttcgacggcatccccaacaaagacctcctggatggcacgcagctgcagttcaagtcggcgctgcggaagacgtacctgaccgcggacaacggcggcggcggcgccgtcgtggccaaccgcacgcaggcctccgactgggagacgttcaagctgtggaggctgaacgacacgacgttcaacttccgcacgtccggcaaccagttcgtgggcatcggcgccagcgacggcatcatcgtcgcgacggccaccacgccgggcctgccggagacgttccagatagtgcggtgccccttcgacaagaacagggtccggatcaaggcggcgaacggctacttcgtccaggcgatagcgaccggcgaagtgatagcggactacggcgagcccacgcggtggtccgacttcgacgcgtcagtgttcctgatgaccaccgtcgggcagcagctgcaaggggagtaccagctctgcaacggctacggcgccgacaaggccgcgccgctgctgagggagcattggagcacgtacatagtggaggacgacttcaagttctttgcgtcgagtgggctgaccgcagtgaggatccccgtcggatggtggatcgccagcgaccccagcccgcccgctccgtacgtcggaggctccctccaagccctggacaacgccttcagatgggcagagaagcacgagctgggtgtcatcgtcgacctgcacgcagctcccgggtcgcagaacccctgggagcacagctcgtcccgagacggcacgcaggagtggggaaccacggacgccagcatcgcgcagacggtgcaggtcatagatttcctcgcgtccaggtacgcgacgagcccgaggctgctggcggtggagctgctgaacgagccgctggcgcctggagcgaccctggacagcctcaccaggtactaccgcgacgggtacgccgccgtccggaagcacgcgccggcgggctacgtggtcatgtccaaccgcctgtcgtc

SEQ ID NO: 273525 - DNA, 2151 bp, Zea mays
gggtcgagtcaggcgtccactggcgcgtttgtggagagtatggttaccgattttatcaaacccacccatggtggagggggcatggggatgagaatagtcgaaaggcctgatgaatttgtggattctgtactgagcgctcaacgggaagctgcagcatcgtttggtgtaaacacactattgattgagaagtatattactcaaccaagacacgtagaagtccaggtatttggcgaccaacatggaaatgcgatatacctttatgagagagactgcagtctacagagaaggcatcagaagatcagcgaggaagctccagctccaaatgtgccagctgagtttcggtctcatattggtggagctgctgtatctgcagcaaagggtcatttattggattgtttgtgttgaaggcagttggttactacaatgctggaacagtggagtttattgtggacactctttctggagagttctacttcatggagatgaatactcgactccaggttgaacacccagtgacagagatgattgttggtcaagatcttgtggagtggcaaatacgtgttgcgaatggagaacgactaccattatctcaggagcaggttccattaaaatggacatgcatttgaagcacggatatatgctgaaaatgttccaagagggtttctccctgcaacaggaaccttacatcactaccgaccagtcccttctgacccaactgtaagagttgaaactggagtcgaagaaggagataccgtcagcatgcattatgatccaatgatagccaaacttgtagtatggggtgaaagtcgcacggctgcactagtcaagctaaagaagtgtttatcaacctttcagattgcaggtttgccaaccaatgttgatttcctccaagaactcgcaagccacagtgcctttgaaaaaggcctagttgacactcacttcattgaacgttataaagatgaccttttgagtatttctacaaagtcctcaaaagaatctcatggtgtagctgagcttggtgcaattttggctgctgcatgcatttgcaaaccggaacacattacatctaaagaatcactacgagccaacaagtcactatctgtatggtacaataatccacctttcaggatgcatcactttgctaggcatcccctggatcttgagttggaagagaatgatggattcagtgagaaacttcttaaactgttcattactcataagtttgatggaagctacttcatcgagacagaagatggcacttctggtttagatgtcaaagttgatcacaagggtgaccacgattttcgtgtggatgtttctggtctgcaaactgatgtgactctagcatcttattcaaagggaaacagcaaacacatacatgtctggcatgggaatcatcaccaccattacagacagactgtaagagctgagcatgcagttgaagatagctcccaacctagtcatgcttctgaagggaagtcgcatccaaaagggagtgttctggcaccgatggctggcttggttgtgaaagttttgcttgaagacggggctcaggtggacgcagggcagcctgtcatggttatggaagcaatgaagatggagcatgttgtgaaggcgcctcgtgccggatacgtgagtggcctgaaggttactgcaggccaacaagtttttgactccagtgtccttttcacaatcaaggacagctctgcaaactgagatggagcgatcactgccctagagtagttgcactgcaactgcatcaagcacccagcggatgctcgtccagatagagaagcgaaggaaataaactgctgggttcgtctgcgggcaatccaatccggcagggcaagcagacggcgcatggtgtttcccggcttgatgcgaatccatcatccgccgcaacaattccattgcgtagtgtacacgaacatgaaactgtaccacgctgagcaagaggaattcttgtttgatttgtgcaatgaaataagttgattccatcaccgttccatttctcataattagtaataataatgaataattagtaataatataatgaggaatgtgtttattttaccaattttatggaatggactcgtgatgtatcacctcatctagaatcaattgattctttaaaccaaacactctctaagc

SEQ ID NO: 273526 - DNA, 780 bp, Zea mays
ttgttttccaagcctgcaccagcgtccagccggggggtctgcaccgcaggatggcctcccgcctcctcctccacctccacctgcgccgccgcgggcgcgggatcccgggctgccccgtgcccgcgctacccctccacgccgcgcggctcctctcctcctccccaccaaccgcagctgcggcctcgtcgtcggcggcgggcggcgggggcatcgagaaggtgctggtggcgaaccggggcgagatcgcgtgccgggtcatgcgcaccgcgcgccgcctcggggtcgccaccgtggccgtgtacagcgacgccgaccgcggggcgctgcacgtgcgcgccgccgacgaggccgtcaggatcggcccgccgcccgcgcgggagagctacctcaacgccagggccatcatcgaggccggcctccgcaccggcgcccaggctatccacccgggatacggtttcctttcagagagtgctgatttcgcgcagctctgtgaagccgaggggctcaaattcattggaccaccagcatctgcaatccgagacatgggcgataagagtgcatccaagaggatcatgggtgctgctggcgtgccgctggttccagggtaccatggggctgaccaggacgttgagctgttgacactcggagcggataaaatcggttatcctgttttaatcaaacccacccatggtggagggggcaaggggatgagaatagtcgaaaggcctgatgaatttgtggattctgtactgagcgctcaacgggaagctgcagcatcgt

SEQ ID NO: 273527 - DNA, 468 bp, Zea mays
gtttgttactacaatgctggaacagtggagtttattgtggacactctttctggagagttctacttcatggagatgaatactcgactccaggttgaacacccagtgacagagatgattgttggtcaagatcttgtggagtggcaaatacgtgttgcgaatggagaacgactaccattatctcaggagcaggttccattaaatggacatgcatttgaagcacggatatatgctgaaaatgttccaagagggtttctccctgcaacaggaaccttacatcactaccgaccagtcccttctgacccaactggtgaaatatggacataccctatgaccaattatattactagttacatttcagtgttgcacaattaacatattcttcctcagtaagagttgaaactggagtcgaagaaggagataccgtcagcatgcattatgatccaatgatagccaaacttgtagtatggg

SEQ ID NO: 273528 - DNA, 590 bp, Zea mays
  unsure (1)..(590): unsure at all n locations
gacgcgtgggtggggagtctggatctcaagcaaccagcccaagaactgttctgctccccagttgtatacgatcgaaggaaaaaaaaaggatcccaaaccctagcatctcccatggacgacggcgacggcggactgagcttcgacttcgagggcggcctcgactctgccccggcttctggggccgggggccccgtgccgtcctccaccgaccccggcgcgggtgtcgggggaggcggcgacgggccgggtatgcacgggcgcggccgaggtcgcgggagctaccgccagacggtgtgccggcactggcttcgcggcctctgcatgaagggcgaggcctgcgggttcctgcaccagttcgacaaggcccgcatgcccgtctgccgcttcttccgcgacttcggcgagtgccgcgagcccgactgcgcgtacaagcactcgtacgacgacgtcaaggagtgcaacatgtacaagatgggtttttggcccaatggtcctaattggcggtataagcatatcaaagctcctggngccaccgcttctggtgaggaagttcttcaaaagattttgcagatgcgctcttttaacagata

SEQ ID NO: 273529 - DNA, 484 bp, Zea mays
cccacgcgtccgtttttttcaaggctggtctgtttcgtgacgtcccgcgagaagagaacccccgtggcccctggccgcgacggagcggtcagaagcagcggcggccggcgcggtttccgtttcctggttggcccgagaattccgattcctctcctgatttgtgttgcctggaggccccgtcgctgtccccgcgctctctgtctcctcacgtttggctgttcgccgcggcgccaccgtcggaggcagctgctaatcgcgcgtccggtggccgcgttgcagcggcggagcgtctcttgttgtgcagtgctgcagcggattgtcgcggcctgcccgcggtgaggccggcatccctcttcggaaggcgtgctcgggcggggccagcccaaccgccgttcgtgcgctagagttcctcgctcagaaactggagaaataagatacatagtggaagatgagatcagttgttcggtcacttcgccagctccgc

SEQ ID NO: 273530 - DNA, 457 bp, Zea mays
aaaaggagaagaaaggacgtgtgggcttcgtttcgttcacttcatctccaggcctctgaagtcgagcacgctggtcctgagccccaggaagtggtggccgttgctgcagctgcacccggccgctcccttctgtccgcccaggccgcagccgaggcagaggccgtggccgtggccgtggccggcctgcagcgcctcccgcttgacgacggcgggcttgatgaggtccagcgcctcctcctcctcctcgccgtcgtcctcatgctggcacggcgggctgatgcagacgtccaggttgaggtcggggcacctgggcgccttgacggccgccgtctcctcggccttgatcggcgcctgcgctgctgtttctgccgcggctgcgacggctgtgttggggctgggctggaacgatatggtggtcgcggcgccccccgcgacgcggcggtgcgtgaccgggtcg

SEQ ID NO: 273531 - DNA, 579 bp, Zea mays
gcaagcaaggcaggcggacgggcaagggcaagcgagggatgagaatgagggccgtggtgatcacgtgcgccggcgggccggaggtgctggaggcgcgggaggtggaggaccatcccgcgctaggcgaaggagaggtgctcctcgaggtcgccgccgcgggcgtcaatcgcgcggacaccgtgcagcggatgggccggtacccgccgcctgccggcgcgtccccttacccggggctcgagtgctccggcaccatcctcgcgctcggccccaacgtcccctcccgctgggccgtgggcgataaggtttgcgcgctcctcagcggcggcgggtacgcggataaggtggtggcgccggcggggcagctgctgccgatacccgagggggtgtcgctgacgcacgcagccggcttgcccgaggtggcctgcaccgtctggtcaaccgtattcatgaccagtcacctctcccccggtgaatcattccttatccatggaggatccagtggaattggtacattcgctatacagattgctaagcacctcggaattaaggtttttgtcactgcaggaagtgaataaaaac

SEQ ID NO: 273532 - DNA, 686 bp, Zea mays
attccaactggcgtagttgaaccgggggaagatattaatgttggagccataagagaagtaaaagaagagaccgggattgatgcagaatttgttgaagtgctggccttcaggcagagccacaaagctttttttgataaatcagatctatttttcgtgtgcctgctacgaccgctgtcatatgacattacgaagcaagactcggaaatagaagcatgccagtggatgccagtagaggaatttgcagcacaaccatttgtccagaaacatgagcttgtgaagtacatcctcgaagtaggcctggctaaagttgacaagaaatatgcagggttttcgccaatctccataaaatcggcgtttacagacaaattgtccttattttacatgaaccggagggacctggacaaagcctcaggatagagtaatatgtaattaaacacagggaattcaagatagttgaaatttcagttgtggtatgtaaaagcaggccaagtcattcatacttgattattttgttcacaaattggaagtttcgggcatccgacacttgtgatttttcgaccatatgtcgtctgctacacatctgtgtttcaaaggagtgttgcaatccaaaagtagagataaaactgttgtgcttatggatttgtatttgtaggtctacagacaataaaaccctgttttcctttatt

SEQ ID NO: 273533 - DNA, 699 bp, Zea mays
gtcttgtatagtgtttcctgatcaacctgaaaaacgtagggcatcagagttgttcaagacagctatagacacgattgagggtgtaaccatcagctccctggatgatgtacccactgaccctgtcaacagcttcttcaaatcaataagaaacaccctggattttgacttctcagatgacaatgaaggtagatggaaatctgatgaaccaccatcgttatatatcttcatcaacagcagcacgcgtgaccttgcttctatagagaagtatgtggaaaagttcgccacatctgttccagcccttctattcaatctcgaactagatacattgcgttctgacctggggcttctcgggttccccccaaaagatctgcactaccggttcctttctcaattcaccccagtattttatatcagacagcgtgactattccaaaacaatcgcagttgctccatacatagtgaattatagtggagctgtattccgccaatacccagccccctggcaggtcatgctgaagcaggctgatggttcctatgcatgtgtcgctgagagcgaactcaggttcactttgggacaggcgaaagaagaactattgagagttattggtttacaagaagaagagggaagctcccttgaatttctcagaagaggatacaagaatgctacctggtgggaagagaacgttgatcaggagacgtc

SEQ ID NO: 273534 - DNA, 466 bp, Zea mays
cgggggaaaaaactcgcctttttctctctgctggttcaagaacgccatggaaaatctcgagcgctcgctgtgattcctgcgagtacccaagcccaaccaaaccctagcccggcagccattctcttcgttccctctttgctctgcgcgccacaccgcacgacctccccgaagcagacgtgcccgctgcccgtccgtcccccgtggccatggccgcgacgtggtcttcgtcttgctgcgccgcgaccgcgtcgagcagcgctctgcttcgtcatgcccgcgtcaagagcgcgccttgggtagccggtgccagccggagtagctacaggcagcggcggcggcggcgggagctgtccatccgcgccacggtcgcggcgccgccgccgcccgtggtctacgcggacgccggcgccgacaacgtggcctcggtgaagatcaagcttctgagcgcagagtacgggctgaaccg

SEQ ID NO: 273535 - DNA, 726 bp, Zea mays
tctcttttcgcccacaactctcacacaacagagaccacccacctgcgctgcgcctcggttttacggcccttccctcaccgccccgcgcgagcaacatgaagcttgaggtcatgcccaagcagcgggtgctggaggcggacagagggaggaggccatggagatgagtggcctggacctgtggaagcacgagaagcccccaaggatctgccccttgcccccgtcgctcccggcgccgccagcgtgcgacgaggcggcgctcgtgccgccgctcaacttcgccatggtcgacgacggcatattccgctccggcttcccggagaccgccaatttccggttcctcaagtccctcaacctccgctccatcgtgtacctgtgcccggagccgtacccggagacgaacacggagttcctagaaaagaatgggatcaggctccaccagttcggaatcgaggggcgcaaggaaccatttgtcaatatacccgatgacaaaataagggaggcgctcaaagttgtcttagacccaagaaaccaacctctgcttattcattgtaagagaggcaagcaccgaactggttgtttggtcgggtgcttgaggaagctgcagaaatggtgcttgtcttcagtcttcgacgagtaccatcgctttgccgctgcgaaagcgcggatcactgaccagagattcatggagctgttcgacgtctcaagcttgaagcacctgacaccctc

SEQ ID NO: 273536 - DNA, 393 bp, Zea mays
cccacgcgtccgcccacgcgtccgcccacgcgtccgagaaaacttaaggtttgacttggacgatgaaagagtcattgtcctgaagtaccagaacgcaaggcttgccacatcccgggtcctcaaacggcacaggataccgtcagccatatcgagcgaccttgtcgaagatcaagtaactgatggcgacgttgagacgtcatgcaccagctaatgctagactcttttttagacctaattgggagttccctgctgtagctcagctcaagaagcgagctgcattgttggcgaggcaagcgcacctgcctgcctgcctgcctggagtacatggtatcactttcctcctttaaggccggtttaattttgacataagggagaatttccttagaaaataag

SEQ ID NO: 273537 - DNA, 922 bp, Zea mays
attttgaacatcgtgaaacatcatttgtgtggaactacaagtatgctgatgttgagttcggaaggctacaagcaagagatatgctgcagcacttgtggacaggtccgatctcaaatgcagctgttgatgttgttcaagggagtcgatcagttgaagttcggtctgttggagttaccaagggtgctgcaattgatcgtattttaggggagatagttcacagcgaaaacatgattactccaattgactatgtcctgtgcatagggcatttccttgggaaggatgaggacatctacgtcttctttgatcccgagtacccttctgaatccaaagtaaagccagagggcggctcagcatcacttgaccggaggccgaacgggaggccgccatcgaatggcaggagtaactccaggaacccacagtccaggacacagaaggcgcagcaggctgcatccgagaggtcatcctcatcaagtcacagcagcacgagcagcaaccacgactggcgcgaagggtcctcggtccttgatctcaagggcgagaactacttctcctgcgccgtcgggaggaagcggtctaacgcccgctacttgctgagctcgtcggaggaggttgtctccttcctcaaagagttggcgacagcgacagctggcttccaggccacctgtgctgactacatgcatgttcttggataggcagtaaatagactgaagttgaagcctccgtgctttaccagagacagagagaagaagaatattcattcctcgtatgcgcgacagagctacacccgtagctagtcagcgtgctgtacaatcatgtacaaaatttatgctcgtgataaaactgcgagaggggagctagcaaatgggaaaggataaaggagtttagttgcttctggtacgagacacaaccgattttgagtaat

SEQ ID NO: 273538 - DNA, 651 bp, Zea mays
ctactcgtccgtcctacgcctctctcgcccccgccgcgcgctgctcgccatctcctccgtccgccttgcgctctccacccagccccacgtcccatctccgtccccatcccctaccccctcctccgcccgccgcctcccgcatttcctctccttcctcgccgccgccgccgccgctgggggagcaaccgtcgcgctctgcgactccggcctagatcaccgggtcgggggcaaggacagcgccgatctggtggttcgtggggagcggaagttcgtgccgcaggagttcatcgacgagctcgcgtccttcctcggggacaacatcactctggactacgaggagaggagcttccatggcacgccacagaacagcttccacaaggcggtcaacctgcctgatgtcgtcgtgttccccagctcgcaagctgaggcacaaaggattgtgatggcctgtaacaagcacacggttccaattgtaccatatggtggggctacctcaatagagggtcacacactggcacctcatggtggtgtttgcatcgacatgacctcgatgaagaaaataaaatccctgaatgttgaggatatggacgtagttgttgaacctggagttggatggatagagctgaccgaatacttgaagccctatggcct

SEQ ID NO: 273539 - DNA, 509 bp, Zea mays
ctccgttcatggccacctccctcctacgcctctctcgcccccgccgcgcgctgctcgccatctcctccgtccgccttgcgctctccacccagccccacgtcccatctccgtccccatcccctaccccctcctccgcccgccgcctcccgcatttcctctccttcctcgccgccgccgccgccgctgggggagcaaccgtcgcgctctgcgactccggcctagatcaccgggtcgggggcaaggacagcgccgatctggtggttcgtggggagcggaagttcgtgccgcaggagtccatcgacgagctcgcgtccttcctcggggacaacatcactctggactacgaggagaggagcttccatggcacgccacagaacagcttccacatggcggtcaacctgcctgatgtcgtcgtgttcccgaggtgatgatgcctactaagaactccagtggtcatcactctgttgaaatcaagggcttgtaagagactttatatgtttcaagcgttc

SEQ ID NO: 273540 - DNA, 1009 bp, Zea mays
  unsure (1)..(1009): unsure at all n locations
ttgagcccacgaccacgagctccagagtggccgtcgccgagtctcgggctcttggctcacgcggcgcggctccccaggccccacccacccccacccccacgcgcccggcggcgtgctctctgctgtctgctctgcacccaggaccttcgcccacaggagctcagccctatccctcgacggtgctcgcggccggcgcgcggcggctcgacccttccccatctccagctgcacgcggtctccaccgcctggaatccagggcctccgacgccaccccacctccaccgcctggaatcgaggaccgtcggcgccgccgtcncctgcctgctgcctcgactcaactgtgtcagggtacttgcaaacagtgacaaaggttctgccttgccttactgtggagccatggctgcaaagatacgcgtggtgatgaagtcttttatgagccaaagcaaccaggtcgcagggcttctgccattcacaaagaaggtcggactacctgaatcgcgagccttgtacaccgtgctgcggtcgccgcatatcgataaagaagtccagggaacagttctcgatgcatgtcaagaaacagtttgtggaactgacagccaaaccgcacgagctccacaagaagttcttctggctaaaacgcctgcgcatacctggggcccagtacgaggtacagatttctttcaagacacgcctggatatggcgagcctaaggtcccaggctccttgatggctcacgatgatcgttcttatcgtcccgcgaaagtttgaagtgctgagactggtactcagaacttgtatccatcaacatttcatatgaagacatgcttattttgatgactttcgaaaaatgtagctgctaactatttccagtgcagttttgagtgcttatggcttgattcacacaaatgtagctgctacgttcagaaataaaaaaattatggaaatacagcatgatatcgcttgattcacaaaactttgtgctgtactgtttccagtgcagttagcagtc

SEQ ID NO: 273541 - DNA, 453 bp, Zea mays
gcacgcgtccagatcaacgccgccgcaggagaggaggagagaccacctccaacgccacccggacaaagcgacagcgcggcggggacggaggaagacagaagaacatggggaacggcgtcctggaggtgcacctcgtcgacgccaagggcctctccggcaacgatgtcttacggaagctggacccctacgtgatcatgcagtaccggcgccaggagcgcatgaccagcgtcgcccgagaccaaggaaggaacccgtgctggaacgaggtgttcaagttccagatcaactcggccgcggccaacgtgcagcacaagctcatcctacggatcatggaccacgacaacttctccagcgacgacttcctcggcgaggcgacgatcgacgtgacggacatcgtcagcctgggcgccgagcgcggcacgtaccacctcaacgcggccaagcacaacgtgg

SEQ ID NO: 273542 - DNA, 461 bp, Zea mays
gttccagaactgcgcctaaggtttcttgcacgcgcaaatgaagcggcagccaccacatcctcgaggcggcggcggcgcggcggtcggcgagagcggaagcggcggagggttccataagggggaggggaaagggaaagggaggtggggcggcgggtgccggcggcggaacgagcagcggctgggtgtcggcggcggcggcggggccctctccctcgctgctttcgccagcgccaagtcccggactaccggctacaacccggccgtcatcaagaagcaaagggagttctacaggaatgctaaactaatcagcagatacaaaaggacaaagaagcaacagagtcagtcaaacgaccatccgcagattccaatccatgaggatggcggcgacaatgcccaatatgtaccgaaaccgcgctaccaaggcaagaagcgcaccgcgcatagtttgaaggaagagtacg

SEQ ID NO: 273543 - DNA, 1847 bp, Zea mays
gccacgcgtacgcccacgcgtccgcccacgcgtccgtccacgcgtccggccacgcgtccggccacgcgtccgcccacgcgtacgcccacgcgtccgcgcacgcgtgaacaaaccacacaccccacctaccccggccggaccggcaggcagcacagcatggacctcgccctcctagagaaggccctgctgggcctgttcgccgcggctgtggtggccatcgccgtggccaagctgaccggcaagcggtaccgcctcccaccggggcccccgggcgcccccgtggtgggaaactggctgcaggtgggcgacgacctgaaccaccgcaacctgatggccatggcgaacggttcggcgacatcttcctgctgcgcatgggcgtgcgcaacctggtggtggtgtcgaccccggagctggccaaggaggtgctccacacgcagggcgtggagttcggctcccgcacccgcaacgtggtgttcgacatcttcacgggcaaggggcaggacatggtgttcacggtgtacggcgaccactggcgcaagatgcggcgcatcatgaccgtccccttcttcaccaacaaggtggtggcccagaaccgcgccgggtgggaggaggaggcccggctggtggtggaggacgtgaggaaggaccccgaggccgcggccggcggcgtcgtgctccgccgccgcctccagctgatgatgtacaacgacatgttccgcatcatgttcgaccgccggttcgacagcgagcacgacccgctcttcaacaagctcaaggcgctcaacgcggagcgcagccgcctgtcgcagagcttcgagtacaactacggcgacttcatccccgtgctccgccccttcctccgcggctacctcaaccgctgccacgacctcaagacgcgccgcatgaaggtcttcgaggacaacttcgtacaggagcgcaagaaggtgatggctcagactggtgagatccggtgcgccatggatcacatcctcgaggccgagaggaagggcgagatcaaccacgacaacgtcctctacatcgtcgagaacatcaacgtcgcagcgatcgagacgacgctgtggtcgatcgagtggggcatcgccgagctggtgaaccacccggccatccagcacaagctccgggaggagctcgcctcggtgctgggcgccggcgtgcctgtgacggagccggacctcgagcgcctcccctaccttcaggccatcgtcaaggagacgctccgcctgcgcatggccatcccgctgctggtcccccacatgaacctcaacgacggcaagctcgccggctacgacatccccgccgagtccaagatcctcgtcaatgcctggttcctcgccaacgaccccaagaggtgggtgcggcccgacgagttccggcccgagcgcttcctggaggaggagaagtccgtggaggcccacggcaacgacttccgattcgtgccctttggggtcggccgccggagctgccctgggatcatcctcgcgctgcctatcatcggcatcaccctgggccggctggtgcagaacttccagctgctgccgccgccggggctggacaagatcgacaccacggagaagcccggccagttcagcaaccagatcgccaagcatgccaccatcgtctgcaagcccctcgaggcctagaaatcaatgcgtgtttcctgcacgcgcccccgcagatgaagcactatgtattttctcttttttttgtgtgttgtgttttttttactaagaggagatgtatttcttgttcgtaaaatgcacttagtcaaatggatcgagattatgttgatcattaaacaccaaaatcacttacgccccgtttgaatc

SEQ ID NO: 273544 - DNA, 618 bp, Zea mays
tcactgtgtactcaccaatgaccaaaaccttctccggctctccagtccctccacgacggttctacgccccctacctactgcatgtccgtcaattttaccgccaactccccatcccgccgtttctctttctcctatatatgcgcacggacatgtccgtcgagatctccaggaaggcaggaagaaccgccgccacgccacacaaaaagcagtgactcagtgagaaaggacagcaagcaagccctccctccatctccgccccgtcgccatggtccttctcttcgtggagaagctcctggtcggcctcttggcgtccgtcatggtcgccatcgcggtgtccaagatccgtggccgcaagctccggctgcctcccggccccgtccccgtgcccgtcttcgggaactggctgcaggtcggcgacgacctcaaccaccgcaacctcgccgcgctgtcccgcaagttcggcgacgtcttcctcctccggatggggcagcgcaacctggtggtggtctcgtcgccgccgctggcgcgggaggtgctccacacgcagggcgtggagttcggctcccgcacccgcaacgtggtcttcgacatcttcacggacaaagtgcaagacatggt

SEQ ID NO: 273545 - DNA, 429 bp, Zea mays
ccctcgccagcctcgggcaaaacttccagctggtaccgccgcccggccccgacaagattgatcccccggaaaagcctggccagttcagcaaccagatcgccaagcacccccccattgtttgcaagcccctcaaggcctagaaataacctgcacgcgcctcccgccacatcaagcactattgtaattttgggcgtcttctctgttatgtgttggggccctgaaaacttctccaaaagttatagtgtcataaacttcaatttaatcaactctgttgcccaaggctttgtttccggattgtgaatttagccaatgcccagacgattaaaagacttcggttctgttctttttatagggtattttgttggacttcattcacaacgggtttaataaaaaaccattatcaaattcgaaaaaaaaaaaaaagggggg

SEQ ID NO: 273546 - DNA, 355 bp, Zea mays
gtctccgtcagccaacttaattccgtccttaattaaccggcaacatactgagcctaatgcggtgtcacacttcaagtgggctcccgtatttatctgctaggcgtagtatctatctgtgtatcaaaaggtagttgaagccgccaccacgtgaccacgcctcaaaaagaattgcgttttgatttgtatatccaagctgccacaccggcaggcagtcggtgccaaaaaaaaaaataatttgtttgcttctgcagcgatcgagacgacactgtggtcgatcgagtggggcatcgccgagctggtgaaccagcggcgatccagcacaagctccgggaggagtcgcctcaatgctgggcgc

SEQ ID NO: 273547 - DNA, 639 bp, Zea mays
acggacgcgtgggcggacgcgtggggcaccttggtgggaaacaaaccaagggtggacgaagaagacgtcaagagcctcagctacctgaagatggtggtgaaagagaacttcaggatccacccaccggggaccttgttgattccacgggagaccatgaggagctgcgtcattggcggctacgacgtgctgccaggcacaaggattttcgtgaacgtttgggcaatgggaagggatcctagcatctgggatcgcccggaggagttcagtcccgagaggttcgagggaagtcatgtcgactttagaggctccagttttgagctcctcccgttcggctcagggcgaaggtcatgccctgccatcgccatgggtgtcgccaatgtggagcttgtcttggccaacctgttacattgctttgattgggagctccctgatgggatggtggaggaggacatcgatatggaagaaacagggcagcttgcttttaggaagatggtgcctctttgtcttgtgcctattaagagagtataaatgtataattgcactggaaggatgatagactatatgtgcattctcttgacatatgttcagttcaaataaactacttcaaatattttcaaaaaaaaaaaaaaagggcggccg

SEQ ID NO: 273548 - DNA, 421 bp, Zea mays
acaggtctatatgttaaaggctgaaggtatcgcatttaggttcttacccgaccctcttcaaataaagaatgcactggagatgaaatcgggcttaactgcttttgatggtgttcctgtttttcagtcagatctgctggttgtgaagaagcagaagaagcgctactgtccagtatattttcaaaaggaagacatagaaagagaacttacaagggcttccaaaggttcaagagggtcagccttatctaagaaaattatggttggaagtttggaggatgtcctgaagaaaatggagataaatgaaagagattctggctgggatgatttgatctttataccccctgggaagagcctcaaccaacatatcaatgaggtatcagcatgattttgttccacggtgatagctcagagtttgaacagacta

SEQ ID NO: 273549 - DNA, 1494 bp, Zea mays
acatgaattgcaactcatcagcatgcagcagctagtaccccggctgttctgttctgttctgtccgctagtgtcgtcttctgctggtgagcgaggcaaactatgcgtgcgtggatgtggatggtacaggaggcactggccaagggcagcccagccgagagcaggatccgcgcggacacggaggaggccgtcaagagcatgcgcgccgcggcctgctcctgctcctgcacggggcggcccgccgcccgggactgccggccgtgcatgctccggcacgtcgccgaccggctgcgcgacgccggctacgacagcgcgctctgcaaatccaagtggacgcgctcgccggatatcccttcaggtaacctgcgtctcgcgcgtcgcgattataacttcgtcttttcgttctttctaccgcaataaacgcagcggagaggaatatcctgtacaagctcacatggttcacatggacctggtcatcctccgatgacactgacagacgccgcttcccagctgatactcctacacagccgccctaacaaacattccaacaaacagccagccaaatgtcaggaacgcgtctctttctccgacggttcagcgttagcggagccggagacgtccacaccaaccctctcggtcccggacccaaggatgcatgttacctgcccaacatcctaaaaaatctgaacccagatattcgatgccgaacaggttggttcgttcgtttgctgacgtgttctcttccgatccgccgaaacgcgtgtgcaggcgagcacagctacgtggaggtggcggtgcagacgaggagcggcaagtccgtgcgcgtggtggtggagctcagcttccgcgccgagttcgaggtggcgcgcgccagcgccggctaccgcgcgctggtgaccgcgctgccccgaggtgttcgtcggccgggccgaccggctgcgcggcgtcgtcaaggtcatgtgcgccgcggccaagcagtgcatgaaggataacaacatgcacatgggaccctggaggaagcacaagtacatgcaggccaagtggctcggcacgcccgagcggggagcggcggcggtggcggcggcggagacgcgggtggtggcggttccgtcggtgacggtcggctcgccagagaagcagaccaagttcagggcgtccatgctgaccttcgactttggccggaccgcgctggaggtcgcgtgatgaacgcacatacgctgccggtcgagcggcattagtagttctctaaatatagacagaggaggtaactttcgagaagaaaaaaaagttatatagagtgtacctgggttttaggtttttgtcaggattcagaaagctgaatctgtaatatcaatcgagctaggtgtaaacagataaggcgagcttgtcacgcgtactccgatcgcgtcactgtaatggaaatgaagctaaaagatcatgggtgtcggttcacatgtcagtaacgaaatggataactgataacgttaaattaaaaa

SEQ ID NO: 273550 - DNA, 833 bp, Zea mays
aagacgcgtgggtggtgatggaggagacgatagacgacagtgagatgagtttgtcgaacatggtgctgggcttcctggaagatttcgagagggacgagcgacggccggagaacgacgacgacaacaacgaggaagagggctccagcggcggcgacaccgccgagagcaaggccttctggcagacccaacacttgcagctgcgcgaggcactggccaagggcagcccagccgagagcaggatccgcgcggacacggaggaggccgtcaagagcatgcgcgccgcggcctgctcctgctcctgcacggggcggcccgccgcccgggactgccggccgtgcatgcaccggcacgtcgccgaccggctgcgccacgccggctacgacagcgcgctctgcaaatccaagtggacgcgctcgccggatatcccttcaggcgagcacagctacgtggaggtggcggtgcagacgaggagcggcaaggccgtgcgcgtggtggtggagctcagcttccgcgccgagttcgaggtggcgcgcgccagcgccggctaccgcgcgctggtgaccgcgctgcccgaggtgttcgtcggccgggccgaccggctgcgcggcgtcgtcaaggtcatgtgcgccgcggccaagcagtgcatgaaggataacaacatgcacatgggaccctggaggaagcacaagtacatgcaggccaagtggctcggcacacccgagcggagagcggcggcggcggtggcggcggagacgccggtggtggcggtttcgtacgtggcggacggctctttgccagagaaggcaaccaagttagggcgtccatgctgacct

SEQ ID NO: 273551 - DNA, 476 bp, Zea mays
aatacatgcgccgcaacgcacgcgacgggccggccggggaggcgtataagtacgggcgcgtcttcttccgccgctgccccgacatctccctctctcgctggtgcgagagcgcgcgcgcaagcaagcaagcaagcaaggagcgtcgtgtctagctagctgagcacctggttttggagcatggaggacaacggtgccgccgccgccgccgccgctcccgcgacgagcatgcctgccgagaagcgtgtggcggtcatccagggggacgcgccgccggagccggcggcggggctactgccctgcgggccgaggaagacggggctccacctcttcgtcatgaacatcaggagcgtcttcaagctggacgggcttgggtcggaggtgctgcgcatcgcggtgcccgcggtcgcttgccttggcggcggatccgctcccctctttggtggacacggcgttcatcgggcgtttaggttcggtgg

SEQ ID NO: 273552 - DNA, 734 bp, Zea mays
acggacgcgtgggctttactgatatcagcatagaaaaagcagttgagtatgatgaatactgtcatagccaccagccgccaattgctttcattaagtccgaagtttgtggcctttttggcagtgttttctgtgactttggtcctgcgttcactgttttggatgtcgatggtgaggaaccacatacaggaattgtggcatcaatcagcaatgacaatccagcacttatttcttgtgtggatgatgagcgtctggagttccaggatggtgatctagttgttttctctgaagtgcatggaatgaccgaacttaatgatggaaaaccaagaaagattaagaatgcaaggccttattcttttactctagaagaagacaccacctcatatggcacttactttagaggtggtattgtcactcaggtgaagccaccaaaggttcttaaattcaaaaccttgaaggatgcaatcaaggagccaggagaatttctcatgagtgatttctccaagttcgaccgcccacctcttctgcatttggccttccaagctttggacagatttaggtctgagttggcacgatttcctattgctgggtcagatgatgatgcacagaagctgatagaccttgctattagtattaacgaaactcttggtgatagtaagcttgaagaaattgacaagaagctcctgcagcatttcgccagtggttccagggcttgtttgaatcctatggctgcaatg

SEQ ID NO: 273553 - DNA, 605 bp, Zea mays
attgcagcagtgcttgaggattcagtgatcagcagatctgcaaggacataaggaccaatgtagtgagctgggttttatattttaactgatgcacctggatgctttattgagcggtgtctatgatccgtgctggatggaagattggagaaacgcccatgggcctggcaaactgtggcatgtggctttgaactttgccaattggagacctgatgtggatcattttgggacgcgagttaagccccctgtttggagtgccagaaacaaaacagatggagaagggaaaaaggtgtcaggggataagagccagcgcctgatcaccgttttattcgtttttgagtaaactgtagcgagcaacaggtagcctataattgagacaatgctgaatggattgtagaaaaggatctgctttaatttccgttaatttagcgccttcagtgatgttcctagttgctggagtacatgttaagtatatttaccatttaaatcctcccaccactctcgcgtagctttataaaaaagctcttaataaaccatgattacatatatgattgaatctagatataacggaccaaaataactgcttgcacagttgcacgtttgtatct

SEQ ID NO: 273554 - DNA, 515 bp, Zea mays
atgggagaagggtcagacctcagataagtacctaacttgctatttcctatttttttatcacttttattgatgcccaattgcatctaatgtgttgtccacttctattgcagcagtgcttgaggattcagtgatcagcagatctgcaaggacaaaaggaccaaaggagtgagctggtttttatattttaactgatgcacctggatgctttattgagcggtgtctatgaaatgagttggatggaagattgtcgtgttttggacaatgccaacctttgtttccgctgtgcctgccaaggttgtggcttccttgggtgatgcttatttgagaacatagctgttgtgctctgagcatgtcctgtgtgcctgtcatggcggcttcttttggcgacatcataccaacatattcaatgtcaggctttaaagattggagaaacgcccatgggcctggcaaactgtggcatgtggctttgaactttgccaattggagacctgatgtggatcattttgggacgcgag

SEQ ID NO: 273555 - DNA, 522 bp, Zea mays
acagcaagctaagcaagtgccaaccaacgagtagcaggaaacatgtctccgcccgtcaagatcctcggccactacgcgagcccgtactcgcaccgcgtcgaggccgctctgcggctcaagggcgtgccgtacgagctggtccaggaagacctgggcaacaagagcgagctgctgctcgccaagaaccctgtccacaagaaggtgcccgtgctcctccatggcgacagggccgtctgcgagtccctcctcatcgtcgagtacgtcgacgaggccttcgacgggccgtccatcctgccggccgacccccacgaccgtgccgtcgcccgtttctgggcgaacttcttggacaccaagttctcccagccgttctggctggcgtactgggcggagggcgaggcgcagaaggccgtggtgaaggaggccaaggagaacctggcgctcctggaggcgcactcggcgggaagagcttcttcggcggcgacacgcccgggtacctcgacatagccgcgtgcgcgttgggtc

SEQ ID NO: 273556 - DNA, 405 bp, Zea mays
acttcagcaaaattctctctttatgtgtttcctacttcacttctgtgtacgtaatgaagtggaaagacttctttcctaacaaagagctgaaggagccaccatattttgatgctcgagctgtatgttacccgaatttgaagactattcgtgattatttggcttggagacaagtggactgtaagctactggaattgattcaaattatcttgtatagcaaacgccacctcatatttgttcacacaacttttttgtttgccctgaagtcctacaaggaaactgcattagatacaccagagttgtacaacgcatgaacctttgtgaacataacaagaaaagtgatctatgtacgtgtcagaatcaaacagtaattttgttagttcactgatatgcatattcgttgtttgt

SEQ ID NO: 273557 - DNA, 1724 bp, Zea mays
  unsure (1)..(1724): unsure at all n locations
gcttcagttgcagcagcaggaagggcactttcactgttgggggtggaagaaccgggggcggtggtcagcccggggccgccggcaccgaccatgccttccaagacggggcccgccataaagccggttaacctgggagtgcggtcggcaggtctactgctgaatcaacaccaagcgttgtcagcagcctncttcatgccgctcccctccttccttgaccatcagcaccagccacatttcccgcccccgccgaagcgccaccactctatgcccgaaaacctgttcctcctccaaaaccaactccagccgccgccgccgccgccgcagggtctacgattcccaccactgcataccaccgcgcccttccagctccaaccatcgctgcaaccaccgcgtggttcgatgaaaacaaccccggcggcgcagcaacatcaacagcttctggatgagcttgcggcggcggcaaaagcggctgaggtcggcaactccatcggcgggcgcgagatattggcgcggctcaatcagcagcttccccctatcgggaagcctttcctccgctccgcttcctacctcaaggaggccctcctcctcgcgctcaccgacggccaccaaggctccactcacctatcctcccctctcgacgtcgccctcaagctcggtgcatacaagtccttctccgacctctcgcctgtgctccagttcgccaatttcacggccactcaggcgctcctcgacgagatcgcctcaacaacttcatcttgtatccacattattgatttcgaccttggtgttggcggccagtgggcttccttcttgcaggagtttgcacaccgccgtggaactgggaacgcccccctgccaatgttgaagctcacagccttcgtctcaagtgcttcccaccatccccttgagctgcatcttactcgggagaacctcacgcaatttgctgtggaccttggcattccatttgagttcactgacatcaatcttgatgcgtttgatccggcagaattcattgctcctagccccaatgaggttgtggctgtttgcatccctgttggttgctctgcacgcacgccaccgctccctatgttgcttcagttggtgaaacagcttgcgcctaagattgctgtggctattgaccatggcagtgaccggggtgacctcccattttcgcagcacttcatgaactgcttccagtcttgtatgttccttctcgactcacttgatgctgctggcactaacgcggatgctgccagtaagattgagaggtttctgattcaaccgagagtagaggatgcagtacttggccggcggaaagctgaaaacgcaatggcttggcgggcagtgtttacatcggccgggtttgctccggtaccgctcagcaacctcgcagaagcacaagctgactgcctgttgaagcgcgtgcaggtccgaggattccatgtggagaagtgtggaatgggtctagcactctactggcagagcggcgagctcgtgtctgtctcggcatggcggtgctgatcatacggaccccatccatcaaccatcatgacacctacaccaatttgcaggcatgtttaaccctggtaatgtgcattttgtcttgcaatttcaaacatcgtgaagaaaactattgtatttgttgttacacgccactgattgctttgctaaaaaaaaaaaaaaaaaaaaaaaaaaaaaaaaaaaaaaagggcggccgctctaaa

SEQ ID NO: 273558 - DNA, 1622 bp, Zea mays
gtctgattttacaagtcagaagcaggtcatcaaacctaagctggtacgaccaatgcggattcctgttacatcatgtgcatgggaccatgaagggaaacgaattgtgggtggcataggggatggttctatacaggtctggaccataaaagctggatggggtagcagaccagatatccacgttgagaaaacacacacagaggatattactggggttaagttctcaacagatggacagagtcttctgtcaagaagtatggatagtactcttaagatatgggatttgagaagaatgaaaactcctttgaaagtatttgaagatctgccaaatcactacgctgagacaaatgcagcatttagctcagatgagcagcttatttttacaggaacatctattgaaaaagatggtgacaatgggggattactttgtttctttgatagaaagaaacttgagcttgtatcaagggtgggaatttcagcacattacagtgtgataaggtgcctctggcatccaagaatcaaccaggtgtttgcaacagttggagacaagaaagaaggtgggactcatatcctgtacgatccttctattaggcaaaggggagctcttgtatgtgttggacgagcaccaaggaaaaagtctgttgatgattttgaggtgcaacctgtcatacacaatccacatgcattgccacttttcagagatcaaccaagtcgtaagcgtcaaagagagaagatactgaaagacccactcaaatcccacaaaccagaagcacctgttaatggtccaggttttggtggaagagttggtactacaaaaggcagtttgctgacacagtatctcttgaaggaaggtggtttaattaaggagacctggatggatgaagatccaagagaagccattttgaagtatgctgatgctgcggagaaagacccaaagtttattgcgccagcttattcccaaacccagccgaaacctgtttttgcggagtctgattcagacaatgaagagaaataaccatgcgcctggttacctaagctagcatgcacctgcattctgttttctgacagatgtctcttgatgagcttgttgcacatgccctgtaacctgcttttcaacagtggagaaacaaaagagcatcttcaagggtcttgatgataggagctctgccccttcattacagatggatatgattagtatctacgacacttcagcactagagctctatgatttgttggatgttgtacccactgtatgtacttagtcctgaaacagtggccaatctatattatactctgttctttcttttttatttgtcgcggtctagtttaaaaatgaactagcgggcgacaaatattcaagaacggaggtagtatatgaggtagtatatgacttagacgtaactttagtgcaccgaatgtagtcaacctttgtttgctttggagaatgaggatttgttgttctagtatcagtctctttgatgttcctaatgggctagttggaagatattttgaggattttgaaaggcaaatgctgtttttgtgtggtttgggctgtacggtccatacaagttgtgaaacagtggcgtatcagccttgttattactatgatccaacaagccaatggt

SEQ ID NO: 273559 - DNA, 726 bp, Zea mays
accacgcgtccgggggaagttcttcaaaatagtgaggcttggttggagactatggttggtttcagttgctatcggccttgtgagttggcccctggcttatgtgggtaaatttattcctgtgcccgtaagacctcttccggactatttcaagccccgctgttgtcggaaaccgccgcgccgagacgaggaggaaggtgggcagagctaaagcgcaacgagtgggcagtgtaaataggcacgtgataaaaaaatggagataaattgcactggttgattccatggtagcagcatcctggggatgtacgcataagatggcaggtagtcggcctcgtcgttttcttctaggagaagcagtcggaagaaaagaagtactatacagaagccaaacttgtctacccctatccagctggtgtgtctgctatgcggcagcgaaacttgagtcattagattgtagcctgaatgaaagcagcgctagcttgcgatgtagcagtaccttttttttccctggcgatatcatctgactgtaaatttgtaaatgctttcggactacgagttgttcttatttttcatccacctcttctctacggaacgtttttttctatataagaaaataacctcaacagagcagttctaaaaaaaaaaaaaaaaaaaaaaaaaaaagaaaaaagaaaaaaagaaaaaaaaaagaaaaaaaagaaaaaaaaaaaaaaagaaggaggagggggg

SEQ ID NO: 273560 - DNA, 421 bp, Zea mays
ccctgcgctgcaaatcctcggtggttttgcagcttccagagcttgagattgagaccaccccggcagttctttcttggccgatggccctgaggaggatcaccaaggacctcaaggacctgcagagggatccacccacgtcctgcagcgcagggcctgtgtccgacgacatgttccactggcaagcgacgatcatggggcccagcgacagcccctactcggggggcgtgttcctggtcgccatccacttccctccggactacccgttcaagcctcccaaggtggcgttcacgacgaaggtgttccaccccaacatcaacagcaacggcagcatctgcctggacatcctcaaggagcagtggagccccgcgctgacggtctccaaggtgctgctctccgtctgctccctgctcaccgaccccaa

SEQ ID NO: 273561 - DNA, 928 bp, Zea mays
ctccccaacttcggctcccaactcccaagtcccacccccactccctcgctcaccagaggaactagcggaccaggcaaagccgagccgcaaccgcgaagatcttgcgtggcctccttttcccagctcgtcactgtgccgctcgtgcccttcactcccggtccgcccaaccaataatccatccatccatccaccaccaccaccccgctgcggcgatgtgcggcggcgccatcctctcgggtttcatcccgccgtccggggtggcggcggcggcggcggcggcggccaagaagaagcagcagcagcggtgccgtgtgactgcggacctgctatggccggggcccggcagtaagggagctccccaggacaaggaggaggacttcgaggccgacttccgcgagttcgagcgcggcctcggcgaggatgacgtggacagcgccggcgaaggcggcgaccccgaggtccaggagcttcctccgccggagccgacgaggtttgccttcgccaccgcggccaaggcagcagttgatggcgtgatgacgacgactccaaaggatgtccaaggagatagagcagtaaaaaagcgcggccggaagaaccagtacaggggaatcaggcagcgcccttggggcaaatgggcagctgagatcagggaccctaacaagggcgtccgcgtctggctcggaacctacaacaccgccgaggaggcagctagggcatacgacgccgaagctcgcaagatccgcggcaagaaagcgaaggtgaatttccccgatgacgacgcgccaggcactcgtcacaggccagcgaacgcagcgcctaggctagtagctccacccccaccccccaaggcctgcgccgatgagatcttaacaacctgaagaacgacgacggcgacaacaacaacaacgatgatctgtttgcgatgttt

SEQ ID NO: 273562 - DNA, 459 bp, Zea mays
tttttggctaacgcctttgcctccacatcgactcccgtgccccctgacactcgtctcccaaatcgccagcgagagccatgccgcctcctcccctgccctcgccgagcctgaccgactgaccccacctcgccactgttctttccctgccacctgggccccacagcgcccccttaccgtcgccaccaaatccccaaatcccggaggcacgaggagggaattcgtcgcctgaccgatcggccgatccactgccgtcggcaccccaatccgccgctgccgccatgttcaacaagatcatcaagaggggaaaccgcatgggcgcgcgccgggacatcgcggaggccgccgcgcgccccgcagcgccctcctcgtcctccgggagcggcggcggcggcgcgggggcagccgcgcccgtcaccgtcaaccacgcctcccgggccacagcgccttcgccgtcctcgc

SEQ ID NO: 273563 - DNA, 576 bp, Zea mays
ccctctcgtcctcaaccacaccccaccgcaatgcccagaggtccccccaatgtcggaagggcgacgggttcacccacaccccccgctggcggatccccccgccgcctgcccgcccgcgcgccaagaattccattcacctccccccacgctgccaggagctctgcccggcccccgggtgccgaacgaccaccaggttcacccgtgtctgccgccggcggatgcccccctcccccggtggctaggagctccattcgtgctgccgtcgtgtgctgctgggcgtctcccccaatggtgttacagcatgggcattagagcactcaatgacggacggggagctactctggcgcgcatcgttcaccccggcagtacctattctgacgcgtatggtaggtggccatcatgttcctcacgcaagggcaggtgcaactcgggaggtgcctcactactgcatctacgtccacacgctatcggccaatttcaccttcaaatccatcttcccccaacgcctaatacccagtaaggctaggccacatctctatcatatatgaaagccgttttggctgtcatacactttcg

SEQ ID NO: 273564 - DNA, 487 bp, Zea mays
cacgcgtccactcacctccattccaagcacatattcccggcccgtgcagctcaccaactaccttgcacttcaattcgtcttatcgcggcacgcacagatatatatagattagtacctagctagatgctcatttagctgcagaggcgccatgattggggtgcgcattgtcagttataagtctctgatcatggtgctactgctggtgctcctcgtctgcgttgtctcgccggcgacggccgcggccggccgggcggaggaggcgcacctggtgcccgcgttgtacgtgttcggcgactccaccgtggacgtgggcaacaaccagtacctgccggggaactccgcgccgcagctcccctacggcatcgatttcccgcactctcgggccaccgggcgcttcagcaacggctacaacgtcgcccacttcgtcgcgaaactggtggggttcaagaggaaccccgccgcttacctgtacctgacgccaagaacg

SEQ ID NO: 273565 - DNA, 496 bp, Zea mays
  unsure (1)..(496): unsure at all n locations
cgcattagcgcggccagagagagatgcgggtgggagttgggatacctcggaggcggcgacgacaggatcgcagtggtcagtagccgggtcggccggtggccgcagattctcaccagcagcgccatccctcgccgtcgcccggcgctccagcccagggcaggagaggaggccactctgactgtcactctgagcttcgcgtcacctgagtactgacggacgacatgggagaagttgaggacatgtacacccaagacgggaccgtggacatgaaagggaatcccgccgtgaagaagggcaccggcaactggcgcgcctgcccctacatcctcgcgaacgagtgctgcgagaggctggcttactatggcatgagcaccaacctggtgaactacatgaagacccgacttggccaggtgaactccgttgccttcaacaacgtcaccaactgggcagggacgtgctacatcacgccgctcatcggcgccttcttcngcgacgc

SEQ ID NO: 273566 - DNA, 548 bp, Zea mays
gctaggagtagatcttcatccaaacccctccaacgacgactaggtcggcgttttctctccctgctgtttcaggtttgttacttttcgacctgtggggtttctttcaaacaattgcatttcatctagcattcacatgggaagctctcaaatctgccagcttaaaaactagatgcaccaaacatgctatctgagcaccgcactgatacaacctttgatcagtatttagtactacttgctcttccacatcaatgcttctggtactcccctttcattgcacgtttacatgacatggaacagagactgaatttagtcgagtgggttcacctgcagttccggtatgcaaactacacgaatgatgcctacaacaagagtgggaacgaatccttgtggctgcagctgataaaccagagagcatagacttaacctttgtgctcttctcgacaggcttctttgctgttagactttaaccaattcatctcatgtcccaagttcaattttatgtaatgaggattgcatggtattttttggcaatttatctttaatgaact

SEQ ID NO: 273567 - DNA, 689 bp, Zea mays
cgattcttgaccatcctgctgttctgccttctccgtccgcgccttcgagaaggccacagagcgaaggaattgcagagttttcttggcgcgaaagaaggggagagagagagagaaagacgaagatgtttatccagaaggcatggaggacggcggcgtttgggctctacggcttcaaccatttcacaaaatctggtttcctggagcatgcgaagaaattcagagaggaggatatgcagatccggttggatggaaaaaattgcctagtaactggagcgaattctggcattggttttgctacggctgagggcttggcttcacatggtgctaccgtctatatggtctgtcgtaacaaggagagaggggaggcagctctcaaccaaataagatccaaaactggcaatgcacacgttcatctggagatatgtgacctttcatctatcaatcaagtaaaatcgtttgcaacaaagttcacttcgatggataaaccactccatgtcttggtaaacaatgctggcttactagagcacaagcatgagactacagcagaagggttggagctcaattttgctgtcaatgtagctgcaacatacactttaacagagctagttatgccgtcattggagaaagcggcaccagatgctcgtgtcatcacagttgcatcaggaggcatgtacaccgagccactgaac

SEQ ID NO: 273568 - DNA, 747 bp, Zea mays
tttcgttgctacctgcattcgtccccagcgcctgctgccaccctatccctgctccattccaacttcgattattgtttcctttgtttgggttgacggtgcagttacatacatgaatgttttcagcgcagggctacagtgtcctcctccctgagaaattgcaaaccggcaggtggaacgtgtaccgatccgcgcgttcaccgttaaggctgataagtagattccctgacaccccagacattggaacgctgcatgacaatttcacgtatgcagttgagacatttacagactgtaagtacctgggaacaagaatcagagcagatggaacaattggagactacaaatggatgacatatggagaagctagcacgagcaggactgcagtaggttctggccttatatatcatggagttcgtgaaggtgcatgcattggtctgtattttgtaaacagacctgagtggattatagttgaccatgcttgttctgcatattcatatgtatctgtgccactttatgacacacttggcccagatgctgttcaattcattgtgaaccatgcagcggtggaagttatattctgtgtgcctcaaactctaagcactctgttaagttttatagttcaaatgccatgtgttcggcttatagtggtagttggtggagatgatgcaaatctgccatcaacggcagtaactactggagtgcaaatcataacttactccaggttgctcatccagggaaaggctagccctc

SEQ ID NO: 273569 - DNA, 420 bp, Zea mays
cgcgaagatcgaggcgtattacgacgagacgggaactggactggaaatcatggtcccaaagcaccgggttggaccggaggagcatgaagttcgggtgtgcatgaggcccccgcatcttggcgacagcgatcttgtgctatcctagaacgaggaaaacaggtagctttcggattttccagtgccatgtttattgccatgagatactcgaacgtaacaggtggtgccatggatcagtgagagccatcatatttgctgctaaacatgtagcttataagttgagaaattcttttcctccataaggccccgttcggttaggctggaataagactaggaactattccaggtgaccaattgttatactgcaaattatacagttattccagctgggatccttcctggagtagattcctgaataaccga

SEQ ID NO: 273570 - DNA, 878 bp, Zea mays
gttgaaggatcttcgctggaactgtactgggagaacctcaagaagtcatggatatgggaagaacttcataaagctaggaattatagaccagcatttgaatacggattaattccgggtatggttttgtctgcactggaacgctacatattcaaagggaagtcaccttatacattgaagcatgggagacccgatcatgaagcaacagacacggccaatctgcatgcgcctattaaatatcctaaaccagatggacatataacatttgatgtcccaacatctttatacaggagcaatacaaaccatgagcatgatcagccgcctcatctccgcttgagggatcctacagtacccgaacgagtaaatgttgcactgtatgcagcgccagaatcacgctattgcccagcccgggtttacgaatatatctctgatgagaaaggtgacccaaagcttcatataaatgcacagaattgtcttcattgcaaggcttgcgacatcaaagatccaaagcagaacatcgagtggacagttccagaaggtggaggtggtcctggttacacagtaatgtagaatgctcaatgatgaaaatatgttgccttcaaaaataataacggctcattcaccactggtgtcaaactggaccaaatccctggctaattgggttggaagttaccccagacatctagcaatgagcaacttccttaaagcagtagacaggatgtcaggatgttcctagagctatgtaccgatcaggatcagtcagggaaagaagcgtgcatcacatggatgtggtgcctgtaaaactattgggaagatgcaatttgtcgaccaataacaggcgctgtaagaaagatctgtccccaacgaaatatcgtaaggtg

SEQ ID NO: 273571 - DNA, 478 bp, Zea mays
cgcttgtgtgtgtctgtctgtccatccatccatccatcccgctgccagtcctcgcgccggccaccccgaaataatcggaaattgcaacccggtccacgggtcggatcccccaaaccgacgaaccctcccgagctcgcccggcgatggggatctcgagcatgccggagccgcgggacagcctgctggggtacctggtgtacaacgcggtggtgtcgatcgcggcgctggcggggctggtgcgggcggcgctggtgttcctggacctgcaggccgcgcagctgcccgggggcgcgggcgcgggcgcggacgacgaccgtctcgcggcgtcgggccccggcctgggcctggcggagcggttcctgagggccttccggccggcgctgtacggggtgctggtgtccacggcgcccggcccgtcgacgagacgccggtgctccgctacccggagctcgagtgatccgggcctcggcggccgtcg

SEQ ID NO: 273572 - DNA, 685 bp, Zea mays
cccacgcgtccgcccacgcgtccggcgtgaggcgtgagtccgtgaccattcccgacggccgtcccaaaagaaccggaaatttacaacccagtccaccacgggccacacaatccccaaatctaacccctccgacggcgatggggatctcgagcatgccggagccgcgggacagcctgctggggtacctggtgtacaacacggtgatctcgatcgcggcgctggcggggctggtgcgggcggcgctggtgttcctggacctgcaggccgcgctgccgcccggggacgacggcggggaccgactggcggcgtcggggcccggactggcggagcggttcctcagggccttccggccggcgctgtacgaggtgctggcgtcgacggcgacgacgtgcgaggcggacggcggcggcgacgactgcagcgtgtgcctggccgggttccgggcgagggccgtggtgaaccgcctcccctgcggccacctcttccaccgcgcctgcctcgagacctggctccggtacgagcgcgccacgtgcccgctctgccgcgcccacgtgcccctccccgccgacgagacgccgctgctccgctacccggagttcgagtgatccggtaaaaacccaccccggtcgcgtcgcgcctcggctgtgtgctgcacgttccgtgtggccttccgtgtacgcgtagc

SEQ ID NO: 273573 - DNA, 492 bp, Zea mays
acgacggcgggccgcgggggccggcgatgaagcctgcgggaggaacggaacgtgaccctcgaggcgggcaaatctggatgcttccttccagccgacgcatcccatcccatacagccccgggacgtacggtgatcggtgaccccactccatcccacggccacgccacacctcctctccacctcctcgtcctcgattcccaagcagtcagtcttcccctcccctcccctcctcccgttgggtaggctggcgagccgccggccgccgtcccttcctccctggatttgattggtgctcgcggctgcggcccagcgagttccttgattcggcggggagcaccgccatcgccatgggagggcaccgctggctgtcgtgacctcaccttgccgctgcagctctgtacctagtattccagaggtgatttctcttcattgacagagagcaaatctggttcgtgatccctagtaccagagagggacacggttttcctatcga

SEQ ID NO: 273574 - DNA, 654 bp, Zea mays
cacagcgatccgagaccatgtccatgcttctacagttcctctttctcagcctcatcgtactcgcaacgtccactacgggtggtgatggccatcagttcgcctactcaggcttctccactaacgatctcgtcgtcgatggatctacaaccatcacatcaaacgggctcctcgagctcaccaactcgaacggactaccagacacgccacgccttctagccaagctcggtgtcgttcaccaggtcacccaacggaacggtgcactctttctacagctccttcgtgttcgcaatcctgtccgtgtacaccgacctaagcgcccacggcatggccttcgtcgtggcgccgagcaggaacttcccgggcgccttgcctgggcagttcctcggcctcaccgacatccggaacgacggcaacgcgagcaaccacttcttcaccgtcgagctggacaccatcgagaacaaggagttcggcgacatcaacgccaaccacgccggcgccaacgtcaacggcctcagatccctcaactccagctccgctggctactacgctgacggggacgtcaacggcggcgagttccactttcacaacctgagcctgatcagtcgtgaggctatgcatgtgtggatggactactatgcctcggtttcaagcatt

SEQ ID NO: 273575 - DNA, 449 bp, Zea mays
acgcacgcaggtcgtaggctatcctcaatccccgatcccgtgcggcggcggttccatagcaacacagtacggcaagacggcaagtccaagtttgcagcgattgcagctccactgctccccaccttctcgccgtgcacgcctgcgcagcgcgcggcgaacggttcgtcggtgccgtggtcgtggtcgtgcgcgagcgcctgtccacggcgggcccacggcgaggtgcgaagccgctacagggcccacggcgagcactgaccgccgagcgggcgaggccgtgacaagcacccactacgtgtccagcacaacagcacgccaggaacagtggtccagctcccactatggttctaaccagcaatatttcggttcagaagaccttgtaccaggttttatctgtgagtgaagacgctacatacgatgagattcgcgcaccatacaggtctgccgct

SEQ ID NO: 273576 - DNA, 596 bp, Zea mays
gcgtccgggacctggcagaagacgagttctctgtgctttcccgcagtctgcgagggatggtgcagtagcacagaacaatctgccctctgctccaagaaatgagaggccatacccaagcccacttcttcctccaccaccagcatctaagaggcctgtttataccgaggcaagcagtgttgactatcttagtggtgactcctacaagtcagagaaggtttcagatgatttcatcaacccaactgctccagctaacatatccacatcatcccattcaaaggcagaagcacatccaccgccaagttatggtggcaggccagacagagtatctgacgacttcataaacccaactgcacctagcttctcggcgccttctcgtcctacaaatgaggagccagcccgcccatccgtgaagcggcaagagagcctacctgacgacgacttcataaacccaactgctcttcctggtttctcgtcgtcttcagctactaaggagtctggcgaggaccttccgaaggctccatgggaagcacaagctgccgcgggttccctaccgccgcctccggcgatgtacggccagagacagcagtacttcgagc

SEQ ID NO: 273577 - DNA, 418 bp, Zea mays
cccacgcgtccggcctccttcgtccctcgatcacaactgctcctctctccactcccctcttcctcgacagatcctcaatcaagcttcatctgtgccgtcgtcggcaatggctccggccttcccacgccgccgtccaacctcccccgactctcctcctcacaccgccgccgctcccatggcccaccctccctgctcgcctccatggccacctggaggcggattcggcctccccgagtcaccgcccaacgtctcgccgcccaaccaaagcgagaaatccactgggcgaagcttctgcacctcccgaacgggggaggggagggggagcacgccagcactatgtgcctgcgggtaggggtttctccccggtccgatggcgtacgccatgtcgtcgaggtcacgacccgccgggcacttcgga

SEQ ID NO: 273578 - DNA, 727 bp, Zea mays
cccacgcgtccgctcactactacatacatcaccaactaggatcgatctctcgacagcaaatagctagcaatggagaagtacaccaaagccctagcgtcattgctcaccatgctggtgctggcacctctcctcgccatggccaccgacccagaccccctgcaggacttctgcgtcgccgacctcaacggcaagccatcagtgaacgggtacccatgccagccgccgtcgtcggccggcgaccagttcctcttctcgaccaagatcgccacgggaggcgaccccctggccaacccgaacggctccaacgtgacggagctggacgtttccgagtggcccggcgtgaacacgctgggcgtgtccatgaaccgcgtcgacttcgcgcccggcggcaccaacccgccccacgtccacccgcgcgccaccgaggtcgggctcgtcacccgcggcgagctcctcgtgggcatcgtcggcagcctcgactccgggaacaggtactactccaaggtggtccgcgccggggagacgttcgtcatcccgcgcggcctcgtgcacttccagttcaacgtcggcaaggaggacgccaccatggtggtgtcgttcaacagccagaaaccgggcatcatcttcgtgcccctcacgctgttcggctcctctccgccgatccccacgccggtgctctccaaggcgctccgggtggacgccagtgtcgtggatctcatcaagtcca

SEQ ID NO: 273579 - DNA, 490 bp, Zea mays
aagactatgacaacctcgataaaaaagaagatacagatgaattcctgacgcctctacagtcaaacgaggttcctggggtgccagctgaaggtgaagtggggcacctgttgcagaacactgagcctgttactgatggtgaccatgttgtcggtgaagaagcgaatcagtttgacaatctcattgcatccgatggtaatcaagatccaccaccacctttgcccatactcgatgctgcaggcccctcggaggaaattcctgatgtagaagaaacatcagatcccaaaatggatttgccagaaaaccagcatttcgatgaaacattaacttcagatgcaatggtgctagattcagatgttgtgcccatccaggacatctctgaaggtgccattgctgctgcatttcacccagaagacaaaggtgtcgagcagaacccacaaactcttgacaaagatgaactttctccatcgggatgcctgactatatggaacat

SEQ ID NO: 273580 - DNA, 1049 bp, Zea mays
gtttgttttataaaattagaaagatacacgttgtagagcggtagttctgagggtgaaaagatagtctcggtacactcatacagggttgtgcagttgtccttcccgagagttcaacagacgctcaggctattacatagaccaccctgtactatcataagcacgactaaaagtcccagagcagagaatatgcagtgcgctttacaaggctgttcatgtctatcatgtttgttggtcatccgtccttatttcgatggctggatggtgcgccacgatgaggttgtacgcgtccagcgtgaggaagtcgtccagctccggcgcggtgcactgccggctgaagatcctgcccgcctccgcgtaccgcccctttcggaacctgtcggggccgacctcagcctcgaccctcgccatctcctcctcgacgacgcgtgcgagtagctctggcgtcgcgcgcacctccacgccgccggcgtccagcgccgctccgtggcgcagccactgccagttctggacgcggctgatctccgccgtagccgcgtcctccatcaggttgtacagcgggacggagccggagccggccagccacgccgcgaggtactgcacgcccacgcggacgttgagccgcagaccgtccacagtgcgcgcgccccgcggcggctggatgaggtcctcctccttcacgctggcaccctcgtgccctgcggcgtcgccgatctggttcggcctcccgccgaggtggccctcgaagacctcccgtatcgccgggatgagccccgggtgcgccgcccacgtgccgtcgtggcccgcgcgcacctccctcagcttgtcctcgcgcaccagctccagtgccgcctcgttcgccgccgcatcgtccttgatcgggatctgagccgccatgccgcccatggcgtggactccgcgcggtggcaggtgtggataggaggtgagtaggagcgcatgaagtgctgggccatgccgacgagggcgcggtcggggaggaggcggtccgggtgggcgcggaacgtcttgacgtagctgaagatgtagtccca

SEQ ID NO: 273581 - DNA, 541 bp, Zea mays
aaagttaaataagtttgatttataaaattagaaagatacacgttttttttttttttttctgagggtgaaaagatagtctcggtacactcatacagggttgtgcagttgtccttcccgagagttcaacagaagctcagtttattacatagaccaccctgtactatcataagcacgactaaaagtcccagagcagagaatatgcagtgcgctttacaaggctgttcatgtctatcatgtttgttggtcatccgtccttatttcgatggctgcattggacagcgatgtgttatttttgaaagctgactccactgccacaaaggcatgcatgtattcagagcttgcacggtgacgcacctggatggtgcgccacgatgaggttgtacgcgtccagcgtgaggaagtcgtccagctccggcgcggtgcactgccggctgaagatcctgcccgcctccgcgtaccgcccctttcggaacctgtcggggccgacctcagcctcgaccctagccatctcctcctcgacgacgcgtgcgagtagctaaaa

SEQ ID NO: 273582 - DNA, 491 bp, Zea mays
ttcatggccgcccgccgatgccgagtgccgggtcggcgctttctttctcctcttcgggcgcttcgctgcttgcctgctctgctcgcgacctgcttctcagacccgccctcctcgccgcccgcccggcgatgcctcctggccagaggcggcggtggcggcggcggcgacggagatagttagctcttcagattgagtgactggtggtcgccggcggcggagacgcggagtatggaggcgccggggacgagctcgggcggcgccggaggcgagggggccgggggcaccaaggtcaacgaggagctgtggtacgcgtgcgcgggaccgctcgtggcgctgccgccggcggggagcctcgttgtctacttcccgcagggacacagcgagcacgtagcagcatctatgcgaaaggatgcagatgccaaaattccgagctatccaaatctctcatctaagcttatatgcatactccgtagtgtcactatgcttgctga

SEQ ID NO: 273583 - DNA, 1059 bp, Zea mays
cggctcgagcggctcgagctcgagccgattcggctcgagggcgagcagtcgagtgttccctagagtccccgttcctccgccgccgcctgcaaccgcttcacgtgccctgatccatcgcaggtcccctttctgaccccaaatggagccgaagaagtcctctgctcagcaccagccccacgccatggaacccaagaagtcctctccacgcggcgccggggccgtcgccgccaccgccactgaagccgagtccccgttgagcagcttgttctacccgccggcgcccgcggcaaatgggaaagatcaggagttgtacagcattatttacaaagggcagagcgggagcgcacaagctggcgcgacaggtaatggtaaaccgcaatgggctccttccaaaagtcataccgcgtacgcaaaggacggtaaacattcaccaccttatgatacgtcatgttttgggtcatctgtgcattatggtggtcgagattatttctacggcagctctacaaccaagaaagcgacagaatcctccactgactacaaaggggacaagaaagatccagtcgcagattctcatggcgactggtggcaaggctcattttattactaagagaacctggtggcctctccttggagaacaaggaacagaaggagggcagtgaagctcggtttccttgattgctagcagtattatcttgtgtcatagtggacccgctttcgtccagcggtggtgccaatatttagaagcatcacctggcctgggcagatgtagtgtgcgtcttatagtctctgctttagatgtgcaatgtaacgaagctttagcacagtatgaactagaccgcataaaagaatccatgtccattccgccagtaatacgagcgggttggtatctgactccttagagtcaaaagtctgtacaattgtatcgtcgctccaaagcaaaaaaaaacaataataatgtgctggagaagcggcgatgacttcacattgtacacctttaccagctggaatttgacagaagtttggaaactgttcttgtcaattgcattttacagtgttatc

SEQ ID NO: 273584 - DNA, 419 bp, Zea mays
acgcgcgggccgatacaacaccccacagtctctctcgagtgatccccctgtagtccccggccccgtctttccgccgcctcctgcaaccgcttcacgtgcccctcgcaggtcccctttccgaccccaaatggagccgaagaagtcctccgcccagcgccagccccacgccatggagcccaacaagtcctctctatgcggcgccaccgctcctgccgccaccgccgaagccgagtccccgttgtgcagcttgttctacccgccggcgccggcgccggcgccgaccgcggcaaatgggaaagattcggacttgtacagcattctttacaaagggcagagcgggagcgcacaagctggcgtcacaggtaatggtaaaacgcaatgggctccttcttccagaagtcgtttgccgcgaatgcaaa

SEQ ID NO: 273585 - DNA, 790 bp, Zea mays
tgttcttggacgcgtgggcaatgttgcttctcgcctgctagtcgccctattctactccactctgttttctggaggctgctaaactaaacccttcttctccccactccgccctcggacccgccgccgccgccgcttgccgggtctatagccatgtcaccagcggttgcctctgcctcatctggcgaccgcatacgaacctacgaagacttcgtgcgggtacacgcgtacctgctggccgcggcgggcatcccgccgtcgctgcaccggaggctgtaccgcaagctcgcggacgaggtcttcgacggcggggaggtctttgccgtagagccgtgcgaggacgggaggcagcggcgcctcgtgctcaccgccgatcagtctctaggaaaagagtccgatgtcttcctcgtcgaccatgcgtggtccttccgcctccctgatgcgctcaagcagttgagggaagtaccaggattggctgaaaggatggcagcattaatgtgtgtcgatttggaccgcaagattgaagcagatgagcaggatgatgacgagagtgggagcttggagcatgtatcgcatgtagtcgagaaagacagggctagagttcaggagagaagtgattctacagcttggctggaacttgaagaacttggcattgatgatgacatgctagtagccttggatctatctgcaaattttccgaatctagtagctctgaacctatggggaaacaagctgcgggatccagagaaagttatgcaagaaatcaggaagtgcacaaagctaaaggcacttt

SEQ ID NO: 273586 - DNA, 729 bp, Zea mays
cactactatgggaagctggacccctggcgtaccgcgccgcaattccccggcgaccacacgtccggtttatttggaggtgttctgtctgaactgaagagccaaggaacagtccccaaatctatagttcatgctacagctcttgcttgtggtgctcgtgctgttcctcttgaagatgcagcttcgcttattagtgccattgaatccaaaatcagatctggaggggccataatagcgaaacttccttcaaacaacctagcacctctagttcctccagccattgctatgtcatcttctagtgaagatgacgaggagcatgaccacagtgagccctcgcaatgatcgatgtcgatcgcaacgttaatcatcagagctccaacgcgatgaagcttcagagggagctatcggagttcgaaactgaagctggcaactgacctggtctgaagacgaaagaaaatgatcatactgattgctaacatacgcgaagtgaaggactgaagttgttctaaagatcaaagcttccctggaaggcggcagatctattctatgatttgagacatttttttaaagattggattaggattgtagtcacttgtttctgttgagtttatattgtaatcagattaactcaagttaatacctccagtggagaattgtagaaaggagtaaccatgctatgtacatgtcttctgcataaaagaaaggcgatagagtttaaaatccagctgtgct

SEQ ID NO: 273587 - DNA, 402 bp, Zea mays
gatcaaggagacccgcctcaagctcttcaaggatttcttcctcgaggagaggaagaagctggcgagcaccaaggccacggacagcaacggcctcaagtgcgccattgatcacatactggaggcacagcagaagggtgagatcaacgaggacaacgtgctcttcatcgtcgagaacattaacgttgcagcgatcgagaccacgctgtggtcgatcgagtgggcggtcgctgagctggtgaaccacccggagatccagcagaagctgcggcaggagctggacacggtgctcgggccgggccaccagatcacggagccggacacgcacaacctcccctacctgcaggcggtgatcaaggagacgctgcggctgcggatggccatcccgctgctggtgccgcacat

SEQ ID NO: 273588 - DNA, 895 bp, Zea mays
gattgataaaaaccgtcagagcgacgttagtcggctcagctgtagtgtagttgcaggtgttcgccggcacacgcgcgtggccgcgaaccctagatgacaccggcgaacggcgccccagcgcgggcagcggaggcgggcccccacgaggtggagtcggaggccgacgcgttccggcgccaggtcgacgacctcgtctcgaagaccgacgtgctggagcggcgggtgaaagaggtggcggacttctacgatggcaaaaagcacggaagcggcgggaggaagggtggtggtggtggcaggtatggggcatcctcgaggggaatgccggaccttatgcgccagttcggcgtgcttttgaaagagatcacctctcataaagatgcatggccatttctggagccggtggatgttgtaactctacagcttcctgactatcacaacattattacccaacctatggacttctctaccatccaaaagataatggaaaggaaggatggtacttgttacaccaatgttagagaaatatgttctgatgttcgattaatttttgccaatgcgatgaagtacaatgatgatcaaaatggcatccacttgatggctatatcactgctggagaattggagagaagtgctccatttctcctaaagtgagaggagaaaagacaaagaggagatcaaggtgtggagcccaatccttcggagtggacgaaaagcaaggcctgtgtggctatcgacacagagtgagagcccgaatgggtcgtgcggatgcccgcgaaggagcgggcgtttgctgtccaatttaagctggatgccaacacatcccccacaaaggaatttgtggccgcgccccccctctttttctttttgggggtgttttttttttttttttttttttt

SEQ ID NO: 273589 - DNA, 495 bp, Zea mays
cagacgcgtgggcggacgcgtggggtacaatgatgatcaaaatgtcatccacttgatggctaaatcattgcttgagaaatttgaagagaagtggctccattttcttcctaaagttgagagtgaggaaaaaagacaaaaggaggaggaatcaaagggtgttgcagccacaaatacttctcgagaagttgcaattgtaaaattagcaaaagacactgatgatgagctaaatcagatcaacaggaagctggaggagctccggaaaatggtggttcacagatgcaggaaaatgacgacagacgagaagaggaagctgggtgcaggtatctgtcacttgtctccagatgatcttagcaaggcgctagagattgtcgcacaagacaatcctagcttccagcctaaaccagaagaagtggatcttgatatggatgcccagagcgagacaactctatggaggctgaaattctttgtgagggaagcgctggaacgacaggccaa

SEQ ID NO: 273590 - DNA, 849 bp, Zea mays
tccacgcgtccgcccacgcgtccgcccacgcgtccggttctacttctacccatttgttccgtcgcttcaacggcacggaagagaatcgctacccagccaatcgaagtcttctcttgccctgctgtatctcatatcctgttgcgcgagattcttggcgattctgctactggtttttatttttattttgctagttcttgaaatttctttcacgagtgtcagtagccaactgctgataacaacatcctatcgttcctgtagcccctttccgtgaccttgccaaagaatttgctcttctctgtgcgtgtgcaatttcttccgctacagctcaaggatccgctactctgctgttttgggagattcgccatgggcggcggggccgttaacgaccacttcccgggggccagcgacccgctgctccccacgaagcgggatggggacggggacgaggacgacgcaggtgcctccgcgttccacgagttcgacggcgcctccttcgccggcgcggtgttcaacctctccaccaccatcgtcggcgcgggcatcatggcgctaccggccaccatgaaagtgctcggtctcgtccctgggctcgtcatgatagtgctcgccgcgctcctcaccgacgcctccatcgagctgctcgtgcggttcagccgggccgcgggcgcgcgctcctacagcgcggccatggccgacgccttcggatggtggggtaggaggctgctccaggtctgcgtcgtcatcaacaacgtcggcgtcatgattgtgtacatgatcattataggcgatgtgctttctggatccacttctggtggtgagcatcactatggtgtgttacaaggatggttt

SEQ ID NO: 273591 - DNA, 676 bp, Zea mays
  unsure (1)..(676): unsure at all n locations
nttccacgcttatcggctttggcttgcccttgcaaggctggagacctatgaccaagcaaggaaagtacttaacaaggcgagggagaagctccccaaggagcctgccatttggattacagctgcgaagctagaggaggctaatgggaacacacaatctgttaacaaggtgattgagagaggtattaggtctcttcagagagaaggaatggatattgatagggaagcatggttaaaggaagcagaagccgcagaacgtgctgggtctgttttaacttgccaggctattgtgaagaacactgtaggcattggtgttgatgatgaggatcggaagcgcacgtgggttcctgatgctgaggaatgcaagaagcgcggttcaattgagacagcgcgcgccatctatgcacatgcgcttactgtgttccttactaagaagagtatttggctgaaagcagctcagcttgagaagagccatgggactagggagtcacttgatgcgctcctcaagaaggctgttaactacaatccacgagctgaagtattgtggcttatggctgcaaaggagaaatggttggctggagatgtgcctgctgctcgtgcaattcttcaggaagcttatgctgctatccccaattcagaagagatctggctggctgcattcaagctcgagtttgagaac

SEQ ID NO: 273592 - DNA, 693 bp, Zea mays
ctgcgttgccccctcatgcagacgtgtaccatctcggcatccagtcgcagcgctcggccatcgccagccagaggtctggacagctgcaaaggcccatccagaaatggaagggccctgacaagatcagcaggatctatggagcctggatagatgagaacgaatagaagaaggatcttctacggtgggccgaagggaagctgttacttggtatccgtccgactccacatcagctggtggaagctttacctggcttagaagatctcgttagcgctgcaaaaccagagtcaagatcatctttgcaagacctgtattggggagataaactgctggaacatagtgccgctttcttccgttgaactcagtagcattgctatgcttgtgtaatttgtgtgttggatggaggagcataatagcatatagcgagtcatggtgcaccctgtacagggtggctgagctgcatcctgaaggctggttgttcaggtgcgtccgtgactgtctgttggttcttgttttcgggctattattattgggccggatatttctagccttactctttggcccattgagcaaaaaaaaaaaaaaaaaaaaaaagaaaaaaaaaaaaaaaaatcaaaaaaaaacaatatcaacaaacaaacaagaaggaacaataaagcaaaatcaactaacaaagaatggctaggtccatccggg

SEQ ID NO: 273593 - DNA, 543 bp, Zea mays
ctggatcaaatactcagattaagcagtttgcatgtacaagattcaaagctgaatttccgatttttgacaaggttgatgtcaatggacctaatacagctcccatctataaatttctgaagtccagtgctggaggatttttgggtgatctcgtgaaatggaattttgagaagttcttagtggataagaatggcaaagtcattgagagatatccaccaacaacttcacctttccagattgagaaggacatccagaaactgctcgcggcataagtacttccaagtctttcagttgagtatctcagtatctgtatataggtcatatattttttcccctgtattgcaatcattttcgtaaaataattcactcattatctacacgtgattatagatgtaacatgagactatattagattttggactatcaactccgaagtttacctgtacatgaaactctgcccaacggagtagcttgggtgaactggctgcctgggagcatcctgattcctgaatgcttcggctcacctgtagcttcgttgttgctttt

SEQ ID NO: 273594 - DNA, 410 bp, Zea mays
gctgctcctctccctccccctgcttggcttcgctcgccttctcagccacgccgccggtcagccacgccgccgcttccctcggtgggcacccccctcccccatctggaacccactcccgccaacgggtatctccattcccccctgcctaccttcgaaccgacgtgctcggattggctgacccgccgcgggcgctccctccgtcgatcaaattgaccgccgcggcgcgcccgtccccatctccgccaatctccggtttcattatgattaataaattgtgtattaatgtagtggaggagccaggccatctagtgacaagtaagtagcattatcggcgaagaaaacatccacagctgagttgccaaagaaaggcggataaatatgtcccaaggaactttctcgctgccaaaaga

SEQ ID NO: 273595 - DNA, 421 bp, Zea mays
  unsure (1)..(421): unsure at all n locations
agaagattctgtaagtgctcctagccagctttcatttggaagttttttgaaagacgacaagttgaatggggattccagcattgctgaagataagacgtgcaatggtagcgctaaccaagaacaacggacaaagctaacaggaattaacaggccaaccagtatcgcttccaaattcatatcatacaaagatgtggctgtttcgccccctggcacagtattgaaacccattttggagaagaaggaagcaaaggagaaagatagtggacgtgatattgacctagcactgtcatccgaggaagaagataaaaagtttacagaaaaagagaaagaaaagccaagtgaggacagtagcanagagattctttcaattcagcgagatttagagagtcatgcagaaatacctcctgacagcaacagtgat

SEQ ID NO: 273596 - DNA, 335 bp, Zea mays
  unsure (1)..(335): unsure at all n locations
cccactacgcggtcttcgctcgctcctcgagttcagtcctcacctccccaccgagctccattaatggcgcctcccctaattttgccataagtgccgagaccacgtggggtctgggaaggaaaggctactgccacttcagaggtcggcctgngaggctgcatcgcatccacatggggtaccagcccatgcacggcaacggcgggacagccggtgccgggacatcaggctccggcggcggcggcggcggagaccacttgcgccaccaccaccagcagcgcctgcacagcccccgcatggcccgcggaggctccatgacgcgccgggccagctcgttc

SEQ ID NO: 273597 - DNA, 1360 bp, Zea mays
ggtctttctggagaaaaccatgtttccgcaaaggaaatgtggaacaccatgctacagaatggtcactttgatcgggaaaatttcagtgctggtcccagtatgccttcttctccaggacagaaactctgtgcagctgtctcagcctcaacttgggttgagccacatggtagatgtactgttgtgtttgctctggcttggtcctcacctaaagtaaagtttcaaaaaggatgcacatataacaggtggtacacccaattctacggaacttctgagaaatcggctgttaatttggtacatgatgccttaacaaaatataaactttgggaagaagaaattgagaagtggcaaaaccccatactgaaggatgaaaggcttccagaatggtataagttcactctttttaatgagctttactttctggtagctggggggactgtttggacagatggtcaacccccagcaatcgatgagaaaaagagtcctggttttaatcaccagaagtcctcaaagaggggtactaaagacaccaatcagggatctgttaaagatagacatgtcaacctggcagtggagcaagtacctcatggtggttacatggctaatggtgatgatcacagtgtatccaagttcgcagcagttcatggatcagaaatgcaagaacaaatcaatggactcaagtcagaagagccaattccttacttgatttcaaaggatggccctgaacacgttggcaagtttttgtatctagaacgagtggaatacatcatgtggaacacatatgatgtgcatttctacgcatcttttgctctccttgatttgttcccaaaaatagagttgagtatccaacgtgattttgccaatgctgtgctgtatgaagatcggcgcaaagtaaaatttttggctgatggtacatccggaatccgccgcgctaaaggtgcagtgcctcatgacctcggtacgcatgatccgtggcatgaaatgaatgcatataacatacacgatacaagcaaatggaaagatttgaaccccaaatttgtgctccagatatacagagactttgctgctacaggtgatatgcaattcggtcgagatgtttggcctgcagtctgtgctgctatggactatatggatcagtttgaccgtgatggtgatggtctcattgagaatgatggatttcctgatcaaacctatgatgcttggactgttcatggaatcagtgcttactgtggttgtctttggcttgctgcacttcaagctgcagctacaatggctcatcgccttggggatcggcactttgctgagaagtacaagctcaagtttataaaagccaaagcagtatatgagcggaagttatggaatg

SEQ ID NO: 273598 - DNA, 388 bp, Zea mays
  unsure (1)..(388): unsure at all n locations
catcgtcgacgctgcttctgggaagacgttcccgacgctggacccgcgcaccggcgaggtcatcgcgcgcgtcgccgagggcgacagcgaggacatcgaccgcgccgtggccgccgcccgcagggccttcgacgagggcccgtggccgaggatgaccgcctacgagcgctgccgcgtgctgctgcgcttcgcggacctgatcgagcggcacgcggaggaggtcgcggcgctggagacgtgggacaacggcaagacgctggcgcaggcggcgggggccgaggtgcccatggtggcgcggtgcgtccggtactacgccggctgggcggacaagatccacggcctggtggcgccggccgacggcgcgcancacgtgcaggtgctgcacgag

SEQ ID NO: 273599 - DNA, 673 bp, Zea mays
cggacgcgtgggatttggtggtacacgggggcacggggcagatctcttgggtcatcctctacgcgagcgggccgcttctcccatccagccgcgcgcggcgtcgccggaaccggagaagggaggggaaggagcgcgagatggacaaggccaataagctcagcaccggagcgggggagaaggcgaccaagagcaggagccacgggtccacggcgctgttcgtcgcggtggactacgcgttcctgctcgtcttcgccggcttcctcgcctacctcgtcgggtcgcggatcctcccctccgccgccggctccgcctagaccggcccgcgttcgtggatctctcttctttcttccacgtttttttggagtcgatggctgcgggagcaccgggatcttgccgggtggttctcgtctcgatctgatgccgctcccgcgatgtaatctggcgacaatttgacgagaagagaagtagcggcgtgtttcttggcaactcgcctggtaatgtgacgcatctttccttattctgttgctattgctactagtactatccctgctcgtgtcgtgtgtgctgagagtctgagattgcttgggactttgaatacggcgtttatgacgcgatctgtgatgtctgctagcaactccccccagcttaaagtaaacccatcagctttggaggg

SEQ ID NO: 273600 - DNA, 555 bp, Zea mays
gcacaatgtttgttcctgaaattacatccctccagaactcccaaaatcagttcaccgtaccttcgagtttcaagcgccggagaagagagtattgaggtgacgacaagatcactagacgtccactgtccagtttaggccatcttgagagaaaggtttcttgctgtaccaaatgacggagaaaggatatccaggactgggttatcattcaaacttcaactgaactatccaagtagctaggtttgaagtgtgctgcaatgcttcaatgatgttcattttccaaagatctgagcttcgctagtgttggggtctttttctccgccgaaggtcctctaggcaaaaacaccttcggcaagacagtacaaaggcaggtgcaacatgaagatataagccgaagctccgatcgaaagagcttcggtttggtgtcatgctaaagacgaaggacgataccgacttaaagaggaaaatactgtatagcccttggtagtctgtattatgatcataattagttattaatgatataaatgtaatttcgttcgggctacggctcgcgcctat

SEQ ID NO: 273601 - DNA, 1233 bp, Zea mays
cccacgcgtccgcccacgcgtccgcgctactgcatctgcggctcatcaatccgtgcagtcccagagcaccccgtcttcccgctactcccgcaaggacgctcgtcgcttccttctccggggcgtggcaggcaccttctggtagagcgagagcgaagagcagcgccgccggcagttcgcgctatggcgtcccagcaggtgttccgggctcagcagcagcagcagcagcagttcccggctcagcagcaggagtcccagccggggaaggagcacgcgatggacccccggcccgaggccatcgtccaggactacaaggccgccaacaagctcaaggacaaggtggcgctcgtgaccggcggcgactccggcatcgggcgcgccgtgtgcctgtgcttcgcgaaggagggcgcgacggtggccttcaccttcgtgagggggcaggaggagaaggacgcggaggagacgctgcgtgcgctgcgcgacatcgggtccgagacgggcgcgcgcgagccgatggccctgcccgccgacctcgggtacgaggccaactgccgggaggtggtggagcgggtggcgtcggcgtacggcgggcgcatcgacgtggtggtgaacaacgcggcggagcagtacgagcgggagagcatcggggacgtgacggaggcggacctggagcgcgtgttccgcaccaacatcttctcctacttcctggtgtccaagcacgcggtgccgcgcatggagcccggcgcctgcatcatcaacacctcctccgtcaacgcgtacaagggcaacaagacgctgctggactacacggccaccaagggcgccatcgtggccttcacgcgcgcgctctcgctgcagctggccgacaggggcatccgcgtcaacggcaaggagaaggtggagcagttcgggtcccaggtgcgcatgaagcgcgccgccagccggccgagatcgcgcccagcttcgtcttcctcgccagcaaccaggattcgtcctacatgtccggccagatcctccacgtcaacggaggcgtcatcgtcaatagctagatacggaagctgttttgctgtcgtgtccaagtctaagggaacaaagcgagtgtccgtgtgtaccaggtagcagtgtcagtacgtgcacgcagaaaggcaaggcagggttcagttgtagcggtgtgtagtgctgtcagcacagcacttgtaaagaaggaacgtgtctgaataaatatgcgtccaagca

SEQ ID NO: 273602 - DNA, 410 bp, Zea mays
cggacgcgtggcgactgcatctctggtctcccacgcctataatcccattcccctccttcaaagccctgcggcgatttcgattcttcccttctatctccaggtatacccatcggagcagcactgacaaaaattctccagatatggcaagcaaaaggattcagaaggaactcatggatctccaaaaggacccaccgacatcatgcagtgcagggcctgctggagaggatctattccactggcaggccacaatcatgggtcctagtgacagcccctatgcaggcggggttttctttattaatatccattttcctcctgactacccctttaagcctccaaaagtgaacttccaaacaaaagtttatcacccaaacatcaactctaatgggagcatttgcttgatacctcgagga

SEQ ID NO: 273603 - DNA, 340 bp, Zea mays
atcacattcccctccttcaaagccctgcggcgatttcgattcttcccctctatctccaggtatacccatcggagcagcactgacacaaattctccaggaactccaagaattcatctgatatggcaagcaaaaggattcagaaggaactcatggatctgcaaaaggacccaccgacatcatgcagtgcagggcctgctggagaggatctattccactggcaggccacaatcatgggtcctagtgacagcccctatgcaggcggggttttctttattaatatccattttcctcctgactacccctataagctccaaaagtgaacttcgaacaagatttatca

SEQ ID NO: 273604 - DNA, 975 bp, Zea mays
agacggttctcaaccaactctaccagtctccaacaaagacgcaaacgaagagtctgattacaccgtcttggcaaatggtaccattgacaaacgggaagatgatatcaggccactgactccggatgtaaaagagagtcaacccgagtttgtggaatggaaggaggaagaagctgaacctggtgatgttgctgagaaggatactgcagttcctggtattgaggttgaaagtgagaagcagctgaattccatggacgatgttatgctttgtgatgccgagttaggagaggaaaagaagagtggtggtatgcttggatcttcagcacctgaggcagaagcagcatcgcctgtttcatctgacatcgattcaatcaagcacccggaacaagctgctgacagtgctgtatcagagtatccaatgggcgaacaaaatcctgagatatgaaatgaatttgagggcagcagagttccgctcacgtgatggcggatgatgatggacgtgcaggaagcacttggaactggttggaccattactgtacaagcagtttgaggatcatgtgtgggttttctgttctactctcttggaggaaggtggtcccggaacatgcatctgatggagcctcaaaggttccacttagtctcatggagatgcttaggttcgatgtgtaacatattcatggagacgcaaaattcagaaagttgacttccctgcccttttccttaatcagtggggttctggttgtgtcactctggtaaatagccgataattgaataggtgatatctggtctggctacatgtccattactgtagttggtgctatctgtacgaaagttttggctcaaatgcagtcagttgattcttgtcatatttagaacttgtttgaaatttgtgtcaacgaaaaaaatatagcttctatttttcccaggtgcttggtgcttaattcatctgttataaatatagattttattttcccctct

SEQ ID NO: 273605 - DNA, 785 bp, Zea mays
ggactgcagcggccggcttcatccctctttcttcctcttcttcttcttcttcacacaagcgtgctccttctgctcttgtgctaagtagctagctcacaacagaagaggacgagaggaagcaaggcggcggcggcggcggcagcaacaacatacaccgctggccgtggcgccatgggcatcctggaccacatgtcgcatgtgtgcagcatcacggagacgaaggaggcgctcaagctcaggaagaagcgaccgctgcagacggtgaacatcaaggtgaagatggactgcgaaggttgcgagcgtcgcgtgaagagcgcggtgaagtcgatgcgcggcgtgacgagcgtgacggtgaacgcgaagcagagcaagtgcacggtgaccgggtacgtggagcccgccaaggtgctggagcgcgtcaaggccaccggcaagaacgccgagatgtggccctacgtgccctacacgctcaccacctacccctacgtcggcggcgcctacgacaagaaggctcccgcgggcttcgtccgcagcgcgccgcaggccatggcagaccccagcgctccggaggtcaagtacatgtccatgttcagcgacgagaacgtcaacgcctgcacagtcatgtgatgcatgcatatgtatagtctctcgatcgtcgtatcatgtgtagtagtacgagctagctagtgcatatcgatcttcgtactgtatcatatcgatcgaaagaaccttaatagccaatacaagaggaatgtgaattaagcctaaaaaaaaaaaaaaaaaga

SEQ ID NO: 273606 - DNA, 748 bp, Zea mays
ggctttatcactactctttcttcttcttcttcttcacacaagcgtcctcctgctcttgcgctaagtagctagctcacaacagaagaggacgagaggcagcaacaacatatatataccgccggccgtggcgccatgggcatcctggaccacatgtcgcatgtgtgcagcatcacggagacgaaggaggcgctcaagctcaggaagaagcgaccgctgcagacggtgaacatcaaggtgaagatggactgcgaaggttgcgagcgtcgcgtgaagagcgcggtgaagtcgatgcgcggcgtgacgagcgtgacggtgaacgcgaagcagagcaagtgcacggtgaccgggtacgtggagcccgccaaggtgctggagcgcgtcaaggccaccggcaagaacgccgagatgtggccctacgtgccatacgcgctcaccacctacccctacgtcggcggcgcctacgacaagaaggcgcccgccggattcgtccgcagcgcgccgcaggccatggacggaccccggcgcgccggagctcaactacatgaacatgttcaacgacgacaacgtagacgcgtgcacagtcatgtagtttcttctcttcctctctttccgtcgatcgatcggatatccctgtcactgtcatcaccggccggccggccggccttattattattcctactgaaaccaacgtcaattatatccgttcatgcaaaaaaaaaaaaaacccacgcgtccgcggacgcgtggg

SEQ ID NO: 273607 - DNA, 566 bp, Zea mays
atcattatatatttaatttcctcccatgcatctgcatgcatgccctgagttttgatgcatgggcggtggttgcagacggtgaacatcaaggtgaagatggactgcgaaggttgcgagcgtcgcgtgaagagcgcggtgaagtcgatgcgcggcgtgacgagcgtgacggtgaacgcgaacagagcaagtgcacggtgaccgggtacgtggagcccgccaaggtgctggagcgcgtcaaggccaccggcaagaacgccgagatgtggccttacgtgccatacgcgctcaccacctacccataggtcggcggcgcatacgacaagaaggcgcccgcggtattcgtccgcagcgcgccgcaggccatggcggaccccggcgcgccggagctcaagtacatgaacatgttcaacgacgacaacgtagacgcgtgcacagtcatgtagtttcttatattattctctttccgtggatcaatacggatccgcccgtcatctgtcatcaccggccgggccgaaagaacaattattattattcaatactgaaaaaaaaaacggcacgcgtgggtc

SEQ ID NO: 273608 - DNA, 427 bp, Zea mays
tgacattatctggttcttattcatttcaagttgttctttcaaaaaaattggaatataagtcattttggaatcgtgtggttctattgctgctagcttagtaaggtaaaatagcctgacctcgtcaacaattagtttttttaggagaaaaagatgcaacaaatgaggattgatgcttcccgcaagagtacatgatgtacaatatatatctttagatggtttcattgttgactgttgtagctgatactaagaatgtagcttttttctttattcaaggtggtcgcagcgatctgtgattgtttatgcccaaagcgtagggttacccgtcttgttagcgctaccttagtgccgcttttttgaaccctagacatctcagaagaggtaccagctgtactttcacgggctttaacaaattatttagaaagccata

SEQ ID NO: 273609 - DNA, 467 bp, Zea mays
cccacgctttcgaccacgcgtccgcttcctcctcctggagtccgtgtcgccgagccccagtgatgacggtggtggtgctggtgatggagaaccgctccttcgaccacatgctggggtggatgaagcggctgaacccggagatcgacggcgtgacggggcgggagtggaacccggccaacgcgtcggacccggcggcgggccgcgtctacttccgcgacggcgccgcgtacgtggacccggacccgggccactcgttccaggagatccggcagcaggtcttcggctccgacgacgacgccgcggacaacccgccccgcatggacggcttcgcgcagcaggcgcgctccatcggcggcggcgccatgtccgacgccgtcatgcgcggctgcaaccccgccgacgtcgccgtctaccgcgagctcgtctcgcagttcgccgtctgcgaccgatggttcgcgtccgtgccg

SEQ ID NO: 273610 - DNA, 376 bp, Zea mays
  unsure (1)..(376): unsure at all n locations
ggtgatcatggaaaatatgtgactcggtcaattgattctgattggtctgtacacctccattggtggtgagcctctcagctgcatcggggaggcgcagaggctctatatgtgtcatgatcttgttccgaactgtcaggttgctgtaatgtagccaaatggaaacctttgtatccctggaacttgaaaggcatgtacctggtatctgcagccagtaagtttggcaatctgaattcgatgccaattcctgggggtattcaaacgtcctacgtccatgtatttatttcagttcatgtgcatctaaacaatattggtatagcctggaaaaaaaaaaaaaaaaaccaaaaaaanncccaaaaaaaaaaaaaaaaaaaanaaa

SEQ ID NO: 273611 - DNA, 518 bp, Zea mays
gcgtcatcgtcgacctggtgcaggagatcgcggaggccgtgtcggcgttcacggtcgttacggccgtgcaggcgtcgggctcccaggacggcggcggcatcgtggtcggcgagaggatggagacggctgccgtggcggtggcagggacgccgagcttctcgccgcgggaggtgtccttcctcctgaggctcattcccgagctagtgcaatagcgcgttcttgctgctttgctggtggaatctcgcgacgagatcctctgtatccgtagagttaggtcactaacgtgtgaatccggcctttttgtttgtcaactgaaatcgaaaaaggttatgggttaaaaaaaaaaaaaaaaaaaaaaaaaaaaaaaaaaaaaaaaaaaaaaaaaaaaaaaaaaaaaaaaaaaaaaaaaaaaaaaaaaaaaaaaaaaaaaaaaaaaaaaaaaaaaaaaaaacacaaaaaaaaaaaaaaaaaaaaaaaaaaaaaaaaaaaaaaaaaaaaaaaaaaaaagggggcgcccc

SEQ ID NO: 273612 - DNA, 830 bp, Zea mays
ctagttctagatcgcgagcggccgccctttttttttgtttttttattttgagtttgaaatcgaaaacttttattctgggtgtgcaaagtttcagattacagagttttattctgggtgtacaaagtttagagatttgacgcacatgtgcactacacgatgtctgtgtcttgcagttgtagtaacaggtagctcttgttacttattaggcgtcaacgtgatatgaggtggtattattggtggtgcttaagattgtgtttccgaaggggctctggtcgtagcagtccaagttgtcgccgtagctgagaccaaacatgtcgcagtagcgtttgtagaagccgatccggctggcaacacgagcgtcggcgccgtggccgcactcgaggccgccgttgatgatgttggtgaggacgccataccccggcagcctccctgcggccacgtcggcgggcgagggcgcccactggcccgtgatgacgtcgtggcaggacggcttgggcggctgcggcgtcatccagtaccagagcgccgtctcgaaggagacagtggcgtcggcggcaaccagacctgggttgcccagaaggtcctggccgatggcctccccggcgggcccgtagttgtagttccaggagagctggatgggcccgcggccgtagtacttctgccccgcggcgcacggccactgggcgctgggctcgcagtagtccggccccgacgcgccgccctgctcctccttgaagcagtagccccaggcgtagggcccgtcgggcgccgtcgcccacccgcccgtcgtctcgtgggacgtctgcgccaggaacgccgccagctcgcgc

SEQ ID NO: 273613 - DNA, 728 bp, Zea mays
tttataattggtttgttttgagtaagcattaatttgctttattcttgattgctggatctgcgtgtagtaaagtaatacatacccatcatcatatcgatcaggtcttattgtgttctctaataataatgcatgcatgcatggtgaggtagctagcttattaattagccgttgaagggcgtctggttggcgcagtccaagttgtcgccgtagctgaccccaagcaagtcacagtatcgtttgtagaagccgatccggtcggcgacgcggctgtcagcgccatggccgcactcgaggccgccgttgatgatgttggtgacgacgccgtagcccggcagcctgccggcggccgtgtcagcggcggagggcgtccactgccccgtcatgacgtcgtggcacgacggcttgggcgactgcggcgtcatccagaaccagacggcggtctcgaacgacacggtggggtcggtggccaccatatccgggttggcgaggatgccggcgccgatggcctggccggcgggcccgtagttgtagttgtaggagatctggatgggcccgcggccgtagtacttcttccccgcggcgcacggccactgggcgctgggctcgcagtagtccggccccgacgcgccgccctgctcctccttgaagcagtagccccaggcgtagggcccgtcgggcgcagtaacccacccgcctgtcatctcatccacgcctgcgccaggaacgcc

SEQ ID NO: 273614 - DNA, 574 bp, Zea mays
aaggaatcattggcagaccatggatactaaattttcacttacaaaaggtgtggtctattggccgttgcaatagatttatgcatggttctgaagggatggtacaccttgaagatatttgttcatatgttccatataacaaaaagggttacctcgtgaaaatttggagcattcttctagattcatgtgttgatgcctcacctttgcttgtcataaacaatggaatgatgtccatctttattggttctcattcatatttgtttctttgcattgatggttatagtggttcagtgaggtggagtgtcaaattggaaggccgtatcgagtgttctgccgctataactggtgatttctcagaggttgttgttggatgctataaagggaaaatttacttccttgatatgtctacgggaaaattatcctggacctttcaaacagatggggaggtaaaaatgcaaccagttgtggacaagatgaggaatttaatatggtgtggctcgtatgaccattacttgtatgcgttaaattacaaagatcgctgctgcacatacaaagttttttgtggtggaagcattta

SEQ ID NO: 273615 - DNA, 990 bp, Zea mays
agcattgatcatatctgttctggtgtctgttgggtggattggctatgaggtatgcttatttatgtcaaagccgtattctaactccagaattatcaagggaatattgttgcattgcctcacaaaattagattggtttctcggcagtgtttgaagctggagaccaggagtgttactttaaactgcacctttctactttcaagaacctgtccattttgtattgtttggattcatttgtttgcaccttacttgtttatgcatatgtttcattatttcagaagtcattgatatccctgcaatgtctggcttgcagatttactccaaatcaacagatgtatttaatgaacgatggcagcatgcctggattattcctgccttctggcatgtcttgtctttcttacttctttgtgtcatttgctacctgtgggcaccttcacaaaactcaatgagattttcttatgatgcaagtgaattctttgatcgaaaggataatatctcattaattaggccagcacccagtgcatccaagaatggatggaatttatcttctacaccagagcccaaagctacaaaggatgtgaataccgtagcagattttgaaggtgatgatgaggaaaacaaaagggagtagaatgtactgtcgatttgattacggagggtatatttgagatcctttgaagtgtgtgctagagcaattttggtatttaggagaggattggccatgctagttattattaatggagcactccgctcgatgttatttcttcgattcgttaccactacagtagttcttcacatggcgagttatgctgttatcttcatagtcttaatgatggtatatgatagaaacaattagtctggggtataatatttataataatggcaccatattgcttctggttcctgtgaactcgacatatgttatgaatgtcagagaataaattacgatagaaacaattagtctgatgtataatatttgtattactggcacca

SEQ ID NO: 273616 - DNA, 1419 bp, Zea mays
accgccgcggtggccgacgccttcatccggtttgacaaggttacttttagacgaccagaagatactaacgattctgtgaaggagactagttcagctaaggttcacatacttgtttttgaggtagaagaccgtgaaatgattggtggatctgcctatggaggtcagaaggctatttgttgtagttcagatcttgcaaaattaggagcttgcaaagaaggttctgtcatctatcgcccatcccaggtaaatcctggttggccaaagttgtttgttgcatcttttgagggaagtgatctgatcgcaacgctgccgtcaaggaccattcaaattaccaaaactgggatgtacaatatgtactttatacattgtgatccttcacttgctagtttggaaatcgaggggaaaaccatatggaaaaatcctactgggtaccttccgggtcggatggcgcctcttaagaacttttttggactgatgtcttttgcatttgtcgtgcttgggatctactggttttatcagtatatgaagtcctggagagaggttcttccacttcagaactgtattactcttgtgattacactgggcatgtttgagatggcattgtggtattttgagtatgctgaatttaatgagactggagtacggccaaaaggcatcacattttgggctgtcacgtttgggactgtcaagaggacggctgctgaagttattgttctcattgtctcaatgggatatggtgttgtcgcgcctaccttgggtggcttgacatcgaaagtggtcatgcttggaggaacgttctttctagcaacagaaattcttgaattggtagagaatcttggtgctgttaatgatctatctggaaaagctcgtctgttcttggtctatccagtggccattttagatgccgcatttgttgtttggatatttatttctttagctaagaccatcggtaaacttcaggcaagaaggttgatggccaaacttgacatttataggaaatttgcaactgcattgattgtatctgttctggtgtccgttgggtggattggctatgagatttactccaaatcaacagatgtatttaacgaacgatggcagcatgcctggatcattcctgccttctggcatgtcttgtctttcttacttctttgtgtcatttgctacctgtgggcaccttcacagaactcaatgagattttcctacgacgcaagcgaattctttgatcgaaaggacaatctgtcattaattaggccagcgccgagtgcttccaagaacggttggagtttatcttctgcgccagaggccaaagcaacaaaggacgtgaatacggtaacagattttgaaggcgatgatgaggaaaacaaaagggagtagaatgtactgtcgatttggttaggggagggtatattcttggatcat

SEQ ID NO: 273617 - DNA, 475 bp, Zea mays
  unsure (1)..(475): unsure at all n locations
cgggtcgacacaagcctctacacacacgcctgcgacgcgccatcgcgcctccaccaccccgaccctgaccccgaactcgccgtcgcaacaggccaagacgcagcagtagaagcaccaccaccaccaccaccggcacacgaccccggcggcagcgagtgccggttctgcgagatgacgcggcagcaccagccgcagtgcgcgcggcggctgccgaagcgcatcatcctggtgcggcacggcgagagccagggcaacctggacatgtcggcctacaccaccacgcccgactaccgcatcccgctgacggcgctgggcgcggagcaggcgcgcgccgcggggcagcgcatccgcgacgtggtggcgggcagcggcaactggaaggtctacttctacgtgtccccctacgcgcgcacccgcgccacgctgcgcgagatcggccgcgccttcncgcgggaccgcgtcatcggcgcccgcg

SEQ ID NO: 273618 - DNA, 533 bp, Zea mays
aatctacttcttccccgcgctgcctgctgcctgctcgagcttggagatggcgctggtgcggcgatgcctctgtggatccgaggaagactgcagagcgcttttgggcatggaaaatctccggctgttctcctacagagagatcagagcagccacaaacaacttcgatcagagtaacaagcttggacgaggtggttttggaactgtctacaagggagttctaagagacggcactgaatttgccgcgaaggttctgtcctcggaatccgagcaggggatcaaggagttcctagctgagatcgagagcatctcccaggtgaagcacgcgaacctcgtcaggctgctgggctgctgcgtgcagaggaaaaaaaggatcctggtgtacgagtaccttgcgaacaacagcctcgatcatgcgctcaaaggagcagcagcagatctaccctggagcacgaggtcgggcatctgcttgggcaccgccaaggggctgagctacctgcacgaggagcacgagcctgacatcgtgcacagggaca

SEQ ID NO: 273619 - DNA, 386 bp, Zea mays
tgagcttaatcttccgcgtgttcctcctcctgctcttcctctccgtcaccgccggccagttcgccatcctcttcaagaccacggcgtacagcgggccgatcaacttcaccaacggaggggacatcgctgtgtcttcggtggttcaggtggtcggcctcgtcctctgcctgcacgccgctgccaagatctcccaccgagctcagaacatcgctgcgctggctagccggtggcacgcgctggcgacgtgctctaacgactccacctacgtgaccaccccgaacagttccgggaacctcgcgcctttccccgcgcacctgttcctgagagactactcggggagtgacctggagtccctggacagcgcgtcggttcagggcagctcccac

SEQ ID NO: 273620 - DNA, 779 bp, Zea mays
aaggcttcttaagcttggttaccaagctgttgcatatattgaagcttctgcggtgatttaccaagatggaaagattttaatagaagttgaccatctacaaggagtgtcgactccatatcttcaaattaaagggacaaataaagaaattgttacctctgctggttctgcactctgcttggatggttcatacacaacaaagagttatcttcaaattattttggagagcttaccagctgatggtaatgtatctattggtattcacaatcaacaagctgcaaggctgcaggaactggttgagttcatccagtcacagggagggagctttaattcagatttatcgtcaccaatacgagaaacttcctctacagatagtgtgattgatgatatgcagtccaggataaggaagcttgagagatggaatacgataaacatggttttgtggactatattattgtctgctcttgttggatattccctataccagaaaaaacgtcactaggttctctggcagttttactgatagggtaggacgcatacctcattcatggcgtctgcagaactgacttgcacgcttcaggcacaaagttgtaagtgctagagaaaatgaaaagcagcatgtagatacaagatctaagacgtgagagatggcctgcgctcatgccatccctgatggcagtcttatttgtttgatccctcaatgtctgtaataatcttctcgtatgagatccatcaaaaaaatttgtgcagttaatgtgtatcaagcactaacgttgataatc

SEQ ID NO: 273621 - DNA, 535 bp, Zea mays
aaatcatccaaattaatctaacaacgaacgacaactccacgcagagcaacaatggcgccgccgatgaaggtgtacgggtgggccgtgtcgccgtggatggcgcgcgcgctggtgtgtctggaggaggccggcgccgactacgagatcgtccccatgagcaggtgtggcggcgaccaccgccggccggagcacctcgccaaaaacccgttcggtgaaatcccagttttagaggacggtgatatcacgctctaccaatcacgcgccatcgcacggtacgtcctccgcaagctcaagccagagctcctccgcgaaggcgacctcgaggggtcggcgatggtggacgcgtggatggaggtggaagcccaccacatggagccggccctgtggcccatcatccgccacagcatcatcggccagtacgtcggccgcgaccgcgaccaccaggccgtcatcgacgagaacctcgacaggctgaggaaggtgctgccggcgtacgaggcgaggctgtccgtctgcaagtacctggccggggacg

SEQ ID NO: 273622 - DNA, 287 bp, Zea mays
acatcatccacattaatctaacaacgaacgacaactccacgcagagcaacaatggcgccgccacagcatcatcggccagtacgtcggccgcgagcgcgaccaccaggccgtcatcgacgagcacctcgacaggctgaggaaggtgctgccagcgtacgaggcgaggctgtccgtctgcaagtacctggccggggacgacatcagcgccgccgacctctgccacttcggcttcatgcgctacttcatggccacggagtacgccggcttggtggacgcgtacccgcccg

SEQ ID NO: 273623 - DNA, 431 bp, Zea mays
aacgtccgaaaaaatagcatgtaaatctataaaatcaatttccatctctcaccctatgaatttgagataggtttaaatgataactttggaaagtggtgaatgtcacattctaaaaaagtagcctattccattagtaagattccaattcctcaaaatgaaaggaaacaaacgggaccttaatctatttcttgtaaaagcatggattgggttggaattgtcaccatggttctaaaaaaactaattgcacttacatttattgtctattaaatctcaaatggacccctagtgtcttgtttagggcctgggcatccaataaaactctcgacactctaggcggtgcacatagacacaagacagtgtttaagtggcgcggaaacacgaaaaagcgtctgcctggctggcttggtgagctatgtgtgactgcaggaaaa

SEQ ID NO: 273624 - DNA, 774 bp, Zea mays
gcgccgcgcggggagattaccggatgggtcatgcacgagttccgcctcgagggcaggcttccccagccgctcccgcgctccgccaaggtccggccctcgtgtacttactcgttccgtcgttcggcgttgcaagcaagtctcctgcccttaatttccggccggtgggcgtgggctaacaagtcccctctccgctttttcttgccgccttgtcctttttgttgcgtgcggtgcaggacgagtgggccgtgtgcaaggtgttcaacaaggagctgcaggcggcgaggagcgagccattattggcggcggccggcgcggcggagctcgagcgcgtgggctcgctgggcttcctcaacgagctcctcgactccgcggagctgccggccctcgtcggagccgacgtggacgaggtgatcgacttcaagggccccgcccccgcgtgcgttccggacgcgagctacctcccggtgaagatggaggaggagcacgcgctgctgcagatgcagcagtgccagtaccagccgccgcccccgacgtcctaccactcgagccagtacttctctctgccggcgatgaactccggcgacgtccttcccccggcgatccggaggtactgcaaggcggagcagcaggtggtgtcggggcagacggcggcgtcggaggtcagcccgtcccgcgagaccgggctgagcgccgaccccaacgcggagatctcgtcggcggtgaccccgtcgtcgtcgcaccagttcctgcccgagttcgacgacccggtcctga

SEQ ID NO: 273625 - DNA, 403 bp, Zea mays
caggacacgacgcagcgccgaagcacctaggatggcgcccgagattcagagcctgtgtccgagtacgacggccgcgctcctcctgctggccgcctgcctcgccgccgcggtggcagcgctcgacgctgcggactacgccaggccgccgctgcctgcaggcggaggcggccggcgcgtcctcttcgccaacgggctcgggctgacgccgcagatggggtggaacagctggaaccatttccagtgcgacatcaacgaggcggtcgtccggagcaccgctgatgcgctcgtcgccaccggacttgcaaaggctggctacacgtatgtcaacttagatgactgctgggcggattccgagagaaccaaagagggatacatggtcgctaaccccaagacattcccatca

SEQ ID NO: 273626 - DNA, 530 bp, Zea mays
cggtacctggtcggtacgcgtgggctaaaaccaactggaatcgcgaaggtaagcgaacttcagtcatttattatatgcattagagacatgtttagttgtctgtgaagtcatttttaacttgtactgtgttccgccggtcctcatggttgccaagattttacttagttcgatgtgggagcaaaaggatatgccaaattgaatgtagtttcatcaattatgctcaattatggatgttcagaggcatccaatttcagtgtgtactgcaatacttgggtccacctgtacttggtttaagaagcgctccgcggacttccacggccgcgcagccgatctcgtccacggcctccggggcacggcgatgcccaggagacacgccctcaacgaagagcagtgcacacaagagaaaggtatctcgactattccatagcacatgtatgcatccatggcctgttccccaatagcaatttgtgcaggattcaaaagaacttcaacctgaaccagcgagagtatcgatacaaagactgtttgaa

SEQ ID NO: 273627 - DNA, 296 bp, Zea mays
ccaaccaactggaatcgtgaagagtcactctccgacagctcatcgccgcttggttctcccgtcggtacacaaggtttaagaagcgctacgcggacttccacggccgcgctgccgatctcgtccacggcctccggggcacggcgatgcccaggagacaggccctcgaggaagagcaatgtacagtagagaacggtatcccgactattccactgcacaagtatagcatccaaagcctgttccccaaaaggaacctttatctccagctctctctgcgcttactcttgttgtgcaattta

SEQ ID NO: 273628 - DNA, 1473 bp, Zea mays
ctccgtgcttaccactcgccattcctaagtcctaactacctccacccccgcacgcacaactggccgcgccaaggcaaagctagaagaagacaacgcaaagggagaggacagaggaggagcagaggacgatgggcagcggcggcgctaacactgcccccctcctcaccccctacaagatgggaaaattcgatgtttcccacagggtagtcctcgcaccactgacgagacagcggtcctacggcaacgttcctcagcctcatgccatactgtactatcagcagagggcgactaaaggaggtcttctgatcgctgaggccacgggggtttcagacactgctcaagggtacaaggacactcctggcatttggacccatgagcaagtcgaagcatggaagccgatcgtagacggggttcaccagaaaggagggatatttttctgtcagatttggcacgtagggagagtctccaattccacttttcagcctaatgggcaggctccaatttcaagcaccgataagccactaaagcctcaagtgagagccaatggtatagacgtggctactttcgcagttcctagacgcttagagactgatgaaatccctttggtcgtcaatgatttcagggtagctgctcgaaatgcgattgaagctggatttgatggtgtcgaaatccatggagctcacggttacctgattgatcagtttctaaaggacggggtcaacgaccgcacagacaaatacggtggcagtctggagaaccgctgccggtttgcactggaagtaactcaagccgtggtcgacgaaattggagctgacaaggtcgggataaggctgtcaccattcgctagctactcggaggcgccggactcagacccggaagctctgggcatgtacatggcgaacgcgctgaacgagttcgggattctctactgccacatggtggagccgcggatggtgaaactcggtgaaaagttcgaaaccccctacagccttcgcccgataagggacgctttcaggggaacgttcatcgttgccggcggctacggcagggaggatgggaatcgcgcgatctcccctgggtatgctgatttggtcgcgttcgggcgcgtgttcttggctaatcctgacctgcctcggaggttcgaagtaaacgctccccttaacaagtacaacagagacacgttttacatccctgatccggttattggatacctgactacccatttctttcgtcagatgtataaatgttctcttttcagcaatctgctttttagattgtgtagtaactggttggtgtaccagtaaaatattagacgaataaaccattggtctgaatgcctcattctcatatatatggacaaaagcaatatgatcgttgtaattccccctcaaatcttatagttatagttgtaaaaaaatattgtgaagaagatcagtcagttgtcaagttgtataaaaagtcagcctggttccc

SEQ ID NO: 273629 - DNA, 616 bp, Zea mays
caggtttgtatgaggattccattcgatactatgtaagggcagttgcaatgaacccaaaagctgacaatgcctggcagtacctgaggatctctcttagcaatgcttcgcgagcggacatgattgctgcatgcgacgcccgcaaccttgacgctcttcagaaagagtttcctctgtgagccctccggtccaaggcattagagcttccatggaaggaagcagcacactagcaagccgagtgactgcacctgtggtcatggaaatggaattggaaaccagtagcgttttgtatttgcctgttgattcttatatttatttttaggaagtgggggaatgtgtagcaactaggaagcgagggaacaacatccagttgatgtgaagcattcatggcacagtaggcaatagtggcaaaggggtactatacatacacacttacgggacgcacaacataaataaagaatggttgattaataaactatttattttggggacacacccctaggatcaacccctacttgtttcgagtttgaatactgatttgtatcaacaggcaataaataatgcgctttgtaaccttttatatcataatgtaatgcgcacgcccaaaccagttgtgtct

SEQ ID NO: 273630 - DNA, 744 bp, Zea mays
agagacgcttcttggtcaaatttagaccttgatcctggactattcgcacttcttggcgcggaatctttcctcggtggaacaatgaggatgactgtgtcagtctgcgtgatacttctggagctcaccaatgacctccttatgctcccgttagtcatgctcgttcttctgatatcaaagaccatagccgacagctttaacaaaggggtttatgatcagattgtggtgatgaaaggcttgccattcctggaagctcatgccgaaccatacatgacgcacttggttgctagcgatgttgtgtctgggccactgatctccttttcaggcgtcgagagagtggggaatatcgttcaggcgttgaggatcacaggccacaacggatttccagtggtcgatgagccacctctatcagaggctccagaacttgttgggcttgtgctcagatcccatctgctggtcctgctgaaaggtaagggcttcatgaaagagaagatgaaaaccagcggtagcttcgtgctggaaagatttggtgccttcgattttgccaagccaggctcagggaaaggcctgaagattgaggacctggatttcactgatgaggaaatggacttgtatgtcgatctccatccaattacaaatacatcaccgtacacggtggtagagaccatgtcacttgcgaaggctgccgtccttttccgggcactgggactcaggcacatgctcgttgtgccaaagaccccatggaga

SEQ ID NO: 273631 - DNA, 499 bp, Zea mays
acgacagcagaaagcaaaaacttctgtgagtaaacgtaatctgaatcctgtttggaatgaagagcttaagctgtcagttccccagcactacgggcctctgacccagcaagtgttcgaccacgacatgctatcgaaggatgacgagatgggtgacgcagagattgacctgcagccgatgatcagtgcagctacagcgtttggcgaccctgatctgctcgcggacatgcagatcggcaagtggctcaggtccccagataatgcgctggcaagggacagcgccgtcaatgtcgttggtggcaaggtcaagcaggaggtctctctgaggctgcagaacgtggaatcgggggaggtggaactggagctggagtggataccactcaatcagtagagttcaaatccacctgtaggctatatgtgatgcatgtttcatgtgtgccacacaagtcctgatgctcttgatcatcttcagtttgtcagggtgcctgcagtgttgtagact

SEQ ID NO: 273632 - DNA, 1282 bp, Zea mays
cgacagtacgtcccaaactcgagtttgatcgaggcgtccgtgactggagtggttgcatacttgcatgcgttgttttgtctctctctccctctctgtgtcgctgaaatattggtcacgtccatcccaatctcatctcaaatctgtccatgggctgacaagaccccgcgcgctgaaagcatttgcgtggtggctgctgcacgcagctcggcccggagttcgtgggcacgttcatcctcatcttcttcgcgacggcggcgccgatcgtgaaccagaagtacggcggcgcgatcagcccgttcggcaacgcggcgtgcgcggggctggcggtggcgaccgtcatcctgtcgacggggcacatctccggggcgcacctgaacccgtcgctcaccatcgccttcgcggcgctgcgccacttcccctggctgcaggtgccggcgtacgtggccgtccaggcgctggcatccgtctgcgccgccttcgcgctcaagggcgtcttccacccgttcctctccggcggcgtcaccgtgcccgacgccaccatctccaccgcccaggcgttcttcaccgagttcatcatctccttcaacctcctattcgtcgtcaccgccgtcgccaccgacacccgcgcagtgggtgaactcgccgggatcgcggtgggagcggccgtaacgctgaacatcctcgtcgccgggccgacgacgggcgggtccatgaacccggtgaggacgctggggccggccgtggcggcggggaactaccggcagctctggatctacctgctggccccgacgctgggcgcgttggcgggggccagcgtgtacacggcggtgaagctcagggacgagaacggtgagacgccgcgcacgcagcgcagcttccgccgctgacgacgcacactggccgcgggcgcgagacattgtccggccgtgtcacgcacgcccgcgtcctcctccgccgccgcgtaacgcacggccacgacgtgtccgcggtcgtacgtgctgtgtctgtgtgtaccaataaataagccccgttttgcttcgtccagaacggtccagtgctatgtgtacgtggtctgtgttgtgatttgcgaattggattattgtgggtcgtctcgtcgaggtctctcgggtgtcgggtgggtctgatgcgatccatcagcgtcgtgtccgaataaaagccacgccgatgcgccggctgacgggcatctggatgtgtgatttctgaacaagatttgcttaatttcacttgcttaatttcggggaaggaggaaaaagaaggacga

SEQ ID NO: 273633 - DNA, 435 bp, Zea mays
aattagtgtgctcccgcgtcctatttctgctgcactgccggcagtcgaaaaaaaacccagggaaaaaagattgtctttgagagtgagtgagagagcaagcaggttgctagtagctgctggtagagagagctagctgttacagccgaccaggtagctagatagctagccatggagccggggtcgacgcccccgaacgggtcggcgccggcgacgcccggcacgccggcgccgctgttctccagcggcgggccccgggtggactcgctgtcgtacgagcgcaagtcgatgccgcggtgcaagtgcctgccgctgccggcggtggaggggtggggcgtcggcgacgcacacctgcgtcgtcgagatccccgcgccggacgtctcgctcacccgcaagctgggcgctgagttcgtgggcacgttcattctcatcttctt

SEQ ID NO: 273634 - DNA, 453 bp, Zea mays
ctttgagagtaagtgagagagcaagcaggttgctagccgaccaggttgccagctagccatggagccggggtcgacgcccccgaacgggtcggcgccggcgacgcccggcacgccggcgccgctgttctccagcggcgggccgcgggtggactcgctgtcgtacgagcgcaagtcgatgccgcggtgcaagtgcctgccgctgccggcggtggaggggtggggcgtggcgacgcacacctgcgtcgtcgagatccccgcgccggacgtctcgctcacccgcaagctgggcgcggagttcgtgggcacgttcatcctcatcttcttcgcgacggcggcgccgatcgtgaaccagaagtacggcggcgcgatcagcccgttcggcaacgcggcgtgcgcggggctggcggtggcgaccgtcatcctgtcgacggggcacatctccggggcgcacct

SEQ ID NO: 273635 - DNA, 378 bp, Zea mays
  unsure (1)..(378): unsure at all n locations
tctgcgacgactgggtgtgataccgcagccgccgccctacgctgggttcccgagccttcgccgatctcttctccggcgaagagcgcccaccagatccgccgcgcatcgatgtctcctttggctcttctccaagctctcatcttcatcctgtgctgctcgcctctggcttctgcttcgtcgtcggagctaacccttgcaggagctgcttgtggagatgatcagcttgtcatcttcgatgcttctgatggccctccctaacctgtcggtcaatggggttctgatgcaagatcgcgtttttgcctgccagaagctcggcttctactttggcagtggatgccttcgctcccttcaccacagtactgcttttacnggactcct

SEQ ID NO: 273636 - DNA, 356 bp, Zea mays
atcttggcctcgtcaatccaccaccaccgtcgtcgctgagctcctcctccggcttcgcttcgctgtcttgcctcctcctcggtcgaagaagaagaagaagaaaacatgtgtccgggatccgtggagtcgtcgtcggcggcggcggcgggcaagagcgtgtgcgtgatggacgccgcggggccgctgggccacgcgctcgtggaccgcctcctccggcgcgggtacaccgtccacgccgccacgtacgcccgcgacggggaggagggcgcagttggggacatggggggtcggggcttgccgagggtagtggggaggggcgcacacgtgcagtttggtggatcgcagtggaggattca

SEQ ID NO: 273637 - DNA, 546 bp, Zea mays
cacggacttgttttctgctgggagtgacacaagctccagctcagtggaatgggcaatcctggcgctgcttcgaagcccgggttcaatggctaaagcatgcgacgagcttgcaacagtcatcggcccaagacaagacatcgaggaatctgatattgggcggctgccctacctccaagccgtggtgaaagagaccttcaggctgcatcctgctgccccgctgttgctaccgcggcgtgcccaggccgacgtgaagatgatgggctacgtgattcccgaagggtctcgagtgttcgtaaacgtatgggcgatgggccgagacgaggagacgtggcctgagcctgagaagtttatgcccgagaggttcctggggaagaagaagacgcaggcggttgatctcaggggcggggacttcgatctcatcccgttcggtggaggacgccggatctgccctgggatgccgctggcgatcaggatggtgcatctgctgcttgcgtcgctcttgaatcagtttgcatggaagcttccggctgagctagagaggaatgg

SEQ ID NO: 273638 - DNA, 1119 bp, Zea mays
tacttccttctgtcgcctggacatagatatggataattttatccctcatgtccatttacatgagaaaagtgagaacaaaactcattggcatggggcagagattgaagttataattgagggaaattggacaactcatcgttcaaagatcctccattatatgcgtcagatggcagtcatcacaccatatgctcagttcctttttaaatttctatctgatgcggcagacaaaaacttaacaataaagtttacacgccggacagacgttatgcctcctgttccacttcaaacaaagcatcacccatctgcggttgatttgttactgataaaacgcttagttgcagagactacaaagcaaaatcttttacagtttctacaacatgagtttgtgaacataagcaaaccgcatgctgaacgtttaattggggagatgggacctgatttcagtcaaaaaatggcagttaagagccttacttctcagcaattagttcgaatacatcaattatttaggcaggctaagttcgatgatcccagcggcaattgtcttagtcctgcgggtgaatataatttacgcctgggtatcataaaagagttgcaccctgatatggttgcgacacatgcaagcagccctcaggtttttgaaggtcacccatttattgttgaagctgggataagcattggtggaaaagatgttaaacaaggtctaaatatttttaggtttgcaaacagaataccacttctctttgaacaaggtgctgatgtcatcacaagaactgctgcaaaaaggatctcttggagcagctaccaaatcaatcaacagcaagataagattggtgtctttgtgagcattgtaagtacaaagatacctttcaaaggaaccggaaaggagtacattggggatgacataactgaaatatcatctgctgttaagtcagccctgaagcagtgctgtcttcaactgaagtctaagattgtgaagaaacttcaggctcgtgagcggcaggacaggaaaaggaacctgaacagatatattcctgatgttgcaagagcggttatggaaactctagtagaaattgcagatcaatctcccccaaaacggccacgttatgataaggaagatga

SEQ ID NO: 273639 - DNA, 667 bp, Zea mays
tccacgcgtccggcagtggccgagcccacattcgacccaagttcccccgggcccccccaaggaaaaccatgtgccgcgcccgccacgttcccacgcgccactaaatcagcagcgcccggccgcccggagctgccagtagcggcaacagcaaaacaagaagcagccagccaccggagcactagtaaacagtaagcagcagagagcatggcgagatcagggcgggaagcggagcccggagaggaggaacggaagctggtgctgggcaagtacgagctgggccgcctgctggggcagggcaccttcgccaaggtttactacgcgagggacctgagcgccggcgccggcacgggccacagctgcagcgtagccatcaaggtgatcgacaaggcgcggctgcggcgcacggaggggatggtggagcagctgcgccgggagatctccatcatgcggatggtgcggcaccccaacgtggtgggcatccgggaggtgctcgccagccgctcccgcgtcttcgtcgtcatggagtacgcgcgcggcggggagctcttcgccaaggtggcccggggccgcctcgccgaggaccacgcgcgccgttacttccagcagctggtcgccgccgtcggcttctgccaccgccgcggcgttccgcaccgggacctcaagcccg

SEQ ID NO: 273640 - DNA, 464 bp, Zea mays
tttacgcgtccggcgcatgctagcactgagacggagcttttagtaacggcaacaacaagcagcagcagccagacggccagttgtaacacagtaaccggcagaggccatggcgagatcaaggcaggaaggggaggccggaggagaggagcggaagctggtcctgggcaagtacgagctgggccgcctgctggggcagggcaccttcgccaaggtgtactacgcgcgggacctgagcgccgccgccggcacgggcagcaccagcgtggccatcaaggtgatcgacaaggcgcggctgcggcgcatggaggggggggtggaagcagctgcgccgggagatctccatcatgcggatggtgcgccaccccaacgtggtgggcatccgggaggtgctcgccagccgctcccgcgtcttcgtggtcatggagtacgcgcgcggcggggagcttttctcaaggtggcccggg

SEQ ID NO: 273641 - DNA, 540 bp, Zea mays
catagtggaaagtttattcttccattgaacatcccactgagtgtaatgcatatgcagaaatgcatatgcagaaattgaggtagcatataactgccgcaagggaaaatatggtgtagcagatgaggatataatcttatatggtcaatgtgtttgaattggtccaaccattgatatttcttcgcggttgctagacttgagagtcgcagttttgcatagtcctatattctatctgcactaagagtaatatatacagccaagcggacgtttggtttaacatttacaaggtatgtttggtccttttgttttttggaattaatggttgtccgatgcttgtcattcatatgagttctaatatcatgcccccttaaagtactcatcatcaaaagtttccatgtgaatgttttaaatgtagatttaaagggttgaaagacatcaaacagttattcaaacatgatcttaagtgtcgtgaaagactacaagtgaggttcaacttggcaaattgtttttctagtaactaaggagcaacaatgctatgtattt

SEQ ID NO: 273642 - DNA, 999 bp, Zea mays
ccggctacaactttcgcgacgtctgcgacatcagaaaactgagctcgccccctcttgccttccctcctccgccggaccgctgctgtccgcctccaaccctccagttcgacgcaggcggcgacggcggcgcgccgagatgaaggtctccgtgaagacgctcaagggatctagcttccagatcgaagtggagcccaccgacaaggttgctgctgtgaaaaaggtcatagagaatatgcaagagcaggcttcctatccagctgaccaacaagtccttatacatcaaggaaaggtgctcagcgatgacaccacattagaggaaaatcaagtgactgagaataatttccttgttataatgctcagacagaacaagggatcatcaagtgcagcaccggctaagacaactgcgaatcaggcacctcctactcagacagtgcctgttgttccacctcaaacgtcagcagccccagctgcaccagcacctattgtacctgtcagtgcaccggctgcaactgctacagcctcagcagctcctgctgttgctgtctccactgaggcggatagttatggtcaggctacctcaaacctagttgctggcagcaacttggaaggaacaattaaatccattcttgaaatgggtggcgggacatgggatagagacactgtactacgtgctctgcgggctgcgttcaacaatccagagcctgccggtgagtacttatattctgggattcctgaacaaatggaggttcctgcaccgcctccgagttcccaaccagtcgaccctgttcaggcggtacaaccagctcaagctggaccaaatgctaaccctctcgacctctttccccaatctcttccgaatgattccgctaatgccaacacaggaaatcttgatgttttgcgtaataactcacagttccaaaacctacttggtttggttcaggctaaccctcaaattttgcagccattgcttcaagaattgaggaaacaaaatccccgggt

SEQ ID NO: 273643 - DNA, 550 bp, Zea mays
cccatgcgtccgcggacgcgtgggctgctgtccgggtcaacggtccaaccctccggttcgacgtaggcgccggcggcgaaatgaaggtctccgtgaagacgctcaagggatccagcttccatatcgaagtggatcctaccgacaaggttgccgacgtgaaaaaggttatagagagtatacaagagcaggcttcctatcctgctgaccaacaagtgcttatacaccaggggaaggtgctcaaggacgacacaacattggaggaaaaccaagtagttgaaaataattttcttgttataatgctcagacagaacaagggatcatcaagtgcagcaccagctaaggtaaccgcgaatcaggcaccctctactcagacagtgcctgctactccacctcaaacgtcagcagccccagatgcaccggcacctattgtacctgtcagtgcaccggctgcaactgctacagcctcagcagctcctgctgttgctgtcttcactgaggcggatagttatggtcaggctacctcaaacctagttggtcgcagcaacttgga

SEQ ID NO: 273644 - DNA, 260 bp, Zea mays
gccttccctcctccgccggaccgctgctgtccgcctccaaccctccagttcgacgcaggcggcgacggcggcgcgccgagatgaaggtctccgtgaagacgctcaagggatctagcttccagatcgaagtggagcccaccgacaaggtactcatcggttgcgctcccgatctgtcgctctgtttctagttgctgatgtattggcggggctgcttcgctagatttggctgctttttaggtttgtttggggtctaggatttg

SEQ ID NO: 273645 - DNA, 829 bp, Zea mays
  unsure (1)..(829): unsure at all n locations
catttatattctttgtatcccttttggagatttatgacaaaagggggaaaaaatttgcattaaaacctaactttaatcctaagttaccaaattttaaaagacctttaaaaaagggaaaaattatttacaaaaaaaaggaaatcctaagaaaaacattaaattaaaaaagttgataagtgcattccatgtcatgagcatcacgtttattttatgacacacttgcaccctatgaatagtatgatataagttgtctatactttgacctaaatatgtgcttttggcatttgagtacaaaagtgttattttctgaaatgcacatatttagggggaggaaactatatcataggatttaaaatcttatttatcaaatcttatgtaagctttaaatgtgttgtcatcaatcaccaaaaagggggagattgaaagtgcattcatcccctttttgagttttggtgatttggataacaacacatttaaaggtctaacgagtttgctaagtgttgaacaggaaattcagtatgatgaacatacttgaatagtgtataatgatcagtgaacaaaggctcaacactaggtcaaataaccagtgagacaatgcaaatggatataatatggtctctatattggtttgaatatatggacaagtcctgagaaatcactatgcataaatatgatcataatagagattgaagtgattaagaggattggtcaagccaaagtgaataagatatgaggaatcgtgaattggctcgaccatattaatattagcccatccatgaatatatgagaatcnnactagagcttgattgatcttagcagttacatctag

SEQ ID NO: 273646 - DNA, 903 bp, Zea mays
ccacgcgtccggaacccggcgtcgtacgtgcactccaacgtcgccggcctcgtcacgctcctcgaggcctgcaaggacgccgacccgcagccggccatcgtctgggcctcctcctcctccgtctacggcctcaacgacaaggtccccttctccgagcgcgaccgcaccgaccagccggcctcgctctacgcggccaccaagaaggccggcgaggagatcacgcacacgtacaaccacatctacggcctctccatcaccggcctccgcttcttcaccgtgtacgggccctggggccgccccgacatggcctacttctccttcacccgcaacatccttcaggggaagcccatcacggtgtaccgcggcaaggaccacgtggacctggcccgcgacttcacctacatcgacgatattgtcaagggctgcctcgcctccctggaaacggccggcaagagcaccggcaccggcggcaagaagcgcgggccggcgccctacaggatcttcaacctcggcaacacctctcccgttacggtgcccaacctggtgtccatcctggagaagcacctccgcgtcaaggccaagaagaacgtggtcgagatgcccggcaacggcgacgtgcccttcacgcacgccaacatctccctagccagggagcagctcgggtacaaacccaccaccaacctggacgtcggcctcaagaagtttgtcaagtggtacctgtcctattacggctacaccaggggaggatccaagaactcgcgacattgatccgtgctaattctttctccttttcctgctttggcccggccgtggccaccatgctaggtcggacattgccattggattttgctggctgggggaaatatggtatgctaggatgttaccgagataaaaatccttctc

SEQ ID NO: 273647 - DNA, 556 bp, Zea mays
  unsure (1)..(556): unsure at all n locations
taagnacaccgtccgcgaccgtggcgacctggtccactggagggccacacttctcttttgaggaccagtccaccgtccactcccagagtccaaaaccctacgatccgcgccaccatgccgcgcctcgccgccgccgccgccgccgtctcacgccgcgccggcgaggccctgcgccgcggcgcgtttgggggactgcggcctctctcctccctgcaaccgttaaacgccgcctccagcgacgaggtgctcgttgaaggaaagacaagtgcgcgcgctgccgtgctcaaccgccctggctacctcaacgccctcaccaccaccatgggagctaggctcaataaattttatcaatcatgggaggacaacccagacattggctttgtcatgatgaagggcagcggccgagcattctgtgctggtggggatgttgttagattacatgaacttatcagtgaaggcaagctggagggatgttgccattttttcaagactttgtacatgttcatttattttctgggcacgtacttgaaaccacatgttgccattcttgatggca

SEQ ID NO: 273648 - DNA, 523 bp, Zea mays
gaggcctttataagggccttttcccctctttggtgaaatcggcccctgctggtgctgtgacatttgtggcatatgaatacatctcagactggatagggagcaaggctggagttgagtgaggtcttgatggatcatggagctatcaagataccatgacgagaactttttgcacaccgtggacatggaggatggagaccggaaggtcaatcgtcaagtgcatacaattcctagagatccgatacatgtaaagccttacatagaaaagagctgttttgtcgtttcttattctttccccaattgcctaatgtggtggtagggcattcgttggcttgtaaaacaaggctgactacaactaacttagtgatcgcgacgcgtcatacatgactaagtccaaaccagccggcagttttgccgggatcgtgttacgaatcctttcccggctgcagtcatgttttccttgcggcttgttggggctgcgtcttctacagtcttttttatttatatggattgcacctgcaacaga

SEQ ID NO: 273649 - DNA, 433 bp, Zea mays
cccacgcgtccgcccacgcgtccgcattgaagggctaaaacgccctccaaggtgtggagctcgaattgagagcagcacatacaagggcatgtaccatgccctaaaggacattgtcccaaaggacggatttggaggcctttataagggccttttcccctctttggtgaaatcggcccctgctggtgctgtgacatttgtggcatatgaatacatctcagactggtctagagtcgatactgatgtgaaaatcttcaatgcagatacggagcaaggctggagttgagtgacgtcttgatggatcatggagctatcaagacaccatgacgagaactttttgcacaccgtggacatggaggatggagaccggaaggtcaatcgtcaagtgcatacaattcctagagatccgatacatgtaaagccttacatagaaaag

SEQ ID NO: 273650 - DNA, 391 bp, Zea mays
  unsure (1)..(391): unsure at all n locations
aatccgtgattggcattgtcactcgtgctcttctttgttctcgtcgtcgtcgtcaccatagagcgcgtctgcaagcgctcccaccccaaaaccccgcggacgcaccgacgcgcgagccataatgcgccgccaaagcctcgccaccgtactgctgctcctggtggccgccgcggccctggccgcccccgccgctgggcactctgagtcctcctgccccttctacgaccacggcggccacggcgaaccgcacgaacgccacggccatggccacagctgcggcggcggcgcggaccatgagcaccaccaccaccatcaccacggccatggacacggcgagatccagcggctgctcncggatgagatggcggacgaggcggatctcgagctcgag

SEQ ID NO: 273651 - DNA, 407 bp, Zea mays
  unsure (1)..(407): unsure at all n locations
gagggcaaggcagtcgacactcgacaggtctccccaccctgcggccaccgggcgaggacgaactccttgagcgcggcgacggtggtgttgggatcgtacttgctgggcccgatgtcggtgccgtcggacagccggaacttcacctcgatcggctccttcacgccagccatctccacgggccgggtcacgagcgccttccaccccaccaacccctcctcttctctcaagttcccaccaggcaacaggagcaaccgccagggcacgggagggaatccgcacaggaattcagggggtaggaaagggctgccagaaatccgagcagggagggcaagcaccgatccggatccgacggaggatccgatcttctgcgcgacgatttanaattgcttcgtggggagcanagcggg

SEQ ID NO: 273652 - DNA, 662 bp, Zea mays
cacacgcgtccgcccacgcgtccgcccacgcgtccgcggacgcgtgggtttttcccatggaactatgattggcacagagatcaacctcatgttgatgaaagtgttataaaatcttcagaagtcactaggagatgtaagtcgggaccagtagaacatgatgctgtattgagggcaatgtcacgggcacttgaaataacagaggaagcgtacatgaaaattgtggaaatggagcttgatagacacccagagcttgcattaatgggttcgtgtgtccttgtaatgttaatgaaggaccaggatgtatatgtcatgaatcttggggacagccgagctatcttggcacaggacaatgatcagtacaatagctcaagtttctcaaaaggagatttacgacatcgaaacaggtcaagagagtcacttgttcgtgttgaacttgataggatatcggaagagtcgccgatgcataatcctaacagtcacctaaacagcaacacaaaagctaaggaactgtcaatatgtagactaagaatgagagcggtgcaactgtcaactgaccatagcacgagtattgaggagttgaatttgtcttggcgacagccaggggtatggcctttcccgggactgacaacattattatcatattatcatctagagaacttatt

SEQ ID NO: 273653 - DNA, 920 bp, Zea mays
cccgccgccattccccccccactcttcaccaccgcagcgccgccgcgtacaaggcgattaggcgaagctgcaccggaaggagaaggagagaagcgagagtctccccagccagagcaagccgaatccgaagctagcggagaggagagagggctgagtgaggatgccgacggttacctgcaacgcgtgcaacgcggggttcgacgacgaggagcagcagcggcttcactaccgctctgaatggcaccgttacaacctcaagcgcaaggtggctggagttcctggtgtcacagaggctctgtttctggctaggcaagctgctttggcggaggggagcaagcctgctagcaccccaatgctttacagctgtgctctttgtggaaaggagtacagaagctcgaaagctcacgagcagcatcttaactcgcgatcacatcttttgaaagcctctcaggagcccaatgcctctattgctggtatcacgatagtcaagccacttcctgaacgagtctcacgaagagctccatctgcagtagaggaggatcaagacgacgatgaggaagaagagtgggttgaagttgacccaagtgagatggagttggctgatgagtctacttcaaacatgcaagaagatgagcactcctcaaaatcagatgatgacatggatgaccttgaagagttggatatctcgtcgtgtttcatgtgtgacctcaagcatgacaccatagaagactgcatggtccatatgcataagaagcatgggtttttcatacctgacagtgaatacttgaaggatcccagtggtcttcttacttatgttggactgaaggtgaagcgtgattttatctgcctctactgcaatgacagatgccagtccttcttcagtctagaggctgtcaggaagcacatggatgcaaaggggc

SEQ ID NO: 273654 - DNA, 493 bp, Zea mays
tgctattttatgaatatgcagttatcgcaattgcgggtagattgtaaaaggctgacttatgatgctcttgaaggagctaacgtcactccgacgtccttttacaacattggtgatcttgagattcaagataatctagcacgagtatgggtagacattggtattcatgagccattgcttctggacatcctgcttaatgccttaacaacaataagttcagatcatgttggtattaagcaagtacagtttggagggtcagagtttttgaactggagcgaggacttgaagacagaagaagttggatatagtgtgtgcaaaatctaaatagcacaatcccgagatttgcagaagcagctacctttttagctaaacgcaaatgcaacatctggttcgaagctagggttttaaccaccttggtcctgcaaacgagaagaagaaaatggtgacaacacgatgaaaaattggcgtccaaacatattaacttctgcttgaaagg

SEQ ID NO: 273655 - DNA, 465 bp, Zea mays
actcgcaggtcgatgcaagcctctatagtcgcttcgcaagcacaggcagtgatcggcaaccaaatccggacagtcttgagctctctcagtctcagcatttcagttcccagattcacatagccccagccccacaagtagcgaaatggcagctgctccgttcgcgattgccggccggctctcccccgttgcgcgcctcccggtccgcgcctggaggccggcgcacgggtttgcgtcgtccgggagagcccgctcgctcgccgtggcgtccgcggcgcaggagaacagggacaacagtgtcgacgtacaggttagccagaacggcggcaacaggcagcagggcaacgccgtgcagcgccgcccgcgccgcgcgacagcgctcgacatctccccatccccgttcgggttagttgatccgatgtcgccgatgcggacgatgcggcagatgctggacacgatggacaggct

SEQ ID NO: 273656 - DNA, 370 bp, Zea mays
accacgcgtccgcccacgcgtccgcccacgcgtccgccctcccgtcccatccagtccatccccgccaccacaggcaaaggcaacccagaaggagccgccatgggctcccgctacgaggtggaggtgacggtggggtcggcgagcaacctgaagaacgtcaactggcacatcggcgacctctagctctacgccgtgctgtgggtggacgacgggcccatgtgctccacccgcgtcgaccccgacaacggccacgactccgtgtgggacgagaacgtggtggtccccgtcctacccgcctccgccgcgcacctgtgcgatgccgtcctccagatcgacctcgtccacgccgccagcgaccacgccgacacca

SEQ ID NO: 273657 - DNA, 960 bp, Zea mays
  unsure (1)..(960): unsure at all n locations
gtttcanatgccgtgcaacaaggcttctcaaacgttgtcagtacgttaccctcacaaccttacgcacctccagtctcggtcttgccggcacagattcaagctaacgcacccccatctcttactctgctggcggtctctgtaaacccgccagtccaacatgtttcccctgtgaataacctgtctgaacagagcttcagtgcatcagcatggacagcagcaatacgctttgttgtctgaccctgttgccacgcacatgcatcaacatgcagcggggagcaaaccagctgtagcagcacatccgtcgttgcctgagcctaatgcatcatctcacacagcattcccttggcaatctaatgctgctgacatgacccacgctggacggaatgcgacggctgatccatgggccgccgcccgcgcagctaactcgtatagtacagcatcagcaagcacagtgccgtctgctaaccagaatgcttacggcgatcaaggcaagcagggtgcgtacagctcttatggatcttcggcagcctcgtcccgtcctgttgtaccagggcacgggcatgacagaaatggctacagccggtctgccctggtggagtacccatgggacgggcaccaccagcggcactcgaggtcaccagatcctggcgtggtccgggactacgacaccgactatggcggtgcgcagggctacagtcagcagcctctgacgcagtggagtgcagggaaagtgcagcagcagagctacaatcctgagccgtcaaggcagtggagttcttcccaggcgcaccagggcggctacgcacccgccgagccgtcgaggcagtggagttcttcccaggcgcatcagagctacgctcccgagctaccgaggcagtggagctccgaacgccgtggctacgatgatgcggaccctcgaggacatggagctccggccagcagaacccggaggcgccgagg

SEQ ID NO: 273658 - DNA, 1229 bp, Zea mays
gacagcctgcctccatagtccatctcctctccccctaccgacaccgatcccattccccaggcccaagcgcccatggatcccaagcccgacgccagcgcgcccgccgcggtgccagcggagcacgcggcgtacccgaggctgtcaccggaggacatcgccccgccgccgccgcctgtcgtgccgccgtccggcgccaacccctacgtgctctccgccccgtcgcctaacccgcccgccaagagcgctagggagaatctgagggagatgttcggcatggtggggaagaagttcaacgaggccgcgcgcaagaccgagggcatcgccggcgacgtctggcagcatctgaaaactggacccagcatcactgatactgccatggggaggattgctcagatatccaaggttatatctgagggtggctacgacaagatatttcagcagacttttgagtgctcgcctgatgagaagctcaacaaggcatatgtgtgctacctatcaacgtcgcatggaccaatcatgggcgtcctgtatctctcgactgtcaagattgcattcggtagcggccgccctgtgaaatatgtgcctgaggacaacaaaactgagtcatccttttataaggttgttttaccccttcatcacctgagatcagttactcccacagcaagtcagcaaaaccctgcagagaggtacattcaggtcgtttcagtcgacaaccacgagttctggttcatgggtttcgtgaactatgatagcgctgtaaagaatcttcaggagtctgttcgagttgttcacggggcctagaggttgcccatcacttttcctctatgtggatgtagtatgcccgtgtaaatgtatttgtgcatggcacctgtaaagttgtgtgttgaaattggtacacatcattaaggctatgtttgtttctctcctaaattatataagttggattatcatgaaaagatagtagagtaaattatcactttgatatcataaataagttaaaataaactacttaatgctagcttattttaacttatttgtagttctaaagtgatgttttactcttctacctttccaccataacccaacttatacaatctaaagagaaacaaacacaccctaagcagtgcattcagatctgtggcatgtgaatgtttttggataaatgtgtaaatctctactacttattaaggctgtaagggtagcctgctgttctgccttcgttcaatctg

SEQ ID NO: 273659 - DNA, 794 bp, Zea mays
tacaggttcgttccgatccgtgtccgaccttgccactcgcccaccggccaccgccaccatcacaaggagaaacaaattcttctattttatctctagctcgctcgccatcccctgcccggctgctgcccccaacggaacgacggccagaggaagctaccagagtcgatcgatcgagagagagagagagagagcatggctggcaggagtttcctgattcggtcccccaaggaggaggagtccaacgccgccgtcagagaagctgtactgctgggagcaaagaacgccgcaatagctggtactgtggttgcagttcccacgttggttggctgccgtgtccttccttgggctaaggcgaatctcaactacactgcacaagcactcattatatctgcagcctgtattgctggcttcttcatcactgctgacaaaaccattctacggaacgcacgacaaaacaccatcgggaagcttgacaagtcaacctgatgcagagatgtagctgaagctgaaaaggttctctggttgccgcggcggttgatagggtgtcttttgccccatatgcagtggcaccatttctcttcgtggacaagtaatttttgggtgtttggctattcaaaccagaggttgtgctgtaatgacttgtctaactgatggacccaactattgtatccagtttactccgaatttgaatcagaataaaaggtggttctatatgttcgtagacatggcttagacccttgttctgaacattcaccccccctggaatttgtgatgcccaagaacggggattagcg

SEQ ID NO: 273660 - DNA, 392 bp, Zea mays
ggcaaccgagacccgagaccgcccaggcgcccaccactccaccagccaaccctagagcctctccagtctccactgctcggccgccgcctgccgcagcccgccgtccactggtcccgcctccctgcgtccgctccactactcctggcgtccgctccattgctaccatcgtccggcgttctgctcctgcgccctccctttgattcgttgccagttgtagtgtccggtcagatttgagctatggcagcaagcaaggattgacgaagcgtgcgttcccatcgcaccaccatgggctacacagagatcgacatccgcccctctgggagcggcaagctgcgtgagggattgacatactgctgactacgggagccgggatggggcatcgtgcgccgtgc

SEQ ID NO: 273661 - DNA, 2005 bp, Zea mays
cccacgcgtccggtggagagagaaagggagggagcgagaagtcaagccggagccgtgaacagctcaacaccacgggccgcggtttctgaaaaggagaggcgtggtgcctcgcggaggcggagccggaggggggcgagccagccagagagccgtacgcgaagcaagcagccccctgcatctagatcaggcgttctgctcgcaccgccgccgccgccgccgccgcttccttctctcaccgacgctaattggagatcacgtctgggcctggctgctcgtcttccgtcctgggtacaattcgattgatgacctcatcagggaagaatgttttgcagtcttacatgagttaaagggatagaaagtgcaacaaccgtggaataaaggactcgtgcttttgagtaattcaggaggagtacatgcatcacgaagccttgattctggaatgctgtccagtcgaaggaacagcgggattatcctacgggaagggtcggttagggactggtccgagtccaacgatccctcgccgtccccataaccgctgtactcgcagtcctatgtcgcagtgagaggattgctgtcctctgtggtctccttggactttttcctgctgtcgagcaagctaaagtcacggggggcggctatgacttcacagaggcatagccgatcgcaggagagatcaaaatcaaaggggttgagctgcaggagagttgcagtccgtctgctgttctttttcatggttggcattttcattgggttcatgcctttgttctctgtcgatgtttacaagaaaatagtatccgaaaacgagaggcttccgttccatgatggtgtgattgaggcggaaatgatgggcaccaaagttaaggagttggagacagttgtagtagagaaagaggtcgaactgattgacgagcctcaggttcaagagagccctccagttcctgcaatgttggatgatgaggcagattttgctgaatcttcacctgcattacctgctattgaagaatctgacattcctgtgaagaagctgctgataatcgtgacgatcacttctgttcggccacaacaggcatattacttgaatcggctagcccatgttttgaaagctgtacaggcacctcttttatggttggtggtggaatggcctgaacagtcctatgaaacagcagaaattctgaggtcttctggggttatgtacaggcatcttatatgtagaaagaataccacgagtgtacgaaagattgctgtatgtcaaaggaataatgcaatctatcatgtcaaaaggcatcaccttgatggtataatgcattttgctgatgaagagcggtcatactcagctgacgtatttgaagaaatgcagaagatcaggcgctttggctcatggcctgtagcaatccatgttggaacgaagtatagggcagttttggaaggccctatttgcaaaggaaaccgagtcatgggatggcacacagtccagacggttcagaagaagagttcgactcgtcgattcccaattggcttctctgcatttgctttcaacagcacaatgttgtgggaccctcaaagatggaaccgcccacctatggattctgttatggtccactcaggtggaagaggtggtttgcaggaatcacgatttatagaaaagctcgttaagaacgagcgccaggtagagggtcttccggacaattgcagtcgggttatggtctggaatttcaacctggaacctcctcgagtcaactaccccacaggcttgggcactatataagaacctagaaccggacatgcctgtgacatagtttcctgccgctgccactgtgcctgcttctagaggtgatttctcccagcaaggcagagaagtttggagcacacgtcttcagcgtattggtagttctaaatttcaactccctgctgttaccaggtggtccagaacacataggctgctcgccgatgccatcctgagcgagttgcgccaaagattacattgatattgcacgctgagatctta

SEQ ID NO: 273662 - DNA, 243 bp, Zea mays
caggtacgacgtccgggactgaaaacttttgctgtgtagcaatgtggcatgacttatgtaacttgtcgtatgatctgtttaattagcgtgtgaaaggctagatgatttcaatagaggttgatagtttggtagtttaaaacatgcgtgctttggttctctactgtacgactggaaacttttgctgtgtagcaatgtggcatgacttatgtttggtgctttcaaaaagaagtcaacacgtcaaaa

SEQ ID NO: 273663 - DNA, 717 bp, Zea mays
tacggtcgaattccgggtcgaccacgcgccggacgctgcggacgcgtggcggacgcgtggcgagtgctgcaaacacaagcacacagctgatatcggatgtcacaggccaaaacccagacgcaacgcaacccaccccctctctgtcctctccgtcctgaactcgcgcctcgcttcgtctctcccattcccacccgctgaagcttcaaggagcttctcgtctgagaccgagctaacgagctcaccggcgggcaggatgctggcggcgtccaccaaggtcggctctaggctggcctctccgcacgcctccttgtccgccggtgctgcggcggcggcactggcgagctcccccgtgctgggctctgggatgctcccaggcgccgggttcggcgagacggggagtcaccacgcggcagacgcgccgccgccgctgccttgcagttcctcgggcgattcaagggaatattatcagtggaagagactggtgaatcaaaggcagtcaacgctagatggaggcaaagtgcctgctgcattgggccaccatgtttttggtgcgggctgttcctcacggaaccaacatatctacagatatttttcatcttctcatcaagggagtatatgggccgggagcaaggttctacatgacctgccagggtatgtaaaaattgtggaagagggccacgagatggtctacagaacgagaaggacatcgtgccaaca

SEQ ID NO: 273664 - DNA, 444 bp, Zea mays
gcggcgggaggccatgaagggggtgatgagcggtgaggtggctgcggctggagggcgcacgggtgaggctgctagagaggtgctgtttgagggggtggaggaggaggtcgaagaggagaggaagcgcgaggaagagaagagggagacggagaaaggcgaggaagttgggagggaattcgttgcacatgtgccgctacctgatgaaaaggagattgagcgcatggtattagagaggaagaagaaggagctgcttagcaagtatgccagcgattccctgctggttgagcaggaggaggccaaggagatgctcaatgtccgacgctagaagacggtctgtcctcgatttccatgtctccaatgaaagttattaactgatgtagtgctcctgacttaaagtactatagagttaagcagatgagtgttcttgtttttgttgcattcaaa

SEQ ID NO: 273665 - DNA, 1877 bp, Zea mays
cgattcccggtcgcccacgcgtcccgcgggtatatacatacacacggccgccgccgccgcaggcctcgctccgaccgccaccggactcccctttcgcgtccgcttctcttgttgttgctgtgctctcctgttaccgggacccggaggaaggcaggaaggaaggaaggaaggaaggcggggatggcggaggagacggtgcgggagctgcgcgcgagcttcgcggcggggcagacgcgcccggccgagtgccggccggcgcagctcaaggggctcatccggatgatcgacgagaaggaagccgagatcagcgccgcgctccacgaggacctcgccaagccgcatatggagtccttcctccacgagatatcacttacaaagtcgtcgtgcaagtttgcgctcaaggggctcaagaactggatgaagcccgagaaggtacctgcggccataactacattcccgtcctccgcccaaatcgtgccggagcccctcggcgtcgtgctcatcatctcagcctggaactaccctttcatactctctatcgacccagtcattggagcaatcgctgctggaaatgctgttgttctgaagccatcagaaatagcgccagctacctcgtcactgttagcaaagctgctacccgagtatgttgacaactcctgcattaaagttgtggagggaagcgttccagaaacaaccgcactcttggaacagagatgggataagatcttctacacaggtaatggaactgtaggacgtatagtgatggcagcagccgcaaagcatctgaccccggtagctctggagcttggtgggaaatcccctgttatcgtggattcaaatgttgatctgcatgttgctgctaagaggattgttgttggcaaatggggatgcaacaacggccaagcatgcattgctccagattacatcataacgacaaaatcatttgcaccggagctggtggcctctttcaaaagagttttggaaaggttctatggggaggatcctctgcaatcagcagacttgtctcgtattgtgaattcgaagcagttcaaaagattgacaaatttgatagaagaaaaaagagttgctgacaagattgtgtacggcggcaaggctgatgagaagcaactaaaaatttctcctacactattgttagatgttcccgaagattcagaaattatgacaggcgaaatatttgggcccttgcttcctattgtgacggtcgaaaagattgaggaaagcttcgacttgatcaatgccaagcctaagccactagccgcctaccttttcaccaagaataggaagctgcaagaggagtttgtggcgagcgtccctgcaggagggatgcttgtaaacgacactgcgctacatctcaccaacccgtacatgcccttcggcggcgtcggcgacagcgggatgggctgttaccacggcaagttcggcttcgactgcttcagccacaagaagggagtcctgatccgcggctttggcggggaggcgaacgccaggtacccgccctacacgacggagaagcaaaagatcctgaggggcctcatcaacggcagcttcatcgccctcatccttgccctcctgggcttccccagggagaagcgttagatgctccggcctcttgtcggtttcggtacagcctttttagtccctgttcgtcgtcaggtgcacagtatacaccgtcatattctgtcaaatagatgcaatgcaacgactgcgcgccgtgcttgtgttgcaagcgtggataatgcatatatattgtagcattgacatgatgtgcgttattgcattacgtaagggagttggataaataagtgtgatttgtttgtcaattattcagtgttgagaatggatgatacttgcataat

SEQ ID NO: 273666 - DNA, 1005 bp, Zea mays
ttaaaccgacaagacctgttttgaaggtgagaaaaccaagggctttagttgatattacacctgctgcgtcctctgctttgcttatgaatgagctccaatggattggattaatcgttaagcctatagactattcttaaaaggtggaatattgcatatcgatgctggcgctgaactgaaaattgaggagtctcagatgattgaaatagaaatttacgtaagtgatatggagtgtgctaattctgccaacagctccatcaaagctggaaaggttgcaaaggcacctactgcaaatggaaagatagaacttcctgattgggctagtgatgtgactactcttgtttggtttcctgttcgtgctattgatgacacaattgcaagaggagaatccctagtgtctcagaaacagagcgttgtagatgggatgagaatgattgctctcaagcttgagtttggagttttccgtaaccaagtgtttgaaaggaccattgcagttcattttactaacccattccatgtaagcacacgcgtcgtggacaagtgcaatgatggagctctacttctacaggtgatattgagttccggagtgaaggccacactgcatgtaaaggatgtacggttagatcttcaatctggatttgatcacttgggcaaaggagatggacggccagctttgagtttattccctctggttattgctccttcttccaaagctggaattttattcatgttacggttaagtggtacaaaggatgtggacgacgcagaaaatgcagacagcacgctgaatatcacctacgggatatctggtgacagaaaaactggagcacattctcctatacctgtcaaatctggtgattctgaagaacttgtgttcaagattgcactcagactgaagcgacctgtcctggatccatgtgtagcagttggattccttccattttcaactgactgcctgagggttgggcagttagttaatatgaggtggagggtcgaaaggctgaaaac

SEQ ID NO: 273667 - DNA, 555 bp, Zea mays
gggtcgagcacgcgtcgagacaactgtaaaaaggtccggctaatggtccaatcctccaaccggcaataataaaacctcaaaaatcaatcctcaagaaactttaagccatgaaggcgatttcatcagtccccactttaataactgggaccaacagtttcaaagaaatccaaaggcgatgacccggcccttaccctttacacaagtggcacaactgggtaaacctaaaggagtagttcacacccaggagggcatcctttctcaggttcagattctatctgaagcgtggggatatcgaagtgaagaccaatttctgcactgtctcccgctgcaccatgtgcatgggcttttcaatgctctatttgcgcccctttattcaggatcagtggttgagtttaataccaaaattcagtgtaagcgggatatggcagagatggcgagaatcatatcccaacgatgcgagtaaaagtacagaggccattacagtatttactggagttccaaccatgtatacacgtctgctgcaagggtatgatagtatggatccggatcaaaggt

SEQ ID NO: 273668 - DNA, 793 bp, Zea mays
cggacgctggcgcgcttgatgacgccattcaatcgccgcgcggcccacgcctcttctccccacctgctccgcgcctgctcatccgcctcttataccatcgctctcgctcgcctccgacgccacttcacctcttctgcttccttctccccagcatacagtgccagacaggatacccacacattcatggaggtggttcaagaagtccttaggcatggctcagcagatagtgtccgtgctgtcataagagctaacaaaaagagctacagccttgtccagctcattgcagcctcttttgatgtctacaacattttgtgcagcaaaaatatgacaccaaatgggatgcaagattcttcttccaaaggaagaaatggaacaggattccttcatggagctcgtgttggcattgtggctaaaccctctcctgaatttgttgctcgggtatttggaacctggctttctggtggagttgcagtaccccttgcccttagctatccagaagctgagcttcttcatgtcatgaatgactcagatatttcaatggttttaagcaccaaggagcatcacgaaatcatggagaacctttctatcaagtgttctgcttattgttctattcttccatctgtcactagtataccttcagaaatcaatcctcaagaaccttcaagcaatgaggcgatttcatcagtctctactttaataactgagaccaacagttcaaagaaaatcaaaggcgatgaccctgctcttatcctttacacagtggcacaactggtaaactaaaggagtagttcac

SEQ ID NO: 273669 - DNA, 719 bp, Zea mays
gccgaggccattgcgagctgcggtgctgaggtgcaccccatcgacatcgacatcgaagctacgccgacgccggtggaggaggtgcacgagccgcaggtggtcgtggtcgtcgacgtggacgtggagcctgtcacctgcgccggcgccgccgaggcagctgcgggagcaggggcagatgcgtccggcgtggccgacggcggcgtccctggacccatggcgccgccggagcagctggcgatcaagcccgacatggccatttccgtggaggcgtaggttggttaacatgtaatagcagagtgagtcgatatcgatcagtagtagatttgtcgagtcaaggaaggggcctgctgctgctgctacgcgacagcagcggccagatgtactgcctgcctgcatgcatgcatgcagtccctcccgttgactcgacccgtagagatgggatgggaatggaagtagccgggtccttgggcgagtagcggcgccttggcacccacgggccagccgtactggcctgtgtgatgaaccggcgagagagagatgagataatgtgcgagcgagagagggttgggttgggttgtggtagttgaaaaagacggctagccagctgctgctgggctctctatatgtctctagatctgtgtgtctgtgtaatcgattccttccccttgcttgccgcctccattttgtgtccttgtagtgggatgattgttttccttccc

SEQ ID NO: 273670 - DNA, 512 bp, Zea mays
caaacccaacacatcgtgtctgcgttctccccctttacgccggcgagtgttcgtcgctggctcgctgcagcggggagaatagaggcagagagcagggatgagcgacgagcgggtgaaggcggaggcgctgcagatcctgggcctattccaggtgctcccccgcctcgtcgtcttcgacctcgactataccctctggcccttctactgcgagtgccggtccaagagggattcgccgagccttttcaggcacgccaggggcatcatgtacgccctcaaggagaaggggatcgacatggcgattgcttctcgctcccccaccccggacatagccaaggtgttcctcgacaagttggagttccagtccatgttcgtcccccaagaaattattccccagctggactcacaagactgagcatttccagaagatccataggaaaactgggattccctacaaatccatgctgttctttgatgatgagaacaggaatattgaagcggtatcaaaaatggga

SEQ ID NO: 273671 - DNA, 515 bp, Zea mays
agaaaccagaagcgctcgcgagaagtaagggagagagaggggggacgacgacagccttgggacccgcggactgcatcgctcgccggtagctgacgtcactcggccccgtggaattttcaagctttggtggtggctcgtctgtctgatccgcgctctgctgctttttcttcgcccgccgcactgtatcacaactataacagtacctacgtgttcacaggtctaggcatttgtcctaccagtacagtacattggactagtaataactagtatgtatccagcaaaccgccacatggatccatactactcgcactatagaaaccatgttccttacccatactatcctcctgccagatgggaaatcccatccggtcatccacaggcaatggactcatcttattattatcggccaccaaactgtggaacttggccatatcatgatatctcacatccttctgagttccattgttgctgcaaccgggcatatcttcctgattactacagtttcagacccccat

SEQ ID NO: 273672 - DNA, 692 bp, Zea mays
tttttctcgtgggcggcttccacgcctttccttgctgctgatgctactccatttcctcccccggtacagcctgacccaacaaacgcacccccaagctaccaacgcacgcaaagcacggacgggcgcatacagctttccctttcgcgagtgcgtgccccttctcttctctagttctcttctccgtcgcgtcagagatcagggagagaccagagcaaacaacaaccaccgcttgtttcatcaagaatcgtggaggagaaccgaaaggtgtagagccttttccggcagggcatctgctagagccggccggttgaagcaggggagcgagaggaggagggcagccgaacaggagcgtcgcagtggtggttaagcagcagcaacgacgacgacgacgacgctgagaggtttccccgttcccgacggcacgtccaccgaggcggcgccatcgcgatgggtcctctggcgccgctgaggtgtaacccgccgccgccgttctccaagtcgccggggtccctgctgctgctgtccaagtcgctcaccctctactgctgaaccgagccccctcttcgatcggttccatgggcgccgtggcctcgtcggcgggtggggcccggggaggcgatggcacggtgctgggcgacctgccggagaactgcgccgcggaggtgctgctcaggctggacccgctggagatc

SEQ ID NO: 273673 - DNA, 572 bp, Zea mays
ctcgcgggccgatacacgcctctacaatgcgtcatctcagtatacccgcctcaagtacaaagggaaagctgcgactcgctcggaagtggggtactgtacttcccgctcgctcgctctctgctctggtccttcacgctctaaccttcagttgaggttctctaatcgggcccgctaaagtcgagagacaggttttcgcgaacatttgcatctagccatctctactcaactgaattcttgtgctcttgtggcattcacaaagtccattttcagactgagctagttcagctgtcattttttttttcagccaaaggtcgcgttcttttggacctgctcttgattcgttcgttcgttcgtttggattgattgattgattgattcctttcgacttcccttcaccacccccctgctccgtcaagcgtgcctctgttcttctgccattgctggatcgcgtttgtctgtttgttgggttgctggcgctgcggccatggatcccttccacggcattgtgaaggaggagttcgacttggacttcgacttcacctgcgcgtctgcggcggcggcggcggcggcct
